United States Patent Application Publication US 2008/0034453 A1 - sequence listing, part 34

SEQ ID NO: 269068 - DNA, 478 bp, Glycine max
gttgagaactaagaaggagaagcaaatggcttcctcaatgatctcttccccagctgttaccactgtcaaccgtgccggtgccggcatggttgctccattcactggcctcaagtccatggctggcttccccaccaggaagaccaacaatgacattacctccattgctagcaacggtggaagagtgcaatgcatgcaggtgtggccaccagttggcaagaagaagtttgagactctttcctacctgccagaccttgatgatgcacaattggcaaaggaagtagaataccttcttaggaagggatggattccttgcttggaattcgagttggagcacgggttcgtgtaccgggagcacaacaagtcaccaagatactaccatggacgctactggaccatgtggaagcttgctatggttggttgcactgatgcttctcaggtgttgaaagagcttcaagaggctaagactgcataccccaac

SEQ ID NO: 269069 - DNA, 306 bp, Glycine max
acgcgcacgcgtacgccttgagggtttttcttctatagagacacacggagagagtgtcacagcaatcaaggcccttgaatggctaccactggggcttacattgcctactattctacgtacggacatgttgagaaaggagctgaagagattaagaaagggagctggttccgatgaacgcgtggaagcagagctatggcatgtacctgaaacactttctgaagacgtgcttgggaagatgggtgcacctgcagagagtgatgcaccgattattacacccaacgagctacctgaggctgatggcttatt

SEQ ID NO: 269070 - DNA, 271 bp, Glycine max
acgcccacgcgtacgatttttactatttttttttttatttttttgttttattatatatttttttgggtaagttttttttattcaattgtattggtgattatttttttttatattcaatatttttttagtaagaacctaatgacaattatttttgaacgggaaaacaaaacagattaaaaaagattcggttatataaacattaaatgcttcattctagttattttaaaaaatattttcgtggtccataaaatatttacactaatattaaaag

SEQ ID NO: 269071 - DNA, 426 bp, Glycine max
acgcccacgcgtccgcaagatccatagttggtgccttgtagtatgctaccattacacaaccagaaattagttttcgtgtcaacgacgtgtgccaattcatgtcaaagccctctgaacaacactggctagctgtgaagagaattctaaggaggtccacttcaggagccagcatttctcttggtcctaacttaatctcttggcgggctaagaaacaatcggttgtggcctggtcaagtactgaagccgagtatagaagcatggctctaattgctgcagaatcgacttggattcaaactcttctttatgaacttgaagctgcttacactactgctttaattctctttgacaataccagcactgtctcttttggctcataatcctgctcttcactcttaaacaaagcatatggagctggatctgtttttt

SEQ ID NO: 269072 - DNA, 349 bp, Glycine max
acgcccacgcgtacgctttctggatggcatatactgccccatactgcatcctttcacaaagcaacgttgcacagtgtggccacctcaagcgccaaatgagtccatgatttcaccgttaaagatgccaagggaaatgatattaatcttggagactacaaaggaaaggtccttatcattgtcaatgttgacttacaatgtggcttgactaattcaaattacactgagctcagtcagttgtatgagaaatacaatcagaaaggtctggaaattctggcattttcatgcaatcagtttggggcacaagaacctgcatctaatgaacagattcaagaatttggttgtacttgct

SEQ ID NO: 269073 - DNA, 441 bp, Glycine max
acgattagattggaggtaatggcagcgtcactacaagcagcagttactttcatgcaacccaccaagttgagcaggagcaacactttgcagcaaaagtctactcagtccattttcaaggcttttggtttggaacctgttggagctaaaaaggtcacatgctcccttcaggctgatcttaaggacttggctcacaagtgtgttgatgctaccaaaattgcatgattcgcccttgccacctctgccctttgtctctgggacaagtgctgaacgtgttccaaagaggctaaccttcgacgaaatccagagcatgacctacttggaagtgaatgggacaggaacagcaaaccagtgcttcacaattgatggtggattggactcatttgcctttaagcctgttaaatacaatgtcaagaagttatgccttgagccaacttcaattac

SEQ ID NO: 269074 - DNA, 469 bp, Glycine max
cttccataaacgggtggtgcctctcttccatctccccagccaaaacctctctcaggaaggccacattacgcccttccgtcttcgcaacccttaacactccttcttctccttcctcttcatcttccttcccctctctcattcaagacaggcctgtttttgctgcccctgcccccatcatcaccccaactgtgagagaggatatggcaaaggaatacgagaaagctattgaagaacttcagaaattgttgagggagaagagtgaactcaaagcgacagctgctgaaaaagtggagcagataacagcttctctagggacatcatcatctgatggcatcccatcatcagaagcctcagacaggatcaaagctggtttcattcacttcaagaaggagaaatacgacaagaatccagctttgtatggtgaacttgccaaaggccagagccccaagttcatggtgtttgcttgctc

SEQ ID NO: 269075 - DNA, 474 bp, Glycine max
ttcacagaagagagagagagagaaaaaaaaaaaaaaagtctctgtttcttcacttgctcacaagccgcaactgctactgtgtacccaatctgagcccaacgagatgggggggcagaatctttccccaaaggaaaggagtagagattggattggagttcttatgaacagcagctttggttattgtacttatcaccatgatcttcgatctaatgagatgaatgtgttctgcgtggactgtgcacttaggatgtgtaggcactgtaaggaagctcattccctacatagaaggtttcagatttacaaatattcctaccaggatgtcttccgccatgccgagctgcagaagtattttgattgctccaaaattcagacttacatatccaataatgaaaggattgtgcatctcaaacctcgggccttcaatcaccaaatctaagtctgctgatctaagtcccgactctaaatacaaagaga

SEQ ID NO: 269076 - DNA, 374 bp, Glycine max
cccacgcgtccggttgagagcaagagatgggtggatttcttcaacccagactcacagtcagtggaatgggccactccatggtcaagaacagctgagaactttgccaatgccactggtgagcaaggctacccagcaggcaaattctttgaccctttgagctttgctggcactatcaaggatggagtttacattccggatacagagaagctggaaagattgaaattggctgagattaagcatgccaggattgctatgttggccatgctgattttctactttgaggctggacaagggaagaccccccttggtgctcttggcttgtaaattaaacatttcatgtagataattgaattgagaggctagacagttgcaaa

SEQ ID NO: 269077 - DNA, 83 bp, Glycine max
accacgcgtccgcccacgcgtccgaaaaaaaaaaaaaaaaaaaaaaaaaaaaaaaaaaaacaggcaaggtgaaaagaaccaag

SEQ ID NO: 269078 - DNA, 450 bp, Glycine max
cccacgcgtccgcggacgcgtggggcagaggggggtgctcaggaccaactgcatagactgcttggatcgcacaaatgttgcacaatatgcatatgggttggctgctcttggccaccagctccatgctctgggggttattgaccacccaaaaattgatcttgatgagcctgtagcagatgatttgatggggttttatgagcggatgggtgatacacttgcacatcagtatggtggttctgctgcacacaacaagattttctctgagaggaggggccagtggagagctgcaacacagtctcaggagttttgtaggactcttcaacgctattatagcaatgcatacatggatgctatgaaacaggatgcaatcaatgtatacctgaggcattttcagccacaacagggcaagcctgctctatgagagttgcgttcagatcagctctatgatgc

SEQ ID NO: 269079 - DNA, 472 bp, Glycine max
cccacgcgtccgtgttgatcgagataactagaaacagtgtgatgaaaatgaaggtccttgttttcttcgttgctacaattttggtagcatggcaatgccatgcgtacgatatgttccctctccgaatgaacactggctatggtgcccgtactccggaggtgaaatgcgcaagttggaggcttgctgtggaagcacacaacatctttggctttgagaccattcctgaagagtgcgttgaagcaacaaaggaatacatccatggcgaacaatatagatcagactccaaaacagttaaccaacaagcttacttttatgccagagacctcgaagtccatcccaaggacacatttgtgttcagtatagatggcaccgtactctctaatattccatactacaaaaaacatggatatggggtggagaaatttaactcgaccttgtatgatgaatgggttaacaagggcaatgcaccggc

SEQ ID NO: 269080 - DNA, 476 bp, Glycine max
acgcaagcacataacagttgaagtgaatggcataaaaatgcatgttgcagagaaaggagagggtccagtggtgttgttcctccacggcttccctgagctctggtactcatggcgccatcagattctctctctcagctacctcggctaccgcgccgtcgctccccgatctgcgtggctacggtgacaccgaagcaccaccttcaatcagcagctacaactgctttcacatcgtgggtgatctccgtgcgcttattgactctctgggtgtccaacaagtgttccttgtggctcatgactggggagccatcatacgttggtatctatgcatgtttcgccctgacaaagatcaggcctatgactgcctcagtgtccctctacttcgcagagacccaaacatcagaacggtggatggcatgcgtgctttgaatggagacgactactatgtctgcagatttcagaaaccaggggaaatggag

SEQ ID NO: 269081 - DNA, 470 bp, Glycine max
acgcccacgcgtacgtccacgcgtacgtccacgcgtccgcttttttcaaggcataggattggtgaggcagacttgaattgaagtgaagaaggagatggctgcaacctcttccttgtgctcatcgaccctccaatcccagatcaatggattcttccttcacaaaacctctctttcccatactccttccctcactttctccaggaggaaaatttcaaccacagtgaaggctacatctcgagtcgacaagttttcaaaaagcgatatcattgtctctccgtccattctttctgcaaacttttcaaacttgggagagcaagtgtaagcaatcgaattggctggttgtgattggattcacgttgatgtaatggatggtcgctttgttccaaatattacaattggacctctcgtggttgatgcattgcgccctgtgacagatcttcctttggatgtacacctgatgattgtagagc

SEQ ID NO: 269082 - DNA, 473 bp, Glycine max
gttgattggttgactgacaagatgagaagccgtgaccacacagtctcagcaacccacggagacatggaccagaataccagggacattattatgcgtgaattccgttctgggtcttcccgtgtcttgataaccactgatcttttggctcgtggtattgatgtgcaacaagtgtctctagttataaactttgatctccctacacagcctgagaactatctccaccgtattggtcgtagtgggaggttcggaaggaaaggtgttgcgatcaattttgtcacaaaggatgacgagaaaatgctgtttgacatccagaagttttacaacgtgcaagttgaggagctgccttcaaatgttgctgagctcctttgatcagattttgtcctccgtcgtagtagatgaaattagtttgcgtttggaaactgttatgtaatgtttctcactctaacctgtctcccccccctttcgtttctttg

SEQ ID NO: 269083 - DNA, 449 bp, Glycine max
gccaattggtggaagctccaaatggaggatccattaggaaggtaagtgtccaatttttcaccaaaggcgatgctacgcttagtgaggaggagctcactgccaacaaagccaagatccaagggcttgtaaagctagttgaagggtaccttttggcaaatcctgattattgaaggtctttgtagttaattaataagagtttgactatggtgcaaattaataagccttgatggatttgcaggctcagcaccaaggctttcttctatgatattttctaaatttttctttgttatgaattgggagattaatcaatcataaattaatagtgtggttttgtaaaaaaaaaaaagcaattaataatcaacaatagacttgaaatatagttgttaaacagtccatttggacaggaacgaaatattcgtaaccaaaaaacgtgaaattcttaataaaaa

SEQ ID NO: 269084 - DNA, 430 bp, Glycine max
acgaacgcttaatctctctcattccccatttcctcacctccttcaaccgctgctaaattctagggttccgaaatggacgctggcggaaagatcaagaagggcgccggacgtagaaagggcggcggcccaaagaagaagccggtttcaaggtccgtcaaagccggtctccaattccccgtcggaagaattggccgttatttgaagaaaggaaggtacgctcagcgtgtcggtaccggtgctcccgtatacttggctgcaggtctcgaatacctagctgccgaagtgcttgagttggctgggaatgccgcacgtgacaacaagaagaacaggattattccaagacacgtgcttttggcagtgaggaacgatgaagagttggggaaattgcttgctggagtgacaattgcacatggtggcgtgctttcaaaca

SEQ ID NO: 269085 - DNA, 447 bp, Glycine max
  unsure (1)..(447): unsure at all n locations
acgcaccaagccaacagaagatgtttctccacattgttttcctcctttcccttctctcatccacttcccatgccactgtccaagacttctgtgtggcagaccttaagggtgcagacaccccttcaggctacccctgcaagccacctgcaaatgtaacttcagatgactttgtgtacacaggcttagctgaagctgcaaatgtcacaaacataatcaatgctgctgtgaccccagcttttgttgctcaattcccaggtctcaatggccttgacctctctgcagcaagattagaccttggtcctggtggtgttatcccactccacactcaccctggtgccaatgaactactcattgntctccaaggtcacatncttgctggattcatatcttcaagtaacatagcttatcagaaggtgctaaaaaagggagagctcatggtttttccac

SEQ ID NO: 269086 - DNA, 475 bp, Glycine max
  unsure (1)..(475): unsure at all n locations
cggacgcgtgggctcctcatcttcctctttttctcaacaaaaaggggttcaattctagctagttctattacgtcgtccgcgaccatgaacatggcgatcgcgcttctgttcatggttttcgcagtttcatcagctttagacatgtcaataatatcacacgacaacgctcatgcggatagggccacgaggcgcaccgacgaggaggtgatgtcaatgttcgaggagtggctggtgaaacacgacaaggtgtacaacgcgctcggtgagaaggagaagaggtttcaaatcttcaagcacaatctgcgcattatcgatgaacgaaactctctgaaccgaacctacaagttgggactcaacgtgttcgctgatctcaccaatgcggagtacagagccatgtacctgcgaaccttggacgagggtccgaggttgggcttggatacgccgncaagaaaccactacgtgccacgtgttggag

SEQ ID NO: 269087 - DNA, 467 bp, Glycine max
ctttcttggaactttgttactctcacacatgtctcgctccgtgcctttggtttcaaccattgttgtgttgcttctgcttctggtggccactgagatgatggggccaacaatggtggcagaagcaagaacttgtgagtctcagagccaccgtttcaaggggccatgtttgagtgacaccaactgtggctctgtttgccgaaccgaacgtttcactggaggacactgccgtggcttccgtcgcagatgcttctgcaccaaacattgttaattttaaaaaattaattaagagtgctttgatagaagatgatagatctatcatctttctactcgtgttgttaattaaccactttgtgtttgagaataagggttacccattctactatgggtttctctgtttgcctcttatcttatctagttagagatccttttatgaaacgagtgatcagtgtgaacgaaatatgttatct

SEQ ID NO: 269088 - DNA, 444 bp, Glycine max
cccacgcgtgcgcccttgaatggatcacctaaggcacgcgctttgaagcgtgctgttggtgagccagtcaaggggggaatagagcagggtcctcagattgattcagaacaatttcagaaaatactgaagtatattagatccggtgttgaaagtggagctactcttgaaaccggacgagatagatttggtaactcgggcttctatattcagcctactgtcttctcaaatgttaacgatgacatgctgattgcgaatgaagagatctttggcccagtgcacagcatattaaaattcaaggaccttgatgatgtgattcaaagagcagattacacacactatggccttgcagcaggggtgttcacaaaagacattaacacagctaatactttgactagagcattgacagctggaacagtgtgggtgaactgctatgatacatttgat

SEQ ID NO: 269089 - DNA, 455 bp, Glycine max
  unsure (1)..(455): unsure at all n locations
cttgcttctattatttacttgtttttctctagtattcatggtgctcgctggtaaacttagtactgaacttggggtgaaagcatccgctaccaaatggttcaacctcttaaccacgcaacttcaccatgttcagaacctttgtgaaagagtgcatgaaaccaagctgcatgatggtgatgactggcacggtgttggtaattcggttaaacactggacttatgtcatagacggcaaggtacacacatgtcaggagagtattgaagccattgatgaagagaacaaaacaatcaaattcatgctcttcggtggagatattagtcagcactacaagagctttaagctgatctttgaagtgactgataagaacgatggcggtgctgctgttaaatggactcttgaatatgagangatcaaagagaatatcgatccctcacatggctacatggactactttg

SEQ ID NO: 269090 - DNA, 474 bp, Glycine max
cccacgcgttcgcccacgcgtccgtacaaatcagcaatgagagagaatctgttgaggcagggatacagaattgttggaatcattggagaccaatggagcgatctgcttggagaccacagaggcgaaagcaggacctttaagcttcctaatcccatgtactacattgagtagtaccttcacctctctcaacaatctagctagagtttgctcctatctatatgtaataaggtatgctgatatgcactattcaaataggagcattagctatgtttgttaatgtcactttatgttatgtgggtaagtcacctaagacactccacgtacctaacgtggtgtctcttaccgggtttaataaatcttctgcccttgttccatatttaaaaaaaaagacgctacggatatttctttctaaaaattgggccttaatgaattgaaaaaagaaaaagggcggccggtttaaaggatccaagctta

SEQ ID NO: 269091 - DNA, 311 bp, Glycine max
acgcccacgcgtacgcccaacagcaagaacgaataatttaacttgtaaaccatcccattcaatatcagttgagccggggtatctatctacgacgcctagggggtcgatttcttcgtacaacactacacatgccccaatggccccgcagggtactaatgcaagagcccagcaaaggtcacagtggacgacttcttatactcctgccttgataccgccggcaacaactcaaacataattaaagccgcattgacccctgcattcgacgcacaattccccgaccttaacgggcttttaatattcattgcacgcct

SEQ ID NO: 269092 - DNA, 234 bp, Glycine max
cgcttcgccacaaagatcacatcagtgcatatggagaaggaaatgagagaaggttgactggaaagcatgagacagcaagcatcaacacattttcttggggagtggctaaccgtggttgctcaatccgtgtgggaagagacactgagaagaatggcaaaggttacttggaagataggcgaccggcttcaaacatggatccatatgttgtgacatcattacttgcagagactacac

SEQ ID NO: 269093 - DNA, 403 bp, Glycine max
cgttcgcaaccaccggccatactcactgttgttctcaagggattcgattctctctgcactcacttctagggttttctctgcgctataagcaatcatggcggatgaaacaccaaatgagatgaaggaggaggttccagaaattgttccttttgatcctaccaagaagaagaagaagaagaaaattacaattgtagatcctgctgatgaacctgtggagaaattggctgagaagacagaaaacctctcagtttccgagggggttgagactgcatttactggtttgaaaaagaagaagaagaagcctgttgaaatgggtaacttgaatgatgagagtggagatgcaattgaagatttggatgatcacccctgagatgatgaaggagaaatgggttgtccccaggct

SEQ ID NO: 269094 - DNA, 387 bp, Glycine max
gaatggaatttcgatgctcagtcatctcttttaccattctcttctctcttgctcttgcaggagagagccatgtccatgcatcgctacctgaggaagattattgggaagctgtttggccaaacactcccattcccactgcactgcgagagcttctaaagcctctccctgcaggtgttgaaatcgatgaactccctaagcaaattgatgatacacagtacccaaaaacattcttctataaagaagaccttcatccaggcaaaacaatgaaagtacaattcaccaagcgtccctatgcacaaccttatggtgtatatacatggttaacggatattaaagacacctctaaagaaggatatagttttgaagagatatgcatcaagaaagaag

SEQ ID NO: 269095 - DNA, 431 bp, Glycine max
ccggggatacgagaatacaaactacaatcttcccttcaccctctcagatctaactcatccacccattcggttcggtttccactcctcacctgttattcaatcaaattcatttcttcttattagttcatgtgctagctgcttttctttttaaattttcagatttgttttttcctgttttgtacggaatttcgatcgaccaagatgagcgtggttggtttcgatttcggtaacgagagttgcgttgttgcggttgcgaggcagagagggattgacgttgtgctcaatgatgagtccaagcgtgaaacgcccgccattgtgtgcttcggtgacaagcaacgcttcattggcactgccggtgctgcctccactatgatgaaccctaagaattcaatctcacagattaagagacctcatggtaggaaattcgctga

SEQ ID NO: 269096 - DNA, 363 bp, Glycine max
cacaccatcaaatctggacaatatctatcttcaattttcttcagattctaacaatggtagattaaaaaaaaacctaaatttctgcaacaaataattaagcaatatctcaaagttttaatttttgtgtttcttaccagggagatccttacgtggcgtagcgtaacagagaatagaacgcccgagaacggagagagaggaaacgacgccagcgacgtaaaacaccataaccaatccgagaacccacggcatcagcatgaacccgatgaagaaagtcaccgatccacacagcatcagcgccaccgaaatccctagcagtagcgacgcgaaccccgccggagtaatctgcgccctcgccggcgaacg

SEQ ID NO: 269097 - DNA, 295 bp, Glycine max
  unsure (1)..(295): unsure at all n locations
gngtgagtcaatagcagccatcttctgctgcaagttgaggtccttatagaaccttttaatgaactcctcagccgccacgtcaacttggttatcgtctccaccttcttcgtccttcaaaggaaagggcgagtctgtgattctgatcagttttctcccaattggactttttccgaacccgggtaacggagaagcctcaaccttgttattgttgagtatttcgagcactttctgtacggtcgaaacgtcgtcgtggtgggggaacttggtggtggtggtgcaacggtggtggtggtga

SEQ ID NO: 269098 - DNA, 324 bp, Glycine max
cccacgcgttcggcagcatgaaaatcaaggtggttgcacctcctgagagaaagtacagcgtctggattggtggctctatcttggcatcacttagcaccttccaacagatgtggatctctaagggcgaatatgatgaatctgggccagctatcgttcatcggaagtgcttctaagttgggtcaagagctggatggtgatcaagttcttcatgcacccagtcctgtgccatatttcagtcaagtttggttgacttatttgatatttgaagctttgggtttttaatagatatatctagtttaatgaatggatttgtaagttgagtat

SEQ ID NO: 269099 - DNA, 451 bp, Glycine max
cgtccgccaacccgtccgaggacttatttttggtaggccattcaatttggccattaataaaggattggaaagggcagaccaaattggaggaggcaaagctgtggccccagtcctagccattggcacagcaaatccacccaatttcatccttcaggaggattatcctgacttttactttcgggtcaccaatagcgaccatttgcaccgcttgaagcaaaagttcaagcgcatttgcgagaattcaaagatagaaaagcgacacatagtccacacggaagaatacctaaagcagaactcagacagcggcacgtacgatggccttcccttggagacacgacagaatgtccccacggaacaggtaataaaattaggtatggaagcagcatcaaaggccattaaggaatggggcgaacccttatcagaaatcacacacctcatcttctacaccact

SEQ ID NO: 269100 - DNA, 369 bp, Glycine max
ataaaccccctccagagaacaagaatcaaagaatggcaactatgactggtgtgagcctttcaagccccagggttttcttcaacgcatcaccctcaccgcaaaacacgtacgccgtaaagttcgcagttccactcagccaagggatgcgacttggtagtgtcaggttgggtcgggtgatgaggatccgacccgttcgcgcagctccagagcgcatttcggagaaggtggaggagagcataaagaacgcgcaggaggcgtgcgccggcgacccgacgagcggcgagtgcgtggcggcgtgggacgaggtggaagaactgagcgcggctgcaagccacgccaaatacaagcaaagggaaaagactccgaccc

SEQ ID NO: 269101 - DNA, 317 bp, Glycine max
cagcaacaataacaatggcagcctcactacaagctgcagctaccttcatgcaacccaccaaggtgggcatggccactcgcaacctcaaatctacacaatgcatttctaaggcttttggcttggaacccgctgcagctaaactcatttgctcccttaagcccgatctcaaagattttgctcaaaaatgtgtcgacgccaccaaaattgcaggattcgcccttgccacctcagctctcgttgtttctggagcgagtgcagaaggtgttccaaagaggctaaccttcgacgaaatccagagcaagacatacttggaaagt

SEQ ID NO: 269102 - DNA, 394 bp, Glycine max
  unsure (1)..(394): unsure at all n locations
gaactcttgccattgcttgacattgttgcaaacaaagttaaagcaattcgacgtttaagagaactccttacaacgaaacttccaatgggaacttttcctgttaaggttgccatccctgtggttcccaccatcagagtattggttacttttacaaagtttgaagaactagagccagtagacgaatttgcaacaccaccatcaagcccatctgcagctgagcaagagagccctgcagtgcctcacttctcggcatcgtcttggtttcaatggataaaggctccttatcgctctagtacatctgctccaggatccagcagtaggatagaaaatattgaagacccttttgcaattccatctgactatactngggttactgctgaagcaaagaaaaaga

SEQ ID NO: 269103 - DNA, 213 bp, Glycine max
gccaagtgcagtgcatcagcttcatcgcctacaagcccccaggcttctaagtgtgaaaaatttgcaaagcatttgtagccgccaccccactttgtttgtttgtacttaaactacattcccatttgtttttgctttttgagatttcatcatcctgtatttttggtttctgttttcggacttcaatggaaattaatggatgagaactaatgaatt

SEQ ID NO: 269104 - DNA, 400 bp, Glycine max
  unsure (1)..(400): unsure at all n locations
atgaaggtagcatttgcagctgttctacttatatgccttgtcctcagctcctccttgttcgaggtgtcaatggctggttctgctttctgttcctccaagtgctcgaagaggtgttctagagctgggatgaaggacaggtgcatgaagttctgcgggatttgctgcagcaagtgcaactgtgtgccatctgggacttatgggaacaagcatgagtgcccttgctacagagacatgaagaactccaagggcaaggccaaatgcccttgattatttttttttttcaccatccacacatcaacttcaagcctttgattcagtcactaccgtgcatgtatatctccaccttagagatattccaccatggaccctngctagctgattattgttactacctttattg

SEQ ID NO: 269105 - DNA, 259 bp, Glycine max
gataactagaaacagtgtgatgaaaatgaaggtccttgttttcttcgttgctacaaggttggtagcatggcaatgccatgcgtacgatatgttccctctccgaatgaacactggctatggtgcccgtactccggaggtgaaatgcgcaagttggaggcttgctgtggaagcacacaacatctttggctttgagaccattcctgaagagtgcgttgaagcaacaaaggaatacatccatggcgaacaatatagatcagac

SEQ ID NO: 269106 - DNA, 404 bp, Glycine max
gccaaacctcaaccctatgctgggtgctgatgcaactcttaggccacgttctctacccttgaaaagaagaacatgctttactaccagagccattctctcatccaccagagaagatgtcttggagcatttgagcgagcgaagagctctcaagattatctcaagcctgcagaatttcaatgaagacaatgttgcctcggttgtcactgctgctgacaagggtggagcaactcacgtggatatagcatgtgaccctgagttggtaaagctggccattggcttaacttcttgtccggattgtgtttcttctgtagatcctgcaacatttccagctgcagttgaagcaggagcactaatggttgagattggaaactatgattcattctacgagaagggaatatttttca

SEQ ID NO: 269107 - DNA, 300 bp, Glycine max
cttccttaagctccttagtgctgctccttgcagctctaattctatcccctcaagttcttgcaactatgagaatcccccagtgtgcaagcctcccactgagaaaccaccagtttataagcccccagttgagaagcctcctgtttacaaacctccagttgaaaaccccccaatttataagcctccagtagagaagccaccagtgtacaagcccccagttgagaaacccccaggttataagcccccagttgagaaaccaccagtgtacaagccctccgttgaaaaaccaccagtgtacaagcc

SEQ ID NO: 269108 - DNA, 468 bp, Glycine max
  unsure (1)..(468): unsure at all n locations
atggaccgcagaagcctcctctgcctcgcaatcatcggcattgtcgtcgccgccgtcggaggtgagtctccagcggcggctcccaccacttcctcggcatccccagccacagccccttctaaacctaaaccaaaatcacctgcgccagttgcttctcccacttcatctcctccagcttcatcccccaatgctgcaaccgcaacccctcccgtttcgtctcccacggtagcatctcctccgtctaaagctgctgctccagctccagcaaccactcctccggtggccacacctnccgcggncactcctcctgcggctacacctcctgctgtgacaccagtgagctcgccgncagcgccagttccggtgagttcttcaccagcgcctgtnccggtgagctctccccttgactggcaccgacaactccggcacccgtggtagcacccagcgctgaggttcccgttcccgttc

SEQ ID NO: 269109 - DNA, 389 bp, Glycine max
ccgtgaccatggcggctgcgtttacaagtacaagtgcaacactgagactgtcaaatgttggagagagcagaggtttgcagctgcgtaagtgtaaccctaatcctaataagctgaaggttatgggggggtttggaggttgttctggagtggcagtgggtgtgagagaaagaaaaggaattggaagggttagggttcgggttcgggcgagttcttcgtcggacgaggcagtgagtgcgcagtcaaaagtgactcataaagtattctttgacgtcagtattggaaatccacgttggaagcttgtgggacgtattgtgattggactgaacggcgacgatgtccctcaaacgggcgagaactttcgtgccctttgtactggagagaaaggcttt

SEQ ID NO: 269110 - DNA, 462 bp, Glycine max
gttagaagtaaagaagatcatggcttctctagcaaccttggctgctgttcaaccagctacgatcaatggccttgctggaagttccctctctggaactaagctctctttcaagccctctcgccacagtgtcaaatccaagaacttcaggagtggtgccgtggtagcaaagtatggtgacaagagtgtgtactttgatttggaggatctgggcaacactacagggcagtgggacttgtatggctcagatgcaccttcaccctacaaccctcttcagagcaagttcttcgagacatttgctgctccattcacaaagaggggattgttactcaagtttctgatattgggaggtggttccacccttgcatacttcagtgcaactgcctcaggtgacattctaccaatcaagaaaggaccacaactcccaccaaagctcgggcctcgtggcaagatctaatttgattt

SEQ ID NO: 269111 - DNA, 391 bp, Glycine max
tgttgttgtaactcgttcttcttcttttgttgttctgtgtttgtgtttgttttttctctcacctgaaaatgtcttgctgcggtggtaactgtggttgcggaagctcctgcaagtgcggcaacggctgcggaggctgcaagatgtacccagacttgagctacactgagtcaaccaccaccgagaccttggtcatgggagtggcacctgttaaggctcaatttgagggtgctgaaatgggtgtgcccgctgagaacgatggctgcaaatgtggaccaaactgctcctgcaacccctgcacttgcaagtgaggttgtgggagagcaagcttcaagcagagatagcccttaattaggaataatgataaactattaatgtgtagctaaaaacttat

SEQ ID NO: 269112 - DNA, 405 bp, Glycine max
  unsure (1)..(405): unsure at all n locations
caaggggcaattttttcaaaacctttttctctctcgcaacctcacctcttcctccttcaatctctttcggaatttcccaaaatccttagtgggaggaagagatggttctgactcagaagcttcacgaagccttcaaaggcaccgtcgagaggattactggcccccgaaccgtttccgccttcaaagaaaaaggagttctcagtgtctctgagttcgtcaccgctggcgataatctcgttgccaaatgccccacctggtcctgggaatcgggtgatccaggcaagaggaagccatacttgccacctgagaaacagttcttgattactagaaatgtgccttgtcttcngagagctgcatctgttgaagagaatatgaagctgctggagggggaagtctactcgatga

SEQ ID NO: 269113 - DNA, 363 bp, Glycine max
  unsure (1)..(363): unsure at all n locations
cccacgcgttcgcccacgcgtncgaattcgaattcccaatccaaaaccctaataccttcgaagaacctagtagtgaatcagtgatggcacctaaggcagagaagaagccagcggagaagaagccggtggaggagaagaagtcgacggtgggagacaaggctccggcggagaagaagccgaaggccggaaagaagcttccgaaggagggaggagccggcggagaaggggggaagaagaaaaagaggaacaagaagagcgtggagacatacaagatatacatattcaaggttctgaagcaggtccaccctgacattggtatctcaagcaaggccatgggaatcatgaacagcttcatcaacgaca

SEQ ID NO: 269114 - DNA, 456 bp, Glycine max
atggctagccaatcaaacactaaatcagttcacgatttcacagttaaagatgccaggggaaatgatgttaatctcgccgattacaaaggaaaggtccttctccttgtcaatgttgcctcacaatgcggcttgactaattcaaactacacagagcttaatcaattgtatgagaaatacaaagggaaaggacttgaaattctggcattcccgtgcaatcagtttggggctcaggagccaggaactaatgaagagattgtggagtttgcttgtactcgcttcaaagctgagtttcccattttcgacaaggtggatgtgaatggtgacaatgctgctccactgtacaagtttctgaaatcaagcaaaggtggactctttggggatagtatcaaatggaacttctccaaattccttgttgataaggatggaaatgtcgttgaccgttatgcacccacaact

SEQ ID NO: 269115 - DNA, 409 bp, Glycine max
  unsure (1)..(409): unsure at all n locations
gaaggtccggcgaagatcgtggccacgcctcatgctaagaagctcgcaaagcagcacaaggtcgacattgcaacggtcgccgggaccggtccgttcggtaggattactccggcggacgtggaggccgccgccggaatcgcgccgtcaaagagaaatgtggctccggcggcgattcctgctccggcgactccagctcctccatcgaaagctgcttctggttctgctgcaccggctccgattccgggttctagtgttgttcccttcactactatgcaatctgcggtggcgaagaacatgatggagagtctatctgtgcctacgttcagggtggggtaccctgtgactactgatgcgttggatgccctgtatgagaaggggaaacccnagggtgtgacaatgacggctattt

SEQ ID NO: 269116 - DNA, 128 bp, Glycine max
cccacgcgtccgaagggaagtcggcaaaatttatctcgtaacctcgggaaaaggattggctgtgagggctggtcacgggggtgccatttcctaacccttctgctgtttgtggtttgttttatcttttt

SEQ ID NO: 269117 - DNA, 335 bp, Glycine max
cccacgcgtccgcccacgcgtccgcccacgcgttcgtgcgcttcagcacaatgggtgcctacaagtatgtttcggaggtatggcgcaagaagcagtctgatgttatgagattcttgcagcgggtgaggtgctgggagtatcgccagcaaccttctattgtccgtttgacaaggtctactcgcccagataaggctcgtcgcttgggtttcaaggctaagcagggttacgtgatttaccgtgttcgcgtacgaaggggtggccgtaagagaccagttccaaagggtattgtttatggtaagcccaccaaccaaaggtgttacttaactgaaaattta

SEQ ID NO: 269118 - DNA, 374 bp, Glycine max
  unsure (1)..(374): unsure at all n locations
gaagcaacgagcaagataaggcaaagaaagggttagaaggcactgccatagatttacctactaaccgccgtgtcaacctgaaaagcgctaccagcgacgacgacttcaccaacattcttgcacacatcaaatcctccaaaacccccgctgtcatcaaatatggcgctccttggtgtcccgtttgtatccaaattctcccagcattctgtagactgagcaataattttccaaagcttacctttgtatacacagacatcgatgaatgcccagaaacaactcaacacattcggtacactcccaccttccaattttaccggaatggtgaaaaggtagatgagatgtatggtgcttggtggggaagagaggctncatga

SEQ ID NO: 269119 - DNA, 451 bp, Glycine max
cccacgcgtccgcccacgcgtccgcccacgcgtccgtctgcttccgagttccgagtggcgagttgcatatagagcaatgagtcatgaatcgtttatatatagcttcgtggctcgggggacgatggtgttagccgagtacaccgagttcactgggaactttcctgctattgcagctcagtgccttcagaaactaccctcttccaataacaagttcacctacacatgcgaccaccacaccttcaattttctcgtcaagacggttacgcttactgtgttgttgccaaggaatctgttagcaaacaaatctctattgctttccttgaacgtgtaaaagcggactttaagaaaagatatggtggtggaaaagcagacacggctgttgccaaaaagtttaacaaggagtttggaccatttatgaaagagcacatgaggtttatcatagaccatgctg

SEQ ID NO: 269120 - DNA, 410 bp, Glycine max
agagtttgttgtgagctataagctagtttatcgtgaggagaatatgaagttgtttgttttctttgttgctgcagtagttttggtagcatggccatgccatggcgcaggctaccaaaggttccctctccgaatgaaaactggctatggtgagcgttcttcggaggtaaaatgcgcaagttttaggcttgctgtggaagcacacaacatccgagcctttaaaaccattcctgaagagtgcgttgaaccaacaaaggactacattaatggcgaacaatttagatcagactctaaaacagttaaccaacaagctttcttttatgctagtgaacgcgaagtccatcacaacgacatatttatattctgcatagataacaccgtactctctaatatcccatactatgaaaaacatg

SEQ ID NO: 269121 - DNA, 406 bp, Glycine max
  unsure (1)..(406): unsure at all n locations
tttaggtgacaaaactactcacagagaaagacactcggagaccttgcaagacttcatcaatggctgtcaaagtttatattgtgtactactccatgtatgggcatgttgagaaactagcagaagaaataaagaaagggtttcctctgtggaaggtgttgaggccaaattatggcaggtacctgagacgctgcaggatgaggtgctcggtaagatgagtgcaccacccaagagcgatgtaccagtcattaccccgaatgaactatccgaggctgatggctttgtattcggcttcccaacaaggtttggaatgatggctgctcagtttaaagcttttctagatgctactggaggcttatggagagcacaacagcttgcangcaagcctgctggcatcttttacagcact

SEQ ID NO: 269122 - DNA, 371 bp, Glycine max
cttgagttaaaaaatggcagcagcttcttccatggctctctcatccccatccttggctggcaaggccgtgaagctgggcccatcagccccagaagtgggaagggtgagcatgaggaagaccgtcaccaagcaggtctcctcaggaagcccatggtacggcccagaccgagtcaagtacttgggcccattctctggcgagcccccgtcctacctaaccggtgagttcccaggcgactacggctgggacactgctgggctttccgcagacccagaaaccttcgccaagaaccgtgaactcgaagtgatccactccaggtgggccatgctcggagccttgggctgcgtcttcccggagttgcttgtccgcaacg

SEQ ID NO: 269123 - DNA, 319 bp, Glycine max
ctgggatgacgttgttgctggccctcaacctgagcgtggccttggcaagctcagaaaactcaccaccctcaaaactattgatgaaggagacagtagcaagctgcagaagacgttgtcgatgccgtcgacaccgacaatcccgatgactcccacgactccaacgacaccgggatccgcgcgtaaagctgacaacgtttggaggagcgtcttccatcctgggagcaactccgccacaaagaccatcggtgctcagatgtttgacaaaccactttccaacactcccactgtctacgactggctgtacagtggggagaccaga

SEQ ID NO: 269124 - DNA, 413 bp, Glycine max
cccacgcgtccgcgaaacggcagcacgcgcaaaaatggtgaagtttctgaaaccaaagaaagccgtcatcgtccttcagggacgctacgccggcaaaaaagccgtgatagtgcgaaccttcgatgaaggcacgcgcgagcgcccctacgggcactgcttggtggcagggataaagaagtaccctgcgaaggtgatcaagaaggattcggccaagaagacggccaagaagtcgcgtgtgaaggcgttcgtgaagctcgtgaactaccagcacctcatgcccacgcgctacacgctcgatgtcgatttgaaggacgcggttacccccgacgtgctccaagccaaggataagaacggtactgctctcaaggagaccaagaagcgcctcgaggagaggttcaagactgggaagaatc

SEQ ID NO: 269125 - DNA, 415 bp, Glycine max
cccacgcgtccgagaaaaacaagtagttgagaactaagaagaaggaaatggcttcctcagtgatctcctccccagctgttaccaccgtcaaccgtgccggtgccggcatggttgctccattcaccggcctcaaatccatggctggcttccccacgaggaagaccaacaatgacattacctccattgctagcaacggtggaagagtacaatgcatgcaggtgtggccaccaattggcaagaagaagttcgagactctttcctacttgccagacctcgatgatgcccaattggcaaaggaagtcgaataccttctaaggaaaggatggattccttgctttggaattcgagttggagcacggtttcgtgtaccgtgagcacaacaggtcacctggatactatgatggacgctactgga

SEQ ID NO: 269126 - DNA, 389 bp, Glycine max
aacaaatcaaagccatggccacctccaacttctctattgttctctccgtctccctagccttctttttggtgctacttaccaaggcacactcgaccgataccgtttctttcaccttcaacaagttcaacccagtccaaccaaacattatgctccaaaaagatgctagtatttcatcctctggggtgttacaactcaccaaagttggcagcaacggcgtgcccacctcgggatctctcggtcgtgccctttacgctgccccaatccagatttgggacagcgaaaccggcaaggtagccagctgggctacatcctttaaattcaacattttcgcacccaacaaatcaaactcagctgacgggcttgccttcttctttgcacccgtcgggtct

SEQ ID NO: 269127 - DNA, 435 bp, Glycine max
cttagtcccaattttctagggttttattcattttccgatggcttctgcagatgttgagtaccgttgctttgtcggtgggctcgcttgggccactgacgaccatgccctcgagagagccttctctcagtacggcgaaatcgttgaaacgaagattatcaacgatcgtgagactggcagatccaggggttttggatttgtgaccttcgcctcggagcagtccatgaaagatgcgatcggagcgatgaatggacagaacttggacggccgtaacatcactgtcaatgaagctcagtcccgcggtggcggcggcggcggcggaggaggaggatacaatcgtggtggcggtggatatggtggtcgtagtggcggtggcggtggtggataccgtagccgtgacggtggttatggcggtggctatggtggtggtgggtggtg

SEQ ID NO: 269128 - DNA, 411 bp, Glycine max
ggtggttttttttttttttttggtttttttttttttttttttttttttttttttttttttttttttttttttttttttttttttttttttttttttggaggggaaaggggggctttttttttttaagccccgaaaaaaaaaaaaactttggggggttttttttatttttttttggcccccagtttaaaaaaaataaaggggaggttgggcccttttttggacccctttttttttatattaaaaaaaagggccccccttttttgttgggggggggaggaattttttttttttttccggggggtttaggaaacttaaagggcttttttttccttttggggcctccgggggaaacctttttttggtttaaaaaaaccaaaaatttggggtcccggctttaaaaatttttttttg

SEQ ID NO: 269129 - DNA, 370 bp, Glycine max
aatacttaggatgcacttccatgattgctttgtgcgaggttgtgacgcttctgttctcatagccggtgctggcactgagagaacagcggggccaaaccttagtttgagaggatttgatgtcattgacgatgctaaggctaagatcgaggctctgtgccctggtgttgtctcttgtgctgatatccttagccttgctgctcgtgattctgtagttctgagtggtggactaagttggcaagtgcccacaggacgcaaagatggaagggtttcaattggatcagaagccttaactttgcctggtcctaatgataccgtcgcaacccagaaggataagttttcaaacaagggccttaacaccgaagacctcgtc

SEQ ID NO: 269130 - DNA, 368 bp, Glycine max
cttttctattccctcaccaacgtaccgttgttcaatttcaatttcaatttctcggcagccattgccatgttctttcacggctcaagtgagaagaagagggaaagggaaagtggtaatgagcatggaggcaggcattggagtgatgggcaccaagttgggtatgatgagctatttcgaatccgacggagaggttgttcctgtcactgtcgtgggtttcaaagaaggcaacatcgtcacccagatcaaaactgaggccaccgatggatacgacgccgtccaggttggttaccgaagggtcagagatcgcaaattgaccaaacccgaaatcggtcatctccagaaggtcggcgccattcccatgcgccatc

SEQ ID NO: 269131 - DNA, 364 bp, Glycine max
aacaacacaaggccatcatcatggcagctgcttccccaatggcaagccaactcaagtccaccttgactaggactcttgtagctcccaagggcctctctgcctcttcaccacttcacctcgtgccttctagaaggcaatttagcttcactgttaaggccatccaatcagagaagccaacctatcaagtgattcagccaatcaacggtgacccattcattggaagcctggaaaccccagttacatccagccctttgatcgcatggtacttgtccaacctgcccgcatacagaaccgcagtgagcccactactaagagggatcgaggtgggcctggcccacggataccctctggggggcccaatcgt

SEQ ID NO: 269132 - DNA, 382 bp, Glycine max
  unsure (1)..(382): unsure at all n locations
cccacgcgtccgcccacgcgtccgcaagtagttgagaactaagaaggagaagcaaatggcttcctcaatgatctcttccccagctgttaccactgtcaaccgtgccggtgccggcatggttgctccattcactggcctcaagtccatggctggcttccccaccagaaagaccaacaatgacattacctccattgctagcaacggtggaagagtgcaatgcatgcaggtgtggccaccagttggcaagaagaagtttgagactctttcctacctgccagaccttgatgatgcacaattggcaaaggaagtagaataccttcttaggaagggatggattccttgcttggaantcgacgtggagcacggtttcgtgtaccgtgag

SEQ ID NO: 269133 - DNA, 458 bp, Glycine max
  unsure (1)..(458): unsure at all n locations
cccacgcgtccgcacgcttagtgagattgagattgttaatcttgagagagttggactttggcagaagaannttcattgggtagttattatttatgactgcaatctgtatttaatggtcttttcttgtattttttccaatttattagatagcttgtattatttgtttgtctttataaatatttttttttttttgttcttgcttttttttattttgttttaataatcttttattattatttcttttttactcttataacatattatttcagtttgttgttatgnattttttttgtttttttttgttttctttttttataatttgatttcctatttttatattttttaatgtttttttatttttttttatttgctaattagaattttaattttcgttgtattttgtttttcttattattgatttttttattatgatgtttattttttttattttgatggta

SEQ ID NO: 269134 - DNA, 416 bp, Glycine max
tagcaagttaacaacacttttgtcttcgttccattatctagttctcaattctcttcagcctttgcctctgaaagaaatgggtagtcttgaagcggaaagaacaacagtaggattggcagcaagagacccttcagggattctctccccatacacctacaatctaagaaacacaggccctgatgatgtttacattaaagttcactactgtggagtttgccattctgatctccaccagattaaaaatgatcttggcatgtccaactatcccatggtcccaggacatgaagtggttggtgaggtactggaagtgggatcaaacgttagcaggttcagagtgggagagttggtgggagttggactcctcgtaggttgcttgaaaaactgccagccatgccaacaagacattgagaattact

SEQ ID NO: 269135 - DNA, 318 bp, Glycine max
agtgatttcagtgagtgatcggtgttcacttgatctcatcataatcgtcagcgtcaattgaagaagatgccgatcagaaacatcgccgtcggaaggcctgaagaggcgactcaccccgacacgttgaaggcggctttggctgagttcatctcaaccttcatcttcgtgttcgccggctcaggctccggcatcgcctacaacaagctcaccgacaacggcgctgccacccctgccggcctcatctccgcctccatcgcccatgcattcgccctcttcgtcgccgtctccgtcggcgccaacatctccggcggccacgtc

SEQ ID NO: 269136 - DNA, 337 bp, Glycine max
cccacgcgtccgctttgtttagatcagaaccagatcgtgttctcttcttccattggcaaacatggcaactcaaatgagcaagaagagaaagtttgtggcggatggagtgttcttcgccgaactgaacgaggttctgacacgtgagttggcggaggacggttactccggcgtggaggttagggttacgccgatgcgcaccgagattatcatcagagccaccagaacccaagccgttctcggtgagaagggaaggagaattagggaacttacctcagtggtgcagaagaggttcaaatttcccgagaacagtgtcgagctttatgctgagaaggtcaac

SEQ ID NO: 269137 - DNA, 404 bp, Glycine max
gtttgagagaaaggttgagctatagcctaaagggagagacacataaatagtttctactttgtattcatagatagatggctggcccaattatgagacctcagattgtgctatttggctcctccataattcaaatgagcttcgacaatggtggttggggtgctattctagctaacttgtacgctaggaaggcggacatcatcttaagaggatactctggttggaattcaaggcgggctttggaggttttggatgaaattttccccaaggatgcttatgtgcaaccatcattggtaattgtgtattttggtggcaatgattctattgatcctcacccatctggccctggtcctcatgtcccccttgagaatatgtttgaaacatgaggaacatgctaatcatcttaa

SEQ ID NO: 269138 - DNA, 445 bp, Glycine max
  unsure (1)..(445): unsure at all n locations
gtttgaacatcgagaagaaaacagaaaggactgcttaaggacccttctccatctcattgaggaggcagggaaagctaataaactagtagatgatgctcgatcctcatacgtaaaagagaggcttcgtgccaatccagctttcatggagaggctgcatgccaagtcaatgaggttgcgagaatctaatcaggttcctgcttgaggttttcagatctgatgtatgaattattgaaattcacctgccataattttttattgctccctggttttttgtatgagtcttatcttgggttccagctgcagaaaacaacctccctgcttagagggtaaggcctcatacatctgatccttcctagaccccacaactgcaggggagactcatgcaccgnggtacctcttagtcatatctttcgtatttagtgcttgaataatggataattttttt

SEQ ID NO: 269139 - DNA, 384 bp, Glycine max
  unsure (1)..(384): unsure at all n locations
atcaaaccacgccagcttcaaaacgctgcgtttcactcccgtcctcgcgtcgctcccaaaccctaatcctatccgcggcattcctctggtcgccgtcgacaccgtcccggtcgcgccaaccgccgcaacccgaagaaaccgaatcgatctgagagaaggtgcgatctcggaggtgggagccaaacgaaacgatgccgtctcacgcggatctggagcgacagatcgagcagctgatggactgcaagcctctgtcggagtcggaggtgaaggcgctgtgcgatcaagcgaggacgattcttgtggaggagtggaacgtgcaaccggttaagtgccccgtcaccgtctgcggcgatattcacggccagntctacgatctcatcgagc

SEQ ID NO: 269140 - DNA, 382 bp, Glycine max
cccacgcgtccgcccacgcgttcgcccacgcgtccgctatcatggccacggcaacagcagctgccacctcgtcctttatggggacgcgtctcctggaggctcactccggagcggggcgagtgcacgcccgattcggcttcggcaagaaaaaggctcccgccccaaagaaagcctccaggggatcgggccgagacaccgacagacccctttggtatccgggcgccaaagcgcccgaatacctcgatgggagtcttgtcggagactacgggttcgatccgtttgggctagggaagcccgcggagtacctgcagttcgagctggactcgctggaccagaaccttggcgaagaacgtggcctgggacatcattggaaccaggaccg

SEQ ID NO: 269141 - DNA, 427 bp, Glycine max
tccacgcgttcgcccacgcgtccgcccacgcgtccggttgcattacatcacaacatcaacatggctgccactgctgctgcaggcatagcttccttggtttcttcttctattaacagtgtcaaacgtcttcgttcctccaagaactgctccataatagaccctctcataacaacagtgccctcaaaccgtggcatgtttgggtcacacttggtggaacctttgtccattaattcgcacaagttgtggggacctagaatttctgctgctgttgcacaagaagaggctgctgatgatgcggatgatgatggtgctggtttagttgaagaagagaaagtggacgagaatgaacgagaagcggtggcagaacatgactctgattcctctgccaccaatgcttattttgggaatttgccttatagtgatgata

SEQ ID NO: 269142 - DNA, 438 bp, Glycine max
aacccttccaaaaactcgtgcatgctttccttcgaaacctgctaacttacccatttgttagacatggcttggggaacaaaacattggtactgagaggaggatactgtgacttcgttaaaggatcttttgaactctggggccttcagcttgagcttgcatactctttatccgtatgaacattcaccattatcaatgacctcatcttgggtccctaagtattctgctatctaaaacgtactctgtaattaattgctcttgccataatgcatgcatgtgctgaatttcctaataataaaagtggatatggagatttctccacatatcaccctctattccaaattgaagttcaatccgttttgttcaacgaacgtgtaacattactatggtctttcaccactgcatttttattctttgatagggtaaagatgtggccaccat

SEQ ID NO: 269143 - DNA, 423 bp, Glycine max
  unsure (1)..(423): unsure at all n locations
tccacgcgtccggctcaaccctagtaagccgcaatggtgaagtactcaagggagcctgacaatccaactaagtcttgcaaggctagaggcgccgaccttagggttcattttaagaacacaagggaaactgcctttgcaatcaggaagttgcccttggtcaaggctaaaaggtacttggaagatgttcttgcccacaagcaggcaattccattcagacgtttttgtcgaggtgttggaaggacagcccaggctaagaatagacactctaatggccaaggacggtggcctgtcaagtcagcanaattcattcttgatttgctcaaaaatgctgagagcaatgctgaagtgaaaggttggatcgtgatgcactgtacatttcgcatatccaagtcaatcaagcacagaagcaaagacgccgaacat

SEQ ID NO: 269144 - DNA, 430 bp, Glycine max
  unsure (1)..(430): unsure at all n locations
tcgtccacgcgtccggtttatgacacgctggagaaaatcgttcaagaggctcctcatccttcttatgctgaattcagaaacactggattggaaaggtctgcaagtttggcagaagatttggagtggttcaaggagcaaggttataccattcctgaaccttcttctcctggtcttacctatgcacaatatcttaaggagttatctgtgaaggatccccaagcattcatttgccatttttacaatatctactttgctcattcagctggtggtcgaatgattgggaaaaaggttgctgaaaagttacttaacaacaaggcgttggagttctacaaatgggatgatgaccttccacgattgttgcagaatgtgagagacaagttgaataaagttgctgaaccttggagtcnggaagaaaaggaccactgtctgg

SEQ ID NO: 269145 - DNA, 303 bp, Glycine max
tcgtccacgcgtccggccactcgttcggtgagctataagctagtttatcgtgaggagaatatgaaggcggttgttttctttgctgctgcagtagttttggtagcatggccatgccatggcgcatgctaccaaaagttccctcttcgaatgaaaactggctatggtgagcgttcttcggaggtaaaatgcgcaagttttaggcttgctgtggaagcacacaacatccgagcctttaaaaccattcctgaagagtgcgttgaaccaacaaaggactacattaatggcgaacacattagatcagac

SEQ ID NO: 269146 - DNA, 412 bp, Glycine max
cggacgcgtgggcggacgcgtgggcaaattccaatttccaattcaagaccctaactccgttcgaagcaccaaatcgtgatggcaccaaaggcagagaagaagccagcagagaagaagcccgcggaggagaagaaatcgacggtgggagacaaggctccggcggagaagaagccaaaggccggaaagaagcttccgaaggatggaggcgccggcggagaagggaagaagaagaagagaaacaagaagagcgtggagacatacaagatctacatcttcaaggttctgaagcaggttcaccctgacattggtatctcaagcaaggccatgggaatcatgaacagcttcatcaacgacatcttcgagaagcttgcccaggaatcttctagacttgcccggttcaacaagaaaccca

SEQ ID NO: 269147 - DNA, 462 bp, Glycine max
cggagaactctacagaggaagcatgatcgagtgcgaggacaactggaactgtcaactcgagagcattacctacactggcaaggatggcaaaacatcgcgacttgagcatgtgtttattcgaggcaacaaagtcaggtttatggtcatccctgacatgctgaagaatgctcctatgtttaagcgtttggatgcaagaatcaagggtaagggtgcatcacttggtgttggtaggggcagagcagttgcaatgcgagcaaaggctcaagctgctgggcgtggagctgcgcctggaaggggtgtaccaccagtgcggaggtgatcaccatttatatagtctggattctccttgcctgttggacatttttaaattcttttgtaaaagttatgtgagatagacatccaaacagaattgcgtatcaagacttattacagattacttttatgcaaatacttgatccctct

SEQ ID NO: 269148 - DNA, 454 bp, Glycine max
ctcatcttcctctttttctcaacaaaaaggggttcaattctagctagttctattacgtcgtccgcgaccatgaacatggcgatcgcgcttctgttcatggttttcgcagtttcatcagctttagacatgtcaataatatcacacgacaacgctcatgcggatagggccacgaggcgcaccgacgaggaggtgatgtcaatgttcgaggagtggctggtgaaacacgacaaggtgtacaacgcgctcggtgagaaggagaagaggtttcaaatcttcaagcacaatctgcgcattatcgatgaacgaaactctctgaaccgaacctacaagttgggactcaacgtgttcgctgatctcaccaatgcggagtacagagccatgtacctgcgaaccttggacgagggtccgaggttgggcttggatacgccgccaagaaaccactacgtgccacgtg

SEQ ID NO: 269149 - DNA, 484 bp, Glycine max
cttcacttgtacactcttcaaccactcaacaaagtggttggtttttggttcttaagccatggcatccacatcctctctgcatctatctcaggcccttctggcacgtgctgtgtaccttcatggctcttcttctgaccgtgtctcactctccttcccatcattctctggcctcaagtcacattctccatgcaaagcagcagccacgtcctcacgtagaaggggtgcttgcgcttccaccagcgttgttcgagccgctgcggttgagacactggaccagaccactgaggtttctctggtggagaaatccgtcaacaccattcggtttttggccattgatgctgttgagaaggccaactctggtcaccctggtctccccatggcgtgtgctccaatgggtcacattctctacgatgaggtcatgaggtacaatcccaagaatcccacttggttcaaccgtgaccgtttcattctctctgctggacat

SEQ ID NO: 269150 - DNA, 286 bp, Glycine max
cccactcgtccgaaaaaaaaaaaaaaaaaaaaaaaattgaataataatataataaataaaagagaaaaataaaaaaagggacaaagataaaaaataaaagagaaaaaaaaataataaaaattaaaaaatcaaataaataaaaattaaataatataaaaggggggccctttttaaaggtccaaattttctgtccctttacttcaaccgtcaaactttttttttaggggccctaaatttaatttaattggcctcgttttaaaaacttctaaattgaaaaacccttggg

SEQ ID NO: 269151 - DNA, 470 bp, Glycine max
gtgactgcgatcatcgtagttaaatggtctcattgagcgcaaagcgcggaagatccataggatcattgctgctaccatctgacaacttggcagcatgggacgcagaaatcacatcatgggtgtcaacggagccctcatgcaagccgatggtggcagagaacccatcgctcacccattcggtatgatcactcttaaagttgactgtgtcagagaggccatctaacttcatacatctgacattaatgtgacaactgaaaaatgtgatgacgacctagctagctagacgctggtgctactaataatggtagaccgattattactatataatacgtgatatactacgtctagacatactgatgctactaatgatgatgatgcatgacatgcggacgagcttatattcgcctctcattaggttgtcaacataactccgactgataagaagtctatcactgactatggttcacccg

SEQ ID NO: 269152 - DNA, 226 bp, Glycine max
gacaaattggaatgaagcatccattatcattgtaactgttaaatggtgcactgcagggcctaagtaagcacctgtatcttaatcccagtttgtgaaacaaattgaacattgctgtattgatgtattatcaaaatgtgcctgccttccctgttaaaaaaaaaaaaaaaaaaaaaaaaaaaaaaaaaaaaaacaatataaaaaaaaaaaaaatacataacacatacat

SEQ ID NO: 269153 - DNA, 289 bp, Glycine max
gaaaaacatggatatggggtggatgaatttaattaaacctcatatgattaatgggttaacatgggcgtctcaccggcgttgccagagactcttaaaaattacatcatgctgctgtctcttggcttcaagattgtattcttgccaggaagatatcttgacaaattggaccgcatcagaagcaaacctatagaaggctggcttccacacatggcttcagttaattctcaacgatccacatattatcactacaaatgcactttcatacaaataaccaatgagagagaatctg

SEQ ID NO: 269154 - DNA, 324 bp, Glycine max
tagtttcatactttttttcttcttcttgaaatggctctccaggctgcttctcttggtcctgcgttctttctcggggcttaaagagggaaagagtggtgcgtctctcaaggactccaccttgttcggtctttcattttcagaacctatcaaagctaacttcagctcttctgcattgaggtgcaagagggaattcgaacaaaagctctgtgctgtgagggccgaaacagtggctacagcctctccagcagttaccaagtctacaccagaaggcaagaaaaccttgaggaagggcagtgctgtgataactggggcttcatctggact

SEQ ID NO: 269155 - DNA, 323 bp, Glycine max
  unsure (1)..(323): unsure at all n locations
atctctgattcattgctagaggagaaacattcaattatcagattttgattggtgcaactggctcaacaggtataaggctgacagattttggtgtagaaagagctgatgcgaaaaacatcttttatttgagggaggttgatgatgctgacaaattgtatgaggcaatcaaggcaaagaagaatgggaaagctgtggttgttgggggaggatacattggtctggagcttagtgcagtgttgaaactcatcaatattgatgttaccatggtctacccggagccttgntgtatgccacgactttttacggctggtatagctgaattc

SEQ ID NO: 269156 - DNA, 460 bp, Glycine max
  unsure (1)..(460): unsure at all n locations
cttggcatgccggatggtgttctcatcaacgggaaaggtccttaccgatataatgacacccttgttcctgatggcattgattatgaaacaattgaagttcatcctggaaaaacttaccgacttcgtgtacataatgttggagtatcaacaagtctgaatttcaggatccagagtcacaacttacttctagcagagacagaagggtcttacacagtgcaacagaactacactagcttagatattcatgttggacaatcttattcttttctgttaagcacagatcaaaatgcaagtacagattactacattgtagcaagtgccaggtttgtgaatgaatcacgttggcaaagagttactggagttgctatcttgcgctatacaaattccaaggggaagggcccgtgtcctttccaccgggtcctgatgatcaatttgacanaacttactcaatgaaccaagc

SEQ ID NO: 269157 - DNA, 454 bp, Glycine max
gaaatcctgagcttccattgtgctcactcatctcttacaacgaaaccctcttcatcttgttctatctgtgacgagcatcatggcctcaagagcagtgttattgttggctatgcgtgtgcttccggcgatggttgtggccattcgcccagcaaagaaccctttttgcgtgaagggtcgtgtctactgtgacccttgccgtgctggttttgagacctcagctaccacctacattgctggtgctgagattatgttgcaatgcaagagcagggttagcaacgaggttgtgtacacgaagaaggggtacaccgactcaaccggagcatacacaaatgtacgtggatgaggatcacgcagatcagatctgcagtgccaagcttgtaagcagccctcaccctcaatgcagggaagtcaccccaggccgcgacgaagccgtcgtgattctcacccgctacaa

SEQ ID NO: 269158 - DNA, 346 bp, Glycine max
cccacgcgtccggtcgaagcgtggtcgtggtggttcggcggggaacaagttccgcatgtcggtgggtcttccagtggcggcgacggtgaactgcgccgacaacacgggggcgaagaacctctacatcatttcggtgaaagggatcaaaggccgtttgaaccgtcttccctcggcctgcgttggcgacatggtgatggccaccgtgaagaagggaaaacccgatctgaggaagaaggtcttgccagctgtcatcgttcgccagcgcaagccatggcgccgaaaggacggcgtctacatgtacttcgaagataatgctggtgttattgtcaatcccaaaggagaaatg

SEQ ID NO: 269159 - DNA, 306 bp, Glycine max
tcgcttcagcttcttgtggcttgtggcaagtctcctcctcctggttacacctgctccctctaaaccagtgaaaggattgaggaaaatatggtcaaaatcgacatgagaggatgtcgagccacactatctctcttctgtcctgattggaactgctgttgcttgttttgctattatttgaaaaaccaatttgtttttaattgagattgttgcatgtatgttttaatcctaggcaagtagcagcaaagatgcttctctgtgacatgttcaattattaatttatatgaattgcgccttaatttgttgaat

SEQ ID NO: 269160 - DNA, 470 bp, Glycine max
  unsure (1)..(470): unsure at all n locations
tcggcaaaagttgtcattgataggctaactggccggaccaagggatatggctttgtaaggttttcagatgagagtgagcaagtgagggctatgactgagatgcaaggggttctttgctcaacaagacccatgaggattggacccgcctctaataaaacccccaccactcagtcccagcccaaagcttcatatcagaattctcaacctcaaggttcacagaatgagaatgatccaaataatacaactatttttgttggtaatttggatcctaatgtcactgatgatcatctgaggcaagttttcagccagtatggagaattagtgcatgtgaagattccagcaggcaagcgatgtgggtttgtccaattcgcagacaggagctgtgctgaagaggcacttcgggtgttgaatgggaccctgttgggtggtcaaaatgttcgtctttcatggngtcgcagtccttcaaacaa

SEQ ID NO: 269161 - DNA, 467 bp, Glycine max
gctgcaacagcttcaaggtttatcaagtgtgtgacagttggggatggagctgtaggcaaaacttgcatgctcatttgctatactagcaacaaattccccacggactatattccaacggtgtttgataatttcagtgcaaatgtagttgtggaaggcacaactgtcaatttaggcctctgggacactgctggacaagaggattacaacagactgaggcctttgagctacaggggggcagatgtctttgtcttggctttctctttagtcagtcatgcaagctatgaaaatgtgttgaagaagtgggttcctgaactgcagcattttgctcccggcattccagtggtgctagttggcaccaaattggatctccgagaagacaagcactatttggctgatcatcctggtctggtgcctgtgacttctgagcaaggtgaggaattgcgtaaactggtgggagctacatatta

SEQ ID NO: 269162 - DNA, 444 bp, Glycine max
tcgtccacgcgttcgcccactcgttcgcggacgcgtggggtttgttgttgtaactcgttcttcttcttttgatgttctgtgttcgggtttgcaacttctctgacctgaaaatgtcttgctgcggtgagaactgtggttgccgtagctgctgacagtgccgaaacggctgatgatgctgcaacatgctcccagacttgagctacacttgagtaaccaccaccgagaccttggtcatgggagtggcacctgttaaggctcaaattgagggatctgaaatgggtgtgcccactgagaacgatggctgcacatgtggaccagactgatactgcaacccctgcactagcaagtgacgtgtttggagagcaagcttcaagcatagatagcccttaattaggaataatgatcaactactaacgtgtagctaaaaacttatgtattatgtct

SEQ ID NO: 269163 - DNA, 415 bp, Glycine max
cttccttatcttatatcttctcctcctccatctttgagattctcaaagaaacttctgaagatggctggcatagcattcggaagcttcaatgattctgtcagttttgcctccatcaaggcctacattgctgagttcatctcaacccttctctttgtttttgccggtgttggttcagccatagcctatgctaagttgacatcagatgcagctcttgatccaactgggttggtagccgttgctatttgccatggttttgctctcttcgttgctgcttctgttggagccaacatttctggtggccatgtgaaccctgctgagacctttgggttgtctcttgggggccacatcaccatcctcactggtctcttctactggattgcacagcttctcggatccatagtggcatccttactcc

SEQ ID NO: 269164 - DNA, 395 bp, Glycine max
cccacgcgtccgcccacgcgtccggaaaaattccaagttggggttctcacgatttcgattaaccgtttctcccacaaactccgattcttcttgtaaacagcggtgccaggtgttaatctagaagttgatataggatgggggcaatgatgtcgaggttctggttcatgttattccctgcaaaagagtataagattgttgttgttggattggataacgctggaaaaaccactaccctttataaattgcatctgggtgaggttgtaacaaccaatcctactgttggtagcaacgtcgaagagctcgtctacaagaatatacgatttgaggtcttggatcttggtggacaagaaagactgatgacatcatgggcaacatattaccgaggaactcatgct

SEQ ID NO: 269165 - DNA, 435 bp, Glycine max
cccacgcgtccggtttcacacttccaaaatcgtaacctcaaaaaaaaaaaaaccgaaccaactctgttcctatttccacactctttagtcttttgattgataatgtcggcgtcgacgggaagcagcaaaatccggcgcatagttcgggtgaggcaaatgcttctccggtggcggaggaaggcagcggcggacgttccggctggacacgtggcggtgtgcgtggggcccagcaggaggaggttcatcgttcgcgccacgcatctgaaccacccgattttcaagatgcttcttgtgaaggccgaagaggaatacggtttctgcaaccacggtcctctcgctataccctgcgacgagtcactcttcgaagagcttcttcgggtcgtgtcccgacccgtacccgtacccggattcttcacgctcgatgatttccagaga

SEQ ID NO: 269166 - DNA, 431 bp, Glycine max
tcgggccgtccttttttttttttttttttaaagttggatcacgtcacgcatgtgtactcaaaccagggatggaaatgtaacagtgagttgatttctgtgttacattaccagaaaaataaagaaaaataattgtgtatctgatctacactccttacgcaatatcatctttcaaaaggtgaagggaaaaattacaacaacctgctactacagaattggcctaatgcccaaactaagctcaaaatttatgtgcggtagtgttctttaatggccgcccctgtctgttaagtttcaatcatttcttcaattatctctccttgttggcctccgacgtgcaggggcagatgattcctgcttctctttggtttcctcattcttaacaattgcctggcttagttgcagttctggttggtctaacgttggcctcttcaacc

SEQ ID NO: 269167 - DNA, 478 bp, Glycine max
  unsure (1)..(478): unsure at all n locations
gtagttagaacatctacctggtggtgattcttccaccgagccctacattgttaaccaccacttaatacttgctcatggagcagcagtcaattgctacaagaacaaataccaggctcatcagaaaggacaaattggagtcaccatagtgactttcttctttgaaccaaaatctaatagtgatgctgatcgcaaggcagcaaggcgagctctggactttatgtttggctggtttgctaatcccattacatttggtgactatcctgagagtatgagatctttagttggttctagactccccacattcaccaaagctcaatctgaaagtctcaaaggttcatatgattntcttggtataaattattacaccttaaatttcgtggaatatgcttcaacaaccaccacttacaagacctatttcactgatatgctagccaaactttcttcgaccaggaatggtgtacccattggcacaccgact

SEQ ID NO: 269168 - DNA, 465 bp, Glycine max
gagagagagagagaggcacttggaatccaaaaatgagagaaatcatcagcattcacataggtcaggccgggatccaggttggcaactcctgctgggaactctactgcctggaacatggcatccagcccgatggcatgatgccaagtgactcctccttcggtgtagcccacgacgccttcaacaccttcttcagcgaaaccggatccggcaagcacgtccctcgcgccgtcttcgtcgatctcgagcccaccgtcatcgacgaagtccgttgtggcacttaccgtcaactcttccaccccgaacaactcatctccggcaaggaagatgccgccaacaactttgccagaggccactacaccgttggcaaagagatcgtagatctgtgcttggatcgcgtccgaaagctcgcagacaactgcactggtctccagggcttcctcgtcttcaacgctgtcggcggtggca

SEQ ID NO: 269169 - DNA, 351 bp, Glycine max
cgcatgctgcactcacggacctttcttgcctaatgattcttacaagcactctgcacggtgcatctgtccatcttttggcttgaggagtctgaaatcgagctctgtatttggagaatctctaagagtggcatacaaatcaacactaaaggcttcaaagacaaagaatacttcactcgtgaccagatgtgaaattggcgacagtctggaagaattcctcacaaaagcaacaccagataaggggttgatcaggttgttggtgtccatgggagacgcattaagaacaatttccttcaaagtgaagacggcttcttgtggtggaacacaatgtgttaatacttttggggacgagca

SEQ ID NO: 269170 - DNA, 355 bp, Glycine max
tgaagaagcaatagttcgccccctccatattgaaggggagttatatgtagggattccgccaggggtggaatcacgtcttgccgctctgactgtagatactgctgatttaagcaaagtctcagcactcgctaatcgtcctgaccttccctccaccttccaaccacagcaaattgctcaacttgcaaccagtttacctgttgctttcaatacactgaatgttcgccgtgccatcataccagcagctaatggacatgtatctgcccgggcacttgcacgttattatgcagccctagctgacggtggcaagataccaccacctcattcttctgcttctaagccagtacttggtagccat

SEQ ID NO: 269171 - DNA, 457 bp, Glycine max
  unsure (1)..(457): unsure at all n locations
tcgcaggcagctgcctgtgatttgaaagaattggtgcgcaagttcatccctgaaatgattggaaaggagattgagaaggcaacatctagcatatatcctctacagaatgtgtttattcgtaaagttaagattcttaaagctccaaagtttgatctaggaaaactgatggaggttcatggtgattactcagaagatgttggtgccaaggtggatagacctgctgatgaaaccttggctgaggaagcaactgaagtagttggagcttgatccggctgataatgcatttttgtttggttagaattcctgttgcttttacaaatatttnatttttcaagttctggttttgacactttaggaaacacactttggtttttgcaaatctaaatcctggttttttggcaaaaagtttattggtacaacccaattaccaagaaccggtgaaaggcgtaattttctt

SEQ ID NO: 269172 - DNA, 269 bp, Glycine max
tcgaaaaaaaaaaaatgtaatgaaaaaagaaaaaattaaaaaaaaaaaaatataaaaaaaaaaaaaaaggaaaaaaaaaaagggaaatatgaaaaaataaaaagggaaaaaaaaaaaaaaaaaaaaaaaaaaaaaaaaaaaaaaaaaataaaaaaaagggcgtaaaatatgggggctcaattagttattccgaatcttaaaaacatgaatacaaatcataatagacctcctaattaaaacccaaaggttcccattttttacaacctttt

SEQ ID NO: 269173 - DNA, 470 bp, Glycine max
gagtgatttcagtgagtgatcggtgttcacttgatctcatcataatcgtcagcgtcaattgaagaagatgccgatcagaaacatcgccgtcggaaggcctgaagaggcgactcaccccgacacgttgaaggcggctttggctgagttcatctcaaccttcatcttcgtgttcgccggctcaggctccggcatcgcctacaacaagctcaccgacaacggcgctgccacccctgccggcctcatctccgccttcatcgcccatgcattcgccctcttcgtcgccgtctccgtcggcgccaacatcttccggcggccacgtcaaaccccgccgtcacccttcggctgccttcgtcggcggcaacatcacctttcttcgcggcatcgtctacgtcatcgcccagctcctcggctccatcgtcgcctccctcctcctggccttcgtcaccgccttcactgttccagcattcgga

SEQ ID NO: 269174 - DNA, 382 bp, Glycine max
gcccgagtccacactcaaacccgcgcccatggcaaataacccttccgacgctcccgccgatgacttccttgaacaaatcctcggcctcccgaacttcgcttccgccgactccggcctttccgctgccgatgtcggcctcgccggtgcggccactcaggctccgatgatgctgcaactcaactccgccgacgccaacgctcacctcgccggcgccgccttccacgcgcccgtgtatcagctagggctgagcttggaccagggcaaaggtgggttcatgaagcccgaggaagcctccgctagcggaaagcgctttcgcgacgacgtcgttgataatagagctaagaatgtttttcatgggcaacccatgcctactactatgcct

SEQ ID NO: 269175 - DNA, 424 bp, Glycine max
aacacacaacagattaggattacgtaccatttccttgatcctttttctgactcttactaaaagtctaagctcaactgcatttgatgtcagtgaatatgaagattgggagagcgttgatacagcagattctatcttaagttatggaagtgaattgggagacatggaagaaaatgaatggcagatggtgcaaacgaaaggaaaccaatttgtggtgaacgaccaacctttctatgtcaatggattcaacacatactggttgatggtatttgctgctgatgagtccacacgagggaaggtcactgaggtgttcaaacatgcatcctctgtgggtatgtcagtttgtaggacttgggccctcaatgatggccaatggcgtgctcttcagaaatctccttcagttaatgatgaagacgtatccaaggcc

SEQ ID NO: 269176 - DNA, 476 bp, Glycine max
  unsure (1)..(476): unsure at all n locations
tcgcccacgcgtccgcttctcttttcacgtcattatcctaaacttgcagattttcacatcccaggcaacatgaaggggaggttcatgtttctgtcggtgctcctttgtgccacctttcatgtctccttctccattactgacggcttagtagcaaacggcaacttcgagctgggtccgaagccctccgccctgaaaggaactgtggtgattggtggcagccactcgatcccagaatgggagatctctggcttcgtggagtacataaagtccggccagaagcatggcgacatgctgctcgtggtccccgagggggcctacgcggtgcgcctcgggaacgaggcctccatcaagcagaggatcaaggtgatcaagggcatgtactactccatcaccttcatggtggcccgcacctgcgcgcatgangagaggctcaacatatccgtcactccagactggggcgtcattcctattcagac

SEQ ID NO: 269177 - DNA, 409 bp, Glycine max
tcgcatagctgtagcggcgacactaagatcggagaaagaatggcgaaaacgacgtcgttgctgctctttacactgctcctcttcggaaccctagctctcatccaggcgaagaaatcgaaggaggatttgaaggaggtgacccacaaggtttactttgatgttgagattaatggaaaagaagcaggtcgtattgtaatgggtctttatgggaaggctgttccaaaaactgcagaaaacttccgagcactttgcacaggggaaaagggaactggtaaaagtggaaagcctctccattacaaaggtagctcattccatagaattattcctagctttatgctctaaagaggtgattttacacaaggaaatggaatgggtggagaatccatttaccgagagaagtttgctgatg

SEQ ID NO: 269178 - DNA, 414 bp, Glycine max
tcgggcgcagctaccctgaggcttctcttctcttctcttctctgtcgtgagtcaccatggtgagggttagtgtgctgaacgatgctctgaagagcatgtacaatgctgagaaaaggggaaagcgccaagtcatgattaggccatcctccaaagtcattatcaaattccttttggtgatgcaaaagcacggatacatcggagagtttgagtatgttgatgaccacagggctggtaaaatcgtggttgaattgaacggtagactgaacaagtgtggggttattagtccccgttttgatgtgggcgtcaaagagattgaaggttggactgctaggcttctcccctcaagacagtttgggtatattgtattgactacctctgctggcatcatggatcatgaagaggctaggaggaaaa

SEQ ID NO: 269179 - DNA, 459 bp, Glycine max
tcgcgcggctatgtcagaaatccttggaaaccccgttaacctcagatgcgcaaccaggtctgctgcatcaccaactacacctgccagcttcaagaccgtcgcacttttctccaagaagaagccagctccacctccaaagaaaaagcctgccgctgtatcccccgccaatgaggaactcgccaagtggtatggtcctgacagaaggatcttcttgcctgagggtctcttggaccgatctgagatccccgagtacttgaccggagaagtgcctggagattatggttatgatccgtttggtcttagcaagaagccagaggacttcgccaagtaccaggcgtttgagttgattcatgccagatgggcaatgcttggtgctgctggattcatcattcctgaggcctttaacaaatacggagctaactgtggtcctgaggctgtttggttcaagactggagcttt

SEQ ID NO: 269180 - DNA, 370 bp, Glycine max
ctcccatcatagaaaaccgaccctctcctttccctcttgaccaaccaatggctgccccaaaggccgagaagaagcccgcggagaaaaagcccgcagagaaggctccggcggagaagaagcccaaggccgagaagaagatatcgaaggaaggaggaagcgagaagaagaagaagagaacaaagaagagcgtggagacctacaagatttacatcttcaaggtgctgaagcaggttcaccccgacatcggaatctcaagcaaggccatggggatcatgaacagtttcataaacgacatcttcgagaagctcgcccaggagtcgtcgcgattggctaggtataacatgaagcctaccattacttccagggagat

SEQ ID NO: 269181 - DNA, 465 bp, Glycine max
tcgcccacgcgtccggctcatccctagtaagccgtaatggtgaagtactcaagggagcctgacaatccaactaagtcttgcaaggctagaggcgccgaccttagggttcattttaagaacacaagggaaactgcctttgcaatcaggaagttgcccttggtcaaggctaaaaggtacttggaagatgttcttgcccacaagcaggcaattccattcagacgtttttgtcgacgtgttggaaggacagcccaggctaagaatagacactctaatggccaaggacggtggcctgtcaagtcagcaaaattcattcttgatttgctcaaaaatgctgagagcaatgctgaagtgaaagggttgggatgttgatgcactgtacatttcgcatatccacagtaatcaagcacagaagcatagacgtccgacataccgagcccatggaagaatcaatccttatatgtcatc

SEQ ID NO: 269182 - DNA, 384 bp, Glycine max
cggacgcgtggtcggactcgtgggcggacgcgtgggcggacgcgtgggcggacgcgtggggaatgcattgcacgtatagaggcaaaggcatatgggttgttaaaggagctaggagcaacccatgtagacgaagttttcacagccggtggaggagctaaaaatgagaagtggataaagatacgagagagggtgattggtttgcctgtgagtcgtgcaaatcaaacagaagctgcatacggagctgcattattggcaatgaagggcgatcaacaaaatattttgtgaaaatattattacaccacctgtttgatcatgatgcgtttgaagagtaattcgtcatttgaaatgttatgagagaaaaaaacaattgaatttcttgggagc

SEQ ID NO: 269183 - DNA, 438 bp, Glycine max
attggaagaaagagaaatggaggagactctttctctcagtctcatccacgtaaacaactcattggttttcaccaatagactacacatcatcctccatttcactgctctatgtttcttggtttactacaggctttgcttcttctttcagaatccacaaaccagacgaggaactactttgttcccttggcttcttgtttttgcctctgaaatcattctctccttcatttggattcttggtcaaggtttccgctggcaccccatttcaagaactgtgtttcctgaaaggttaccacaggatgacaagctccctctcattgatgttttcatatgcactgcagacccaactaaggaaccaactttggatgttatgaacactttgctatcagccatggcgcttgattacccgccagagaagctgcatgtgtatggttctgatga

SEQ ID NO: 269184 - DNA, 404 bp, Glycine max
ctcctatctccggagttaaaggagataagagaatttcaaaatacaatatactatatggaactgtaatggcatgtcctcatgttactgcagcagctgtttacatcaaatcatttcatcccaactggtctcctgcagtgattaaatccgcattaatgacaactgctactccaatgcgtgatatacttaatcatggaaatgctgaatttggttatggtgctgggcaaatcaatcctatgaaggcagtaaaacctggattagtttacgatgctactgaaattgattaatgtcaagtttctggggtggagatggttatagtggatttatggacaaaattacaggagataattaaaccacttgtacaccagcaaatacaggaagtgttttggaccttaatctcccatctt

SEQ ID NO: 269185 - DNA, 340 bp, Glycine max
  unsure (1)..(340): unsure at all n locations
cccacgcgtccgctcaacttcagttcaagagaaaactatgccatccaaaagggtctttctacgtctcggcatcgagcaccaagaaaatcctaataatgggaggcaccaggtttattggtgtgtttttatctaggctccttgttaaagagggtcaccaggtgactttattcacaagaggtaaagcgcctgtcactcaacagttgccaggtgaatcagacaatgattatgctgatttttcttccaagatcttgcatttgaaaggagacaggaaggactntgactttgtaaaatccagtctctcggcagaaggatttgatggttgttatgacataaaatggac

SEQ ID NO: 269186 - DNA, 348 bp, Glycine max
ctctttgttcctaaacacggggcactggtttcgaaccctcgttgtgggtaggtcttcttcagctttcgaattttggaatccatgggtcagggaactccgggcggcatgaaccggcagggcgaccggaagccggacggcggcgacaagaaggagaagaagttcgagccgtcggctccgtcggcgcgcgtggggcggaaacagcggaagcagaaaggtccggaggcggcggcgcggttgccgacagtgactccggtgacgaagtgcaaactgcggcttctgaagctggagcggatcaaggactaccttctgatggaggaggagttcgtggcgaatcaggagcgactcaag

SEQ ID NO: 269187 - DNA, 358 bp, Glycine max
cccacgcgtccgcccacgcgtccgcactatagcaatagaaacatttgcttttgaaaaacccctcactcttcatcactacactagctagccacatacaatgtcgaccaaatttaaggtgtttcgtgaattcacaagcgatgactcattcctaaaccaagttatccctgaaaacatcaccgaattccaagtgactctgtccctcgctagagactacgatggcaacaactcaaccaacggaaagttcattccttactgtgacactgaaaaggtcactcccgaagtgataaaaaaattcaagaaaaaatacgaacccaccgcactgagggttaaggttctcgtcagcattggaaacaaaaac

SEQ ID NO: 269188 - DNA, 411 bp, Glycine max
gctcactcttcttatcttgcagctaggattttagcgcatcttcttgtacacctaacgaagatgtgtaacgaaaaggcacacatcagtattccggttattggccatgtcgtctcttgcaagtgcactaccactgaccacctgatctacatgcttggccgcatcgacaagccgcttatcgagagatttgaaaaagaatctgctgacatgaacaagatgtctttcaagtttgcctgagtgcttgataagctcaaagctgagcgtgaaagaggaatcacagttgatattgacttgtggaagttcgaaaccaccaagtactattgcacagtcattgatgcccctggacacagggatttcatcaagaacatgatcactgagacatcccaagctgactgtgctgttcttatcattgat

SEQ ID NO: 269189 - DNA, 431 bp, Glycine max
tcggccacttcctattagaaccctcgatcactgccacgcgctcctatatcctctccttcaccggcgctctctccaacgatcacaacaacatcgccctcccatggcaaacgccgcatctggtatgggagtccatgatgactgcaagttaaggtttttggagctgaagacaaagaggacacaccgattcatagatcgtaagattgacgagcagcagaagcaggtcattgtggagaagcttggtgagccagcccaaggctatgaagatgtcactgccagccttgctgctgatgagtgccgttatgctgctcatgatcttgagtatctgactgaagggaacgtccctaaaagcagaattcttttcattgcatggtcccctgacacatcaagggtgaggagcaagatgatctatgcaagctccaaagacagattca

SEQ ID NO: 269190 - DNA, 438 bp, Glycine max
tcgtccacgcgtccgctttctctcgtttcaatcgaaaaaaatcatgggcagaaaattcttcgtgggtggcaactggaaatgcaatgggaccactgaggaggtgaagaagattgttactactttaaatgaagctaaagtccctggagaagatgttgtagaagttgttgtgagccctccttttgtgttccttccttttgtaaaaagtttgctgcgccctgatttccatgtctcggcccaaaattgttgggttcgcaaaggtggtgcttatactggagaggttagtgctgaaatgcttgttaatttgggaattccttgggttattattggtcactctgaacggaggcagcttttgaatgaatcaaatgagtttgtgggagataaagttgcctatgcacttcaacaaggtctgaaagttatagcatgcattggggaaactct

SEQ ID NO: 269191 - DNA, 437 bp, Glycine max
tagccattggagctgccatttctcctgtctcttcttatgatggcaaccaatatgacatcacaatcctcatttggaaggatccaaaagtggggaattggtggatgagttttggtgacaacacattggtagggtattggcccgcagagctattcacacacttagcagaccacgccacgatggtggagtggggaggagaggttgtgaactcacgaaccaacggccaacacacctttacccaaatgggctctgggcacttcgcagaagatggtttcggaaaagcaagctacttccggaaccttcagactgtagacacggataacaatctgagttctgtgcagggcatctcaaccttagccgaaaatacaaactgttacgacattaagagctactacagcaacgaatggggcacctacttctactacggtgggcctgggaac

SEQ ID NO: 269192 - DNA, 334 bp, Glycine max
ggcacgccgtacgcagttggcaacagtgcactcatacccggaccaatggctatcaagttctagttttgaggaccaaggctcattgttaggccgttggctggatgagcacatccaagatgcacagaacacccttcacaagccacttgtattcgcggagtttgggatttccacaaagagttatggtggcaactcaacaccaagggatcggttattcaacacagtatattctgcaatatactcatcaacaagcagtggcggggctgctgttggtggcttgttttggcaacttatggttcaaggaatggattcttatcgagacggttacgaaagtgtc

SEQ ID NO: 269193 - DNA, 416 bp, Glycine max
aatgccatgcgttcgatatgttccctctcctaatgaacactggctatggtgcccgtactccggaggtgaaatgcgcaagttggaggcttgctgtggaagcacacaacatctttggctttgagaccattcctgaagagtgcgttgaagcaacaaaggaatacattcatggcgaacaatatagatcagactccaaaacagttaaccaacaagcttacttttatgccagagacctcgaagtccatcccaaggacacatttgtgttcagtatagatggcaccgtactctctaatatttcatactacaaaaaacatggatatggggtggagaaatttaactcgaccttgtatgatgaatgggttaacaagggcaatgcaccggcactgcccgagactcttaagaattacaacaagcttgtg

SEQ ID NO: 269194 - DNA, 409 bp, Glycine max
ctcggagatgaagaagggcttgatgcatagctatggcgttgctgtgattgtgttggctttgagtttgtgtttgggttcatcatcggagcaattaagttcacgagaatgcgagaatctcggtttcaccggactcgccttgtgctccgactgcaacactctctccgagtacgtcaaggacaaagagttggtatcggattgtttcaagtgttgcaccgaagactccaacgatgccactaccaaggttacttactctggagctgtgttggaagtctgcatgaggaaacttgttttctatcctgaagttgtaagctttattgaagatgaaaaagatcaatttccatcagttaaagttcaatatgtttttaactctccaccaaagctaattatgctggatgatgcgggtcagcaa

SEQ ID NO: 269195 - DNA, 405 bp, Glycine max
agtttacaaacatttggaatgtgactttggcgaaagcaaatgtcattctcccagcagcataatgcatatgtttcaaagctcgcttttctgcttgcaaccccagggtgattcatacacgcgaagatctgcttttgattcaatgctggctggttgtatacctgtcttcttccatccaggctcagcatatacacagtatacttggcatcttcccaagaatttcacaaagtattctgtcttcattcccgaggatgatattcgtaagaggaatatcagtatagaggaaaggcttagtcagataccccctgagcaagtgaagatcatgagagaagaggtcattagtctcattccaagactagtgtatgctgatcctcgctccaaattagaaactcttatagatgcatttga

SEQ ID NO: 269196 - DNA, 285 bp, Glycine max
tcgcgcacgcgtccgacgatcgcatggaaactagctggatcaaatcagtgctctatattgcaggctgttcaagtacacacccctccggaagttctgcttaaaggaaagccaataactacgttcttcttcaagggcaagtcatattttcgtagaaaaccgatgccggcaaccgggcttgaagggttgcggcaaaagcctctagtagaagacaaacccttgattttatggaacccttattgtggaagggtgaaccaattttcagaatctggcaccccatttccctac

SEQ ID NO: 269197 - DNA, 425 bp, Glycine max
aacggatattaaagacacctctaaagaaggatatagttttgaagagatatgcatcaagaaagaagcgtttgagggagaagagaagttttgtgcaaaatccttgggaacagtaattggttttgccatttcaaagctgggaaagaacattcaagtactttcaagttcctttgtcaataagcaagagcaatacactgtggaaggagtgcagaatcttggagacaaagcagtgatgtgtcatgggctaaatttcagaactgcagtattttactgccataaagtccgtgaaacaacagctttcatggttccattggtggctggtgatggaaccaaaactcatgcacttgctgtttgccactcagatacttctggaatgaatcatcacatgcttcatgaactcatgggagttgatcctggaactaaccctg

SEQ ID NO: 269198 - DNA, 417 bp, Glycine max
  unsure (1)..(417): unsure at all n locations
tcgcccacgcgtacgaggattgcatggaaactagctggatcaaatcagtgctctatatgcatgctttncaagtggcacccctggtgaagttctgcttagaggaaagccaataacttaagttcttcttcaagggcaagtcagattttgtaagaaaaccgataccggtaaccgggctagaggggttgcggcaaaagctgctggtagaagacagccccttgattttatggagcccttatggtggaaggatgaaccaattttcagaatctgacaccccatttccttacagaaatggaactctgttcataagtctgtacatctctctttggcaagagggagagaagaatgttgcaaagcacatagattggattggaaaccttcacaactacatggggggcttatgtgcctagtttcccaaga

SEQ ID NO: 269199 - DNA, 425 bp, Glycine max
ctgacgcgtgggcggacgcgtggggttggaggggttcatagatttagggaatcgattactatactagtaataaattgtacaaaaaataaaaatataaataatataaatataaaaagaacaaacacaaattttatgtgattagtcgcggtatttaaaataaaaaatgaaagtagacaaataaaaaaggaaaggagatgtttgaataaaaataattccccttcaagttcttattttttgagaggacaggacaatatgaatgttttattatgctctatcaacacattaaaaagattatatgatatatctgctgtggaagtaggtcaacatttctattggcaaatagggagtttccaagtacatgcccaagtacttattacttcttgggttggaattgctctcttattggtttcagccattctaattat

SEQ ID NO: 269200 - DNA, 410 bp, Glycine max
gctacctgaaacccttggtcgtctgccaaaggggcatcaggcaaccacattacttgaactcatgacaatcagggcatttcacagcaagatacttcgttgttacagccttggaacagctattggttttcgaatacggcgaggtgtattaacagatattcctgccattctagtgttcgtttccaggaaagttcacaagcagtggctcagtccaatccagtgtctacctactgctcttgaggttcttggagttgtccaaattgaacctgcttgatttaattttggagtttgaaatatttatatatcacaaacaggtttaagttgttatctggtgcctaagatgcatttaaaatcaatgttcaatttgtgaatcaagggcctggtggagtatggtgtgatgtggatgtggtgga

SEQ ID NO: 269201 - DNA, 354 bp, Glycine max
atttttcacaccaccaacacaagatgtttctgcacattgagttcctccttttccttctctcatccacttaccatgccactggccaagacttctgtgtggcaaacctcaaaggtgcagacacccctgcaggctacccctgcaagccacctgctaatgtcacttcagatgactttgtgtacactggcttagctgaagctggcaatgtcacaaacataatcaatgctgctgggaccccagcttttgttgctcaattcccaggtctcaatggccctggactatctgcagcaaggttggaccttggtcctagtggtgttataccactccacactcatcccggtgccaatgaactactca

SEQ ID NO: 269202 - DNA, 429 bp, Glycine max
ggctgtggacgtaaaataatggctctgtcttttggttttgggctcttgtcttcttcttcttcttcttcttctttatgtgttgtccctccatcagaaacccacactttcatgatgaggccttctgcttcttctggtttgcgcatgatgcgtaccagtcgcattacctgttgcaccctttctcagtcttctaagccagcccgcaaaatccgtggtatcatgaaaccccgcaaagtctcccccgagatggaagacctcgtcggcgctcccgagatggctcgaacccaagtcctcaaacggatttgggcttacattaatgacaacaatcttcatgaccctacagacaagaggactataaattgtgatgagaagctgaagaaggtgtttgcagggaaagatcaagttgagatgctagagattgctcgcttgatt

SEQ ID NO: 269203 - DNA, 434 bp, Glycine max
cccacgcgtccgcccacgcgtccggtccttgttttcttcgttgctacaattttggtagcatggcaatgccatgcgtacgatatgttccctctccgaatgaacactggctatggtgcccgtactccggaggtgaaatgcgcaagttggaggcttgctgtggaagcacacaacatctttggctttgagaccattcctgaagagtgcgttgaagcaacaaaggaatacatccatggcgaacaatatagatcagactccaaaacagttaaccaacaagcttacttttatgccagagacctcgaagtccatcccaaggacacatttgtgttcagtatagatggcaccgtactctctaatattccatactacaaaaaacatggatatggggtggagaaatttaactcgaccttgtatgatgaatgggttaacaagggcaa

SEQ ID NO: 269204 - DNA, 217 bp, Glycine max
atctcttattatagccaccgataaagaatgttttaattcagaacagctattcttcaagcaagaagccatcatgggggattagagctccagtccaggatgcccgctaaccaatactgggcttcccacttaaaatcggtgacaaaacattcaagtacttttaaattcccatagtaattatcactagcaaaacactgcggaagaagggcataaaccttca

SEQ ID NO: 269205 - DNA, 426 bp, Glycine max
aaagatatcacataggcatatggcttccaccttttgttgctcggacgaccatgctgtgcaccatcacagccagatactcatcacatcacatcatggttagcaccaatccttaccagcttctttgagaggcacaaaacacagaggatattgatgtcagcccaatctctcaccggattgctctaaccgtgctcattggtgctgctgctgttagctacaaagttcaacctgctgatgcagcttatggagaaaccggcaatgatgttagttaaggctattacaaacacatatttcctgccatacaatggagatggattcaaactatcaattcgctcatagtggaacccaagcatataggtttaatacacaagtcaggttgttagatatgaggataactttgattcaaccaccaacgtggttgtcaacatc

SEQ ID NO: 269206 - DNA, 344 bp, Glycine max
ggagaagctaatggcttcctcaatgatctctttcccactcttgggactgtaaaccgggccggtggcggcatggttgctccattcactggcctcaagtccatgggtggcttcccgacccgaaagaccaacaatgacattaccttcattgctagcaacgggggaagagtgcaatgcatgcaggtgtggccaccacttggcaagaagaagttggagactctttcctacctgccagaccttgatgatgcacaattggcaaaggaagtcgaataccttcttatgaagggatggattccttgcttggaattcgagttgcaacaccagctccatgttccgtgagcacaaca

SEQ ID NO: 269207 - DNA, 411 bp, Glycine max
gcagcaactccactcaattgtatgcattgatccatggctagatacattaatattgtacttttgggaatagtgttggtagtggtgagattgaaaggtgcagaggcacagcgggcgttctttgtgtttggggattctcttgtggataatgggaacaacaactttttggcaactacagctcgagcagatgctccttcttatggcattgattacccaaccggtagacccactggccggttctctaatggctacaacattcctgacttcattagtcaatcacttggggccgaatccacattgccttatttagatcccgagctcgacggggaaagattgcttgttggtgccaactttgcttctgctggtattggaattctcaatgacactggaattcattttgttacttaatccgaa

SEQ ID NO: 269208 - DNA, 438 bp, Glycine max
ctctgccactgccataactcactcactagcttcttctctgttctcaccaatggcatcaacaatatcagcaatggccatgatcaacgccaaatgcgtcaacccaaagttccccaatcccaccaagctcgcaccatcaaaaccctcccttcagatcaaccttccaaagggcctcatagcctcacccgaaagcactaaactttcccccgcgacagcaatcgcaggagcaatattcacaaccctcggaacctgcgacgccgcattcgctgttcaacaaatagccgacatagcagaaggcgacaaccgcggactggcactgttgctgcccataatcccagcaatagggtgggttctgttcaacattctgcagccggcgctgaaccagctgaaccgaatgcgcagcaccaaaggcgtgatcattggcttggggcttggcggctt

SEQ ID NO: 269209 - DNA, 430 bp, Glycine max
  unsure (1)..(430): unsure at all n locations
cttggcatttccgcagcacgtttggacttatcagcaggtggagttataccacttcacactcatcctggagcttcagaattacttgttgtaattgaagggagcatcctagctggattcatttcttctgccaacattgtctacctcaaaactcttaagaagggggatgttatggcattccctcaaggcttgcttcatttccaaatcaatgcaggcaaatcttcagccctggcaattgtaagcttcagtagctccaatcctggtctacaaattctggacttcgctttgttcaaaagtagcttccccacaccattgatagtacaaaccactttccttgatgctgctctggtgaagaagcttaagggtgtacttggaggctcangctaaaccatgggaagttatccatgaaagagactgaagtcaagcaagcata

SEQ ID NO: 269210 - DNA, 430 bp, Glycine max
ctgttaccaatggctccctcatcaaactacatttctttccttttcctcaccacccttttgtttgctcttcaaatcagtgcaagagacagccagttcttcagcaaagtcacccattttgacaaaaacagtgtcaaagagacagaacttcccaacaaagaagcaccagaagtgaacaagccagagcaacaaccacctttcattccggagactgaaaacagctatggcctatatggtcatcatgatgagtataaccaagtcccttccaccaccaccaaccccacttcttaccacccctacaagaccgagtttgagaactccaacaacaagtattacaacaatgatgcctataacacaaggttctccgaaaccggttacaacaacaacaaggattcttatgagggtaaccaatatgagttaagtgacacaaagt

SEQ ID NO: 269211 - DNA, 410 bp, Glycine max
gcaacgcaaactcatatatggtttggcttctatgcgaagattgcggagacaacctcaaaaagcccaggttgtctagtcacttccgaacttgctctgcctacaaattgtcgtgcattgactgtggggaaatatttgggcgtgataccgttcaggatcacacgcagtgtatcacagaagcggagaaatatggaccaaaaggccaaggaaaaacttttaacgttgcaactgccaagcctaataaggatagcaagcaaaggcctgaagttgatattaatgtggggttatctgatcggcctccttggttctgtagtctctgcaatacgaaagctacaagtaagcaaacacttctttctccatgcggatggaaagaaacacaggtcaaaagctagagcatttcattgctttaaagc

SEQ ID NO: 269212 - DNA, 365 bp, Glycine max
cccacgcgtccggcacgtacgaagcaaactgctcgtaagtccacaggaggaaaggcacctaggaagcagctcgcaaccaaggctgcacgtaagtctgcaccaactactggtggtgtgaagaagccacatcgttatcgtcctggtaccgttgctcttcgtgagattaggaaataccagaagagtaccgagcttttgatcaggaagctccccttccagaggctggttcgtgaaattgctcaggacttcaagactgatctgcgtttccagagccatgctgtgcttgcattgcaagaagctgctgaggcataccttgttggactctttgaggatactaatctgtgtgccattcacgctaagcgtgttac

SEQ ID NO: 269213 - DNA, 413 bp, Glycine max
cgtacgggaggcttttacattgaagtggattctgcatgactggagcgacgagcactgcgtcaagatcttgaagaactgcaggaaggcaataccatataaaacagggaaagtgatcatcgttgatcacgtgctgcggcccgaaggcaacgaactcttcaccgacgttggcattgcatttgacatgatgcttctcgctcacaacgccggcgtgaaagagaggacggaagagaactggaagtggctgttcaaagaaacaggcttcgcccgttacaacatcatcaagatcaacgctcttgcttccatcattgaagcgtttccaatctaacgtagaggaagccactacacttcatgtgcgtggttttatgttgcatgtgtcgttattattattaacagctatgtgatcttcgtgtgat

SEQ ID NO: 269214 - DNA, 347 bp, Glycine max
ataccgctcgccttatgtagtttgaagtcttttgtttgtgattcacgtcattgatacagttcttgttattattgtggttctaatgctatgtttcttgcctttatgaatagataattttttgttattaaaaaaaaaaaaagagaataaagtaaaaaaaaaaataaaaaacaaaaaaaaaaaaataaaaaaagaataaaataaaataaaaaaaaacaaaaataaaccgggggggccgttttaaatgaaccaagttatcctacgcttcaatccgacgcaataacttttttataggggaacataaataaaattacctggccggctttttaaaccttctaaactggaaaaac

SEQ ID NO: 269215 - DNA, 310 bp, Glycine max
catcagctttccagggggcaagtgactgtcctatccaatgttgcttcttgctgctctctctgggggaacaactgtggtatacaacctgttgtatagtgaggatattcatcacatgctttgtgcattaaagacccttgtactgcgtttgggaaactacaaatcatccaaacaatcaattgttgttgggtgttgtggatcgtttcccactactcaagtatgttaagatgaaattaacttattccttaggaatgctgcttctgcagtgcgaactttgacagcatcttcggtttctgcacgtggaaatgcaagc

SEQ ID NO: 269216 - DNA, 432 bp, Glycine max
aagcagctatgaagtgggatgaagatgttcttggacttggatatgacctggatctcttcaatgttgttgctgtcccagattctaacatgggagccatggaaaacaagagcttgaatattttcaattcaaagcttgtattggcctctccagaaactgcaactgatgcagattatgctgcaatattgggagttattggccatgagtatttcacacaactggactggcaacagagtgacatgtcgcgattggttccagcttagcctgaaggaaggtctcactgtttttcgtgatcaggaattttcatctgacatgggaagtcgtactgtaaagcggattgctgatgtttcaaaacttagaaattaccagtttccacaggatgcacgtcccatggcccatccagtgcgaccacactcttacatcaagatggacaac

SEQ ID NO: 269217 - DNA, 408 bp, Glycine max
tcgtccacgcgttcgctagaaacagtgtgatgaaaatgaaggtccttgttttcttcgttgctacaattgtggtagcatggcaatgccatgcgtacgatatgttccctctccgaatgaacactggctatggtgcccgtactccggatgtgaaatgcgcaagttggaggcttgctgtggaagcacacaacatctatggctttgagaccattcctgaaaagtgcgttgaagcaacaaatgaatacatccatggcgaacaatatagatcagactccaatacagttaaccaacaagcttacttttatgccagagacctcgaagtccatcccaaggacacatttgtgttcattatagatggcaccgtactctgtaatatgtcatactacaaaaaacatggatatggggtggaga

SEQ ID NO: 269218 - DNA, 423 bp, Glycine max
aagacggtgaccgtgtttccgttaccttgcgcgggccgaagacgccgacgccgatcacctaccgcgtgccgatggcctccgcacaggtgaagtccgccgtgctgctcgccggcctcaacacgcccggcatcacgacggtcatcgagccgatcatgacgcgcgatcatacggaaaagatgctgcagggctttggcgccaaccttaccgtcgagacggatgcggacggcgtgcgcaccatccgcctggaaggccgcggcaagctcaccggccaagtcatcgacgtgccgggcgacccgtcctcgacggccttcccgctggttgcggccctgcttgttccgggctccgacgtcaccatcctcaacgtgctgatgaaccccacccgcaccggcctcatcctgacgctgcatgaaatgggcgccgaca

SEQ ID NO: 269219 - DNA, 423 bp, Glycine max
gaaagagatcacatagcagaatggcttctactcaatgtttcttggaccaccatgctcttaccacccctgccagatccccatcacaacgcatcatggttagcaccaagcctaaccagcttgtttgcaaggcacagaagcaagaggatattgatgtcagcccaatctctcgccggttagctctaaccgtgctcattggtgctgctgctgttggctccaaagtccaacctgctgatgcagcttatggggaagctgccaatgtgtttggaaagccaaagacagacacagatttcctgccatacaatggagatggattcaaactatcgattccctcaaagtggaacccaagcaaagaggttgagtacacaggtcaggttgttagatatgaggataactttgattcaaccaccaacggggttgtcacca

SEQ ID NO: 269220 - DNA, 400 bp, Glycine max
ggtcactgacctatcttggtagagatttgaagtttaaaccttcaaattaatcaaaccattttaatttgcctttagattctgagtcactgctgctatggcgctacgcgtacttcttgtgttggggatgttgctgatgttgtgccttgttaaggtttcatctgatccaaagatagaagaagaaatactggaagcagaagaagaactgcagtttcccgataacgagccacttatcgtgagagacgcgaacagaaggctaatgcaagatatggattgtggtgggttgtgcaagacgaggtgcagtgcacattcgaagcccaacttgtgcactatggcgtgtggcacgtgctgtgtgaggtgcaagtgtgtcccacctggtacatctggaaataaggaactatgt

SEQ ID NO: 269221 - DNA, 435 bp, Glycine max
tccacgcgttcgcccacgcgtccgggtgattgtttgattgagccttgaagaaatggaccacagcgctgatgcacatcgcacggacttgatgaccataacgcggttcgtgctgaacgagcaatccaagcaccccgagtcacgcggcgatttcaccatcttgctcagtcacattgttctcggttgcaagttcgtttgttccgctgtcagcaaggctggtcttgctaaacttattggactcgctggagaaaccaatgttcagggtgaagaacagaagaaactggatgttctttccaatgaggttttcatcaaggctctcataagcagtggccgaacatgcatcttggtttctgaagaagatgaagaagcgataattgtggagccttctaagcgcggaaagtactgtgtttgctttgacccattggatggctcgtccat

SEQ ID NO: 269222 - DNA, 419 bp, Glycine max
cgcacgcgttcgcccacgcgtacgcgcacgcgttcgagagagagagagagagggcgcggagaatgttaagtctctcagctgcgtctccgtcttctgtaaccatatcctttcttccagagccattcaatgacattcagctccggcgctctgccacatgctccattccacccacgatatgcatcgcttcggggccagtggtgatgatgtctaaaaagacagacgaattgaaggaaattagacaaatgaccaccgcacaaattaacgaagagggtgtcgaccttaaaggcgagcttgtcatgcttcgccttcagaaatcggctcgcaacgagttcaagtccagcgaattcggtcgcatgcacaagatgattgctcgcatgcttactgtgaagcgggaaagagacattgaggagggtatcaat

SEQ ID NO: 269223 - DNA, 427 bp, Glycine max
  unsure (1)..(427): unsure at all n locations
cccacgcgttcgatggcctcttcagtgatggcatctgtggccctcaaacctgcccctttcactgttgagaagtcctcagtttgaggccttccctccctctcaaggaactcctcttcattcagagttgtggccagtggtggcaagaacatcaagactgacaagccttatggaattaatggtggcatggctttgagggaaggagttgatgcatctggcaggaaaggaaagggaaagggcgtttaccagttcgtagacaaatacggtgctaatgtcgatggttacagtcctatctactacaccaaggactggtctccaaccggtgatgtctacgctggcggtacgactggcttggctatcttggctgtgactctacntggtcttcttgctggtggggcacttcttgtctacaacacaagtgctttggcgc

SEQ ID NO: 269224 - DNA, 159 bp, Glycine max
gcgaggctatccttgaggattaaaaatggcatctgcctggcccagggctctatctttccaatccttgggtggcaaggccattaaacttgtcccatcttcccccgaagcccgtagggtctgcctgaggaagaccgtcaccaagcgtgccttctaccggag

SEQ ID NO: 269225 - DNA, 418 bp, Glycine max
atggatagcatggaaaaggtgtttccttatttggttcagaaaaaacacaaagaagggcaagaaatacgaagggtagctcagtgttgctggaacataattgctgatgattgtaatctgccattttctgcatcaggcttaaaatttattcctttgccagtaatgcatggagaggattatatctgtttgggtttcctttttggtgagaaagatagggtggcttatatatctgatgtttcacggattccagctagtacagagtatgtcatttcaaaaagtggggctggacagttggatcttcttatattggatacactgaaaaagactggatcgcataatgttcacttttgtcttccacaggctcttgaaactgtgaagaggttatgtccaaagcaaaccctattgattggaatgactcacg

SEQ ID NO: 269226 - DNA, 423 bp, Glycine max
gtcattcctgtggaaattacagtctacgacgataaaagctttactttcatattgaagaccccacctgcttcggttctacttcttaaagccgctggggtggaaaagggttcaaaagaccccaaggcggaaatggtaggaaaggtcacgattgatcaattgcgtacaattgctgctgaaaagctaccggacttgaattgctcgagtatcgaatcagctatgagaattatagcgggcactgcggcaaacatggggattgtggttgatcctcctgttcttgaacccaaacagaaggaatttgtgtagagaaatttcagtttggccgagtgtaaaatcgcgcaggacatatttactgacttgttttgtcttctaaacagcaagggaaaccagtctttttagttatttggtatttgcatgaatgatatt

SEQ ID NO: 269227 - DNA, 422 bp, Glycine max
gttgttgtggctgatgatgaggtagatgatggtgctggtttaggtgaagaagagaaagtggaggagaatgaaggagaagtagttgcagaacaagactctgattcctctgccaccaagctttattttgggaatttgccttatagtgttgatagtgccaaacttgcagggctaattcaggattttggtagcgcagaactaattgaggttctttacgacagggatactggaaaaagtagaggctttgcatttgttacaatgagttgtattgaagactgtaatgcagtaatagaaaatcttgatggaaaagagttcctgggcagaaccttgagggtgaacttctctagcaaaccaaaaccaaaagaacccttgtaccctgaaactgaacacaagctttttgttgggaacctgtcatggtcagtaac

SEQ ID NO: 269228 - DNA, 349 bp, Glycine max
atcaaccgcgccctacaatcactttgggggcttggtgttgctggatcgggcacaacctacttttgcctcgctgaaccaagtaataagaatctaatacaatgtgttgttgacaacccatcaactgtctggcttgtcggtcctacttttgctgccttgacaggacttgtctttaaggaaggactctgctatgccaagcttgaagctggacttctcacctttgttattaccatacttcttcttggcatctgactggcttgatggatgacggagtttagcttactttactcgcttcgtggatgactctttttgtgatgtttgctgtaacgaaattcacccagcccatcaagga

SEQ ID NO: 269229 - DNA, 441 bp, Glycine max
cccacgcgtccgcccacgcgtccgggaaaacaaagtatagagtgaaagaatgggtgagaaaagcaagattttgatcataggaggcaccggctacatcggcaaacatatagtggaagcaagcgcaaaggctggaaatcccacttttgctttggtgagggaatccacactctctgacccctccaaggcacaactcatccacaattttgaggctttgggcgttaatttggtccgcggggatctgtacgatcatgagaagttggtgaaagctatcaagcaagtagatgtcgtcatatccacgctgggtcacctgcagcttgccgatcagctcaagatcatcgctgccattaaggaagccggtaatgttaagaggtttttcccttcggaattcggtaacgacgtggatcgtgtccatgccgtgggaccagcaaaatctgcattagc

SEQ ID NO: 269230 - DNA, 421 bp, Glycine max
ataacataacatccttaaccctttgaacatcgttttgcagccatggaaacaggcattgcgtgcttcactcgcgggcctttcttgcctagtgcttcttccaagcactctccaccttccatttctgcatcttttggcttgaggagtctgaaatcaagctctttatttggagaatcgctaagagtggcctccaaatcaacaataaaggtttcaaagacaaagaatacttcactcgtgaccagatgtgaaatcggtgacagtctcgaagaattcctcacaaaagcaacaccagataaggggttgatcaggttgttggtgtccatgggagaagcattgagaacaatttccttcaaagtgaagacggcttcatgtggtggaacacaacgtgttaatacttttggggatgagcagctcgcagtggatt

SEQ ID NO: 269231 - DNA, 419 bp, Glycine max
tgcagtattttactgacataaagtccgtgaaacaacagctttcatggttccattggtggcgggtgatggaaccaaaactcaggcacttgctgtttgccactcagatacttctggaatgaatcatcacatgcttcatgaactcatgggagttgatcctggaactaaccctgtttgccatttccttggaagcaaggccattttatgggtacccaatatatctatggacactgcctatcagactaacgttgttgtttaattagtccatgcatctgcatcttgggcaccataagattgtatataaaataaattatggtgtgttgtgtatgttgtgcaagacctggaactttacctttctacgtacgtgtgctgttaggatgcagtgtgctctgatgatgctttgatgaatatgcagcgtgctt

SEQ ID NO: 269232 - DNA, 384 bp, Glycine max
ctcacactgtgtttggagcagaatcagatcgtgtgttccgtacgttcgttcgttcatttgcagtgtcaaacatggcgtctcagatgagcaagaagagaaagtttgttgcggacggagtgttcttcgccgaactgaacgaggttctgacacgtgaattggcggaggacggttactccggcgtggaagttagggttacgccgatgcgcaccgagatcatcatcagagccaccagaacccaggctgttctaggtgagaagggaaggagaattagggaacttacctcagtggtgcagaagaggttcaaattccccgaaaacagtgtcgagctttatgctgagaaggtcaacaacagaggcttgtgtgccattgctcaagccgagtcgc

SEQ ID NO: 269233 - DNA, 423 bp, Glycine max
acggaccttacccatcctttgaacagcttgggtaatgggaatatattggtttggaaaaggaaggctgagcaatatctggctgattccggcatcccatatacaattataagggctggtggcttgcaagacaaagatggaggtcttcgggaactacttgtaaggaaggatgatgagcttctccagactgaaaccagaaccataagtagatctgatgttgcagaagtctgcattcaggcactaaattttgaggaggctaaattcaaggcatttgacttggcatcaaaacctgagggagcaggttcagcaacaaaggatttcaaggctttattttcccagatcaccactcgcttttgatttttgaatgttgttgtcatggtcccaaaatccttgtggattgaaccatatgggtattagtgctatctg

SEQ ID NO: 269234 - DNA, 424 bp, Glycine max
gcttcatgccaaaaagctcttttccttctaaatttgattccttagttcagcattctattattatatatggcttcttcaccttgctcagaaaacaaaaacctatagggagtagctggtggtgccggagagaaacccattccacttggtgagaacgttctgcagaagcatgctgcattctttgacttgaataaagatggtgtcatctacccatgggagacttttaaagggttgcgtgaaatcgggactggggttttgctgtccgttggaggtgctattttcatcaatgtgtttctcagtcagagtactcgtcccggaaagtttccatctatactttttccaattgaaattaaaaatatccaacgcggcaaacacggcagtgacactggagtctacgatactgaaggaaggtttgtaccttcaaaat

SEQ ID NO: 269235 - DNA, 397 bp, Glycine max
agtaaactaacgcaggcaggaagagtgagcgcgctagatgccttgggtgaggctttcagagtctccaaggctcgacgttgctattgacatgggtaatccatttctcaatctcactgttgatgggttccttaagatcggagctgtcgcagccacgcgatcagctgctgaagatacttatcatattatccaacaggggaatatcatcccttcctggtcaagctctgatgtcgaggagttcattgcttctgatcctgttcatggacccgtcctgaaaagtgctagagaagcagtgcaatttggcctcacaggaagtgctttgggagcattatttactgcaggctatgcctggaaatattcaaagagtttacatggcgcttgactgtcacttttagctgga

SEQ ID NO: 269236 - DNA, 341 bp, Glycine max
tttgtctttgcacaaaatcaaaccctccccagtgccaatgtgtagatgggagcgagacaggctgccactcatgttgcaaaaattgcatttgcaataagaaatttcctcggacgtgtttttgtggagatataaccaacttctgctatgacaaatgtaactcaactgaagccaattaaagctcactagctaggaatatgaatgagcatgtttccataaataagttgtgaggcaaagcccctttaggctttgtctacttgtcttcgtgcatgtatgcatgcaaataaattactatttcaataaataaataaataaaaactacttggctaagaatttactttctc

SEQ ID NO: 269237 - DNA, 260 bp, Glycine max
aaaaaaaaaaaaataaaaaaaaaaaaaaaaataaaaaaaaaaaaagggaaaaaaaaaaaaagggaaaagggaaaaaaaaaggggggccgaatataatattttctaaacttaaaaccacatgcattcacacgtcattagtcttacatcgtgttggctgggttcatttatgtgtgcacgcgttttacaaccgctttactggaaaaaccctttcttttccaaccttatatagctttgatcacagcccccttttcccacctgcc

SEQ ID NO: 269238 - DNA, 385 bp, Glycine max
accctacttctacttcccccctttgctctcaaaccttatcacctaatccttatcctcccaaaccagaaaaccatgtctacctgcgcagcttccctcgcactcccaaccctcactctccgaacccgacaacctctatgttctccccaatgcttctcctcgtccctctccctcacacccaacaacaaacccatttccatttctgctggttttctcaaaccaacaactctgtcgtcgtctcgcttcgttccccacgtcgtggtgtcgtcggatttggggcaggaggaggacaccttcagtgacggagacggccccagcttctcccccgaccttaagctctttgtcgggaatcttccgttcaacgtcgacagcgcgcagctcgcggagc

SEQ ID NO: 269239 - DNA, 450 bp, Glycine max
acgcccacgcgtccggatcgagataactagaaacagtgtgatgaaaatgaaggtccttgttttcttcgttgctacaattttggtagcatggcaatgccatgcgtacgatatgttccctctccgaatgaacactggctatggtgcccgtactccggaggtgaaatgcgcaagttggaggcttgctgtggaagcacacaacatctttggctttgagaccattcctgaagagtgcgttgaagcaacaaaggaatacatccatggcgaacaatatagatcagactccaaaacagttaaccaacaagcttacttttatgccagagacctcgaagtccatcccaaggacacatttgtgttcagtatagatggcaccgtactctctaatattccatactacaaaaaacatggatatggggtggagaaatttaactcgaccttgtatgatgaatgggt

SEQ ID NO: 269240 - DNA, 332 bp, Glycine max
ctccctctgcgcatacactgtgctcgcagggtttatacaccaagagggaaatgggtgccgagccgactatttcgggtgggtgggttggactggacaaaggttacgtcgtcaccaacaaagaattgccttcacacccctcacatcgttaggggaaaacaagcaatatggtgcactatgtgcggaaccttatatgagatggagccggatttgcaccctatgaatagcgtctaactcagttggtgaatgatgagaacgataaaacggcactcgacgttgcaaaaagaaagctcggtacacacacacgcgcaaataataagcatgaggaaatgtcc

SEQ ID NO: 269241 - DNA, 421 bp, Glycine max
cccacgcgtccgcccacgcgtccggttgaaaactaagaacaaagaaatggcttccgcaacggtctcctccacagctggtaccgccggcaaccgtgccggtgccggcatggaggctacattcaccggcctcaaatgcaagggtggcttccccacgaggaagaccaacaatgacattacctacattggtagcaacggtggaagaggacaatgcatgcaggtgtggacaccaattggcaacaagaagtgtgagactatttcctacttgccagacctggacgatgcccaattggcacaagaagttgaataccttctaaggaaaggatggattcctcgcttggaattcgagatggagcacggtttcgtgtaccgtgagcacaacaggtcacctggatactatgatggacactactggaccatgtgg

SEQ ID NO: 269242 - DNA, 440 bp, Glycine max
cggatacctcgtttgtgcgccagttccagtgtgtgcaaagtgcagtgatagaaagctagcgcgctagctagggttagggtgggggttaaggtttctgcgtttatgcgaagatgactaacttcaggaaattgggtcgacccaccggtcaccgaatgtccatgctcagaaccatggtctctcagttggtgaagcacgagcgcatcgaaactactgtcgccaaggcgaaagagatcagaagactcgcggataatatggtgcaacttggaaaggagggatcccaacatgctgcgagacgtgctgctagttttgtgcgaggagatgatgtccttcacaagctgcttacagaactggcttatcggtacaaggatagagctggaggatacaccacattgcttccgacccgtattcgaatgggtgatgctgcaccgatggcctatatt

SEQ ID NO: 269243 - DNA, 443 bp, Glycine max
cccacgcgccggcaaaaatggcatcattcaccatgacagcttccatccttggcgggccagccgtcaccaaccggttgggagtagcaacgcagaggagatcactcgtagtgaatgctgccaaagctgttgaagcggaaaaggtcagttatgacaatgacatggatggtagcaatggaaggaggaacttgatgttcgccgcggcggcggcggctgctgtttgctctgttgctgggatggcagtggcagatgagccaaaaccaggaaccccagcagccaagaaaaagtatgctccgatttgtgtcaccatgccaactgctaggatttgtcgcaattgagggactcggtttttattttacttctgatgatcggaaatgtgcattagggttgtagtaatgttttgatttcacatgatcctcactgtactagatgttcataaaactatc

SEQ ID NO: 269244 - DNA, 391 bp, Glycine max
gtggttgtgaacaagttcaaacccaagaccccttacgttggtagatgcctgctcaacacaaagatcactggggatgatgctccaggagaaacttggcacatggtcttcagcaccgagggagagattccttacagagaaggacaatcaattggggtaattcctgatggtgttgacaagaatggcaaacctcataaactgagattgtattctattgctagcagtgccattggtgattttggagattccaagactgtttctctatgcgtgaaacggctagtgtacacaaatgaaaatggagaaattgtcaagggagtctgctcaaatttcttgtgtgacctgaagccaggagctgaagtaacaataactggacctgttgggaaagaaatgctta

SEQ ID NO: 269245 - DNA, 405 bp, Glycine max
gttataacctgtttccagagtccaaagtgtctagttccaccgagccaaaccaaaccaagggggcagcagcctcagccttatccatgatatcaacaccagactgatatccaaccatccaaaagcaccatcatttgaagccatccaacgcgcgcttccaaggtcttacacccctcttacggttcaccaaatgctcattaaccaaagtgagcaccaccaccaaaagggttattccaaagggtggggttagagctgaactcaactcagcccttgtgataagcctcagcactggactctccctcttcttgggaaggaatgaggtcttcaacttccaaagggagaacgcggcacagcaagtgcctgagcagaaccgcctcacacactgtgaggctggtgatacacgtgcca

SEQ ID NO: 269246 - DNA, 433 bp, Glycine max
cccacgcgtgcgtccacgcgttctaacacattaacccttctcattccccatctacgcaccggattcagccactgctgattgcgagggttccgaaatggacgctggcggaaagatcaagaagggcgcccgaggaagaaagggcggtggacctaataagaagcacgtttcaaggtccggcaaggccggtcttcaattccccgtcggaagaattggcctgtatttgaagaaaggaaggtacgcccagcgtggcagtacccgtgctaccgtgtacttggccgcagctcttacgtgcctaactgctgaggcgcttgagatggctgggaatgctgcacgtgacaaccagaagaacaggattattccgagacatgtgctattggctgtgaagaacgatgaagagttgaggaaattgcttgctggagtcaccattgcacat

SEQ ID NO: 269247 - DNA, 268 bp, Glycine max
  unsure (1)..(268): unsure at all n locations
nccacgcgttcgnccacgcgtncggacgccataagtaagagcaagtcgaaaagttcctctgtctctgacacacacacatgccagccatgagcctcttcggtataggcagaaaccagagaacattccgcccgaaaaaaagtactccttctggaagtaagggagctcaacttcgaaaacatattgatgccacgttaggtagtggaaatctgagggaagcagtaaagctacctcctggggaggatttaaatgagtggctagctgtcaacac

SEQ ID NO: 269248 - DNA, 444 bp, Glycine max
cacgaaatgaattagcgttgccattctcatcctcctctgtctctctctctccaccattgccatggatccttacaagctccggccatccagcgccttcaattctcccttctggactacaaattctggtgctcctgtttggaacaacaactcctctttaaccgttggagctagaggtccaattctgcttgaggattatcatcttgtggagaagcttgcaaactttgacagggaacgtatcccagaacgtgttgtccatgccaggggagctagtgcaaagggtttctttgaggtcacacatgacatttctcacctgacatgtgcagatttccttcgagcccctggagttcagacgcctgtaattgttcgtttctcaactgtcattcatgagcgtggtagccctgaaaccttgagggaccctcgaggttttgccgtgaagttttacac

SEQ ID NO: 269249 - DNA, 447 bp, Glycine max
  unsure (1)..(447): unsure at all n locations
gcaaaactctgctttttcggattccgatcgcacgcgccgtcaccatggtgaacgttccgaaaacaaagaagacatactgcaagagtaaggagtgcangaagcacacgctgcacaaggttacccaatacaagaagggtaaggatagcattgctgcccaaggaaaacgccgttatgatcgcaaacaatccggttatggtggacaaactaagcccgtcttccacaagaaggctaaaaccaccaagaagattgttctgaggttgcaatgccagggttgcaagcatgtcttccaacacgctattaagaggtgcaagcactttgagattggtggtgacaagaagggcaagggaacatcactcttctagtttgagaattaggatttagagctttatgtttcagcaatgttggaatgttttgtttctctctggattttttctgctagttatattt

SEQ ID NO: 269250 - DNA, 299 bp, Glycine max
gatcgagataactagaaacagtgtgatgaaaatgaaggtccttgttttcttcgttgctacaattttggtagcatggcaatgccatgcgtacgatatgttccctctccgaatgaacactggctatggtgcccgtactccggaggtgaaatgcgcaagttggaggcttgctgtggaagcacacaacatctttggctttgagaccattcctgaagagtgcgttgaagcaacaaaggaatacatccatggcgaacaatatagatcagactccaaaacagttaaccaacaagcttacttttatg

SEQ ID NO: 269251 - DNA, 450 bp, Glycine max
cccacgcgtccgatggactgggtatgacgaatcaacgtgccgatacatctgaaacagaagtgtcttggatggccaagggatcgtccttaactaatacgttgatctgcgccgccaccgtattggtggcgatgagtccgtggccgacagccgtgggcggcggggaccaccacttgggaatgggatgggtttccagcacgtgcaaggggaccattgctgagtgcctgggaggggaggagtacgagttggattcggagatcaaccggcgcatcttagccaccaacaagtacatcagctacgttgcgctgcagaagaacactgctccctgctctcgccgcggcgcctcctactacaattgccgacccggagcacaggccaatccttacaaccgtgggtgcagcgccattacgaggggcaggagctgaatttttcctttctttaaaattttttttt

SEQ ID NO: 269252 - DNA, 442 bp, Glycine max
atttccttagcagatgtctatcatgtagtcactgccactgttccattatatgtcaccatgtttctagcctacatctctgtgaaatggtggaagctcttcacaccggaacaatgttcaggcataaacaaatttgtggccaatttctcagtcccaattttgtcattccaagtcatttcttccaataacatttacaagatgagcctcaaactcgtatatgccgacgttgttcagaaattgcttgcatttttagtcttcacggcaatcattaggatcaaggacagggggggtttgaagtggatcataactggtctctcactatcaacacttcccaacactttgatcctaggaatcccactcatgaaggctatgtatagggatgaagcttctcttctcctaccccagattatcttccttcagagcatggtgtggtacaatttgttat

SEQ ID NO: 269253 - DNA, 405 bp, Glycine max
ccgacgcgtgcgcggtcttgtcttcttcttggcgccgaggctgtctaagccccaatcctgcgatggatttattggtctggtgaacagtcccttaaaggacacgtctttccaaaccgtggcgattgagttcgatactttctctaacaaaaaatgggatcctgctaaccgacacatcctcattgacgtgtactcgatcaagaccgtcaaaacggcatactcggggttgtgcaatggacacgtagcggaaattctcgtcacctataatgccgacacgagcctattggctgcttctctgatccacccttcaatgtaaacaagttacattctctctgacacagtgaacttgaagagtaatcttaccgaatgggtgagcgttggcttctatgtcaccaactaattgcatga

SEQ ID NO: 269254 - DNA, 439 bp, Glycine max
gcggctgctacttcggctccatcttctccgatctcctcaaactctatcagcgcagaaccaagcctctatcaccatggggaagacacatggaatgggagctgcccgcaagctgaagtctcaccgtaggagacaaaggtgggctgacaagtcatacaaaaagtctcatctgggaaatgaatggaagaagccttttgctggttcatcccatgccaagggtattgttcttgaaaagattggtattgaggctaagcagcccaactctgccattcgaaaatgtgccagggttcaactcatcaaaaatgggaagaagattgctgcatttgtgccaaatgacggttgcttaaattatattgaagagaatgatgaagtcttgatagctggatttggacgaaaaggtcatgccgtgggtgatattcctggagtcaggttcaaggtcgtg

SEQ ID NO: 269255 - DNA, 445 bp, Glycine max
  unsure (1)..(445): unsure at all n locations
gactcacgctggcagactacaacattcaaaacgagtctacccttcacctagtccttcatctgaggggaggtatgcagatctttgtggagactttgacaggaaaaactatcaccttggaggttgaaagttcagacacaattgataatgtcaaggcaaaaatacaggacaaggaaggtatccccccagaccaacaaatgttgatctttgctgggaagcaactggaggatggaacgactcttgctgactacaacattcagaaagagtctactcttcacctatgcttgcgtgttcgaggtgggttttgagtttgagaatggtctgcacgtaccttgattggtgtgaactgaattatgtgatagtctataatctggtcttttctttttttatgttactgaactctgtgtgagtgagcatncaacgaccattagcggaccttgaaagctat

SEQ ID NO: 269256 - DNA, 446 bp, Glycine max
ctcgttcgagtttgtgtttgtgctatcttcttcgctcttcacttttgttgtctaacatggctttggtgaatccgggtgtggtaccactcgaacgtccctccctctgcgagtttcaggtccaccaaaccaagtcctaccacgttggactctctgctcccaatattcattcaaaacatcatcactaagatcgaagcaactcaggtgtggcgccactgcagacatcaaagcacatcacgcggttcttgtgggccccaccagcgaggaggagagaaaaggggactatgactggacacaggaatggtaccctttgtatctcactcagaatgtgcccgaagatgcacctttgggtctcaaagtgtttgataaacagctcgtgttgttcaaggatggcaatggccaagttcgcttgtacgaagatcgctgcccccacaaggtagcgaaactat

SEQ ID NO: 269257 - DNA, 446 bp, Glycine max
cccacgcgtccgaaagaaaaagaaagaagacatttccttccgaattgaggaagggaaaggtgtcttggatggccaaggcatcttccttagctatcacgttgatctgcgccgccacggtattggtggcgatgagtcggtggccgacagccgtgggcggcggggaccaccacttgggaatgggatgggtttccagcacgtgcaaggggaccattgctgagtgcctgggaggggaggagtacgagttggattcggagatcaaccggcgcatcttagccaccaacaagtacatcagctacgttgcgctgcagaggaacactgctccctgctctcgccgcggcgcctcctactacaattgccgacccggagcacaggccaatccttacagccgtggctgcagcgccattacgaggtgcaggagctgaattttccttttttttaaaattttt

SEQ ID NO: 269258 - DNA, 443 bp, Glycine max
agagtttgttgtgagctataagctagtttatcgtgaggagaatatgaagttgtttgttttctttgttgctgcagtagttttggtagcatggccatgccatggcgcaggctaccaaaggttccctctccgaatgaaaactggctatggtgagcgttcttcggaggtaaaatgcgcaagttttaggcttgctgtggaagcacacaacatccgagcctttaaaaccattcctgaagagtgcgttgaaccaacaaaggactacattaatggcgaacaatttacatcagactctaaaacagttaaccaacaagctttcttttatgctagtgaacgcgaagtccatcacaacgacatatttatattcggcatagataacaccgtactctctaatatcccatactatgaaaaacatggatatggggtggaggaatttaatgaaaccttat

SEQ ID NO: 269259 - DNA, 448 bp, Glycine max
cccacgcgtccgcaaaaaatattcttttcttcatctccaaacctgatgtcttcaagagtccaaattctgagacctatgtcatatttggtgaggcgaaaatagaggacttgagctctcagttgcagacacaggctgctcaacagttcaggatgccagatatgggatctgtaacggcaaaacaagaagatgctgcagctgcagcagtgcaacctgaagaagaggaggaggttgatgaaactggtgtggagccccatgacattgatttggtgatgacgcaggcaggagtgtcaagaagcaaggccgtcaaggctctcaagactcacaacggggacattgttggagccatcatggaactcactacttaattgggggtttatgttctatttgtatgtttttttgggaatgatatttagaactagtgccgtttctatgttataaaccgaatcaa

SEQ ID NO: 269260 - DNA, 361 bp, Glycine max
aaaaaaaataaaaaaaaaaaaaaaaaaaatatttaatttaaaaacaaaaaaaaaaaaaaaaacaaaaggaaaaaaaaaaaaaagggaacgggtaaaaaaaaaaaaaaaaaaaataacctactcatataacaacacaaaacaaaaaataaaaaaaaggggccccccctttttaaaggttccaattttacttccccgtccttccaacgaattatttttttttttgtgccccctaatttaatttaccggcccctctttttccaccctcggaactggaaaacccctccctttccccactttataccctttgaaacaattcccctttttccaagttgggtaataaaaaaaaaccccccacccaatc

SEQ ID NO: 269261 - DNA, 450 bp, Glycine max
  unsure (1)..(450): unsure at all n locations
gngagcttaccttacctgaagatggcttcggtgtcctttgccgtgggacttttaccttacgcttcagttcgatttcccgtattgagcaacgccaactcactgaaactcagttcctcagctagcatctctactccaattcttcagcaaaagctctgctctcttctttcccccctccctctaagccctcgccctcgccctctcaccattgtatccgctaagggctacaaaatgaaaacccacaaggcatctgcaaagcggtttagggtgaccggacgaggcaaaatagtgcgtaggagagctggcaagcagcatttgctcgtcaagaagaataccaagcgcaaatcccgactctccaaaatgcacgcggtcagcaggagcgactatgacaacgtaattggagccttgccatatctgaaagtaaacagaaatgctacatagatgttctgtttg

SEQ ID NO: 269262 - DNA, 448 bp, Glycine max
gtgtgatgaaaatgaacgtcctcgttttcttcgttgctacaattttggtagcatggcaatgccatgcgtacgatatgttccgtctccgaatgaacactggctatggtgcccgtactccggaggtgaaatgcgcacgttggaggcttgctgtggaagcacacaacatctttggctttgagaccatccctgaagagtgcgttgaaacaacaaaggaatacatccatggcgaacaatatagatcagactccaaaacagttaaccaacaagcttacttttatgccagagacctcgaagtccattccaaggacacatttgtgttcagtatagatggcaccgtactctctaatattccatactacaaaaaacatggatatggggtggagaaatttaactcgaccttgtatgatgaatgggttaacaagggcaatgcaccggcactgtccgagac

SEQ ID NO: 269263 - DNA, 370 bp, Glycine max
atataactagaaaccgtgcgatcaaaatgaaggaccctgttttctatgttgctacgatctgggtagcatgacaatgctatgcgcacataatgtccactctccgaatgaacactgtcaatggtgcccatactactgaagtgaaatgcgccagtcgaacgctatctttggtagcacacgacatcataagctttgagacccttcctacagagtgcgtgtgcagatctgaggaataccttcgtggcgaactgcatacatcctactacaaagcagtttaccatgaaccttactttcatgccaaaggcctcgacgtgcatcccaaggacacatgtgtgctcagaatatatggcacggcactttataatattccata

SEQ ID NO: 269264 - DNA, 359 bp, Glycine max
ctcataagatcgctgtataacttgacatagtgtggagattctaaccatgtttgttttttgcgtagttcgcaaaggcttggtggcttgtacatactataggacctatcaaaccaatgcatgtctgcctgacgaaaacagactatgtggagcgctgctaacttgttaccacgcgcgggtcaaatgataagtattggaaccacaccacattcgtgtcttgtaaaccattcctgaagagtgcgttgaaccaacaaaagactgcctgtctgtctaacaatccagattaaactctacaacagtgcaacaacatgctttcttttatgctagagaacacgaaaatcatctgaacgacatatttatat

SEQ ID NO: 269265 - DNA, 437 bp, Glycine max
gattattcctcttttaacaatccacacccaaattctagggttccgaaatggacgctggcggaaagatcaagaagggcgccggaggtagaaagggcggcggcccaaagaagaagccggtttcaaggtccgtcaaagccggtctccaattccccgtcggaagaattggccgttatttgaagaaaggaaggtacgctcagcgtgtcggtaccggtgctcccgtatacttggctgcagttctcgaatacctagctgccgaggtgcttgagttggctgggaatgccgcacgtgacaacaagaagaacaggattattccaagacacgtgcttttggcagtgaggaacgatgaggagttggggaaattgcttgctggagtgacaattgcacatggtggcgtgcttccaaacattaaccctgttttgttgcctaagaagaccgag

SEQ ID NO: 269266 - DNA, 391 bp, Glycine max
tttttagcaaccttttctgttttttgatctggttctatcaatggccgggctggaagttttcctttttttaactaatcttttttttaagccctttttccacattgcaaattcaataactttatgattggtgccgtggtttcaaagtttggtgacaagagtgtgtacttagatttgtaggatctgggcaacactacaaaaaaaaaaacttgtgtggtttatatgcaccttcaccctacaaccatattaagagcttgttcttcgagacattagctgctccattcacaaagaggggattgttactcaagtttctgatatttgaaagagtttcacccttgcatacttcagtgcaactgtctaagggacattctaccaatcaagaaaggaccacaac

SEQ ID NO: 269267 - DNA, 303 bp, Glycine max
tgttgatcgacatacctagaaacagtgtgatgcacttgaaagcgcatgcatacttcattgatacaggaatcggcagcacgtcggatgcgaaacttacaatatgttacgtatcgaatgaagactggctatggtgcccgtacttctgaagacatatgcgcatgaagaaggctgggtgtgaaagcacacaacatgtatggctcttataccaatcctgattagtgctgaggagccacacagggacacatacatggggaacaaggtgcatcatactccaaaacaggtaatcaacaagcttactgttat

SEQ ID NO: 269268 - DNA, 444 bp, Glycine max
gactctgcaaaaacctatcctgaaacggttcgcagagaggcagcaaaacgctaaagccctaaacccccatattgagctttctccctctctctccgtcttcgatggcaacatctcttctgaaaactccgctcaatgtgttcaacagacaccacaatcacgtcgcattcttctccaatggcacaagtgcaagaagcagtgctccaatttcgcagaagaggagatcgcgtccattccccgtagtgtcaatggcatccacaccggttcaaacttctctcgaaaaaactgaactttcgtccaaaagcaccggtcttccaataatggttaatgcatgtactggaaaaatgggaaaggctgtgattaatgcggcggaagctgctggactgaatgttgttcctgtgtcgtttggctgtgaagaggagtctggacagacttttcagattggtg

SEQ ID NO: 269269 - DNA, 375 bp, Glycine max
gcacgcattactgttgcacttcttactcggtctccctcttttttttcttcttcttggtctgggctaaaccccccctggatttgtcctatctcactaacatcgatgggagacgagaataagaccaagtcccctgcttccggcgtgtggtccaccatcaagcctttcgtcaatggcggagcctccggcatgctcgccacctgcgtcattcaacccatcgatatgatcaaggtgaggattcaacttgggcaaggatcagctgcgcaagtcactttcaccatgcttaagaatgagggtgttgctgccttctataagggtctatctgctggattactcacgcaggctacatacaccactgcccgtcttgcatcatttaaa

SEQ ID NO: 269270 - DNA, 447 bp, Glycine max
cccacgcgtccgcccacgcgtccgggatgctcgatcaatctatgttggtaatgttgactatgcatgtacgcctgaagaagtccagcagcattttcagtcctgtggaactgtgaacagggtgacaatactgacagacaaatttggtcaaccaaaagggtttgcttatgtagagtttgttgagattgatgctgtgcagaatgctctcctgttaaatgaatcagaattacatggtcgacaactgaaggtgtctgccaagcgtacaaatgttcctggaatgaagcagtattttggaagaagacctgctggtttccgatctaggaggcctttcatgcctgctccattctttccaccatatggatatggaagggttccaaggtatagaagacccactcgatacaggccatactagtgcacattctctgtttaataggtgatcacatatttaat

SEQ ID NO: 269271 - DNA, 401 bp, Glycine max
gccagtcgtgcgctataagctactttatcgtgaggagaatatgaagactcttgccgtctgcgttgctaaaaaagatccggtggcatatacatgccatgtcgcatagctacacaaacgttccactcttagaatgaagactgtctatcgtgagcgttcttactacgtataaagcgcaacctgtatgctcgatgcataagcacacatcaatcctagcctgaaaaaccattcctgaacagagcgactgaccaacaaaagactacatttgtggcgaacattgtagatcaaactctataacacctaaacatcacgctttcttttatgctagcgaacgcgcacaccatcacgacgacactattatattcaacatatattacaccgcactctctaatatgccatactat

SEQ ID NO: 269272 - DNA, 441 bp, Glycine max
gcagcattagggtttatcatctgcttcaatggggaagggaacagggagcttcggtaagaggaggaacaagacccacactctctgtgtgaggtgtggccgccgcagcttccacctccagaagagtcgctgcgccgcttgtgctttccccgctgcacgcacgcggaaatataactggagcgtcaaggcaattcgcagaaagaccaccggaactggcaggatgagatacttgcgtaacgtgcctcgccgtttcaagagtggcttcagagaaggtaccgaagctgcaccaaggaagaagggagcagctaccactgcatagacctttcaaagatcgttctcgttgggtacggatttacaggaatagattgctttttgtgcttttggcaagtattttggaacacttatttttagagtctcattgcttctttatcccccatttaattt

SEQ ID NO: 269273 - DNA, 441 bp, Glycine max
cgttgatcgacataactagaaacagtgtgatgaagatgaacggccttgtgcaattcgttgatacagcaaacggcagcatgtcagatgcgcggcattactatatgctaccctctgcgaatgaacactggctatggtgcccgtactccggaagggatatgcgcatgatgaaggctagctgggcaagcacacaacatgtgtggctatgagaccatgcctgatgagtgcgttgaagcaacaaaggaattcatacatggcgaacaatatacatcagactccaaaacaggtaaccaacaagcttacttttatgccagagacctctacatccatcccaaggacacatttgtgctcagtatagatggcacgcgcctctctaatattccatactacaaaaaacatggatatggagtggagaaatttaactcgaccttgtatgatgaatgg

SEQ ID NO: 269274 - DNA, 452 bp, Glycine max
cttttcattacatacgcaaaaaccattttactctctctttcacagaagaacaatatctctattttcgaaactacacacatcatttagaaccatgtctttctctaccaaattgcctttggtcctcttattttcatcccttttcatccatgcatctttggctgagatggtgtgtgaggacctgccaaaggaagtgtgtgctttctcagtagcttcatcagggaagaggtgtttgttggagactgagaaggcagccgacggtggcgtcgagtaccaatgccggacatcggaagtggtggtggagaggatggcagactacatagagacagaccaatgtgtggaggcatgtggggttgataggaactctgttgggatttcatctgatgccttctttgagcctcaattcaccggcaagctttgctctcctgcatgttaccagaagtgccccaacattg

SEQ ID NO: 269275 - DNA, 441 bp, Glycine max
cccacgcgtccgcttggatcaggtttagggaatggctgcaatcttagctcgaaaatcactccttgctcttcgtgcgcgccaattggctgtaagcggtcaagggctgcacagctcccaatactatggccttcggttaagtgcacactccttctctaccaaaagagaggatgaggaaagggagcaactcgcaaaggacatttcaaaggattggagttctgtctttgaacgtagcattaacactctctttctcactgaaatggttcgaggactaatgctgactctgaaatacttctttgaaacaaaagttacaatcaattatccatttgagaaaggccctttgagccctcgttttcgtggtgaacatgcactccggcgatatccaacaggggaggaacgttgtattgcttgcaaactttgtgaggctatatgttctgcacaagc

SEQ ID NO: 269276 - DNA, 448 bp, Glycine max
gaaagaatggcagcttgcactgtctactcaacacaatctctgagcacaaattgctccatcggaaccccatcaaagacgcaactcagttttttccaccaaaagcaggtagttttctggaggaacagcaagaagggcagctgcagcagcagaagaagctatgtgataacatgtgcagcaggtgactcacagacagtggtgattggcctggctgcagactcagggtgtgggaagagcaccttcatgaggaggctgaccagtgtgtttggaggagcagcagagccaccaaagggtggcaaccctgactccaacactcttatcagtgacaccaccactgtcatatgcttggatgattaccactctgtggacagaactggaagaaaggagaagggtgtcactgcccttgaccctagagccaatgattttgatctcatgtatgaacaagttaaag

SEQ ID NO: 269277 - DNA, 445 bp, Glycine max
cccacgcgtccgcccacgcgtccgccattgcaccacataaggccaaagctattaaggccactagttcggggtgacgtgaagatgacaatcaattctccttaccttctttcacctggttttattgttgttttgcttttttcctgcatccttgctttcttcctgaattacagtatttttctgaacacaactctcaattcagctctggcacagacaatatgtggtaatcttaaggatctatttactattggctttggctggataatttttggtgggctaccatttgatttttggaatgtagtaggacaacttctgggttttgcgggctctggtttatatgcctactataagctcatcggcagataactcactgcgtttgatgtctttatggatttcggactaccattgcttcggtcatctgaccttcactacatcaaggagaagaatc

SEQ ID NO: 269278 - DNA, 446 bp, Glycine max
tccatggcgaacgccggtcccggaaccaacggatctcagttcttcatttgcacggagaagacagagtggctcgacggaaagcatgtcgtgttcggacaggtcatcgaaggattgaacgttgtcaaggacatcgagaaggtcggatccagctccggcaggacctccaagcccgttgtcatcgccaactgcggtcaactctcttagacgacgttgacccgcggctttaatctctgaatctgtgttatttctttcggtgtcgtttttgccttttttttctcttcttttctttctcgtgtcgtcgtttaggggattgtggtgttaaggatatcatttcgaaacccttcccctttccttttcaatatcagtatcatgtggttggttggttggggttcatagagtgagtgaatggagtctgttatgagaagcatataaaaaacatgatgagc

SEQ ID NO: 269279 - DNA, 449 bp, Glycine max
tgccatttcaaagctgggaaagaacattcaagtactttcaagttcctttgtcaataagcaagaccaatacactgtggaaggagtgcagaatcttggagacaaagcagtgatgtgtcataggctaaatttcagaactgcagtattttactgccatgaagtccgtgaaacaacagctttcatggttccattggtggctggtgatggaaccaaaactcaggcacttgctatttgccactcaaatacttctggaatgaatcatcaaatgcttcatcaacttatgggagttgatcctggaactaaccctgtttgccatttccttggaagcaaggccattttatgggtacccaatttatctgtggacactgcctatcagaccaacattgttgcttaattagtccatgcatcttgagcaccatgagaatgagattgtgtataaaataaattatcat

SEQ ID NO: 269280 - DNA, 450 bp, Glycine max
ctttacttttgtttcatgggctcattttgggaccatagagcgccatgacgccatgaccaaacccaacactttctttcacaatctaatcaagcccttcaaattcagctccagcaaagagggacaaaccgaagaaaacgaaatacagaacttagctgcacaggagcagaagatcttcccctacgaaacattggttgctgctaccaacaaatttcatattcttaacaagctaggtgaaggaggatttggacccgtctataaggggaaattgaatgatgggagagagattgcggtgaagaagttatcgcatagatcgaatcaagggaagacgcagttcgtcaacgaggcaaagttgttggcacgtgtgcagcaccgtaatgtggtgaatttgtttggttattgtacccatggctccgaaaagcttcttgtttacgagtatgtccgtcgcgagag

SEQ ID NO: 269281 - DNA, 370 bp, Glycine max
  unsure (1)..(370): unsure at all n locations
acgatttcaactccggatatttagctacattttctttgttgccttgtcttctgaaatggatgaaatatggtccatatgaagtcaggtcttgtgattaatgataactctgtctgccttccttttagaactgtgatttccggcttgtgtacgggatacactagtgaaatctgggaccaatttcaactccggatatttagctacattttctttgttgccttgtcttctgaaatagatgaaatattttccaaaanaaaaaaaaaaaaaaaaaaaaaaaaaaaaaaaaaaaaaaaaaaaaaaaaaaaaataaaaaaaaaaaaaaaaaaaaaaaaaaaaaaaaaaaaaaaaaaaaaaaangggggggggccgtttt

SEQ ID NO: 269282 - DNA, 441 bp, Glycine max
gcacatcctacaccaaatacgagatcagaaagcgaaaccctgaaccaaaatcatgtgccctattggtaatcgacgtgcaaaaccacttctcatccatggccaccccaatcctccataacctcaacaccaccatctccctctgccgccgcgcctccatccccgtcatcttcactcgccactgccacaagtcaccctccgacgccggcatgctggaggagtggtggtccggggacctcatcgtcgacggcacggcggaggccgagctcctggaggctctggaccggaaaagcagcgaccttgtggtggagaagagcacctacagagcgttcaggagcactggcttggaagagaagttggtggagatgggtgtgaaggaggtcatagtgacaggtgtcatgaccaacctgtgctgcgaaacgacgtcgcgtgaagcgttcgtga

SEQ ID NO: 269283 - DNA, 444 bp, Glycine max
gggaatttcagttataagactctcaggtggtggtgcatcgctgagttgtgtgagagtgagaaagagagagtgtgtgtgtgtgcagaagatgtggccattcagcagaaaaggggcttctggtttttcatcatcatccacggcagagcaagtcactgaaggaattgatggaactggtctcactgccattgtcacaggagcatccagtggtattggcactgagactacacgtgtcctttcattgcgtggtgtccatgtgattatgggtgtgagaaatatgcttgctgctaaagatgtcaaagaaacattacttaaggagattccctccgctaaagttgatgccatggagttagatctcagttcattggagtctgtcaagaaatttgcatcagagtttaagtcctctggtcttccattgaatatgttgataaacaatgcacgaattat

SEQ ID NO: 269284 - DNA, 449 bp, Glycine max
tccatgtgcagactgaaaatgagggctgttcagctttccacagatcacagcacaagcattgaagaggaagtttttagaataagagcagaacaccctgatgataatcaggccatattcaatgatcgagtgaaaggacaattaaaagtgaccagagcatttggtgctggattcctgaagaggccgtcttttaatgaaccgctactgaagatgtttcgagttgattatgtggggaatgctccttacctaagttgtgcttcttctgtccttcatcaccgactttcctcaagtgaccggttcctggtgctctcctccgatgggctttaccaatttttcagcaatgaagaggtagttgcccatgtcacatggttcatggaaaatgttcctgaaggtgatcctgcacaataccttatcgcagagcttctctttcgtgcggctaataagaacggaat

SEQ ID NO: 269285 - DNA, 395 bp, Glycine max
cgcgtacggcctttttctttatcaactcccttagattctctccatcgggtcttcaaaaatgcggatgagctgcattggatgtcgagttctcagagaaggttgcattgaaaattgcagcattagaccctgtttacaatggatcaaaagcccataatttcaagccaatgctactgtgtttcttgccaaggtctaccgacgtgctggtctaatgaacctggttaacgcacgcctcgaacatcttcgtccagagatctttttttcgatgttgtacgaggcatgcgggcggatattgaacccgatttaccaatctgtccgcttgttatgggccgagagctggcagctatgtcaagccgccttggaaaacgtcttgaaaggcgcaccgattacgccgatca

SEQ ID NO: 269286 - DNA, 454 bp, Glycine max
cgacatggaagccgtaacaggctcccaccatttttccactctctccctttctttctctcacaacaaaaccttgcgctcttcttctgccaaatcaatcaggctttcctctccttcgaccaacgcttccttatcttccagaaactggttcgcgaaagaggtatggggttgggtgaactccaactccaaaggcgtcgccgtgagaaggtacacacgcggagtggtggtcagggctgaaatgttcggccagttaacaagtggccttgagactgcatggaacaaactcaaaggagaagaggttttgtctaaggagaacattgtggaacctatgcgggatatcaggagagctctcttagaagctgatgttagtcttcctgttgtcagaaggtttgtgcagtctgtcagtgaccaggctgtgggtgttggtgtcattcgtggagtgagaccagatcagcaa

SEQ ID NO: 269287 - DNA, 438 bp, Glycine max
cccacgcgtccggcacatatgaacttggggattgtattgagttattttaatgctcatttctttcgaaactcactggatataagggaccagtttgtgccacagatgattttccttaacagtctatttgggtatctttcccttctcattgttatcaagtggtgtactggctctcaagcagacctttatcatgtaatgatatacatgtttttaagccccacagacaatcttggcgagaatcagttgttctggggccaaagacctcttcaaattgtgttattgcttttggctgtaattgcagttccatggatgctctttccaaaaccttttatactaaagaagcttcatactgagaggtttcaaggtcgtagttatggctttttaatttaaagtactaatgctattgtatgaataagtgatcagctcctgtatttatcagtg

SEQ ID NO: 269288 - DNA, 456 bp, Glycine max
  unsure (1)..(456): unsure at all n locations
gcacaaagcgggttactgtctgttcaagctaccatctctctctctctttcttagtgcctccttgccagaagttaaaatggcccaagaaactttcctattcacatctgaatcagtgaacgaggggcaccctgacaagctctgtgaccagatctccgatgctgtgctcgatgcatgcttggaacaagaccctgaccggaagggtgcctgtgaaaccttgaccaagaccaacattgtgaatggtttcggagagaatacaaccaagggcaacggggactattaaaagaatgggggacacatgcaagaacattggttttggctctgatgatgttggtcttgatgctgacaactgcaaggtcctcgtcaacattgagcaacagagtcctgatattgctcaaggtgtgcacggccacctcacaaagaggcctgangagattggtgctggtgaccaaagtcata

SEQ ID NO: 269289 - DNA, 454 bp, Glycine max
ctttgctattccaatggccactgttgaggttgtgtcagccaaggttgccctcccagaggacacgagaagaggcatcattgaaggttgacgaggagaagaacacagaagaagttgttgagactccaacaccagaaactgtagtcactgagcaaaccaaggaggaaagtactgaggccccacgacctgcagcttcagaagacaagccctcggttgaagttcagactaaagaggtggcagaggaagttgtgtctgagaccgtcacacaagagccaacagttgagaaacaagaagctgctgagggaacaaaagaaaatgccgatcctgctgagattaagacaccagaagctgcagaagatgttaatgttaaggaagagaaagaagctgaggctgaagctaaggaggaagaggccccggcagagaaaagtgaggagaaggttgagacagaagggtcagc

SEQ ID NO: 269290 - DNA, 467 bp, Glycine max
tcgcccacgcgttcgcccacgcgttcgatcgagataactagaaacagtgtgatgaaaatgaaggtgcttgttttcttcgttgctacaattttggtagcatggcaatgccatgcgtacgatatgttccctctccgaatgaacactggctatggtgcccgtactccggaggtgaaatgcgcaagttggaggcttgctgtggaagcacacaacatctttggctttgagaccattcctgaagagtgcgttgaagcaacaaaggaatacatccatggcgaacaatatagatcagactccaaaacagttaaccaacaagcttacttttatgccagagacctcgaagtccatcccaaggacacatttgtgttcagtatagatggcaccgtactctctaatattccatactacaaaaaacatggatatggggtggagaaatttaactcgaccttgtatgatgaatggggtaacaa

SEQ ID NO: 269291 - DNA, 458 bp, Glycine max
gttatcctaaaatttcttccttgccactgccagtgtgtcaccaccatggccaccgtcacaacccaagcctccgccgcgattttccggccgtgtgcctcgaaatcgaggtttctgaccggctcttccggtaaactcaaccgggaagtgactatgaggccaatggggtgccctccttctgcctctttcaaggttgaagccaagaagggagagtggttacctggcttggcctccccaacttacctcaatggcactcttcctggtgacaatggatttgaccctctgggactagctgaggacccagagaacttgaggtggtacgttcaagccgagcttgtgaatggacgttgggccatgttgggtgttgcaggaatgctacttcctgaggttttcaccaagattggaatcatcaatgcccctcaatggtatgatgctgggaaatcggagtactttgctttatc

SEQ ID NO: 269292 - DNA, 452 bp, Glycine max
ctgagaatcgccgcaagcgcaaagagaattgttcaaacggcgtcgttggaggcgccaccgttggggattagggttctgccgcgtgtctaccacgagagggtggtggaccactacgacaacccccgcaacgttggatccttcgacaagaacgaccccaccgtcggaacgggtcttgttggtgcacccgcgtgtggcgacgtcatgaagctccagattaaggttgacgacaaaacggggaagatcgtcgatgctcgcttcaaaaccttcggttgtcgatccgccattgcttcttcctccgtcgctactgaatgggtgaagggaaagcaaatggaggaagttttgaccattaaaaacactgaaattgcaaagcatctttcacttccaccagtcaagcttcactgcagcatgcttgctgaggatgctataaaagcagctgttaaagattatgaagc

SEQ ID NO: 269293 - DNA, 452 bp, Glycine max
gctagtttatcgtgaggagaatatgaagttgtttgttttctttgttgctgcactagttttggtagcatggccatgccatggcgcaggctaccaaaggttccctctccgaatgaaaactggctatggtgagcgttcttcggaggtaaaatgcgcaagttttaggcttgctgtggaagcacacaacatccgagcctttaaaaccattcctgaagagtgcgttgaaccaacaaaggactacattaatggcgaacaatttagatcagactctaaaacagttaaccaacaagctttcttttatgctagtgaacgcgaagtccatcacaacgacatatttatattcggcatagataacaccgtactctctaatatcccatactatgaaaaacatggatatggggtggaggaatttaatgaaaccttatatgatgaatgggttaacaagggcgacgcac

SEQ ID NO: 269294 - DNA, 370 bp, Glycine max
acgcgaggatggtggcagatgctgacgtgacggagactgaggctgctgagacggccgaggtggctcgagacgagccgatgtgacggtgggcgtcagagagaagagcatacttctccggtgtccagacgagtatacttgtacacgtccggactatatctatgcttgcggaccttcacctatctacaagtcagctcacattgtgaaagcaccattcatgatgaatcatgacctaatatgcatcaaaggataaaggcaatctctatgttgagccagatgaaacatctatcttcctgactaagctctttgaacaaaagtctgaacgtgtcatgtttatgctacaacgcttatgactcacatcaaggtgaatgta

SEQ ID NO: 269295 - DNA, 334 bp, Glycine max
gtgtttttcatttcatcgtgcattcaatggccaccacagcagctctatccggaaccatggtgagcaccttcttcatgaggaggcaacctatgaccaccacaagcctaaagacattccccaacgttggtgaagctctttttggtctgaaaagtggacgaggtggtcgtgtcacttgcatggcctcgtacaaggtgaagctcataaccccagaaggagaagtggagtttgaatgcccagatgatgttttcattgttgacatggcataggacgaaggcatttgacttgtctactcgtgcagggccgtttcttgcgttttctgtgttggcaaaattgt

SEQ ID NO: 269296 - DNA, 335 bp, Glycine max
tcggccacgcgtgcgatcacgcgtccaatcgagatatctagaaacagcgtgatgaaaatgaaagtccgcgatctcttcgttgctacaaggttggtagcatggcaatgccattcgtacaatatgtatcctctccgaatgaacactggctatggtgcccgtactccggaggtgaaatgcgcacgttagaagctttctatgctagcacacaacatctttggctatcagaccattactgaaaaatgcgttgaagcatcataggaatacatacatggcgaacaatgttcatcggactccaagacaagttaccaacaagcttacttttatgccacagacct

SEQ ID NO: 269297 - DNA, 399 bp, Glycine max
taaaaaccttcccttctcttctcacccccacactcccatctcacacacccctcgcatccaacaatgtctctcaccattccctccaacctctccaagcccgccgtccttcgccccaaactaagcccaaagctaaggtccgccgccacaaccaccatcgtctgcagcaccaccaacaacaacaacaacaacaacgtgtcctccgacctgaaggcgttctccgccgcgctggccctctcctccatcctcctctccgtccctcttcccgtcggcgccgacatctcggggctcaccccatgcaaggagtcgaagcatttcgcgaagcgtgagaagcagtcgataaagaagctggagtcgtcgctgaagctctacgaggcgggcatggcccccgcactggccatt

SEQ ID NO: 269298 - DNA, 446 bp, Glycine max
cccacgcgtccgagcgttatgagactatgtgagatcagagttattgcataatttcaagtgtgggagtggacagatttagtttaaggggcgtaaatagtgagcatataaagaaaaggaatctgaggaataggggagacaaagacaatggatttgcatttgaagagtttgtataacagatgtctggagcaatttgggtctggtcctggtcttggccctggatctgggacatgtatgatgaaagtggatggcattgctccaaatttcattaaatctatatacaaagcttctgcagctttgtatagagctgagccgtggaagaggctgcttccagagcacttgtttggcgaccggattgagaaagattctgattggcctggcaagaaacaactctttccatgtgttcagttcattgtaggggatggatgagatgttgaattttacatgtt

SEQ ID NO: 269299 - DNA, 423 bp, Glycine max
atccactggttcttcatctgcatgcacacagttgcatagttttggaaaccaacaattcctgaagaagggtagcatcaacaagcaggtctgaaaatggagatcaccaatgtcagtgagtatgaggctattgcaaagcagaagttgccaaagatggcgtttgactactacgcatctggtgcagaggaccagtggactctgcaagagaacagaaatgccttttccagaattttgtttcggccacgtattcttattgatgtgagcaagatagacttgacaactactgtcctaggcttcaaaatatccatgccaatcatgattgccccaacagcctttcagaaaatggctcatcctgagggagaatatgcaacagcaagagctgcatctgctgctggaacaatcatgactttgtcctcatgggctact

SEQ ID NO: 269300 - DNA, 449 bp, Glycine max
aaagaagcgtagctaaagtcagcattcgaaaaagatgagtagcatcggtacaggttacgatctatcggtcaccactttctgccgggatggccgcgttttccagatcgagtatgccgctaaagccgtcgacaacagcgtgactgttattgggatcaagtgcaaagatggggttgtgttgggcgtcgagaagcttattccgtacgaaaatgatgctttcgggttccaatagaagaatacactatcgatcatcgacactctgggatggcatgttgcaggattagcagctgatggcagacaaattgctgccagggctaagtgtgaagctactaactatgacagcgtatatggcgaaccaattgctgttaaggaacttgctgaccgtgtggctcgttatgagcaccttgtgacgctatattggaggctcatacactttggatgtagcgtcatac

SEQ ID NO: 269301 - DNA, 412 bp, Glycine max
gggagaattaggtttttagggtttacaccgagcagccacaccttccgcagcagccatggttctgaaaactgaactatgccgattgagtggtgccaagatctacccaggaaagggcatcagatttgttcgtggtgattctcaggttttcctgtttgcaaactcaaaatgtaagaggtatttccacaatcgcctgaagccttcaaagctcacctggactgcaatgtacagaaagcaacacaaaaaggacattgctcaagaagctgtgaggaagaggagacgtgctgtcaaaaagccttactctaggtccattgttggtgcgaccttggaagtaatccagaaaaagagagctgagaagccagaagttcgagatgcagctagggaagctgctctttgtgaaattaaggagaggatc

SEQ ID NO: 269302 - DNA, 341 bp, Glycine max
ggaaccaaaactcaggcacttgctgtttggcactcagatacttctggaatgaatcatcacatgcgttatggactcatgggagttgatcctggaactaaccctgtttgccatttccttggaagcaaggtcattttatgggtaccctatatatctatggacactgcctatcaaactaaccttgatgtttaattagtccatgcatctgcatcttgggcaccataagatttgatataaaataaattatggtgtgttgtgtatgttgtgcaagacctggaactagatgtttctacgtacgtgtgctgatatgattcagtgtgctttgatgatactttgattaatat

SEQ ID NO: 269303 - DNA, 390 bp, Glycine max
gtgagtgtgagtgagtgtatcaatcggccacacagaattgggcagtgctactatgattccagggtcctggttgccttggcggccgcgttatcctttcaagggatcggtgcaaaccttggtcgcaaaaccatggctgaagaagattcatcatgcatgacccttcatttccgtggttaacaaggctgcctatctatcttccgtcgtgacatgcacccagcgtcagcgctaggtttctgctggacactttggggccgcaacctgtttctaggaattgggctaagagaaagggtcgaggaatattcgcatggcaaggggctcgttgtcgttttgggatgagaggtcagaaatctcgatcttgacctggcgttattaaaggtatcgaaggttgtc

SEQ ID NO: 269304 - DNA, 395 bp, Glycine max
ctcgcagatgtcgagcctacggcgtacgcgtgcgctcacgcgctcgatcagccgagatgacaagtattcataatgtgctcaaaaaatgcttggagcgatgatagtgcacgtacaggaacttgttccacagcaagctacctcaagtgcatgggcgacttcagcactaggtagacccacactgacgcatgaactattgttatctacataggaagcttgaaatggatgcttatgctggacgaattgtcaagaagaagatcgagactattttctacttgactgacctagctgatgcccaatcggcaatggacgtcgaatcccttctgaggaaaggatggattccttgcttggaattatagttggagcatggttttgtataccgcgagcacaaatgttca

SEQ ID NO: 269305 - DNA, 375 bp, Glycine max
ctaagtataaatatatagaaattctagtgattatagactatctttatataataatataaataggaataaaaaaatataaaaaaagaaagaatctatataaatataaaaataatatatataaggtacaaatagtaaatcgaggtacccattttatgataaactttccttccatttttgttcctctagtaagcctagtatttccggcaattgcaatggcttctttatatctttatgttcaaaaaaacaagattttttagatacagaaaacatagtgaaattctggggttttttattccccaattataatacttaattcaaaaaaaggagagtaatgagtataatcatatcgctcagacgatgtactgatatattcta

SEQ ID NO: 269306 - DNA, 439 bp, Glycine max
agctaagcctgcaagcttcgccgtttgaaacagtgcctcaaccatggcagaacaaacagagaaggcttttctgaagcaaccaaaagtgtttctatgctctaagaaaggtgggaagggaaagaggcctgggaaaggtgggaatcgcttttggaagtcaattgggcttggattcaagactcccagagatgccattgaaggaacctatattgacaagaagtgccccttcactggcaatgtttccattcggggtcgtatcctagccggtacttgtcacagtgctaagatgacaaggaccattattgtgaggaggaattatcttcattttattaagaaataccagagatatgaaaagcggcattcaaatattccttcacacatattaccttgtttccgtggtaaggaaggagatcatgttattattggccaatgcaggccaatc

SEQ ID NO: 269307 - DNA, 451 bp, Glycine max
  unsure (1)..(451): unsure at all n locations
gtttgttgtgagctataagctagtttatcgtgaggagaatatgaagttgtttgttttcgttgttgctgcagtagttttggtagcatggccatgccatggcgcaggctaccaaaggttccctctccgaatgaaaactggctatggtgagcgttcttcggaggtaaaatgcgcaagttttaggcttgctgtggaagcacacaacatccgagcctttaaaaccattcctgaagagtgcgttgaaccaacaaaggactacattaatggcgaacaatttagatcagactctaaaacagttaaccaacaagctttcttttatgctagtgaacgcgaagtccatcacaacgacatatttatattcggcatagataacaccgtactctctaatatcccatactatgaaaaacatggatatggggtggaggaatntaatgaaaccttatatgatgaatgg

SEQ ID NO: 269308 - DNA, 454 bp, Glycine max
cccacgcgtccgcggacgcgtgggtaaagatggaaggtgctagtagagtcttatgcttgtttctggcggcatttttgtggtttaatgctcaacatgcttttgtaagttgtgctttgacatttgagttgcaaagcaaaattgctaaagccaaccaagagggaccttacctaggtttaatcataccaaattcttttgaactagaccctcttcttcagaatcctggctacacagctagtgacaccatcatagacttcgctggaaggagatttcgctttggagccattggtgacaagcctgttatactggtcatgacaggattgagcgtgataaatgcagctataacgactcagcttctgttgagtttattcacggtagaaggagtggtgcattacggcattgctggaaatgcaaacccgtccttgcatattggagatgtagctattccccaatactg

SEQ ID NO: 269309 - DNA, 452 bp, Glycine max
tcgcccacgcgtccgcaagtagttgagaactaacatggagaatcagatggctccctcaatgatcgactgcccagctgttaccactgtcaaccgtgccggtgccgtcatggctgcttcattcactggccttaagtccatggcatggcttccgcaccagagagaccaacagtgacattacctacattgctagcaacggtggaagagtgcaatgcatgcaggtgtggccaccagttggcacgaagaagtcagagactctttcctacctgccagaccttgatgatgcacaattggcataggaagtagaataccttcttaggaagggatggattccttgcttggaattcgagttggagcacggtttcgtgtaccgagagcacaacacgtcaccaggatactacgatggacgctactggaccatgtggaagctgcctatgcttggttgcactgatgct

SEQ ID NO: 269310 - DNA, 368 bp, Glycine max
ctttctctctctcattctcttctccatcgcgcgtaagaaacacattttagttgctactaatgggaactgttgaagctgcaaacagggatgcacatggaagtctcctagagaaaaatccttcagttgtttttgtgttaggtggcccatgaagtggaaagggtacccaatgtgcaaatattgtccaaaattttgggtatactcatctcagcgctggtgatcttctgcgagcagaaatcaaatctggttctgaaaatggtacaatgattcagaatatgattatagaaggagaaattgttccctctgaggtaacaattaagctcttacaaaaagcaatgcatgaaagtggcaatgacaaatttcttattgat

SEQ ID NO: 269311 - DNA, 445 bp, Glycine max
agataactagaaacagtgtgatgaatatgaacgtccttgttttcttcgcagctacaatactgggagcatggcaatgccatgcgtacgatatggtccctcttctaatgaacactggctatggtgcccgtactcctgaagtgaaatgcgccagttggaggcttgctgtggaagcacacaacatctttggctttgagaccattactgaagagtgcgttgaagcaacaaaggaatacatacatggcgaacaatatagctccgactgcatagcagataaccaacatgcttacttttatgccagagaccttgaaatccataccaaggacacattcgtgttcagtatatatggcaaccgtactctctaatatgggatactacaaaaaacatggatatggggaggagaaaattaactagaccttgtatgatgaatgggttaacaagggcaatg

SEQ ID NO: 269312 - DNA, 363 bp, Glycine max
accacgcgtgcgaccctctctactccttctttttccattttaccatcgtactatgccgaatcggctcatgcactcattaccattatggtgatatgcgccgctcttcttagcgtacgctccttccgcagcaagttcgagcgcatgaagccccacgtgaacatcgtcaccatcgtgcacttggaccacgggatgactaccctgaccgtcagcacaatttgtttgtttgaacttaaccttcattcccttttgttcatgatatttgagatttcatcatcctttatgcttgggatctgttttctgacttcaatggtaattaatgtatgagaacttatgcgtgtgaaaattctatgctgccgttccttc

SEQ ID NO: 269313 - DNA, 450 bp, Glycine max
ggaacagctagcagagaaacaaagttacaagtaaagtaaattaagaagatcattaatggcttctcttgcaaccttagctgctgttcaaccagctgcgctcaatggccttgctggaagttccctctctggaactaagctctctttcaagccctctcgccacactgtcaaatccaagaacttcaggagtggtgccgtggtagcaaagtatggtgacaagagtgtgtactttgatttggaggatctgggcaacactacggggcagtgggacttgtatggctcagatgcaccttcaccctacaaccctcttcagagcaagttcttcgagacatttgctgctccattcacaaagaggggattgttactcaagtttctgatattgggaggtggttccacccttgcatacttcagtgcaacagcctcaggtgacattctaccaatcaagaagggacc

SEQ ID NO: 269314 - DNA, 453 bp, Glycine max
cccacgcgtccggtttgttgttgtaactcgttcttcttcttttgttgttctgtgtttgtgtttgttttttctctcacctgaaaatgtcttgctgcggtggtaactgtggttgcggaagctcctgcaagtgcggcaacggctgcggaggctgcaagatgtacccagacttgagctacactgagtcaaccaccaccgagaccttggtcatgggagtggcacctgttaaggctcaatttgagggtgctgaaatgggtgtgcccgctgagaacgatggctgcaaatgtggaccaaactgctcctgcaacccctgcacttgcaagtgaggtgttgggagagcaagcttcaagcagagatagcccttaattaggaataatgataaactattaatgtgtagctaaaaacttatgtattatgtctgtgatggttttcgtgcactctggtgtttcgtgttaa

SEQ ID NO: 269315 - DNA, 255 bp, Glycine max
cccacgcgtccgaatcggccttagaaataatgtgcgacctttcatgcttctctgctgtacttggaattggggctcaactcgtacgggcagcgttcctataggtacacttcggttgctcgtctttaccataagaagctctggcaccagctcactctcaagcttgatgccaatagaggtcttgtcatctttcacgcatggtgacgctttaatacaattatatcacaaattacatcacatactttgagacggaaatca

SEQ ID NO: 269316 - DNA, 430 bp, Glycine max
cccacgcgttcgcccacgcgtccggcttaccttacctgaagatggcttcggtgtcctttgccgggggacttttaccttacgcttgagttcgatttcccgtattgagcaacgccaactcactgaaactcagttcctcagctagcatctctactccaattcttcagcaaaagctctgctctcttctttcccccctgcctctaagccctcgccctcgccctctcaccattgtatccgctaagggctacaaaatgaaaacccacaaggcatctgctaagcggtttaaggtgaccggacgaggcaaaatagtgcgtatgagagctgtcaagcagcatttgctcgtcaagaagaataccaagcgcaaatccctacgttttcaaatgcacgcggtcagcatgagcgacttttacaacgtaattggagccttgccata

SEQ ID NO: 269317 - DNA, 398 bp, Glycine max
agcacacttgcgaccgcgtgaaggcaatgcaggtccttgctttcttcgcagcgccagctatggcagcatgagcattgcatgcgataggatatgcaaatacatctgaatgaacactggctaacgcgcccggactttacccttctaatgcacgtggtggatgttggcttgggaatcacacaacatatattaactacacaccgttcatgaaaagtgcgttgtagcaccagaacattacatgcatgtagcacaatataggttagactaccaatgacttaaccaaagagctgacatgtatgcctgagacctgactacccatgcgagagacacatttgtgggcaagatcaatggtgacgtacttagctaaatgtgcatactacagaatacatgcctatagagca

SEQ ID NO: 269318 - DNA, 461 bp, Glycine max
gcgcatcgctcttccatggaaaaccatttcttgctggaaagcagcctgagctaggtggagggaccgtagagcttggtcctcatactgctgtccaccgttggaccggtgatccaagacaacctaacaaagaggacatggggaggttctattctgctggaagagaccccgctttctattctcaccatgccaacgtggatcgtatgtggaatatatggaaaacaataccaagtggaaaaagaagggatttcaaaaaccgtgattggttggaaacctcctttttcttctacgatgagaacaagacccttgtccgtgtgaaggtgaaagacagccttgacacgaataagatgggttatgtttaccaagatgtcgccattccatggctcgagaaaaagcctaaacccaaaagaactagaaaggctaataaggtggcgttcgcacaacaatttggcggcattggtgca

SEQ ID NO: 269319 - DNA, 427 bp, Glycine max
gcctctgatatctgacactgctgcgtctatcgtaaccatgcctaagcgaatccacgaggctaatgactaccttctcactgctagaaggacagacgcaaggtcggtgaagatcaagaggagcagatatgtggttaagttcaaggtcagatgctcgaagtacctttacacactttgtgtgtttgacccagagaaagctgataaattgaagcaatctctgactccaggtttgagtgttcaagacctgtaaaggtacaaggcgagagaccaagaagaagcaatacattgattcttcagaacttcgcttctctgtagttgaaacttgagattcttttcaggatctattattactagatcattgctaggacatggttgtattcatctgacttggaaaatgatactagaatatatgtctaatggattattctag

SEQ ID NO: 269320 - DNA, 375 bp, Glycine max
gtaagtcgtttcagcgaaccagaaggaggggctcctcaactttaaaaagtgaagttagaattgaatgaatgaaaaagggtccgtggcaatggagacagagccaaaagggctagaagcttccctagaacatttgattgaccttcaccaccacaaatctcttgtccttgcccaccacacagacaaagccaagaaggacgcaataaggaaagccgagcacgtttctgatttgttggttgaagcggtgaatggtggggtccaagattccttcatcaaccagaagcgaattgagctcgaaattcgaactctggctaccaccatcacgaggttcatgaagcatactgatcaatggctcgctgtcacttatgcccttaacac

SEQ ID NO: 269321 - DNA, 340 bp, Glycine max
cccacgcgttcgatcaagaaccgcaagctggatcttctgaatggcactgggtcccaccacgacgacctcttataccgcttcatggggaataaagactcctactctgaagagtttctccaacacgtggcactcaacttaattctggcagggcgcgacacgtgatctgtcgctctaaaatgcttcttctggctctgcattaataacccgcatgtggacgaaaagatcctgcacgagctctgcagtgtcctcaagtttacacgtggagatgatatctccacgtggcttgaggagcctctggtgatcgaggatgtagaccgcctggtctatctcaaggcaactt

SEQ ID NO: 269322 - DNA, 458 bp, Glycine max
cccacgcgtccgctcatttctcgattcatctctctcattgagctgcattgcaacactcactcaccaatggcactcagacccatcgacaacgctcttccaacaaccccagagagacctaaaaaacaacccaaagtcgctcttgcaacccaaaagcaacaagaccgtgctggcgtcaatggcgaaaacatagttccattgccctcatctggggatgccactgttgactatgtctcctccgacaaccttaagcccttgtcggaccctgaagttaagattcagagcttggttgaagatttggattcgaaaaattggacgaaggtttgtgagtcgctgaatgatgttagacgcttcgcgatgtaccactcctctcttctgttccccattttgggaaaaattgtgttggtggtggcgaagacaatgaggaaccctcgtagtgctctctgcaaaactgctattat

SEQ ID NO: 269323 - DNA, 438 bp, Glycine max
caattcatcatcagcttgtggccatagtctcattatttatccttttgcttccaaatatccatgggtggggagacgatgggcatgtcattgtttgcaagattgcacaggctcgcctcagtgaagcagctgcagaggctgtgaagaaactgctgccaatatccgcaggaaatgatttgtccacaaagtgttcttgggcagatcatgttcatcatatctatccttgggcctctgctttgcactacgcaaataccccagaggccctctgcagttacaaaaacagcagggattgtgtagattacaaaaaaggaattaaggggcgatgtgttgtggctgcgattaacaattacacaacgcagctccttgaatatggcagtgacactaaatctagatataacctcacgcaatctctattcttgctttcacattttatgggggaca

SEQ ID NO: 269324 - DNA, 450 bp, Glycine max
cccacgcgtccgccatactatgaaaaacatggatatggagtggaggaatttaatgaaaccttatatgatgaatgggttaacacgggcgactcaccggcattgccagagactctcaaaaattacaacaagctgttgactcttggcttcaagattgtattcttgtcaggaagatatcttgacaaaatggccgtaacagaagcaaacctaaagaaggctggcttccacacatgggagcagttaattctcaaggatccacatcttatcactccaaatgcactttcatacaaatcagcaatgagagagaatctgttgaggcagggatacagaattgttggaatcattggagaccaatggagcgatctgcttggagaccacagaggcgaaagcaggacctttaagcttcctaatcccatgtactacattgagtagtaccttgacctctctcaacaa

SEQ ID NO: 269325 - DNA, 325 bp, Glycine max
ctgctctcttttcttttaggtttccactctcacacactctccctcttctctttctctgcaatggtctctcttctcttcttcactgtctcaactcctgccaaacccccatttccgcagttcttaaatttggagtctgatgtctccgccattgctggttaccgaagatgaagggcagtgccatgcctcgatggtagcatctgcatcttcaccatccctgaactgtttctccctaaatgaggccggatttaaagaatgcaattacctgggattgtcagattgctcttcggtggacagttctactgtcccgaatttgtctgatgagaaa

SEQ ID NO: 269326 - DNA, 472 bp, Glycine max
gtgaaaatggcggtacccttgctctccaagaggatcgtgaagaagcgcgtcaagaagtttatacgcccccagagtgatcgcaagagctccgtcaagccaagctggcgcagacccaagggtattgattctcgtgtcaggagaaagttcaaaggatgcactttgatgcccaacattggttatggctcatacaagaaaacccgccattatctaccaaatggtttcaagaaatttgtcgtgcacaatgtgaaagacctggaacttctcatgatgcataacaggacatactgtgctgagattgctcacaatgtattcacaaggaagaggaaagacatagttgagagagctgctcagcttgatgttgtcttgacgaacaagacggtcagactacgtagccaggatgatgagtagatccaatatatgggagagttattgatggtttgtagtgagcttctgttgacacccttgatggtag

SEQ ID NO: 269327 - DNA, 371 bp, Glycine max
ggttaatatgaccgaaaaagattaccaaagaataaaaaacaagtttctgcccaaaattcatgcatgggtccaggagcacgggggtgagactattattcctttcagctgtgccttggaaaggaatcttgcagatatgccaccagatgaagcggctaagtattgtgaggagaacaaaactcaaagtgctcttaccaaaataataaagactggattttcagctattaatctcatttactttttcacagcaggacctgatgaggttaagtgttggcaaattagacgccaaacagaggctgctcaagctgcatgggctatgcatactgattttgaaagaggatttatttgtgctgacgtgatgaaagttgaggatc

SEQ ID NO: 269328 - DNA, 379 bp, Glycine max
gacaagggtcgcattctcagcgaggaggaacaggccaaagagaatgtctacatccagaaatgggagagggagaggttggagaaacagaagcaactgtctgagaaggccaaggctctcacggacaaagatgcttctgctgctgctcataagaaacctgaaggtgctcaaaaggactgagtttatctttcacacaacccgtcaaggtcactttgtgggaaataagcatggagaataaaacacattgaccctgagtgaactttggtctttgtatagattgtgtttcttgtttatttgtagtttcgtgacggatgaaaccatgccattgcattcaccaaacttggtacgtttgttatgaacttgtgatgtaatcctttccagt

SEQ ID NO: 269329 - DNA, 456 bp, Glycine max
catttgctcccagtacagagcttaaccgagcttcacaaagatgaatcgggaaaaggggatgaggatggccggttcgggtagaactgggggaaagggtaccatgagaagaaagaagaaggctgtccacaagacaacaaccacagatgacaaaaggcttcagagcaccctgaagagaataggggtgaatgccatcccggctattgaggaggtcaatatctttaaggatgacgtagttatccagtttctaaatcccaaagttcaagcatccattgctgctaatacttgggttgtcagtggttctccacaaacaaagaagttgcaagatatactccctagcattatccaccaattaggaccagataacttagaaaacctgaagaagctagccgagcaatttcagaagcaggctcctgaaggagccggcggttcaaccacaggtctagaggagaatgatga

SEQ ID NO: 269330 - DNA, 387 bp, Glycine max
cccacgcgttcgcgaagaagaagctcataggcttcatcgctgagaagagatgcgcgggtctagggctccgtttggcatggcactctgctggaacttacgacgtgagctcgaagaccggaggtcccttcggaaccataaagcacccctccgaactcgctcactgcgctaacaacggtcttgacatcggtgttaggcttttgtagccactcaaagcggagtgtgctattttgagctacgccgatttctaccacttggctggcgttgttgccgttgaggtcaccggtggacctgaagttcccttacatcctggaagagaggacaaacctgagccaccaccagagggtcgcttgcccgatgccactaatggttctgaccatttgatagatg

SEQ ID NO: 269331 - DNA, 250 bp, Glycine max
atctgcagtacgattagaccttggtcctggtgttgttatcccactccaaactcacgctgttgcgcttgaactactcggtgttctgcatggtcgcattcttgttggattcatatctttaggtaacatatgtttatcagatggtgctaaaaaagggagagctcatggttttcccacaaaggttggtgcactttcaaatagctgttggtaagagaaaggctcttgcttgtactgtcttcaggattacttttgc

SEQ ID NO: 269332 - DNA, 454 bp, Glycine max
ctcgctcttctccgccacttctgaatctattgaatcaacaatcatgtcggacgaagagcaccaggtcgagtccaaggccgacgccggagcctccaaaacctaccctcagcaagccggtaccatccgcaagaacggctacatcgtcatcaaaggccgcccctgcaaggttgtggaagtttcgacttccaaaactggaaagcacggtcacgctaagtgtcactttgttggaattgatattttcactgccaagaaacttgaggatattgtgccctcttctcacaactgcgatgttcctcatgtgaatcgtactgattaccagctcattgatattgctgaagatggatttttgagtctgcttactgaaaatggtaacactaaggatgacctcaagcttcccactgatgagagtctgctcactcagataaaggatggatttgctgagggcaaggatctt

SEQ ID NO: 269333 - DNA, 425 bp, Glycine max
ctcacgcgtccggtgattatagactatctttatataataatataaataagaataaaaaaataaaggaaagaaaaagaatctatataaatataaaaataatatatataaggtacaaatagtaaatcgaggtacccattttatgataaactttccttccatttttgatcctctagtaagcctagtatttccggcaattgcaatggcttctttatttctttatgttcaaaaaaacaagattttttagatacagaaaacaaagtaaaattctggggttttttattccccaattataatactaaattcaaaaaaaggagagtaatgagtataatctttcgctcagacgatgtactgatatattctatggcggaggttcgaagaacaagcaatttattttgggcacgtttcactttgttaggttcattggg

SEQ ID NO: 269334 - DNA, 437 bp, Glycine max
cccacgcgtccggtttctgcagggagttagtgttggtaccatcaaaaccaaggcaaatgtttgctgcgttcagttccccctggattctgctcgtttccttgcttttggttcagcagatcaccgaatatattactatgatcttcgcaaccttaaaatgccactttgtactttagttggacataacaagactgtgagctacatcaagtttgtagacactgtgaaccttgtctctgcttccacagataacactatgaagctctgggatttgtctacatgtgcatctcgagttatagactcaccgattcaatcattcactggtcacgcgaatgttaagaactttgtggggttatcagtatccgatggttacattgccactggttcagagacaaatgaggtgttcatataccacaaggcctttcccatgccagcattgtcat

SEQ ID NO: 269335 - DNA, 410 bp, Glycine max
cacgcgttcgaccacgcgtacgaccacgcgtacgctagaaatattgtgatgaaaatgaacgtactgggtttcttggctgctacaattggggtagcgtggcaatgccatgcgtacgatatgttccctatccgaatgaacactggctatggtgcccgtactttcgaggtgaaatgcgcacgttggaggcttgctatggaagcacacaacatctttggctttgagaccattcttgaagagtgccttgaagcaactcaggaatacattcatggcgaacaatatacatcagacttcaaaacacttaaccaacaagcttactcttatgccagagacctctaagtccattctaaggacacattctgtgttcaatatacatggcacctgcatttcataatattcatactgcatataac

SEQ ID NO: 269336 - DNA, 363 bp, Glycine max
tccacgcgtccgcccgctctctctctcgatcgttatatcctctctttcacccacaggagaagagggattgaatcatagggaatttggagcgtgaattgtcatgcaataaaattcgatcgattttgatattctaagtcgtagtatccagattattactcgaaatgatgaatactttatggagggcttgattgaaccaacaaaagttagtacccaggctctgtttacaaaaaaccaattggtaatatatctaccaacaccactgatgtcatatactgatgtttgacagaaaatatttattaagaaattcagaaatggaacaagttgtaacaaatttacgtattagtgtaatatttgtcctatatt

SEQ ID NO: 269337 - DNA, 434 bp, Glycine max
gtttatcgtgaggagaatatgaagttgtttgttttctttgttgctgcagtagttttggtagcatggccatgccatggcgcatgctaccaaaggttccctctccgaatgaaaactggctatggtgagcgttcttcggaggtaaaatgcgcaagttttaggcttgctgtggaagcacacaacatccgagcctttaaaaccattcctgaagagtgcgttgaaccaacaaaggactacattaatggcgaacaatttagatcagactctaaaacaggtaaccaacaagctttcttttatgctagtgaacgcgaagtccatcacaacgacatatttatattcggcatagataacaccgtactctctaatatcccatactatgaaaaacatggatatggcgtggaggaatttaatgaaaccttatatgatgaatgggtaac

SEQ ID NO: 269338 - DNA, 412 bp, Glycine max
cattgacatgtcttcatccgtctacaagaattgggtattcactgaccaagcattaccagctgggctcgtgaagagaggattggcaggtgaagatccctctgcaccccatggccttcgtcttgtgatagaggactactcttatgctgttgatggacttgaaatatgggatgctattaagacatgttttcatgaatatggctccgtgtattacccatcagatgcagcagattagcaagatactgagctacgagcatggtggaaggaagctgcggagaagggtcatggtgacttataagaatagcactggtggcctaacatgcatacaactgaacatctcattcaatcatgcgctatcatcgcttggacagcttcggctattcatgctgctgataatttaggacaatatccttat

SEQ ID NO: 269339 - DNA, 419 bp, Glycine max
  unsure (1)..(419): unsure at all n locations
gatggatgtctcttcctcggaggagcattcttcgctctcatcctcgtctggggtttctcctcggtcaccaccaccatccctaacgacacccccaacttcgaatctctttcaaaaaacgacgccgcttcgcaccacatcgctcccgatttcaacttcgacccacccgacagaacattctacgacgacccgcaaatgggttacaccatggacaagaaagttcgcaactgggacgagaagcgcgaggagtggctgaaactccacccttccttcgccgccggagcgagagaaagggttttcatggtgaccggttctcagccgaagccgtgccggaaccctacaggcgaccaccttctcctgcggttctttaaaaacanagtggactactgtcgggctcacgggtgcgacatttttacaacaac

SEQ ID NO: 269340 - DNA, 191 bp, Glycine max
gcaaagcatcttccctcagccaaaacctgcaaaacctctacctgacatcatcagggagagtgggcaccagcatgccagagagtatgtggagggagataagtattatggagccaatgcaaccataaacgtttgggacccaataattcaacaacccaatgaatttagcctttcttaaatgtggattatgggtg

SEQ ID NO: 269341 - DNA, 453 bp, Glycine max
cccacgcgtccgcccacgcgtccggtggatcgagatcctctcttgtttctctgtttgaatttggattcgaatttgaatttcagttaatctcgttttcactgccagggttgtgttttatttttatttttttgatttgatatttctgcagagttgggtttttttttatataactgataatgggtgatagcagtgttcaatctgggtctccaaatgcaaaaccagatcttgttgacggagactcggcggtttccaataacgcgacattggaaaccattgttcaaagtttccaagattcaatgtctcttggtaagagacacaagttctgggaaactcagcctgtggggcaatacaaggatgttggggactccagtttgcccgagggcccgattgagccctcaactcctttatctgaggtcaagcaggagccttacaaccttcctaatgcttatgagt

SEQ ID NO: 269342 - DNA, 423 bp, Glycine max
cccacgcgttcgaccacgcgttcggagataactagaaacagtgtgatgaaaatgaaggtccttgttttcttcggtgctacaatttgggtagcatggcaatgccatgcgtacgatatgttccctctgcgaatgaacactggctatggtgcccgtactccggaggtgaaatgcgcaagttggaggcttgctgtggaagcacacaacatctttggctttgataccattcctgaagagtgcgttgaagcaacaaacgaatacatccatggctaacaatatagatcagactccaaaacagctaaccaacaagcttacttttatgccagagacctagaagtccatgctagggacacatttgtgttcagtatagatggcacctgactctctaagattgcatactacaaaaaacatgggtattgggtggag

SEQ ID NO: 269343 - DNA, 369 bp, Glycine max
aatgctaaggcacttgtgactgctctaacccgccgtcagaaaggaacttgcgttccatcaagtgttttaatgggcataccagatgggagtctatcatcaaaggaaacaggttcattgactccttttggtgatcctcgctcaagaagagatctgactgcaatacaaaattttggaaaacgtatgctacaaagatgatgaacgtgttgcatatgagctgtcctttcaaatgttgacaagatacatacatgtaactctagattctacaaagctaggcgattctgcattccatgctagagacttatccacggccattgactgctctacacaattcatcgatggtggaaccatggtatcacctactgtgtatgc

SEQ ID NO: 269344 - DNA, 416 bp, Glycine max
ctatctatagtaacagaatatttgcctaggggcagtttatttcgcctaatacataagccagcggctggtgagattctagatccaaggagaagattacggatggctttagatgtggctaaagggatcaattatctccactgtctaaagcctccaattgtgcactgggatctcaaaaccccaaatctgttagtggacagaaattggaccgtgaaggtctgtgattttggattgtccagatttaaggcaaatactttcttatcatcaaaatccgttgctggaacacctgagtggatggctccagaatttcttcgaggagaaccttcaaatgagaagtctgatgtttacagttttggggttatcctgtgggaacttgtgactctgcaacaaccatggaatggacttagtcatgcccaggt

SEQ ID NO: 269345 - DNA, 160 bp, Glycine max
cccacgcgtccgtgctgatatgcactattcatttaggagcattagctatgtttgtgaatgtcactttatgttatgtgggtaagtcacctaatacacttcacgtacctacgttgctgactcttaccggctttaataaatcttctgcccttgttccatattt

SEQ ID NO: 269346 - DNA, 246 bp, Glycine max
gaaaaaggagcatgttggctatatataaagtttagggcaacaatcatatttgtttaccatggggaatgacaccatcggtgacataataacctatataagagatgctgtacatgtataaaaaatgaatggttcaaataccatttactaacataacataaaacattgtaaaaatacttttacgcgagggttttgttgaaaacgtcagaaaacatagagaaaacgacaaatattttttagttttaactc

SEQ ID NO: 269347 - DNA, 366 bp, Glycine max
gccaattcatcattttctctcttctctgcttcttcttgttcaaatcttaggagctgaggagagtcaatcgagagaaagatgtctggtatcgctcgtggacgccttgctgaggaacgaaagtcatggcgcataaaccatccacacggtttcgttgccaagcccgagactctacctgatggcaccgtaaatttgatggtctggcattgcactattcctggcaagaccgggactgattgggagggtggatatttcccactgacaatgcactttagtgattattaccctagcaagcctcccaagtgcaaattccctcaaggtttcttttaccctaatgtgtatccatttggaactgtttgcttgtctata

SEQ ID NO: 269348 - DNA, 466 bp, Glycine max
cccacgcgtccggacacaatacagagtgagttgttgctccttcgccacaactctctgccaacatgggtatctccagagattctatgcacaagaggcgtgccactggtggcaagaagaaggcctggaggaaaaagagaaagtatgagcttggtcgccagcctgctaacactaagctgtcaagcaacaagacagtcaggaggatccgtgttagaggtggaaatgtgaaatggagggcattgagattggatactggaaattactcctggggaagtgaagctgtaactcgcaagactcgtgtactagatgtggtttacaatgcctcaaacaatgagcttgtgcgtactcagactcttgtcaaaagtgctatcgttcatgttgatgctgctccattcaaacagtggtgtcttcagcactatggtgttgagattggtaggaaaaagaagacagctgccaagaaggaaactgc

SEQ ID NO: 269349 - DNA, 457 bp, Glycine max
cccacgcgtgcgcaaacatatctgttcctcttctgtccctcaatggaaggatcaggatccggggtggttacagtctacggcaacggggccatcaccgagaccaagaagtcccccttctccgtcaaagtcggcctagcccagatgctccgcggcggcgtcatcatggacgtcgtcgacgccgagcaggcccgcatcgcggatgaggccggtgcctgcgcggagatggccctggagcgtgtccccgccgacatccgggcccaaggcggcgtggcccgcatgagcgatccgcagctcatcaaggatatcaagcgggccgtcacgatccccgggatggccaaaggccgcatcggccacttcgttgaagcccagatcctcgaagccatcggcatcgactacgtcgactagagcgaggtcctcaccctcgacgacgacgccaaccacatcagcgaacacaact

SEQ ID NO: 269350 - DNA, 331 bp, Glycine max
gtcgtcccactcatacgcccacgcgtacgtgtctatgtcgtttaggagtatcatccttgaaaggaatgcatttgatgtgaggtttgtatatagcgggacatgcacgtcacagtcacacagtgattctattgcccatgatagtttggtggtgcttgatggattgaatcatatttgttgggctaacatgccccctgagctttttagggatgtgctcatgagaattgacgcctcttatgatttctggcctgtccagaaacatgtcttctcctgcgccggagtttgccgcaatttcagataaatcatgattgaaattttcaaagtcccttaacta

SEQ ID NO: 269351 - DNA, 378 bp, Glycine max
cacacgcgtgcgagctttagtttcgttcaagatgctatatgcaggacataagaagaaagagatggaaaatgtcattaccaatgcaggtcgattccttgaagatacacaaacagctgatggttcatggtatggaaattggggagtttgcttcacttatggctcttggtttgcacttggacgtctaacagctgctggttagacttacaccaattgagctgtcattcgcaaagtcggtaaatttctacttacaacacaaagagaggactgtggatggtgagagagttatctttcatgcccaaaaaagatatatgtacctctagaaggaagccgatcaaatgtttgacatacagcatgggctcttatgggactaattcatgc

SEQ ID NO: 269352 - DNA, 405 bp, Glycine max
tcgcaacattcaagacattacagctccttctccttttggaatccattgagcgtacaagggtgaagaggcctaagccgcgaggcatgaacgagaatgacgaagaagaaggcgtataagaggtgttagagattgatgttgagtacgatagcactgatggtgttaggcttgatgtgttcatcaacgaccaaggtgataatgagattggaccccaggattcagagtttgctggaagctttgtgactttgtcttacttgccgcatgtcaatcataacatcatcaccatagctttttttaaatggccattaacgtatcagttgaatgacttgggagtaacaaatgacgattatagtatttctgtcacactggctcccatattttgatacaagtctgttataatttatgact

SEQ ID NO: 269353 - DNA, 450 bp, Glycine max
cccacgcgtccgtgacgatgtcgtttaggagtatcatccttgaaaggaagggatttgaggtgaagtttggatatagcatgagatccaggtcacagtcacacagtgatgctattgcccaggatagtttggtggtgcttgatggattgaagcagagttgttgggctaacatgccccctgagcttttgagggatgtgctcatgagaattgaggcctctgaggattcctggcctgcccagaaacatgtcgtcgcctgcgccggagtttgccgcagttggagagaaatcatgaaggaaattgtcaagtcccctcaactatccggcaagctgacattcccaatttccttgaagcagcctggtccaagggactctcttcttcaatgctatattaaacgaaatcgcagtaatcaaacatattatctgcttcttggtttaaaccaagcctcaactgatg

SEQ ID NO: 269354 - DNA, 232 bp, Glycine max
ccagagccaacgtaggtgtaacactcttctttttcgtcgtcgcaatgggacgtgtgatccgtgcgcatcgtaagggggcaggctcggtcttcaagtcccacacgcaccaccgcaagggccctgcacgctttctgagcctggatttcggagagctcatcggctacctgaagggtgtcgtaactgacgtcattcaccatcctggccgtggcgcgcctctcgctaaagtctgcct

SEQ ID NO: 269355 - DNA, 363 bp, Glycine max
ctcacgcgttcgaaaactttctaaaacccttttgcaaacttgttcatagacttaagcactcttgtgccactgatgggcgtataccgccaggtacttgattggagtctgacggacgcatgccttctactatacacgctgctcaagagcttggactacgtaaccttatcttgtggcctgctagtgcctgggcttacttgcctatcatgaactttcccactctgggtgataaaggtcttacaccactcaaagatgatagttatctgacaaatgggtatttggacttcaaagctgactggattcttggaatgaagaacttccggctgaaggacatacctgactgtatcttgacaacggatctaaatg

SEQ ID NO: 269356 - DNA, 449 bp, Glycine max
cgcagtcataacacactatcaccaccacttcatcaactctacttgacaacaatattgtcaaacgcaaaatctagttacatactcggtttcttcttcttgaaatggctctccaggctgcttctcttggtcctgctactttatcggctcttaaagagggacagagtggacgtgtctctcaaggactccagctcgatcggtctttcattctcagaacctatcaaagctaactctagatcttctgcattgaggtgcacgagggaattcgaacaaaagctctgtgctgagacggccgtaacagtggctacagcctctgcagcagttaccaagtctacaccacaaggcaagaaaacattgatgaacggcagtgttgtgataactggggcttcatttggactaggcctggacactgatgaagctttggctgacaccggaaaatggcatgtaataat

SEQ ID NO: 269357 - DNA, 452 bp, Glycine max
cccacgcgtccgctcgtttcttacaaggctctactctactgcttcaccttctgctggagaaaaggcagtggtgatacagggcttcggctactctctctgcagccaaaccagcccttcaggcaaatgggaaaggcttctctgaattctctggcctccgcagctcatcaggcttccttcccttctctagaaaatcttcagaggattcccattctgtcattgccttccagacctatgcagatggaagcagcggacgatacaagaagggtgtgacagaagcaaaactgatcgttgccataaacggatttggaaggattggaaggaacttcttgaggtgctggcacggtctcaaagactcccctcttgatgtcattgccatcaacgacacctgtggcgtgaaacaagccttttaccttctcaagtacgaattgatcctcggaacctttgatgctgat

SEQ ID NO: 269358 - DNA, 456 bp, Glycine max
gtgctttcagctctggttgaaaccatgaagaaaggaactagctttggtgcaccctgtctgctggaaaacactttggcagagctggttatcaatgcggtccccagcattgaaatggttcgctttgtcaattcaggcaccgaagcttgcatgggtgcactacgtctcgcccgagcttataccggaagagagaagatcatcaagtttgagggctgttaccatggccatgctgatccttttcttgttaaggcaggtagtggagttgccaccttgggacttcctgattctcccggtgtccccaaagctgccacttttgaaacccttacagccccctacaatgacactgccgccgttgagaagctctttgaggctaacaaaggagaaatcgctgctgttttcctcgaacctgttgttggaaacgctggtttcattgttcctaaacccgattttcataatttc

SEQ ID NO: 269359 - DNA, 429 bp, Glycine max
aaaaaaagacaacccagagagcgcgtcttaataaacgctcttctctgaaaacccccgagttcttggcttctttcttcttcgctttcgcttcttcgatcttcgatcttcgtcgctgaaaatgagagagtgcatttcaatccacatcggccaggccgggattcaggttggaaacgcctgctgggagctttactgcctcgaacacggcattcagcctgatgggcagatgccaagtgacaagaccgttggtggaggtgatgatgctttcaacaccttcttcagtgaaactggggcaggaaagcacgtgccccgcgcgatttttgtagaccttgagcccactgtgattgatgaggttaggactgggacataccgtcaactattccatcctgagcagctcattagtggaaaggaggatgcatcaaacaacttttg

SEQ ID NO: 269360 - DNA, 414 bp, Glycine max
cacatttggaaagtgatgtagcgctttttatcattcgcattgcaaagcaaacaccttgcaaattgcaacggcttccaacaaggttgttgccaccatcttggatctttctctccttgcctactcaacatcattcaccaatgcatgtggcacatgccacccaaaacctactccttctgcccctactccatacatggaagtgccccaaggacacatctaatctaggggtgtgtgctgatgttctaggacttggtaatgatgatgctggttccactgtctctagcaagtcttgtgcattgcttgaaggtttggctgattctgaggctgcactttgcctatgcactgctattaacgccaatgctcttggaatcaacttgcatgtgcctatcacactcagtgtgctactcagtgcttggc

SEQ ID NO: 269361 - DNA, 417 bp, Glycine max
cccacgcgtccggtgaatcaagaaccgctcttctatggctgctctgcaatacttggaatcgctgcgcaattcgcacgctgagctctccgattggtacaattcgctggcggatctgtaccagaagaagctctggcaccagctcactctcaagctcgagcagtttgtggctctcgccgtcttccaggctggtgatgctttaatacaattatatcacaatttcatcacagactttgagacgaaaatcaaccttctcaagcttgcacattttgctgttatagtttctcggcagtattctgaaaaagaagctgctgttggttatcttggaggggtcattcagaaaacttcaagacactagagagcagcgcatagaagaacctattctttacattaatgatcaaatagcaatattcaagcttg

SEQ ID NO: 269362 - DNA, 366 bp, Glycine max
tccacgcgtccgggcgagtgagaaatgccagaaggagaagagaaagacaatcaatggagacgagttgctatgggccatggccactttaggatttgaagactacatagatccgcttaaggtgtacctggctaggtacagagaggctgagggtgacactaaatgatctgctagaagtggtgatggatctgctacaccagatcaagttggccttgcaggtcaaaattctcagcttggtcatcagggttcggtgaactatattggattgcaggtgcaaccatagtatttggttatgccttcaatgcaaagccatgaatagtttagatgcttctacgcatcttatttatgtgtctttaatgcttgtacgca

SEQ ID NO: 269363 - DNA, 469 bp, Glycine max
cccacgcgtccgcccacgcgtccgttctattcattcaagattcagcaagtgcgttttggaagcagagaccgaaatacggcgagatggcccgtacaaagcaaactgctcgtaagtcaactggaggaaaagctcccaggaagcagcttgcaaccaaggctgcacgtaagtctgcaccaacaactggtggtgtgaagaagcctcatcgttatcgccctggaactgttgctcttcgtgagattaggaaataccagaagagcactgagctcctaatgaggaagcttcctttccagaggttggttcgtgaaattgcccaggatttcaagactgatctgcgtttccagagccatgctgtgcttgcattgcaagaggctgctgaggcataccttgttgggctctttgaggacactaacttgtgtgccattcacgccaagcgggtgactattatgcccaaggatattcagctggcaag

SEQ ID NO: 269364 - DNA, 440 bp, Glycine max
cccacgcgtccgctcttaccctgctgttccaggtgggaatagcaactcttcatcttcaggtgcgagtaaaagttccagtggtcagattgaaggaccacctggtgccaatctatttatttatcacatacctcaagaatatggagaccaagagctcacaactgcatttcaaccgtttggtagagttttgagtgctaaaattttcgtagataaagtaacaggagtaagcacatgttttgggtttgttagttatgatactccagaagctgctcaagctgccattagtacgatgaatggttgtcaattacgtggcaagaaattaaaggttcagcttaagagggataacagacagagtcagatttactgatgaatgtggatacttctcaattctcctgacccatcagatgtcaatacaatttgtaattttcatgttacagaaaatt

SEQ ID NO: 269365 - DNA, 457 bp, Glycine max
  unsure (1)..(457): unsure at all n locations
agtgaagcaaatatggcatactctcaacttcaaaaggtggaaactagcctgcagatcaaggcttgtgctgaacagttctatgatggtttttgcaacaagccacacactattgccaacatttcaccagaaaatattcagtcagttgaagttcataaaggtgaatggggcaaagagggatcaatcgtctcctggaactatttacatgagggaacagtttgtgtagccaagcaagtgcttgaaggcatagacaaggaaaataacaaaatgacaatgaaggtcatagagggtgacgtgctgggactctacaagagcttcaagtctaatttgcaagttactccaaaaggaaagggcagcgtaatgctttgggcaatggaatacgagaaacaagaggaccacattcctgacgctcataccttgttgcaactggctgttgtggttagcanaaaaattgatgctt

SEQ ID NO: 269366 - DNA, 348 bp, Glycine max
accacgcgtccgcccacgcgtccgattaaaatagtgagagtactagaaggtcgtgagatcgcatagggaataatggaaacagaagcggttgaagatattgtgattgtgggagctggaattgctggccttacaacatccttaggacttcacacgttgggtatcagaagtttggtgctagaatcttcagacactttgagggtcactgggttagctttgtcaatatgggaaaatgcttggaaggcattggatactgttggtgttggagacttcatccgtcactaacatctccagctcaatgggattgtcactacttcattggttacagggcaacatacatcagatatgcct

SEQ ID NO: 269367 - DNA, 428 bp, Glycine max
ataacataacctcttgtgttgtcatctaagaaaacctagtgagagtgagcacacattgatcagggacaatggcagcctactcaagccatgctttgaaaaccatccctttttcttcctttgtgaagcctgtcagtaccaaaccaacatcattcttcacaccttcacctaccaaacctttcttaccctttacctcaccaaaccactctctcaccaaaaatctcaagctgaactccactttgccacacttttgcttgtcttcagttcccaagaaatctttcacttgtagaagccaggcttatcctgttgactcagaaaaagtgcaagaactgagtgtgtattagatcaacgagcgtgaccgttgaagccccgtgtatcttcgattgatctataaaagtgtcaatttccttggtgaggtagttccttttagc

SEQ ID NO: 269368 - DNA, 440 bp, Glycine max
agaagaacaagtagttgagaactaagaaggagaagcaaatggcttcctcaatgatgtcttccccagctgttaccactgtgaaccgtgccggtgccggcatggttgctccattcactggcctcaagtccatggctggcttccccaccagaaagaccaacaatgacattacctccattgctagcaacggtggaagagtgcaatgcatgcaggtgtggccaccagttggcaagaagaagtttgagactctttcctacctgccagaccttgatgatgcacaattggcaaaggaagtagaataccttcttaggaagggatggattccttgcttggaattcgagttggagcacggtttcgtgtaccgtgagcacaacaggtcaccaggatactacgatggacgctactggaccatgtggaagctgcctatgtttggttgcactgat

SEQ ID NO: 269369 - DNA, 279 bp, Glycine max
tccacgcgtccgcgagataactagaaacagtgtgatgaaaatgaaggtccttgtggtcttcgttgctacaattttggtagcatggcaatgccatgcgtacgatatgttccctctacgaatgaacactggctatggtgcccgtactccggacgtgaaatgcgcaagttggacgcttgctgtggaagcacacaacatctttggctttgagaccattcctgaagagtgcgttgaagcaacataggagtacatccatggcgaacaatatagatcagacttcaa

SEQ ID NO: 269370 - DNA, 452 bp, Glycine max
cagaaaacgaagatgggggcggaatccgcgtcaccggcatgcaattctcctacgacgtgcagcggccgccgctcttcctcgacttgaacctcaacgtctctcccggatcccgctgcctccttttcggtgccaatggatccggaaagacgactttgctgaagattctggcggggaagcacatggttggaggaagagacgttgtgcgcgtcttgagtggttccgcttttcacgacactcagctcgtttgtagcggagatctcgcttatttgggcggatcttggagcaaaaacgttggctccgctggagaaattccgctccaaggagacttctctgctgaacatatgatctttggagttgagggtgctgatccagaaaggagagataagttaattgagctgcttgatattgatctacagtggcgaatgcataaggtatctgatgggcagcggcgt

SEQ ID NO: 269371 - DNA, 261 bp, Glycine max
cccacgcgtccggagcacaacaggtcaccaggatactacgaaaccgtgctccaactcgaattccaagcaaggaatccatcccttgctaagaaggtattctacttcctttgccaattgtgcatcatcaaggtctggcaggtaggaaagagtctcaaacttcttcttgccaactggtggccacacctgcatgcattgcactcttccaccgttgctagcaatggaggtaatgtcattgttggtcttcctggtggggaagccagc

SEQ ID NO: 269372 - DNA, 456 bp, Glycine max
agcacgcgtccgatcacgcgttcgcacacgcgtacggtctgaaacgatcgctgccacggcgaccacgaccctctcttcaaacccggaactcgcatcttgccacggacagcccgctacatattcttagcgcgtcgtacccaccaccaagttattctcattcaaacaaggcacaatctgcatgtccctaacccaacaccccatacgacctgcaatccttcaaattccaacccatcgtagaatccatcgtctcacgcgaaatgacgcgccggtacatgaccgacatgataacctacgcccacaccgacttcgtaatcgtcggagccagctcggcggtgctctcctgtgcgtacgagatcagcaagaaccccgccgtgagcgtcggcataatcgagcagaccgtgagcgcccgcagaagcgcgtggatcggcggacaactcttatccgacatggtggttc

SEQ ID NO: 269373 - DNA, 448 bp, Glycine max
cccacgcgtccgcccacgcgtccgcccacgcgtccggtttgtttttttgttgagaagagagaggggctgtggcgtcgtcatcatggcttatcacgttgaaggtgaaaccttgcattttcgggtctcctcggagatccgcggtggttcggaattgtgcgaagtcaacggcggggacaatatcgacgagttggagcctggacagctggagggcgaagaaggcgcttcagcttccggagtacccagatgcgaatgaattggacctagtcctccaaaccctctcttcttttcccccaatcgtcttcgccggcgaggcgaggaatctggaggagaagctcgctcaggctgccatggggaacgcttttctccttcagggcggtgattgcgccgagagcttcaaggaattcactggcaacaacattcgtgacaccttccgtgtcatccttcaaat

SEQ ID NO: 269374 - DNA, 427 bp, Glycine max
cccacgcgtccgcccacgcgtccggataactagaaacagtgtgatgaaaatgaaggtccttgggttcttcgttgctacaattttggtagcatggcaatgccatgcgtacgatatgttccctctccgaatgaacactggctatggtgcccgtactccggaggtgaaatgcgcaagttggaggcttgctgtggaagcacacaacatctttggctttgagaccattcctgaagagtgcgttgaagcaacaaaggaatacatccatggcgaacaatatagatcagactccaaaacagttaaccaacaagcttacttttatgccagagacctcgaagtccattccaaggacacatttgtgttcaatatagatggcaccgtactctctaatattccatactacagaaaacatggatattgggtggagaaattt

SEQ ID NO: 269375 - DNA, 447 bp, Glycine max
cccacgcgtccgaagaccaagtggaccgactccgtcaccggcaccatgccactcggaaaaaagatcgaggccgggctcatcgccggcggcatcggcgccgccgtgggaaaccccgccgacgtggcgatggtccgaatgcaggccgacggccgccttcctccggcgcagcggcgcaactacaagtccgttgtggacgccatcacgcgaatggcgaagcaagagggcgtcactagcctgtggagaggctcatcgcttacggtgaaccgcgccatgctcgtgacggcgtcgcagctggcttcctacgaccagttcaaagaaatgattctcgagaacggcgtgatgcgcgacggcctcgggacccacgtcacggcgagcttcgcggcggggttcgtggcggcggtggcgtccaacctcatcgacgtgatcaagaccagggtgattaacatg

SEQ ID NO: 269376 - DNA, 474 bp, Glycine max
atcaaaattacacacatttagctacccttactttctatggcttccaacaaactcctggccaccatgttggtgctttctctcctctcttactcaacattcactcatgccaattgcccaccacccactccatctgcaaagcccacaccaccaactgcaataccaacaccacccacaccaaagcccacaccacccactccaaagcccacaccaccaactgctaagcccacaccacccacaccaaatcccacaccacctactccaaagcctacttgtcctcctccttctcctccttcaccaccatcaaacaaagcctcatgccccaaggacacattaaagctacgtgcttgtgctgatctcttacgacttgttaacattattgttggaactcctacttcgagccagtgttgtgcattgatcaagggttcggcggatctggaagctgcactttgcctatgcaccgcaattaagagcaat

SEQ ID NO: 269377 - DNA, 218 bp, Glycine max
gcagagtgcagtgacttgagaatggccttgccagtggtcgtcgacgcagagtacctcaaagaggtcgacaaggctcgccgcgatctccgcgcactcatcgctaacaggaactgcgctcctctcatgcttcgattggcctggcacgatgccggaacttacgatgctaagaccaagactggtggacctaacggttcgatccgtaacgaggaacagtattc

SEQ ID NO: 269378 - DNA, 421 bp, Glycine max
gtgaggagaatatgaagttgtttgttttctttgttgctgcagtagttttggtagcatggccatgccatggcgcatgctaccaaaggttccctctccgaatgaaaactggctatggtgagcgttcttcggaggtaaaatgcgcaagttttaagcttgctgtggaagcacacaacatccgagcctttaaaaccattcctgaagagtgcgttgaaccaacaaaggactacattaatggcgaacaatttagatcagactctaaaacagtttaccaacatgctgtcttttatgctagtgaacgcgaagtccatcacaacgacatatatatattcggcatagattacaccgtactctctaatatcccatactatgaaaaacatggatatggggtggaagaatttaatgaaaccttatatgatgaatg

SEQ ID NO: 269379 - DNA, 282 bp, Glycine max
cccacgcgtccgaatctttatataataatataaataagactaaaaaattaaaaaaaaaaaacgaagcgttttgggtttaaaattaattgtttaaggccaaattgtaaatcgaggcacccattttatgataaactctccttacattttgtgtcctctagtaggccaaatatttccggcaattgcaatggcttctatatttctatatgttcaaaaacacaagtttttttagattcagaaaacaatataaaaatctggggttttttattccccaaattatatact

SEQ ID NO: 269380 - DNA, 364 bp, Glycine max
gaaaatgtggcttgtgcagctctcaaccccatttctgaacggacatggtcattccaccacccttctgtccaagcacagttcggcggtgactcagacccactgggccccaccgagtttcctgcctcaaatcaatgcgatgaagacaatgcaggggagagtggtgtgctccaccagcgacaagacggtggcagtggaggtggtgcggctggcccctcacccaaagtacaagaggcgcgtgaggaagaagaagaagtaccaggcccacgaccccgataaccaattcaaagtcggcgacatcgtccagctccagaagaccaggcccatcagcaagaccaaggcctttctcgcactccccgttcccaaa

SEQ ID NO: 269381 - DNA, 407 bp, Glycine max
attagtctcatcgaaatgggagaacagaatgacattacgctgacatgggagaatttggaagctactgtgacaaatggaaagaaccgaaaactaattcttcatgggcttacaggttatgcccagccagggagacttttggctataattggtccttctggcagtggcaaatccacacttcttgatgctttagcaggaagattgacatcaaacataaagcaaacagggaagattctaatcaatggccacaaacaagaactggcttatggaacatcaggctatgtaacacaagatgatgctatgctgtcatgtttaaccgctggggaaactgtatactactcagctatgctccaattttcaaacaccatgtctgtagaagagaagaaggaacgagcagatatgacactgag

SEQ ID NO: 269382 - DNA, 361 bp, Glycine max
atttcatcacaatcttcctcaatcatgtcttcagaaacaaaagcagaaacacaaactttgaccaccccctcttactcctcagatgttgacaatggtatagtgaaggatgtagtcctatggagaagaaagaaaataaatataagcgttcttgttgcggcaacagcggcatgggtgttgatggaagtgtttgaattcaacttcctcactctcatatcatgggtggccatactcggtcttgcttcaatattcctctatgccaatatgcttagacttttgggcaaggaaccaccgaacttgttggggttggaagtgagtgaaaaaacaacaacgagaatagcacacacagttcgagcatggattg

SEQ ID NO: 269383 - DNA, 329 bp, Glycine max
cccacgcgtccgcatttatagtttactattgaaagatgggtttgaaaatggcaatactgatcctaggcctgctggccatgttccttttggtctcctcagaggtggcatccgcgaattcaaaagaggtgacaaatggagttgaagatgccaaatatcctggtggaggctatggtgggggttacccaggcaatggcggtggtggctatcctggccgtggtggtggctaccctggtcgtggtggtggctatccacgtcgcggtggtggttaccctggtcgtggtggcggctatccaggccgtggaggagggtattgtcgctatggctgttgc

SEQ ID NO: 269384 - DNA, 386 bp, Glycine max
aaagcaagctcatcctagagttttaaaaatggcagcagcctcctccatggctctctcttccccatgcttggctggcaaggccgtgaagctgggcccatcagcccccgaagtcgggagggtcagcatgaggaagaccgtcaccaagcaggcctcctacggaagcccatggtacggcccagaccgcgtcaagtacttgggcccattctctggcgagcccccgtcctacctcactggcgagttcccaggtgactacggctgggacactgctgggctttcggccgacccagaaaccttcgccagaaaccgtgagctcgaagtgatccactccaggtgggccatgcctcgggccttgggctgcgtcttccccgaactattgtcccgcaacg

SEQ ID NO: 269385 - DNA, 474 bp, Glycine max
  unsure (1)..(474): unsure at all n locations
cccacgcgttcggaagcatcaggccactcctgcccagttggcattagcatgggtacttcagcaaggcgaggatgttgtacctatccctggaacaactaagattaagaacctggatcaaaacataggtgccttagcagtgaaactgtcagaaaaagacctgagagaaatttctgaggcggttcccattggtgatgtagcaggtggtagatactacaatggattggatcacttttcatggaagtatgctaacacaccttcaaaagattcaaaaatctcaacctgacgcacccaaccaaccctttggttagggaatctaccaagtcatcatgaattgagggtagcaaggctggcaaaggctaatatcaggatgctatttaaatatcaataatgtagcccttcttgatgttggacttnctagatatttggttggttaaaatttttaatttagactgtaatacttttttatatgcaaca

SEQ ID NO: 269386 - DNA, 183 bp, Glycine max
ggttggtggtggaactcggtcttcttcttttggtggtctggggttggggttggtttttctctcacctgaaaatgtcttgctgcggtggtaactgtggttgcggaagctcctgcaagtgcggcaacggctgcggaggctgcaagatgtacccagacttgagctacactgagtcaaccaccaccg

SEQ ID NO: 269387 - DNA, 366 bp, Glycine max
gaagattccacaacagtgggagggagatccaaaaagagagagtggaaaagatggcgcggttgatcacagtggtgtggtgcgcggtggcggtgctattatgcgccgcggccggtgcgtcgtgggtggaggaggcggcgaacccgatacgaatggtgtctggcgtggaggcggacgtggttcgggtgatcggggagtgccggcgtgcgttgaagtttgctacgttcgtgagcaggttcgggaagagttaccaaagcgaggaagagatgaaggagaggtacgagatattctcgcagaatcttaggttcattcgctcccacaacaagaagcggttgccctatactctctcttgtaatcattttgctgatt

SEQ ID NO: 269388 - DNA, 407 bp, Glycine max
ctgatctgcgtttccagagccatgctgtgcttgcattgcaagaggctgctgaggcataccttgttgggctctttgaggacactaacttgtgtgccattcacgccaagcgtgtgactattatgcccaaggatattcagctggcaagaaggattcgtggtgagcgtgcttgagttggtgcgttctgtgtttgtgaagatggattgttggtggctgcggatggtgttttgttactaagttttctttttgttgaagcctataggttattagggaaaaataggtgtttacttggtagtcatattaattgtcattggcaaatactgcctaagacactgtgaaggtctggttgttagaaatttggcatgtatttgatttttttggatcctttatttctcggtttatttctgggt

SEQ ID NO: 269389 - DNA, 423 bp, Glycine max
caagctccttatcgtgtttgcattgcagagagagagagaatggcgaccacacccggtttgtgtggcagtgtgttgttgagcacctcgttcctgaggaagcaggcaatggcatcagtgaacatgagaatgctgaaggctaatgctggtgtttttggcttaaagggagggcgtggagggcgtgtgagtgcgatggcaagttacaatgtgaagctgataaccccagaaggagaacaagaatttgaatgcccagatgatgttttcattcttgaaaaggctgaggaatttggcattgaccttccctactcatgcaaagctggtgcttgctcttcctgtgccggcaaagttgtttctggcaaagtcgaccaatctgatggtagttaccttgatgatacccaaatcggtaacggatttgttctcacctgt

SEQ ID NO: 269390 - DNA, 348 bp, Glycine max
ggttttagcgctattctctttacagttacatgttttctacgagagaggcattgtatgatgaattatgtcctcttcataatgggggatcctcagtctcaagattccggggacaaagtttgtggcataagcccaagcattgttgttcactgggtcagcaaggtgatcagcaaggttttctaaaggtccctttcctgtcacaattgcctgaacaaagaatccaaacatggagaacatggcccaactaccattcttgaactccttcaccttcagctcatcaaaagcctctgggtcatcatcaagaaccaatgggtcaaagctggcaccttgatagattggatcagtcacctt

SEQ ID NO: 269391 - DNA, 478 bp, Glycine max
cccacgcgtccggcgagacgagccgtttctaattaatgataggtgtcaagtggaagtgcagtgatgtatgcagctgaggcatcctaacagaccagtagaacttccaaatatgttcgtttggatcccaacttagaagataatgatcttgatgacagatttcggggtctgcaacgtcctaatgtgagaaaagataagtggttagagattgagatgggagagttcttcaactcaggcttggaagaagatgaaatctatatgaatgtcagggaaactagtgatatgtggaagcacggcttcattcttgaaggaatagaagttaggcctaaacatgtttgatccgtcaaatgattgtacttaggcctaacctgaatggatggtggtgtttgctacagtggatggagacccggaataatacagactggttatctcgataaattctttttctgatttagcttctttgagataaaaaatcaactta

SEQ ID NO: 269392 - DNA, 464 bp, Glycine max
  unsure (1)..(464): unsure at all n locations
aaggcacacatccaatatatatttcattaaataacaacatgaaattcacactcaagtcatagtttctcatcgtttcagggtttttttttttccctcactttccggggacaaagtttgtggcataggcccaagcattgttgttcactgggtcagcaaggtgatcagcaaggttttctaagggtccctttcctgtcacaattgcctgaacaaagaatccaaacatggagaacatggccaacctaccattcttgagctccttcaccttcagctcagcaaaagcctctgggtcatcagcaagacccaatgggtcaaagctgccacctggatagattggatcagtcacctcaccaagaggcccaccagcaatacggtaaccctcaactgcacccatcaagataacttgngtggcccagatggcaagaatgctttgtgcatggatcangcttgggtttgccaagtagtca

SEQ ID NO: 269393 - DNA, 467 bp, Glycine max
cccacgcgtccggaggagagcattcctgctttccagagagctggaaccattattgcaaggaaagaccggtttcggcgaagttccactcagatggcaaatgatccctacactctggttgtagctctgaatagttcccaagcagctgagggtgaactctacatagatgatggcagcagctttaattttctgcaagggggctatatccatagacgatttattttctcgaatgggaaacttacttctatagacctggcacctgcttccagtagcaaggggcgttatccatcagatgctttcattgagaggattatcctgctgggacatgctcctagctcaaaaaatgcactcattgagccatcaaatcaaaaggttgatattgaacttggccccctttgggttctaagggctcgtgcaccagctgttacaaccatacgtagacctaatgttcgtgttgcagaagattggac

SEQ ID NO: 269394 - DNA, 441 bp, Glycine max
cagctgtgtacaaaaattgtggaaactgacatgggtgtgtccaggacgtttgaggggaattactctgagtatgtaatttcaaaagcagcatggattgaagcacagtatgctgcatgggagaagcagcagaaagaaattgagcagacaagagacttgataagtagattaggtgctggagcaaattctggccgtgcttcttctgccgagaagaagctggagagacttcaggaagaggaactagtggagaaaccttttgaacggaaacaaatgaaaatcaggttccctgagcgtggaaggagtggaagatctgttgtagcaattaataacttggaatttggctttgaggataagacacttttcaaaaaggcaaatcttacaattgaaaggggagaaaaaattgccattattggtccaaatggatgtggcaagagtcctttactg

SEQ ID NO: 269395 - DNA, 360 bp, Glycine max
ctcactcactagcttcttctctgttctcaccaatggcatcaacaatatcagcaatggccatgatcaacgccaaatgcgtcaacccaaagttccccaatcccaccaagctcgcaccatcaaaaccctcccttcagatcaaccttccaaagggcctcatagcctcacccgaaagcactaaactttcccccgcgacagcaatcgcaggagcaatattcacaaccctcggaacctgcgacgccgcattcgctgttcaacaaatagccgacatagcagaaggcgacaaccgcggactggcactgttgctgcccataatcccagcaatagggtgggttctgttcaacattctgcagccggcgctga

SEQ ID NO: 269396 - DNA, 460 bp, Glycine max
cccacgcgttcgagtactttcaagttcctttgtcaataagcaagaccaatacactgtggaaggagtgcagaatcttggagacaaagcagtgatgtgtcataggctaaatttcagaactgcagtattttactgccatgaagtccgtgaaacaacagctttcatggttccattggtggctggtgatggaaccaatactcaggcacttgctatttgccactcaaatacttctggaatgaatcatcaaatgcttcatcaacttatgggagttgatcctggaactaaccctgtttgacatttccttggaagcaaggccattttatgggtacccaatttatctggggacactgtctatcataccaacattggtgcttaattagtccatgcatcttgagcaccatgagaatgagattgtgtataaaataaattatcatgtgctgcgtgttgtgcaagtactatcttc

SEQ ID NO: 269397 - DNA, 440 bp, Glycine max
gttcgctccatagctgcagcattagggtttttcatctgcttcaatggggaagggaacagggagttttggtaagagaaggaacaggactgacactctctgtgtgaggtgtggccgtcgcagcttccatctccagaagagtcgttgcgccgctcgtgctatccccgccgcacgcactacgaaatataactggagcgtcaatgcaatccgcagaaagaccaccggaactggcaggatgaggtacttgcgtaacgtgccttgccgattcaagagtggcttcagagaaagtaccgaaactgctcctaggacgaagggagcacctaccactgcataaacctgtcaaagatcgttgcttgctgggtacggacttacaagaatagattgctcccctgtgcttatggcaagtattttggaacacttatctgtagagtctgatagctact

SEQ ID NO: 269398 - DNA, 401 bp, Glycine max
attttccatctcatggtccagaatattccccaagggcaagggagcagttaacaccttgggggtcaagttctacaacgatctgattaatgagattatagcaaatggcttaaagccatttgtcacgctgtttcattgtgacctaccacaagctcttgaagatgaatatgggggatttctcaaacctgaaatagtggaggacttgcgtaactatgctgacttttgcttcaagacatttggtgatcgggtgaagcactgggtaaccctaaatgaaccatatggctacagcgtgaatggctaccgtggtggaaattttgcaccacgtagatgttctaactacgatggaaaatgccctgctggtgattctttcaccgagccctacattgttaaccaccacttaatac

SEQ ID NO: 269399 - DNA, 482 bp, Glycine max
  unsure (1)..(482): unsure at all n locations
cccacgcgtccgcccacgcgttcgccgactccgattccgattccgactcagaaccctttccatgctgctttgaactaacgaagttttgttcacgcgccttgttttctctgcattgtatccaattccatggaggagtcttcttacaccggtcttcccactagccatttgctcggttcagttcctgctgtcgtaactgaagaaaataatgcctcgaaacatgtggccaccagtgcgaatatgcaaatattccctcccaacaatggaagagacagaggaccgggatataatactcttggcagtcctactgaagcctttgaacaacagccagcatacaactggaggggagtctttagcatctcatcttattcagagtatttcaatgtagacacggatgttgtcctaatcagattgataagttccttgaatccagttgctggagactntttcagcatgatagatgctaaccctgatttatatgggct

SEQ ID NO: 269400 - DNA, 349 bp, Glycine max
  unsure (1)..(349): unsure at all n locations
cccacgcgtccgcccacgcgtncgcccacgcgtccgcccacgcgtccgatagagtgaaagaatgggtgagaaaagcaagattttgatcataggaggcaccggctacatcggcaaacatatagtggaagcaagcgcaaaggctggaaatcccacttttgctttggtgagggaatccacactctctgacccctccaaggcacaactcatccacaattttgaggctttgggcgttaatttggtccgcggggatctgtacgatcatgagaagttggtgaaagctatcaagcaagtagatgtcgtcatatccacgctgggtcacctgcagcttgccgatcagctcaagatcatc

SEQ ID NO: 269401 - DNA, 467 bp, Glycine max
cccacgcgtccgcccacgcgtccgctttcttatcctgtgcattctactttacagagcgatgaagcagaatctgtcttgctagataatctttctgaatttgctgctagcctcttggctgcctatgatagtggtgatctggtagcagcacttgaagaaggccataccggctggcaaaagtgggtgaaaggctttggaaaatcgctaaagcgcaagggaaaatcgcttttcatgccgctccgacttctgttgaccggcaaactccatggacctgacatgggggcaagtgttgcattgctctatagagctgggactagcaatgtagtagctcctgaatctggctttgtgacactggatgaaagatttaaaatgcttaggcaaattgactgggaagcattgtccaaggaccaacctgtcaaagagactgctgctcctgtctaacttagaattcactttcaaggtctatcaaa

SEQ ID NO: 269402 - DNA, 477 bp, Glycine max
cccacgcgttcgggcagctgcttctcctatggcaagccaactcaagtccaccttcactaaaactcttgtagctcccaagggcctctctgcctcttcaccactccacctcctgccttctaagaggcaatttagcttcactgttagggccatccaatcagaaaagccaacctatcaagtgattcaaccaatcaacggtgatcccttcattggaagccttgaaaccccagttacatccagccccttgattgcatggtacttatcgaaccttcccgcatacaggaccgcagtgagcccactactaagagggatcgaggtgggcctggcccatggctaccttctggtgggcccattcgtgaaggccgggcctctgaggaacaccgagatcgccgggcaagcgggctctctcgccgctggtgggcttgtggtgatcctcagcctttgcctgacaatctatgggatttcatctcttaacgaagg

SEQ ID NO: 269403 - DNA, 473 bp, Glycine max
ctttctttcactcccacaattcttcttcgtctggagctgcgatcctctgcttcgatggccaccgtgcaactccaatccctaacccttggtcgctcctccgcactcccttccgccaccttctcccctccgatcgccctctccggccgccggaactccgccgcgctgccgcgctacgcctgcctccgactccgacccgccgccgagacctgttttccgactcgcgccgccttgagaaccgctcctcgcggcggaggcgtcaagtgcgaggcaggagacaccgccgttgaagtggctcctattactgatgcaaattggcaatcacttgtgcttgaatctgagtctccagtattggttgaattctgggctccatggtgtggtccctgccgtatgatacatccgataattgatgagctggcaaaggaatatgttggtaggcttaagtgctacaaactcaatactgatgaaagcccttc

SEQ ID NO: 269404 - DNA, 428 bp, Glycine max
tcggtggtgttagatctgtacctgcctagccattgatttggaaaagtccaagcttcaaagatgagtaagcttcagagtgatgctcttagagaagctatctcaggaatcatgactgattccatggataagaacaggaaatttgtggagaccattgaactccaaattgggctgaaaaactatgatccccagaaggacaagcgttatagtggctctgttaagttgcctcacattcctcgcccgatgatgaacatttgtatgcttggagatgcccaacacgttgaagaggctgagaagataggattggactacatggatgtcgaggccttgaagaagctcaacatatacaagatattggcgaaaaaactagccatataatatcatgcctttttggcctctgaagcagtcatcaagcagattcctcgtctctt

SEQ ID NO: 269405 - DNA, 470 bp, Glycine max
tccacgcgtccgagaaaatccatacaatcttcaccaccaaaaagaaaataatggcaatggccagtgcaacaactctagccacaatcactgttgtggcggctagccccagtgttggcagcagaaggagtgggaagaggaatgtgaacttcatcagagggttgaattcttttggagggttgaaggctcagaacaatgtgacattactaggccttcctgtgtgcactgagcagagctttgcaaatgtggtgagctcattgaaatatccatcatcatcatcacgtaaggggagaggtggacgtgctgccttttcaacatgcaatgctgctgatgagattttccagattgcagccatcatgaatggccttgtgcttgttggggtggcaataggcgttgtccttcttcgagtcgaagcgtttgtggaagagtctgagtgagaattgcatcaactattaatgcagttttcatatatg

SEQ ID NO: 269406 - DNA, 333 bp, Glycine max
ggccagtctcaaacagtatttgtaaggggtttcgatacatcccttggagaagatgagatacgagggagtttgcaagaacattttggatcttgtggggacattaccagggtgtcgattcctaaagattatgagtctggtgctgtcaaggggtttgcttacgtagacttcagtgacgttgatagcatgggcaaagctctagaactccatgaaactgaacttggaggttataccttaacagtggatgaagccaaacctagagataatcagggttctggtggtagacgtgccggtggaaggagtggtggcggtcgatttggtggtaggagtggtggt

SEQ ID NO: 269407 - DNA, 283 bp, Glycine max
ggtgttttgcattacgttgattttcatcgttctatatactgtgtattactgatagaaagcttagccgcataagtgcttttttttttcggtgaaggccaaaaaaaaaaaaaaaaaaaaaaaaaaaaaaaaaaaaaaaaaaaaaaaaaaaaaaaaaaaaaaaaaaaaaaaaaaaaaaaaaaaaaaacaaaaaaaaaaaaaaaggtaaaggctccaaaaatattaacattaaaaccctcttaagtgggcgccgaaaaacattttaacaattgaaaaaatccaaaaa

SEQ ID NO: 269408 - DNA, 459 bp, Glycine max
aataactccattttccctctgtcttccccccctcctctacacaaaaatatattattagcatggagaaggtgaattttgtgaagaatggagagcttagattgcctccggggttccgtttccacccgactgatgaggagctggttctgcaatacttgaagcgcaaggtcttctcctgccctttgccagcctctatcattcctgagcttcatgtttgcaagtctgatccttgggatttgccacgtgatttggagcaagagagatacttctttagcaccaaagtgggcaaatatcccaacggaaatcgctccaacagagccacaaattccggttattggaaggcaactggcttggacaaacaaattgttacttcaaaaggcaacaaccaagttgtcggaatgaagaagacactttgtttctacagaggcaagcctcctaatggatccagaactgattggatca

SEQ ID NO: 269409 - DNA, 445 bp, Glycine max
gaaccattcatcaccacctttcttcattcattcacggttttccttttcgactcgatttgttgtttgttttgttttgtttccttgacgatgttgacgatgagcaagcagaagaagaaccagaacgcgaagaggctgttgataagcatcaatgtgctggggagcgcggggcccattaggttcgtggtgaacgaggaggagcttgtggcggcggtcatcgacaccgcacttaagtcctacgcgcgtgagggcaggctttccgtcctgggaaacaacaccaccggtttcgtgctttattgcccccatcttggatctgatgctttgagtccttgggagagaattggatcacatggggtgaggaatttcgtgctgtttaagaagccagagggtgtggcggatgtagatggaagtacagcactttctcgcagcagcagggggagtgggagct

SEQ ID NO: 269410 - DNA, 474 bp, Glycine max
tcggctgcctggagtgctactgagaggaagaatgcgtttcatagtacggactattctggtggtgatgccatcactggatatgtgagggcttgtgatgttcacctcattgcggaggctgctgatgacgcccatgattggaacggtgattgtgcgctctactctcaccactccgggcagctgattgttcttcctcacaatgtggcgctgccggtgtcccttaaggtgttggagcacgaggtgtatgctgttgcgcctattaagaaggttttgggtggtggctacagctttgcgcctcttggacttgtgaacatgttcaatgctggtgctgctgttgaagggctggtcttcgaggaggatgggttggttcgtttggagatcaaagggtgtggtaagtttggggcttattcttctgccagaccaacaaagtgtttgctgggaaaccatgagctgctggatttcgattacgatgctgat

SEQ ID NO: 269411 - DNA, 476 bp, Glycine max
cagactccaaaacagttaaccaacaagcttacttttatgccagagacctcgaagtccatcccaaggacacatttgtgttcagtatagatggcaccgtactctctaatattccatactacaaaaaacatggatatggggtggagaaatttaactcgaccttgtatgatgaatgggttaacaagggcaatgcaccggcactgcccgagactcttaagaattacaacaagctggtgtctcttggcttcaagattatattcttgtcaggaagaacactggacaaacaggccgtaacagaagcaaacttaaagaaggctggctaccacacatgggaaaaattaattctcaaggatccacaagatccttccactccaaatgcagtttcatacaaaacagcagcgagagagaaactgataaggcagggatacaacattgttgggatcattggagaccaatggagcgatctcctcggaggccac

SEQ ID NO: 269412 - DNA, 481 bp, Glycine max
ctcaagctccctcgcgacttcaacatcgttgcagaactcgttgccgcgcttctgaatcttgcacggcggcggcgattccctggctccatggcggcgcgagtccactcctccgcggcagcggctccgccttcgtgcctcagcgaacgtctgaatcaaatccctcttaataataaacaaattcgcatggcgcatcataagcataagagcgcgcacgcacaggatgagggtatcgaacgtaacgagtttggagcttccattgtgattttgacttgcgctcaatcaggcacgatttggcatattatgcacaagcatgctctatggaactcggtgacaggcttaagcactggagtacagtaaacgagccagtgctatataactacggaggttatgagatgctccaagcgttctgctgactgcactgctggcgatactactaccgaaccctatgtcgttacacaccacctcattcttgctcatgttg

SEQ ID NO: 269413 - DNA, 357 bp, Glycine max
gtttcctttcattttccctcactttctcgctccccaaacgcccctctctctcctccaatggccgaccagctcaccgacgaccagatcgccgagttcaaggaggccttcagcctcttcgacaaggacggcgatggttgcattactaccaaggaacttgggactgttatgaggtcacttggtcaaaacccaactgaggcagaactgcaggatatgataaacgaggttgatgctgatggcaacggaaccatcgacttcccagagttcctcaacctgatggctcgcaagatgaaagacaccgactcagaggaggagcttaaggaggcttttcgcgtgtttgacaaggatcataatggtttc

SEQ ID NO: 269414 - DNA, 306 bp, Glycine max
gagactgcatatccgtttaccaacaggcttactgttatgccatacacctgcaaaaggagcatgctattccagttcgtcactttgctaaagagtctgcccctcctgcccttaagggagatcagatgctgaagaacatttttgtggaggtgaagaacaaatttgagactgccataggaatattaaagaaggagaagatcaccattgacccagaagatccagctgctgcttctcattatgcaaaggtcatgaaaacagttagagagaaggcaagcttgttgtcggagtcccaagacatactatccacca

SEQ ID NO: 269415 - DNA, 390 bp, Glycine max
  unsure (1)..(390): unsure at all n locations
cccacgcgtccgcacattttagaagaataccccctcttttgctgcatcagaggagttgtaaattaagagcatggctgcacaagctcttgtatcatcatcttctcttaccttctcagcggaggctgcaagacaaagtcttggaccaagatcactccaatctccatttggcttctccagaaaagcctcctttctcgttaaggcagctgctaccccccctgtcaagcaaggatcagacaggccctttgtggtttgcatcanagcanagtctttcttacttggatggcagcctttcgggtgactatgggattgaccctctgggactntcagacccctgangaacangagnggtcattgagccggaatgctagcatatggtgagataatcaatgg

SEQ ID NO: 269416 - DNA, 405 bp, Glycine max
tcgccacgcgttcgtccacgcgtccgccaattcccaattcccaattcccaattcgaaacccttattcctttcaaagaaccaaattgagtgatcgtgatggcaccaaaggcagagaagaaagccagcggagaagaagcccgcggaggagaagaagtccacggtgggagacaaggctccggcggagaagaagccaaaggccggaaagaagcttccgaaggagggaggcgccggcggagaagggaagaagaagaagagaaacaagaagagcgtggagacatacaagatctacatcttcaaggttctgaagcaggtccaccctgacattggtatctcaagcaaggccatgggaatcatgaacagcttcatcaacgacatcttcgagaagcttgcccaggaatcttctag

SEQ ID NO: 269417 - DNA, 243 bp, Glycine max
gtacttaaactacattcccatttgtttttgctgtttgagatttcatcatcctgtatttttggtttctgttttcggacttcaatggaaattaatggatgagaactaatgaattaaaaaaaaaaaaaaaaaaaaaaaaaaaaaaaaggcaaacaatataaaagaacaaaagaaaaaaacacaatgcaagccacctcttaaatcattgggggcgggctttaaaagactagcttggtcacctttttt

SEQ ID NO: 269418 - DNA, 403 bp, Glycine max
ggactttaggttgggatttgggaattagggttattcgcgtggcgaagatgattgaggtggttttgaacgatcgattggggaagaaggtgcgcgtgaagtgcaacgacgatgataccatcggcgacctgaagaagcttgtggcggctcagactggcacaagagccgacaagatccgcatccagaagtggtacaccatctacaaggatcacatcactctcaaggattacgagatccatgacggcatgggtctcgaactctactacaactaaacacaacaaggtgtgttttatgcgtaatatactatgtgctgggaatgggataagcgctaaatgtaattctgacttgcgaaagttcccatgatttgaaataatgtacatctccaaatgatattgggtattatata

SEQ ID NO: 269419 - DNA, 413 bp, Glycine max
ggactataggatgggatttgggaattagggttattttcgtgtgaaagatgattgaggtggttttgaaggatcgattggagaataaggtgcgcgtgaagtgcaactacgatgataccatcggcgaccttaagaagcttgtggcggtttagactggcacaagagcctataagatccgcattcataagtggtacaccatctacaaggatcacatcactctttatgattactagattcatgacagtatgtgtctttaactctattacaactaaacacaataaggggttgttctattgcgcaatatactattttgctgtgtaaatgggagtaaacgcttaaattctaatttatgaacttgcgaaaagtatcgcattgattttgaaaaaaattattcatttttccaaaattaatatttg

SEQ ID NO: 269420 - DNA, 385 bp, Glycine max
atctaaaacggtctctgagatattttgcatttagtgaatgaactcttccccagctgttaccactgtcaaccgtgccggtgccggcatgggtgctccattcactggcctcaagtccatggctggcttccccaccaggaagaccaacaatgacattacctccattgctagcaacggtggaagagtgcaatgcatgcaggtgtggccaccagttggcaagaagaagtttgagactctttcctacctgccagaccttgatgatgcacaattggcaaaggaagtagaataccttcttaggaagggatggattccttgcttggaattcgagttggagcacggtttcgtgtaccgtgagcacaacaggtcaccaggatactacgatggacgc

SEQ ID NO: 269421 - DNA, 344 bp, Glycine max
caggaactggaatagcagaactaatagctcttgagatgtcaaagcagacaaagacacctatagaggagactcgcaagaagatatggcttgtagactcaaagggtttgattgttggctcaagaaaggcttcacttcaacacttcaagcagtcttgggctcatgagcatgagcctgtaggcagtctcttagaagctgtaaggtaatcaagcctacaggcttgattgcgtcatcatgagtgggaaaaacatttacaaatgaagtaattgacgctgtgacttctataaatgaaaaacctcttgtcctggctctctccaatccaacttcacagtctgagtgtacagctg

SEQ ID NO: 269422 - DNA, 474 bp, Glycine max
gcagctgtctaggcatcgaactctgatggacatatttgataaggctcctgttgttgatgaggatgtatttgttgcgcctagtgcctccgtcattggagacgttcaacttggaagaggatcatccatttggtatggagttgtcttgaggggtgatgttaacagcatcagagttggaactggaactaacatacaggacaactctctggtgcatgttgcaaagtcaaatttaagtgggaaggtgttgcctacaattattgggaataatgttactgtcggccacagtgctgttatccatggttgtactgttgaggatgaggcttttgttggtatgggtgcaatactacttgatggcgtagttgttgagaaaaatgccatggttgctgctggagcccttgtcagacagaatacaaggattccttctggggaggtatgggcaggcaatcccgcaaagttcctgagaaagctcactgatga

SEQ ID NO: 269423 - DNA, 392 bp, Glycine max
cgtgagttcaaggctaacaagatctccgaggaagagtatgttaagtcaattaaggaggaaattcgcaaagttgttgaacttcaagaagagcttgatattgatgttcttgttcatggagaaccagagagaaatgatatggttgagtacttcggtgagcaattgtcaggctttgccttcactgttaatgggtgggtgcaatcctatggttcccgttgtgtgaagccaccaatcatctatggtgatgtgagccgcccaaagccaatgactgtcttctggtcatctctggctcagagctttaccaagcgcccaatgaagggaatgcttaccggtcctgttaccattctcaactggtcctttgttagaaatgaccaacctagatctgagaccaccta

SEQ ID NO: 269424 - DNA, 408 bp, Glycine max
  unsure (1)..(408): unsure at all n locations
ttggaattcgagttggagcacggtttcgtgtaccgtgagcacaacaggtcaccaggatactacgatggacgctactggaccatgtggaagctgcctatgtttttttgcactgatgcttctcaggtgttgaaggagcttcaagaggctaagactgcataccccaacggcttcatccgtatcatcggattcgacaacgttcgccaagtgcagtgcatcagcttcatcgcctacaagcccccaggcttctaagtgtgaaaaatttgcaaagcatttgtagccgccaccccactntgtttgtttgtacttaaactacattcccatttgcttttgctttttgagatttcatcatcctgtatttttggtttcttgtntcggacttcaatggaaattaatggatgagaactaatg

SEQ ID NO: 269425 - DNA, 358 bp, Glycine max
  unsure (1)..(358): unsure at all n locations
ttggaattcgagttggagcacggtttcgtgtaccgtgagcacaacaggtcaccaggatactacgatggacgctactggaccatgtggaagctgcctatgtttttttgcactgatgcttctcaggtgttgaaggagcttcaagaggctaagactgcataccccaacggcttcatccgtatcatcggattcgacaacgttcgccaagagcagtgcatcagcttcatcgcctacaagcccccaggcttttaagagtgaaaaatttgcaaagcatttgtagccgccaccccactttgtttgtttgtacttaaactacattcccatttgnttttgctttttgagatttcatcatcctgtattt

SEQ ID NO: 269426 - DNA, 354 bp, Glycine max
atagcagcagaacagagagagcaaaaccctagagcatccatcacaagcagaggaagaagatggtgaagttcctgaagcctaacaaggcagtgatcgtcctgcagggccgctacgccgggcgcaaggcggtgatcgtgaggaccttcgacgagggaaccagggagcgcccctacggccactgcctcgtcgccggaataaagaagtacccaagcaaggtcatcaagaaggactccgcgaagaagaccgcgaagaaatctatggttaaggccttcgtgaagctcgtgaactaccagcacctcatgcccacgcgctacacgctcgacgtggatctaaaagacgcttgtacccccgatg

SEQ ID NO: 269427 - DNA, 447 bp, Glycine max
gctagtttatcgtgaggagaatatgaagttgtttgttttctttgttgctgcagtagttttggtagcatggccatgccatggcgcaggctaccaaaggttccctctccgaatgaaaactggctatggtgagcgttcttcggaggtaaaatgcgcaagttttaggcttgctgtggaagcacacaacatccgagcctttaaaaccattcctgaagagtgcgttgaaccaacaaaggactacattaatggcgaacaatttagatcagactctaaaacagttaaccaacaagctttcttttatgctagtgaacgcgaagtccatcacaacgacatatttatattcggcatagataacaccgtactctctaatatcccatactatgaaaaacatggatatggggtggaggacattaatgaaaccttatatgatgaatgggttaacaagggcga

SEQ ID NO: 269428 - DNA, 353 bp, Glycine max
tttcgcgttgcgttttcttggtctccccgtcgatttttcttctgaattttaatacttcggaacttttagtttcctctcctggcttctggttggagtttccggcgaccttgtcggagattttgttgtttatttttcgcaccccttgtgaaacttctcaaaaaaaaaaaagaatgtttcttgttgattggttctatggaattttggcgacccttggtctgtggcaaaaggaggcgaagattttgttcctagggttagataatgctgggaagaccactttgcttcacatgctcaaagacgagagactggttcagcatcaacctactcaatatcccacttcggaggagttgagtatt

SEQ ID NO: 269429 - DNA, 415 bp, Glycine max
aactttttctacttaccttttctcttaatccaaatacgatggcagccatggcaaccacaaccctctcttcaaaccccaaactctcattcttcaacggaaagcccgtcacatattcttcccgcgtcgcgcccaccaccaaattatcctcatccaaacaaggcacaatttccatgtccctaaccccacccccctacgacctgcagtccttcaaattccagcccatcaaagaatccatcgtgtcacgggaaatgacgcgccgctacatgaccgacatgataacctacgccgacaccgacgtcgtaatcgtcggagccggttcggccgggctctcctgcgcgtacgagctcagcaagaaccccgccgtgagcgtggccatagtcgagcaagcagtgagccccggcggcggcgcgtggct

SEQ ID NO: 269430 - DNA, 389 bp, Glycine max
  unsure (1)..(389): unsure at all n locations
ctctgtccaaggtagacctcatcagaaggacaatccaaattggactgatgacacaaaggcaattcaagcctttaagaagtttggaaacaagctgaaggaaattgaggacaaaatctcagggaggaacaagaattcaagccttaggaaccgtaatggaccggcgcagatgccctacactgtgcttcttcctaccagtggggaaggccttactttcagaggaattcccaacagcatctctatctaatgagagtgtgtggtgtgtggtgtgtggttttctttccttccaacgtacctctcattgacaaataaacgtgcaaacttatgtgtgcataattttcttatgtatgcttaangtttgtaattggatgctatctacttnttcatatcta

SEQ ID NO: 269431 - DNA, 423 bp, Glycine max
gaactaggtgttacctgggatgtggacttgtacggggaattgctgaaaattggaggcggaaaagaaaggatgacagcatactttaacaaggtgggttggcctgcgaatgccccaacaggtgaacaagaaagaaaagaattcatagcttcactccacaaacaaaagacagaactatttatggcccttatagagaaaaaactgttgcctcttcgtccaggtgttgcaaagattatcgatcaggcttttgctcaaggagtccaagttgcagtttgcagcacttccaacgagaaggcggtctctgcaatagtatcattcttgctgggacctgagagagcagaaaaaatcaagatatttgcaggagacgtggttccccgtaaaaagcctgatcctgccatctacctattagcagccagcactctgaat

SEQ ID NO: 269432 - DNA, 384 bp, Glycine max
gaaacaatgctggaccgccttttccctgtgaatgatcctgctccagtttccagtgagacaactccccaagctgaaggttttgatccttcaacttcaaccactaccaagagtgatggtttgctgattcccaaggaattagctgagattgagtacatggagagcctttatatgaagagtactgtatcagctttgcatgttttgcaggaaattagaagtggaagctcaacagttagcatgttttcattgccaccgctgaaaataagtggttcagaagaaacatggaagaaaatcccggttctggaacaaacagccaagtaacctgctgggttacgttgaaagcaatgtagtgggatgtggttattttcccatctatttttttcattt

SEQ ID NO: 269433 - DNA, 290 bp, Glycine max
cccacgcgtccggcgttcaaataggggcactagcttcactttatgttgcttcagctgtgtgtgaacaagtcatgtaagagacttgactatgttgttttctctttcgaggctttaataaaatatgcgcccttgttccattcaaaaaaataacataatgatcccttctcaaatgtacttatttgtattaccctttctttatcatggaggaaacaaaaaacccaaaaatttaatggggcgggggttttagaggatccaacttaacatacgcgtgcttggaaaaaaatagtttt

SEQ ID NO: 269434 - DNA, 246 bp, Glycine max
catggctgcacaagctcttgtatcatcatcttctcttaccttctcagcggaggctgcaagacaaagtcttggaccaagatcactccaatctccatttggcttctccagaaaagcctactttcttgttaaggcagctgctaccccccctgtcaagcaaggatcagacaggcctttgtggtttgcatcaaagcaaagtctttcttacttggatggcagccttccgggtgactatggatttgaccctct

SEQ ID NO: 269435 - DNA, 309 bp, Glycine max
cgaccggaattccgggtcgccacgcgtacgctaattaaatactatggctgtcatggcaacctcaaccctctattgaaacccctaactctggttctgcaacggaaagcccggcacatattcttaccgcgtcgcgcccaccaccaaattatcctcatccaaacaaggcacaattaccatgtccttaaccccaccctcctacgacctgcagtgcttcaaatttcagcccatcaaagaatacatcgtgtcacgggaaatgacgcagccgcttcatgaccgacatgataacctacgccgacaccgacattgtta

SEQ ID NO: 269436 - DNA, 430 bp, Glycine max
cggacgcgtgggaaaaaagatcactctgaagaagaaaccaagaataccacgtttcttcatcatttttcattcctttcttgatcatcatattcatcactgttaataaataaataaataaaaactttctcatagattctgtaaccaacatcaacatcactgttaactatggcaacactcgctcccgggattttgttgaagctcctcaacggattgaacaccggcgtgaaacccacgaacgagcaccgcagctcgctcctgcaagtgaccgacatcgtccccgccgatctcgacgaaaaaaacctaatcccaaaacaagggtttttcataaaagtctccgattcctctcactctatctacgcgagtcttccctcggaccaagacgacgtcgttctcagcaacaagatgcaactcgggcagttcatctacgtcg

SEQ ID NO: 269437 - DNA, 351 bp, Glycine max
ttctctttctctttctctgtctgcttcttcactttctctcgtttcaatcgaaaaaaatcatgggcagaaaattcttcgtcggtggcaactggaaatgcaatgggaccactgaggaggtgaagaagattgttactactttaaatgaagctaaagtccctggagaagatgttgtagaagttgttgtgagccctccttttgtgttccttccttttgtaaaaagattgctgcgccctgatttccatgtctcggcccaaaattgttgggttcgcaaaagtggtgcttatactggagaggttagtgctgaaatgcttgttaatttgggaattccttgggttattattggtcactctg

SEQ ID NO: 269438 - DNA, 371 bp, Glycine max
  unsure (1)..(371): unsure at all n locations
cccacgcgtncgcccacgcgtncgnccaggttcgatggtgcggctttcctgaacagttggaggggtaagaagataatgtttgtgggtgactcactgagtctcaacatgtgggaatcactgtcctgtatgattcacgcgtcggtgccaaatgccaagaccggctttttgagaaaagaatcactgtccactgtgaccttccaggactatggagtaactatacagctataccgcacaccgtatttggtagacataattcgtgaaaatgtggggcgagtgcttacattggactccattgttgctggaaatgcgtggaaaggcatggacatgctgattttcaactcgtggcattggtggacccacactggaaaatc

SEQ ID NO: 269439 - DNA, 396 bp, Glycine max
cccacgcgtccgtgatcaacgaaatcttgaatcatctatctcaaaccaagaaaaagatattgaaaacgattatgtaggatcagacagtgaaaagaatagtaagggtgtgaagaaaaagaaagacaagaacaagatggaggcggaacttaatttcttactaagaaattttttgattttacatttaaattggaataatttcttaggtcaaagaatatttaacaatgtcaaaagatattgtctgctgattagattaaaaaatttaagagaaattacaatagcctctattcaaagaggagaactaggtctagatattatgatgattcaaaatcagaagaatttaattcttctaggcttaaggaaaaagaaaaataacaaatttatgaaaaaagaaatatt

SEQ ID NO: 269440 - DNA, 460 bp, Glycine max
atcattagagagtgaagtgttcttccctcacttgcttaagatgttggaaggaaaagctgtggtgagagagacagacatgccagagggaatgcagagctatgttatggaattagcacaccaagctctcgatgcacatgaagtttctgattgtcagtccattgctcatttcatcaaacagaaacttgatgaagcatatggacctgcttggaattccgtggttggaaaagactttggatcttgcatcacacatttatgtggaagtttcatattctttcgtgtggagatgatggaatttctgatcttcaaagatgggaagaatttcacagaaagcagggaagaagctattggagtgctgcagaaggctagaaattgtgattagtaaattccaaaattgttagttgttatagaacaacctaaactctttaatattcctaatgaatctaagctaaacatgttcaaa

SEQ ID NO: 269441 - DNA, 423 bp, Glycine max
atagggcactttgaagggaattcttggatacactggagatgatgtggtctccaccgactttgtgggctatagcagatcaagtatttttgatgcaaaggctggaattgcattgaataagaactttgcgaagcttgtctcttggtatgacaacgagtggggatacagctcacgtgtcattgacctgctcgtattcgttgccaaaaagtttttttaaggttgtactgaaaaaaaagtagcttggctagacattatgggctggtgtctagctgcaatttaaggtcttcttgcttcggcctaaatgataaatatgaataatatgggttccggaaccggtgatgttaccctgttaagagcattaaacattttcttgatggctcttcatacgaggggacggagtttttggattattatatacttgctcat

SEQ ID NO: 269442 - DNA, 326 bp, Glycine max
  unsure (1)..(326): unsure at all n locations
cccacgcgtccgaacattttacactcttttcttcttctcgttgttgcttcggtgttgaatcatggatcagaaagtcgatttcagtgctccgcattccatgggaaccactatcatcggcgttacttacaacggcggtgtcgttctcggagccgactctcgaaccagcactggagtgtatgttgccaaccgagcatcggacaaaatcacacagctcactgataatgtttacgtgtgtcgctctggatcggctgctgattctcagattgtctctgactatgtgncgctacttcttaccaacacacgatacaacttggacaacctgcgac

SEQ ID NO: 269443 - DNA, 428 bp, Glycine max
ctgcaactccaaaatgtcttccataggggcaaaaaatctagcactctcctcagcctttttggtccttttggtcggttttgcaacctcagacatcaaccaagacaaagcagaatgtaccgacaaacttcttggtctagctggttgtcttacctatgttggtggtgaagccaaagtccccgccatggattgttgctctggtatcagagaggctattgacaagagcaagaggtgcctctgcatcctcatgaaggatcgcgatgaccctaatcttggcctcaagatcaacgtcacccttgctctaagtttaccagatgcttgtcaaacacccaccaatataactcaccgtggtgatcttttgcatgtggcacctaactccacggaagctaacgtgtttgaggggtttaaaaatgccttgaccaacaaaacta

SEQ ID NO: 269444 - DNA, 437 bp, Glycine max
cccacgcgttcgctttttttcttccaacgctccttttccttctcatagccttcgccacctcggtctcgggccgccgtgacctcgggggagactttctccggctgccctccgaaactgataacgacgacaacttcaagggcacccggtgggccgtcctcctcgccggttccaatggttactggaattacagacatcaggctgatgtttgtcacgcctatcaaatattgaggaaaggtggtctgaaagaagaaaatattattgcttttatgtatgatgacattgcattcaatggggaaaacccaaggcctggagtcatcattaacaaaccagatggaggtgatgtttataaaggagttccaaaggattacaccggcgaaaaagatactggtgataacttctttgctgctttacttggaaataaatcagcactgactggt

SEQ ID NO: 269445 - DNA, 464 bp, Glycine max
gtgatgtgtcataggctaaatttcagaactgcagtattttactgccatgaagtccgtgaaacaacacctttcatggttccattggtggctggtgatggaaccaaaactcaggcacttgctatttgccactcaaatacttctggaatgaatcatcaaatgcttcatcaacttatgggagttgatcctggaactaaccctgtttgccatttccttggaagcaaggccattttatgggtacccaatttatctgtggacactgcctatcagaccaacattgttgcttaattagtccatgcatcttgagcaccatgagaatgagattgtgtataaaataaattatcatgtgctgtgtgttgtgcaagtactaccttctctagctagattgctagagctagaatttcaacctacctatgtgtactgataagatctgcttccctacttaaagagagcatcatcctgtgatc

SEQ ID NO: 269446 - DNA, 360 bp, Glycine max
cccacgcgttcgattcataggcccaagagcaaagaaactaagaagattttgagcacaatggcatccacacaatgcttcttgcaccaccatgccctcaccactccaaccagagcttcatcacagcgcttagttgtgagcaccaaaccaaaccacattgtttgcaaggcacaaaagcaggttgtccaagagggtgaggacactactaacattgtgtctcgcaggttggccctcactgttctcattggtgctgctgctgttggctctaaagttgcacctgctgatgctgcctatggagaagctgccaatgtgtttggaaagccaaagacaaacactgacttccttgcatacaatggggatgga

SEQ ID NO: 269447 - DNA, 474 bp, Glycine max
  unsure (1)..(474): unsure at all n locations
atcgaacccgtcgtagcagaaaaacttgtcaccatggtttcttccgacaaggatccacgagaggatgtccttcaagcctggtacatggatgatagtgatgaagatcaaagactcccccaccacaaagaacccaaggagtttgtctcgttggaccaacttgctgaacttggagtccttagctggaaactagatgctgataaccatgaaaatgatccagagctgaagaagattcgtgaagagcgtggttacacctacatggatgtttgtgaggtctgcccanaaaaagtgccaaattatgaacagaaaatcaaaagcttctttgaagagcatcttcacactgatgaagagatccgcttttgtgctgctggaagtggctattttgatgttagggatcgcaatgaagcttggattcgtgtgtgggtcaagaaaggaggaatgatcatcttacctgccggaatttatcatcgctttacg

SEQ ID NO: 269448 - DNA, 482 bp, Glycine max
attatcttcatcttcttcttcatcgaactgcggaggcacttagcagcagtagcagaaatggctaccacttctgcttcattcgctcgcttctccgtcatatcgcgaccttcttcgtcaaatccccaattcatcctcttcaacgccgctccccgaaccggaacccctcattcccgaaccggttcggcccggttcaggtgcttggccggccagaccgggttcttcacgaaactagggcggttgataaaggagaaggcgaagagcgacgtggagaagctcttctcgggattctccaagacccgcagcaacctcgccgtcatcgacgagcttctcctctattggaacctcgccgacaccgaccgcgtcctcgacgaactcgaagaggctcttttagtgtccgattttggaccaagaatcactattaaaatacgggagaatttgcgtgaggatatattttcagggaagcttaaatcacggaatgagat

SEQ ID NO: 269449 - DNA, 436 bp, Glycine max
  unsure (1)..(436): unsure at all n locations
atccaggcaaaacaatgaaagtacaattcagcaagcctccctttcaacaaccatggggtgttggtacatggttaaaggaaattaaagacactactaaagaaggatatagttttgaagagctatgcatcaagaaagaagccattgagggagaagagaagttttgtgcaaaatccttgggaacagtaattggttttgccatttcaaagctgggaaagaacattcaagtactttcaagttcctttgtcaataagcaagaccaatacactgtggaaggagtgcagaatcttggagacaaagcaaggatgtgtcataggctaaatttcagaactgcagtattttactgccatgaagtccgtgaaacaacagctttcatggttccattggtggctggtgatggaaccaaaactcangcacttgctatttgccactcaaatac

SEQ ID NO: 269450 - DNA, 447 bp, Glycine max
cccacgcgtccgctctcttctgttaccaatggctttctcatcaaactacatttctttccttgtcctgactacgcttttgtttgctcttcaaatcactgctagagacagccagttcttcagcaaagtcacccatttcgacaaagacaatgccaaagtgacagaacttcccaacaaagaagcaccagaagtaaacaagccagagcaacaaccacctttcattcccgagactgaaaacagctatggcctatatggtcatcatgatgagtctaaccaagtcccctccaccaccccgacttcttaccacccctacaagaccaagtttgagaactccaacaacaagtactacaacaatgatgcctataacacaaggttcttcgaaaccagttacaacaacaacaacaacaagtcttacaacacggattcttatgagggtaaccaatatgagtt

SEQ ID NO: 269451 - DNA, 335 bp, Glycine max
acgcccacgcgtacggtaaggaccaccttgcaaggcttattactcctgggagaccaacaactgggggtagcaagggcttttggtgacaggagcctcaacatgcatcttagttcaaaacctgatgtgcttgtcgaggaagtagatccacatacattgtttcttattctggctcgcgatggaatatggcaggttatgtcaaacgaagaaccattggaatgtattcgacaaataaaggatgctcaagctgcagcatagcacttgataaaagaggcaaatttcatgaaaagcaaggatgatatatattgcatatgtgtaaggttctaatgacacgtttt

SEQ ID NO: 269452 - DNA, 317 bp, Glycine max
cccacgcgttcgcccacgcgttcgaaaaaaaaaaattaaaaaaaaaaaaaaataaaaaaaaaaaaaaagggaaaaaaaaaaaaaaaaaaaaaggaaaaaaaaaaaaaaaaaaaaaaaggggggggagattaaaaagatttataaattaaaaatatttgtataaaaaaagggggggggccgtttttagggatcaaaatttatttcccggggcttgcaaagaaaaagttttttttttggggaacttaatttaatttcatgggcgggggttttaaaacggggggtttgggaaaaccttggggttccccaatttatttgct

SEQ ID NO: 269453 - DNA, 396 bp, Glycine max
ccaaaatgtatttggtttcaagtatacgacacaagtgacggttttcataattctttcctgccttatctccatctctgtcaatttcagtacgttccttgttattggaaagacatctccagtcacctatcaggttcttggacacctgaagacatgccttgtattggcatttggttatatacttctccgagacccatttagctggagaaacatactgggtattttgatagccatgattgggatgattctatattcttactattgcactctcgagaatcagcaaaaaactgttgaagctgcatcacaatcatcccagtgtttccaggcaagagaagatgaatctgatcctctgatgaatgtggaaaatggaagtgcacgtgtgagttctaatgtcggaca

SEQ ID NO: 269454 - DNA, 482 bp, Glycine max
  unsure (1)..(482): unsure at all n locations
cccacgcgtccggccaagtgaaagtgagaaaaaataaaaatcaaagagcataatgtcagggatcattcacaagattggggagacccttcatgtgggagggcacaagaaggaggaggagcataagggtgagcaccatgctggagaatacaaaggggagcaccatggtgaacacagtagtgagtacaaaggagagcatcatggtgaacacaaagctggagagtaccatggtgagcacaagccagagcacaaagaggggttcctagacaaagtcaaggacaagatccatggtgaaggcggcgccgccgatggcgagaagaanaagaaggagaagaagaagaatgagcatggccatgagcatggccatgacagcagcagcagcagtgacagtgattaaactgctgcatcacctatatatttaaaacggttatgggaccatagtagcgagggctgngccttatttctctctctcttctctctcttct

SEQ ID NO: 269455 - DNA, 359 bp, Glycine max
ctccattagattaccaagctctgtaactttgcttctcaacatggagtatcgtctgggaccgatttttactttactcaatattgcactggtggcaacccatgctgctttaccccctgaagtttactggaagtcggagcttcctactacgccaatgccaaaagccatcactgatatcctttactctgattgagtggaagagaaaagcagctcattgcatgttggatgtggaggcgtgaacgtgcatacacgataaggaggtggtagaggcaccactgccaacgtttgtggaaaaggacgcggtggcgtaaacgtgcatgcccgccacaagggaaaaccattgtatgtttcaggtagctcaa

SEQ ID NO: 269456 - DNA, 418 bp, Glycine max
gttgctgcatatttctaatacattcatcaagtgctttttttctccggtgccccctacattaagatgggtggtgaatattatgattttgggcctcacaagatccaccatagttcagtgttctatacaagtaatctttcttttgcctttgtcaacttgcgtcctgctgtgacaggtcatgtgctcgtctgttcaaagcgtgaagtgaagcgtgttgctgatctcacagacgatgagactatttatttatggcgcatatcaaataaacttggtaggcagctagagagctaccataaggcatcatcacttagctttggatccaagatggaccctaagccaggcaaaccgcgcctaatgttcatatccatatccttccctggaaaagtggtgattatgagaacaatggtgacatttatgatga

SEQ ID NO: 269457 - DNA, 442 bp, Glycine max
  unsure (1)..(442): unsure at all n locations
cccacgcgtgcgcccacgcgtncgcccacgcgtncgcaaaaactgtaagcattaattttcgaaatgggaaaaaacgaaaaataacttttccaaattcatgacaaccgaatcacacaaaaactattttatatgctgtttttctgtttgaaggatcacacaaactagtaaccagaaaaatggcagaaacaaagttgagctccttcaaagacaaaagatggtcactccatggcatgacagctctagtgacaggaggcacacgaggcatatggtacgcaatagctgaagagttagcagaatttggggcagctgtgcatatttgtgcacgtaaacaacaaagatattgataaatgtttagaagaatgggataagaaaagacttcccataacangggtcggcatgtgatgtactatctcgtgaccaacgtgaaaaattaatgaaaaat

SEQ ID NO: 269458 - DNA, 458 bp, Glycine max
cccacgcgtccgaaaaaccatggcaataacactcaacaatggcttcaagatgcctatcattggattgggcgtgtggcgcatggaaggaaacgaaatcagggacctaattctcaattccatcaaaattggttatcgccattttgattgtgctgctgactacaaaaacgaagcagaagttggagatgcgcttaaggaggcttttgatagtggccttgtgaagagagaggatctcttcattaccaccaagctttggaattctgatcaaggccacgttcttgaggcgtgtaaagacagtctcaagaagcttcagttaacgtatctagatttatatcttggtcactttcctgttgcccgaaagcatactggggttgggaatacttctagtcctttgggtgatgatggggtcctggacatagataccaccatatccctggaaacgaccttgcatgcaatggaag

SEQ ID NO: 269459 - DNA, 346 bp, Glycine max
cacattgcaaagaaaatacacattacattactaagtctttgttcatttgagtagtagtgatggctagcctcaaggttgcatgtgtggttgctgtgatgtgcatggttgtggtggccatgagtgctgcacccatggcacaggccgcaatcacgtgcgggcaggtcgccggcgacatgtctccgtgcttcagttatcttcgaagcggcggaaaaccgtcgcaagcctgctgcaacggagtgaagtccctcagcagcgcggcgaagaccaccgcggaccgccagggggcgtgcacgtgcctgaaaaaccttgccaataatatgggacagagtttgaatgccggcaacgc

SEQ ID NO: 269460 - DNA, 266 bp, Glycine max
acggggaaagcgagaaaaaacaaaaaacaaagagcatgatggcagggatcatccacaagattggggagacccggcatgggggagggcgcatgaaggaggaagagcataagggtgagcaccatgcgggagaatacaaaggggagcaccatggggaacacagaagggggtgcaaaggagagcatcatgggggacacaaagctgggaaagaccatggggagcacaagccacatcacaaagaggggggcctagacaaagtcaaggacaag

SEQ ID NO: 269461 - DNA, 458 bp, Glycine max
cttgctgcatatttctaatacattcatcaagtgcattttttctccgttgccccctacattaagatgggtgttgaatattatgattttgggcctcacaagatccaccatggatcactgttctatacaagtaatctttcttttgcctttgtcaacttgcgtcctgctgtgacaggtcatgtgcttgtctgttcaaagcgtgaagtgaagcgtgttgctgatctcacagatgatgagactatagatttatggcgcataagcaaagaaacttggtaggcagctagagagctaccataaagcattatcacttagctttggtatccaagatggaccttatgcagggcaaacagtgccttatgttcatatccatatccttccctggaaaagtggtgattattgagaacaatgatgacatttatgatgacatgaatgaaaaagagaaagagttgtatctagcgctt

SEQ ID NO: 269462 - DNA, 439 bp, Glycine max
  unsure (1)..(439): unsure at all n locations
cccacgcgtncgactttttctacttaccttttctcttaatccaaatacgatggcagccatggcaaccacaaccctctcttcaaaccccaaactctcattcttcaacggaaagcccgtcacatattcttcccgcgtcgcgcccaccaccaaattatcctcatccaaacaaggcacaatttccatgtccctaaccccacccccctacgacctccagtccttcaaattccagcccatcaaagaatccatcgtgtcacgggaaatgacgcgccgctacatgaccgacatgataacctacgccgacaccgacgtcgtaatcgtcggagccggttcggccgggctctcctgcgcgtacgagctcagcaagaaccccgccgtgagcgtggccatagtcgagcaagcagtgagccccggcggcggcgcgtggctcggcgggcaactc

SEQ ID NO: 269463 - DNA, 160 bp, Glycine max
atcaagggggccacgaccaccactcacttgtacacttgagaccaaaggcttcttgacgcgagccaccgggacctgaggcgttcaaggggagtactgcttatcatatggtggacttcaacatgagtacaaaaggttgtggccctcgtgcttctaaccctca

SEQ ID NO: 269464 - DNA, 466 bp, Glycine max
gcatcaacaacaaattgaaaggatgtcgatcttcgtttaccacggatttccaacgcatttgcaagattcacgacaagctcttcatcgctctctctggcctcgccaccgatgctcaaacattgtattagcgtcttgttttccggcacaaactgcatcaacttcgtgaagagagggatatgaaaccagaaacctttgccagcttagtctctgctctgctttatgagaaaaggtttggtccatacttttgtcagcctgtaattgctggattaggggatgaagacaaaccattcatctgcacaatggattgtcttggggcaaaggagcttgcaaaagattttgttggttctgggactgcatctgaatctttgtattgtgcttgtgaggcgactgttaagcctgacatggaaccagaagaattgtttgagaccatctcccaagcactgctatcatctgtagatcgtgattg

SEQ ID NO: 269465 - DNA, 438 bp, Glycine max
gcgggcgctgcatattcctaatacattcatcaagtgcattatttctccgatgccccctacatggaggagggcggttgaatattatgagggtgggcctcacaagatccaccatagttcagcgttctatacaaggaatctttgttttgcctgtgcaacttgcgtcctgctgggacaggtcatgtgcttgtctgttcaaagcgtgaagtgaagcgggttgctgaactcacagatgatgagactatagatttatgggcatagaaaagaaacttgggtggcaggtagagagctaccataaggcatcatcacttagctttgggatccaagatggaccgtaagcaagggcaaacagcgcctcatggtcatatccatatcctttcctggaaaagaggggaatatgagaacaatgatgacatgtattgatgacattgaatgaaaaag

SEQ ID NO: 269466 - DNA, 374 bp, Glycine max
ctgattcattagtgaagaaaaatggcaaccatcatcgccggcatcccaactacatcgatcactcgcgcaggtcttgtgctcaaacgacctgttggagcctcgtcctctaccgttcttggattgccagcaatggctaaggcagggaaagtgaggtgctccatggaggaaaagccttcaagcagctcaaatatagggatgggggcatccttgttagcagctgcagttgccgcaaccatgtcaagcccagccatggctttggtggatgagagactcagcactgaaggaaccgggcttccctttgggcttagcaacaacctccttggttggatcctgtttggtgtcttcggtcttatatgggctctctactttgtcta

SEQ ID NO: 269467 - DNA, 399 bp, Glycine max
  unsure (1)..(399): unsure at all n locations
ctcaagcctatggtgatcatacctgtataatagcaaaagaacatttggagcctaacttangtgggctcactgttgagcaggctatccaaaacaagaagttgttcatcttagatcaccatgactatctcattccttatttgaggaaaataaatgcaaataccacaaagacttatgctacaagaaccatatttttcttgaaagatgatggaactttgacaccattggccattgagttaagtaagccacatcctcagggtgaagaatatggtcctgttagcgaagtctacgtgcctgccagcgaaagaagggaagcttatatttggttactggcaaaagcttatggttgtgtgaatgatgcatgctaccatcaaatcattaaccattggcttaacactcatg

SEQ ID NO: 269468 - DNA, 423 bp, Glycine max
  unsure (1)..(423): unsure at all n locations
tcggagaagagaaggtgtacacaaacacaatctctaatggcactcangatgtgggcttcttgcactgccaatgcactcaaagtctcttctacctccagacctcatctcttgcatcctttttctttctccagatgcttgtcttccgtcttggatggacttaagtatgcagattcacacgaatgggtcaagcacgaaggctcagtcgccaccattggtatcactgaccatgcccaggaccatcttggagaggttgtgtatgtggagctgccagaatcaggtggcacagttacccaaaagtctggcttctgagccgttgaaagtgttaaagcaacaaagtgacataaactcttcaatctcgggggagattgttgaggttaacaaaaagcttacagagacacctggcctggtcaactcaagcccata

SEQ ID NO: 269469 - DNA, 134 bp, Glycine max
ttggaattcgagttggagcacggtttcgtgtaccgtgaggcccaacaggtcaccaggatactacgatggacgctactggaccatgtggaagctgcctatgtttttttgcactgatgcttctaagtgttgaaaga

SEQ ID NO: 269470 - DNA, 392 bp, Glycine max
  unsure (1)..(392): unsure at all n locations
catatgcatacatgccatatttgtggtggtgcttaagctgattgtctattttctgttggacttctgtgattataaatgtaatcctctgttgtctaccattnaaaaaaaaaaaaaaaaaaaaaaaaaaaaaaaaaaaaaaaaaaaaaaaaaaaaaaaaaaaaacaaaaaaaataacaaaaaataaaaaaaaaaataaaaaaaaaaaaaaaaaaataaaaaataagggggggcctttttaaagaattaaagataaaaaaacccgcctacaaacgaaaaatcttttttaaaaaccccccaaattcaatttcacgggccaccgattaaaaaccgctaaaatgaaaaaacctggccctttccaaattaaatttttttaaaaaaaatccccttttccc

SEQ ID NO: 269471 - DNA, 439 bp, Glycine max
gttgctgcatatttctaatacattcatcaagtgcattttttctccgttgccccctacattaagatggctgttgaatattatgattttgggcctcacaagatccaccatagttcagtgttctatacaagtaatctttcttttgcctttgtcaacttgcgtcctgctgtgacaggtcatgtgcttgtctgttcaaagcgtgaagtgaagcgtgttgctgatctcacagatgatgagactatagatttatggcgcatagcaaagaaacttggtaggcagctagagagctaccataaggcatcatcacttagctttggtatccaagatggacctcaagcagggcaaacagtgcctcatgttcatatccatatccttcccttgaaaagtggtgattatgagaacaatgatgacatttatgatgacatgaatgaaaagagaaaga

SEQ ID NO: 269472 - DNA, 376 bp, Glycine max
ggattcttctttgtgggtcttacgttgttgttggtcggcgtggcaaatgctatggctagctcttccaacaaatttgatcaactcttccaaccaagttgggcttttgaccactttattcatgaaagggatcttctcaaactcaaacttgacaaattttccggggctggttttacttccaagagcaagtatatgtttgggaaagttaccatccagcttaagctcgtggaaacgtgactctgctggaacagtcactgctttctatatgtcatcgggccggcccaagccacaacgagtttgattttgagtttctagggcaacatcacaggggaaccttacttcggtccaaaccaacgtgtatgtgaacgggtgtggccac

SEQ ID NO: 269473 - DNA, 478 bp, Glycine max
cccacgcgttcgctccaagttaatgccagagacagccaattcttcagcaaagtcacccctctcaacagcaacatcaaagagactgagactgccaaaaatgaaggccaagtaaacaagccagaacaacaaccaacattcattcctgaaactgaaaacagttatggcctatatggtcatgagactggtctgcaccctcccaccactacaacaactaatgctgcaccctacaccaccacttacaagccatacaaaactaccagctgaagaggacactgccaagtactccaacaacaacaacttctacagcttcaagaaggatggctacaacaccaaccaaaatgagttgagtgaaacaacaagactcacaggcacttcttacaccaacaacaacaactacttttacagcggtaaggatgcttttgctaagcagaatgaattgagtgatacaaagtacactgaaggtggatacaacacggaa

SEQ ID NO: 269474 - DNA, 405 bp, Glycine max
gttattttctgcactggctttgatacagatttcaggttgagtttgtttcgttatctcttaatgacaaccttgtttcttaaggtttatattttggagtttacgtagtgatgaaaaaaaaaaaaaaaaaaaaaaaaaaaaaaaaaaaaaacaaaaaaaaaaaataaaaaaaaaaaaaattaaataaaaaaataaaacggtctcacatatctaatgatctaacctttactaccatttacatctcattcaaaatctactatataggtgaacttaatttcaattacttgcccttcatttactaatacatcttctagaaaaacccttatcacaccaaactaaattagttgactgtaattacactttttacaagctctttatacaccaataaggacaattacttttacaatt

SEQ ID NO: 269475 - DNA, 393 bp, Glycine max
aaaccctaacacttctcttcctcttcgatcatcacctctccacaatgccgccgaagttcgacccctgccagatagtcgacgtcttcgtccgcgttaccggcggcgaagtcggcgcggcgagttccctggccccgaagatcggtcccctcggtctctcccccaagaagatcggagaagacatcggctaagaaaccgccatggactggaagggcctgcgcgtcaccgtcaagctcaccgttcagaatcgtctggcgaaggtcacggtggtcccctccgccggcgtcctcgatatcaaggccctcaaggagcccgagcgcgaccgcatgaagaccaagaacatcaagcacatcggcaacatctagctcgatgacgtcatcgacatcgctagggtta

SEQ ID NO: 269476 - DNA, 362 bp, Glycine max
tcgagagagcggagcggcgatcctagcactctgtcatggagctttcgccgacagcttaattgatcatggctgatcgacccagaaggcttttctgaaacagccaatagtgtttttcagatcgaataatactgagaagggaaagagacccggaaagggtgggaaccgctttcggaaatccattgggcttggatttaagactccaatggaagccatcgaaggaacctacattgacaagaagtgccccttcactggcaatggttacatccgtggccgaatcttggctggaacatgtgacagtgctaagatgaacaggactattattgttaagaggaattatcttcattgtatcaagaagtaccaga

SEQ ID NO: 269477 - DNA, 427 bp, Glycine max
cttttctcttaatccaaatacgatggcagccatggcaaccacaaccctctcttcaaaccccaaactctcattcttcaacggaaagcccgtcacatattcttcccgcgtcgcgcccaccaccaaattatcctcatccaaacaaggcacaatttccatgtccctaaccccacccccctacgacctccagtccttcaaattccagcccatcaaagaatccatcgtgtcacgggaaatgacgcgccgctacatgaccgacatgataacctacgccgacaccgacgtcgtaatcgtcggagccggttcggccgggctctcctgcgcgtacgagctcagcaagaaccccgtcgtgagcgtggccatagtcgagcagtcagtgagccccggccgcggcgcgtggctcggcaggcagctcttctccgcgatggtg

SEQ ID NO: 269478 - DNA, 460 bp, Glycine max
  unsure (1)..(460): unsure at all n locations
ctcctctttccactctctctctctttcttccccgctctttattttattcttcttttttcccttgcaaagattttataaaattgatatgtgttgaaggcatatttgcttaagagctgaaccacatcatcgtcttgaacgtttgaatctatggaacagcttgtcaacttcatcatccggccaccaagagctgaatatgaccccaaaagtgatttattggatcaggagttcatgctgaaaggaaaatggtatcaacggaaggatgtagagataaaaaacagtcggggtgatgttcttcaatgcagccattacttgcctatagtcagccctgaaggaaagcctctgccgtgtgtaatatattgtcatggaaatagcggatgtagggctgatgctagtgaagctgctataattntaacttcctcaaacattacacgttttactctggatctttctggctctggaa

SEQ ID NO: 269479 - DNA, 458 bp, Glycine max
  unsure (1)..(458): unsure at all n locations
ccctctcaaggaactcctcttcattcagagttgtggccagtggtggcaagaagatcaagactgacaagccttatggaattaatggtggcatggctttgagggaaggagttgatgcatctggcaggaaaggaaagggaaagggcgtttaccagtttgtagacaaatacggtgctaatgtcgatggttacagtcctatctacgacaccaaggactggtctccaaccggtgatgtctacgctggcggtacgactggcttggctatctgggctgtgactctacttggtcttcttgctggtggtgcacttcttgtctacaacacaagtgctttggcgcaataaactttgcaaatcgatgttttaagctcaaacttagtccatgtaactatctaaaaatgaagaattattcatgaagtactntgtggatacgtgttccttctgttctataaatgtgtggatgtg

SEQ ID NO: 269480 - DNA, 474 bp, Glycine max
cccacgcgtccggagaaacaatggccaatgtttcaattccactcccacgaaacggtttctccaaacccaattactcgacaaaacgcccatgtttcaccccttcagcttcaacactcagaatttcttgctctggagtggctgagtttgatggatctcatcagaaaaaaggaggtttgtttaatttcaatggaatcaagggcgtggcttgtggtattcttgcagcttgtgctgttacttctgctgcatttcctgttactgctgctactcagaggcttcccccattgtcaactgagcccaatcgctgtgagcgtgcatttgttggcaacacaattggtcaggcaaatggtgtatatgataaaccattacatctccggcaatgtgatttcacaaatgagaaaaccaaccttaaggggaagtccctgtctgctgcactcatgtcagatgctaagtttgatggagctgatatgacagaag

SEQ ID NO: 269481 - DNA, 428 bp, Glycine max
gtacaagatatctctgaaacattacccgatttaggctccttgccaacagtatctgacatccatttcagaactctcattgatgtcttgtcagaacgcacaaataaatctgaagttttgaatctggacttgcttaatgtcacccaaatgtcacaacgcagaagagacggccatgcatctatttactatatcggaccagacagcacagcctctatgcagcggcaagactgtagccattggtgcctacctggtgttcctgattcatggaacgagattctttatgcacttcttctcaagtgggaggacttttttgaatggagacagaatgcaacataaatttctcaagtttcaccataattggtctatagagtttgcagagaatggtctaagttatacatacaagtctttccctacccttgctgaatgagaag

SEQ ID NO: 269482 - DNA, 352 bp, Glycine max
atctttttcagattcctgttctgaagatgacagcaaagaggtatctcattgtgtgtgttgctgcgatctgtgccgttgatctgggttcatcatcacaccatgcccgtgccccagcaccagcaccgtcagtggagtgttcaaacctggtattgaccttataggattgccttaccttcgttagcaacggcagcaccgtcaccaagccacagggaacatgctgatcttccttgaaaactgtgctcaacacaacccctaagtgcctctgcgaagcttttaacagcagcgctcagttaggtttagccatcaatgtcaccaaagctgttacgctttccgctgcttgcaaactctatac

SEQ ID NO: 269483 - DNA, 431 bp, Glycine max
gaaaatgctgtctgggccaactgggttacaccatgaagatcaaaagctgttatacaaagacaaggagagggattcaaaggcttttcttgacatggttggggtgaaggacaaatccaagatagtgctaatggaagaccctattagtcaagagaagaggttgttagagagaagaaagaatgctaagatggagaaagctgcaaagtcgatctcagaaatcagcttggaaatagatagacttgcagggagggtatcagcctttgagtcaattattagcaaaggtgggaaagttgtggaaacagatgtgcataatctgattgagttattgatgaatcagttgctcaaattggatggtataatggctgatggggatgtgaaactacaaaggaagatgcaggtaaaaagagttcaaaagtatgttgaaactcttgatg

SEQ ID NO: 269484 - DNA, 462 bp, Glycine max
acgcgcacgcgtgcgatcatcttttgcagaagcttatgcataggcagagcctagtcctacctataaatcggatgaacaaattacagggtttgacttaaacacgggactatttgctatataagtcgggttggatttgtaggatcgaagttagaaaacacagcacgaatttgattgcatagtgttatttcgagcatcaacatcaatggctccaattgcagtgggaaacgtgattccagaccgcattttggctcacttggatgaagaatacaaactccaaactgtcttcattcactctctcgccagcggctagaaagtcatcatctttgtggttcccggcgacttcacttctacttgcaacttgaagcacgttcctggcttcattgagagagcagatgagctgaaagggaatggtgtggacgaaataatctgtatcaccgtgaatgatacatatgtgatgaactc

SEQ ID NO: 269485 - DNA, 478 bp, Glycine max
gagaatcataagaaagcaagaaagaaaatgggagtggagaagcagttgttgaggcctggcaccggtcccaagccaattcccggtcagaacgtcaccgttcactgcactggtttcgggaagaacggtgacctttctcagaaattctggagcaccaaggatcctggccaggaccctttcactttcaaaatcggccaaggttctgctatcaaaggatgggatgaaggtgtgcttggcatgcaaattggtgaagttgctcgtctccggtgctctccggattatgctcatggtgctggtggctttccttcttgggggatacagcccaactctgtcttggaatttgaaatcgaagtcttgagtgcacaatgaaaaccttggtagtctgtctctgtcctaagaataaaatcatcatccatttccatggactcgtattatggtatccccactttgtgactcgtgagggatatctacagtggttgag

SEQ ID NO: 269486 - DNA, 472 bp, Glycine max
  unsure (1)..(472): unsure at all n locations
gacttaacaacagcacaaagcgggttactgtctgttcaagctaccatctctctctctctttcttagtgcctccttgccagaagttaaaatggcccaagaaactttcctattcacatctgaatcagtgaacgaggggcaccctgacaagctctgtgaccagatctccgatgctgtgctcgatgcatgcttggagcaggaccctgacagcaaggttgcctgtgaaacctgcaccaagaccaacatggtgatggttttcggagagatcacaaccaaggccaacgtggactatgagaagattgtgcgtgacacatgcaggaacattggttttgtctctgatgatgttggtcttgatgctgacaactgcaaggtcctcgtcaacattgagcaacagagtcctgatattgctcaaggtgtgcacggncaccttacaaagaggcctgangagattggtgctggtgaccaaggtcatatg

SEQ ID NO: 269487 - DNA, 507 bp, Glycine max
  unsure (1)..(507): unsure at all n locations
acgcccacgcgtacgagcacgcgcacttcctttggagtctctgcctgaagatggcaagccttcagttaacaacaacacccttcactcttttgagacaacaaaggcagcaccccacaaagaagaagtccactgcttctcagctgaaccctcctcggccacgtcccctcagagtgagtgtgaggtcctataaagtggtgattgagcacgatggagagtccactgacgtggaggttgaacctgacgagaccattctgtcaaaggcattggactctggcttgtctgtgcctcatgattgcaagcttggagtctgcatgacatgccctgctcgcctcattagtggatctgttgatcagagtgatggaatgctaagtgatgatgttgtggagcgtggctatgcactctngtgtgcagcctaccctcaatccgattgtcatattaagattatccccgaggatgagctattgnctttgcagttagccacagccaatgactagtcagcttttgagt

SEQ ID NO: 269488 - DNA, 462 bp, Glycine max
cccacgcgtccgcttgtcctcagctcctccttgttcgaggtgtcaatggctggttctgctttctgttgctccaagtgctcgaagaggtgttctagagctgggatgaaggacaggtgcatgaagttctgcgggatttgctgcagcaagtgcaactgtgtgccatctgggacttatgggaacaagcatgagtgcccttgctacagagacatgaagaactccaagggcaaggccaaatgcccttgattatttttgtttttcaccatccacacatcaacttcaagcctttgattcagtcactaccgtgcatgtatatctgcaccttagagatattccaccatggacccttgctagctgattatgtttactacctttattgttgtgtttgtgtattacataaagagaaaaatttgggcactttagttggatcggatatgcatgatacatgagagtgagaataaattg

SEQ ID NO: 269489 - DNA, 434 bp, Glycine max
  unsure (1)..(434): unsure at all n locations
agcatgcgtggcagcgacggtaacccttcaacaacaacacttccgctgcgaaaaatgtctctggtggcgaacgaggatttccagcacattctgcgtgtgctgaacaccaacgtggatgggaagcagaagataatgttcgcaatgacctccatcaagggtattggaaggagattcgccaacatcgcttgcaagaaggctgatgttgacatgaacaaaagggctggtgagttgactgctgctgagttggataatgtgatgactgtggtggcgaaccctaggcggttaaggacccaaaactgctttttgaccaaaaggaaggattacaaggatggcaaatactctcaagttgagtctactgctcttgatatgaagctcanggatgatcttgagagactcaagagaatcagaaaccaccgtggtttgaggcattactg

SEQ ID NO: 269490 - DNA, 402 bp, Glycine max
aaacctccactcattccataaatctctgtttactctcctcgattttaccgcaacatgacacaagaaggaaatggcaacaccaacttctgtatgagtgttaacaacaacggctacattagcgctaatgacccgttgaactggggcgcggcggcggaggcgatggccgggagccacctcgacgaggtcaagcgcatggtggaggagtaccggaggccggtcgtgaagctcggcggcgagaccctgacgatctcgcaggtggcggcgatcgcggcgcacgaccagggggtgaaggtggagctggcggagtccttcagggccggggttaaggccagcagcgactgtgtgatggagagcatggacaagggcactgacagctacggcgtcaccaaccggttcggtgct

SEQ ID NO: 269491 - DNA, 504 bp, Glycine max
  unsure (1)..(504): unsure at all n locations
cccacgcgtccggaagcattagcaaaagcaagaagaactagtctaagcagaaatggcctcttcagtgatggcatctgtggccctcaaacctgcccctttcactgttgagaagtcctcagttagaggccttccctccctctcaaggaactcctcttcattcagagttgtggccagtggtggcaagaagatcaagactgacaagccttatggaattaatggtggcatggctttgagggaaggagttgatgcatctggcaggaaaggaaagggaaagggcgtttaccagtttgtagacaaatacggtgctaatgtcgatggttacagtcctatctacgacaccaaggactggtctccaaccggtgatgtctacgctggcggtacgactggcttggctatctgggctgtgactctacttggtcttcttgctggtggtgcacttcttgtctacaacacangtgctttggcgcaataaactttgcanatcgatgttttaagctcaaactt

SEQ ID NO: 269492 - DNA, 467 bp, Glycine max
cccacgcgtgcgcccacgcgtccgctggattccagctagcaaccttgaaagtgcaactgcaaaagagaatcctgatgcttttaaggcatcatggacgttattaaagggtgcacatggtgttcttgttcctggaggctttggagatagacgagtgcaaggaaaaattattgcagccaaatatgcccctgaaaacaggattccattccttggcatttgtcttggaatgcagattgctgtcatagagtttgcacgatctgctcttggtgtacaagatgctaacagcactgaatttgagccccataccaaaagtccatacatgatatttatgcctgagggatcaaagacacatatgggaggcaccatgcgccttgcatctaggacgacatatttgcagaccaaggaatgcacatctgcataattatatggctgcaaaagcttcattgatgagagacatcggcatagatatg

SEQ ID NO: 269493 - DNA, 483 bp, Glycine max
  unsure (1)..(483): unsure at all n locations
ctcgtagcacacactcacacactcagatctctcttctctttctgcaattccattgttgttctcttcactctcacaatgcgaatcctcgttgtgctctctctcgccaccctcctcctcttctcctccctctttctcaccctctgcgacgacctcaccgacgacgaggacctcggcttcctcgacgagccctccgccgcgccggagcacggccactaccacgacgatgacgccaatttcggcgacttcgaggaggacccggaggcgtacaagcagcccgaggtggacgagaaggacgtcgtcattttgaaggagaagaacttcaccgacaccgtcaagagcaaccgcttcgtaatggtcgagttctacgcgccctggtgcggccactgccaggccctcgcccncgaatacgccgncgtcgcaacggagctcaagggcgaagacgtaattttggcgaaagtggatgccacggaagagaatgaattg

SEQ ID NO: 269494 - DNA, 448 bp, Glycine max
  unsure (1)..(448): unsure at all n locations
agaagggctacacaaacacaatctctaatggcactcaggatgtgggcttcttccactgccaatgcactgaaactctcttctgtctccagacctcatctcttgcctcctttttctttctccagatgcttatcttccgtcttggatggacttaagtacgctgattcacatgaatgggtcaagcacgaaggctcagtcgccaccattggtatcactgaccatgcccaggaccatcttggagaggttgtgtatgtggagctgccagaaccaggtggcacagtttccaagaagtctggcttcggagccgttgaaagtgttaaagcaacaagtgatataaactctccaatctcggnggagatcgttgaggttaacaaaaagctcacagaaacgcctggcctggtgatcaattctaacccttaccctatatctctgtactatatatatatatttg

SEQ ID NO: 269495 - DNA, 471 bp, Glycine max
gcattggcagctaatgctactccctctctggccttcgcttcttcctccttactgaaccacaatccccaatttggtgctgctcccaaacgattcgtttcttcttcttcttcttctttgtgccttgccgcggggctcagctccaaggctagggccttcagtttctctgcctcggctgcggcccttgacggagaagaactcgcggtggaagaaacgtgtaatctagcgagaccaaccgaagtgtacgtctgcaaccttccacgaagctgtgacactgagcaactacttcatatgttcaacccttacggaaccgttctctctgcccaggtttgccggagtgcggaaactggtgaaagtagagggagtgcttatgtcacaatggcttctattaactcggcaagaaaagcaattgctgcattggatgcatcggagtttggtgggcgtgaagtgcgggttagattttcagctgagatg

SEQ ID NO: 269496 - DNA, 404 bp, Glycine max
ctattctcctcatcttcctctttttctcaacaaaaaggggttcaattctagctagttctattacgtcgtccgcgaccatgaacatggcgatcgcgcttctgttcatggttttcgcagtttcatcagctttagacatgtcaataatatcacacgacaacgctcatgcggatagggccacgaggcgcaccgacgaggaggtgatgtcaatgttcgaggagtggctggtgaaacacgacaaggtgtacaacgcgctcggtgagaaggagaagaggtttcaaatcttcaagcacaatctgcgcattatcgatgaacgaaactctctgaaccgaacctacaagttgggactcaacgtgttcgctgatctcaccaatgcggagtacagagccatgtacctgcgaaccttg

SEQ ID NO: 269497 - DNA, 304 bp, Glycine max
aaaaaacgttgttgatagcaggaagatgcacttcgcaattgcacaaggaaaacaacggaagccaagtttccgcgcattttgtcacataagaaaaacgaagtgtcaatccctttcttcttcgcttgtattgtttatgaattattaattactttggttttagacagttgtatggcactgcttttgtctctgtcgttgaatgatatcacatgaatgcattttggtttgcaacctgctgcgcttgcaaggggttgtgaagccaattttataataaataaaatcaaatatatgctttgtatatttattg

SEQ ID NO: 269498 - DNA, 338 bp, Glycine max
tgagaaacatggctttcttaagctccttagtgctgctccttgccgctgtaattctatcccgtcaaggtcttgcacactatgagaatccgacagagtacatgcctaccactgagaaaccaccaggttataggcccgcagttgagaagcctcctgtttacaaacctccagttgaaaaccctccagtttataagcctgcaggagagaagccaccagcgtacaagcccgcagttgagaaacctccagttgataagcccccagttgagaaaccaccagtgtacaagcccctaggcgaaaaaccaccagtgtacaagcccccagttgaaaaacccccagtgtac

SEQ ID NO: 269499 - DNA, 410 bp, Glycine max
  unsure (1)..(410): unsure at all n locations
ctccgcctttctcttctcaaatcaaatcaatgagcatggcttctctccccaattcccccgctctttcatgctgctcatctctctgcaccaccggcaatctcctcccatgtcgccgcttcaccgcattcccccgccggcgcgcctcttcattctccgtgcaagctaagatccgcgaaatcttcatgcccgcactcagcttcaccatgaccgacggcaaaatcgtctcctggatcaaatccgagggcgacatgctctccaagggcgacagcgttgtcgtcgtcgaatccgacaaggccgacatggacgtcgagaccttctacgatggcatcctcgctgccatcgtcgtcgccgacggcgaaactgcccncgtcggagcccccatcggtttgctcgccgattctaccgaagaa

SEQ ID NO: 269500 - DNA, 402 bp, Glycine max
aaaagactatctcttatgaaatcaaactcaaatgagcatggcttctctaccaattcccccgctctatcaggctgcgtatctctctgcaccaccgccaatctcctcccatgtcgccgcttcaccgcattcccccgccggcgcgcctgttcattctccgtgcaagctaagatccgcgaaatcttcatgcccgcactcagctacaccatgaccgacggcaacatcgtctcctgcatcaaatccgagggcgacatgctctacaagggcgacagcgttgtcgtcgtcgaatccgacaaggccgacatggacgtacagaccttctacgatggcatcctcgctgccatcgacgtcgccgacggcgaaactgcccccgtcggagcccacatcggttagctcgccgattct

SEQ ID NO: 269501 - DNA, 478 bp, Glycine max
cccacgcgtccgcccacgcgtccgcccacgcgtccgcccacgcgttcgcccacgcgtccgcatcaaccgactctgacccttggattggagtgtcgcttcgtttgggcgccaaaggcgtttctagtcacacagaagaaaaagacttactcaagaagcttcgagaaaatgtctggaaaagcgaagaggagagatgacgacggtgcttccgacgccgactctgaaggccacgcgccagccaagaagtccctcaagaaggattccgatgacgatcccgactctattaccgtttgcgagatttcgaagaacaggagggttgccgtgaggaactggaaaggcagcattatggttgacattcgcgagttttacgtcaaagatggcaagcaattgcctggcagaaaaggtatctctttgaccatggatcagtggaatgtgcttcgtaatcatgttgaagacattgacaaggcaattaatgagaatt

SEQ ID NO: 269502 - DNA, 308 bp, Glycine max
cggacgcgtgggttcaggaagcggttcaatcaagggcagctcttgtgcaatttcatgccctggcattgctgcaccagatacggcagaatgaccgactagctgttagcaagctggttaccagcttaaccaggggaaatgttcgctctcctttggcccaatgccttttgatccgttatacaagtcaggtaacttcgggaagtcagggaattattccacaatcaggggaccgtcccttctatgattatcttgagagtggctttggtaacaggtaaaagatggtaatttttgaagctgcaagggcaattccg

SEQ ID NO: 269503 - DNA, 469 bp, Glycine max
cccacgcgtccgtccacgcgtccgcccacgcgtccggagggatcaggttcaccatcaatggtcactcgtacttcaacttggttctcatcacaaatgttggtggagctggagatgttcattctgtgtccatcaaagggtctagaactgggtggcaaaccatgtctagaaactgggggcagaattggcaaagcaactcctacctgaatggccaaagcctatcttttcaggtcactacaagtgatggcaggactctcactagcaacaacattgtgcctgctaactggcaatttggacaaacatttgaaggggcacagttctaggaaccttaatgatttttaagtacacattaatttgcgtgtaatatatgatggcattgttcactagtttttgatatagttggaaagggtcgcgaaagagaagaaacgaatgtagattaagaagagtttctggccaacatggcccctaatgc

SEQ ID NO: 269504 - DNA, 478 bp, Glycine max
cacacgttcttgtatatgtatgcctaactgttcctttggggatgatgtccttcttcaaataccgctcggccttcaagaatccaccacttccaccaggtcctagaggccttcccataatagggaatcttcatcaactagatagtccttctcttcatgagcagctatggcatctctcacagaaatatggtcctttattttaccttcaatttggattaaggccagccatagttgcttcctgtgcaaacattggccatagaggtcatgaaagacaatgaccttgactgctgtggacgacctaaattactaggccaacagaaactaacctataatgggttagacatgggattttcctcatacgatagttattggagagaaatcagataaatttgtgttgtccatgtccttagctccaaacgtgtccaaagctttgacctaataagacattttgaggtcaagcagatgattaaaaaaatatcta

SEQ ID NO: 269505 - DNA, 497 bp, Glycine max
ttctggttgcaaccctcaaaaaccctcttggaacgaggctttcacttcttcggatcgaaactccgacgcatgcagaggcgaaacgcgatcgttcctgcgcggaatcgacgtgaaccggttaccttccgccgtggacaccgaggaggaaacgggagtttcgtctccgaacagcaccgtctctagcgtgagtggaaaacgtagcgagagagaagaaccgaacggcgaagaacacgacatggacagagcctgttcccgcggaatcagcgacgaggaagacgctgaaaccgcaaggaaaaaacttagactctccaaagaccaatccgctatactcgaagaaagcttcaaagaacacaacaccctcaaccccaagcaaaaattggcactggcgaaacagctaggacttcgacctagacaagtggaggtgtggttccagaacagaagagcaaggactaagctgaagcaaaccgaggtggactgcgaagtattgaaaaggtgct

SEQ ID NO: 269506 - DNA, 464 bp, Glycine max
  unsure (1)..(464): unsure at all n locations
cccacgcgtccggttcctccgctcaacaactataataacatctttctctctccgaacagatcacactatggccacctcaagcgccaaatcagtccatgatttcaccgttaaagatgccaagggaaatgatattaatcttggtgactacaaaggaaaggtccttatcattgtcaatgttgcctcacaatgtggcttgactaattcaaattacactgagctcagtcagttgtatgagaaatacaaacagaaaggtctggaaattctggcatttccatgcaatcagtttggggcacaggagcctggatctaatgaacagatacaagagttngtttgtactcgcttcaaggcttgattttcccgttttggacaagttgatggtaattgggaacaaagttgttcactgtacaagtatctaaaatcaagccaaagtggactctttggggatggtatcaaatggaacttct

SEQ ID NO: 269507 - DNA, 501 bp, Glycine max
aacaaatcaaagccatggccacctccaacttctctattgttctctccgtctccctagccttctttttggtgctacttaccaaggcacactcgaccgataccgtttctttcaccttcaacaagttcaacccagtccaaccaaacattatgctccaaaaagatgctagtatttcatcctctggggtgttacaactcaccaaagttggcagcaacggcgtgcccacctcgggatctctcggtcgtgccctttacgctgccccaatccagatttgggacagcgaaaccggcaaggtagccagctgggctacatcctttaaattcaacattttcgcacccaacaaatcaaactcagctgacgggcttgccttcttcttggcacccgtcgggtctcagccccaatccgacgatggatttcttggtcttttcaacagtcccttaaaggacacgtctcttcaaaccgtggcgaatgagttcgatactttctcgaacaaaaatgggatcc

SEQ ID NO: 269508 - DNA, 422 bp, Glycine max
agaatccttaacagaacatgttgcatggatggcctccactctctctatatcctctttatccacccttggtgatgccaagcctccaactccaagacaatgcgtcacccttcccactctgacccctccaccttttcactctcagactcgtgcttggaagaccactgctttctgtcataggcttgctcgcaattttatggcaatggccaccacaagagaggcagccgcagcagaagttgccgccacaactgacctctctattgccgagacgccagagattgtgaagactattcaagaagcttgggacaaagttgaagataaatatgcagtgagttcactggccgttgctggtgtggttgcattcgtgggctcagctgggatgatctcagcaattgataggctaactttaattcctgggcttcttg

SEQ ID NO: 269509 - DNA, 431 bp, Glycine max
acagatatacaacatggctatatctacattagaaagaatggccttagtctcgaaaaggattaccctgaccgtggcgacaagggtaaacgggactcacataagaaaaatgctatcgttactattgatggccacagatgggttcctacccaacttgaggaagcctttaaacagggcattgcaaatcatccagtggccgttcctatttcagcatactactatgaatttcaatattatacatcacgtgtattcaaagggatatgctgttcaaaattaaatcatgctctcctgcttgaggcgtatggttcaaaaaaagatttagattatttgatagccaagaatttatatcatgacaaatggggtgagaatgtgtatatcagaatacaaagaaaactgatcactttgtaaattggaaactggggttactatcccat

SEQ ID NO: 269510 - DNA, 493 bp, Glycine max
gcagtatatcgtacataacggggtcgcagcttctctctctcagacgccatccaagcatcgccgtcgtcgatgtaagggacgatgagaggagctacgacggacacatatcggggtctcttcattacgcaagcgacactttctccgataacatctcaaatctcattcaggcagttaaaggcaaagacactctcgtcttccactgcgctctaagtcaggttcgtggcccaacttgtgctaggaggcttgtcaattatcttgaggagaacaaggaagatactgggataaagaacattatggtcttggaacgtggcttcaatgggtgggaagcttctggtagacccgtttgccgctgcaccaatattccttgcaaaggagagttgtctccttaatcaaagacgtatttgtggttggatggaattatggaagcatatcatctttcgtgtgatatgtgcacgcatttgtatacaaaatgtcaaaaacagtaggatgacca

SEQ ID NO: 269511 - DNA, 414 bp, Glycine max
tcttctttctgtatccgtaacacttgcaacacacatggctacaatcaccaacactttcatattcaaacgccccatctctcatcacccaaagcagcttctttattcccaccgctcttctctacgctttctcaccaaatttaaaaccccctccggagcgaattctcggcggctggttccgaaagccacggcggctcccggggccaagaagacagaaaagccgcacgagagagtccagcgagtccacagcgtggaggagttcgagtcggcgctcgaatccgccaaagacaggcttgtggtggtggaatacgctgccagcgacagcgaggagagcagccagatatcccctttcatggtggagctgagccgcagctgcaacgacgtggagttcatcctggtgatgggcgacgagtcgga

SEQ ID NO: 269512 - DNA, 500 bp, Glycine max
cccacgcgtccggggttagatatatagaaaaacaaaggagaaaagatagaaatggagaactttccagtggttgacatgggaaacctgaataatgaagagagatcagcaaccatggagataatcaaagatgcctgtgagaactggggtttctttgagttggtgaaccatgggatatccatagagttgatgatggacaccgtggagaggatgacaaaagagcactacaaaaagtgtatggagcaaaggttccaagaaatggtagcaagcaaaggcttggagtctgctcaatctgaaatcaatgatttggactgggaaagcactttctttttgcgccatcttcctgtctctaacatctcagagatccctgatcttgatgaagattacaggaaggtaatgaaggattttgccgtggaactggagaaactggcggagctagttcttgagttgctgtgtgagaatcttgggctagagaaagggtatctgaagaaggttgtctgtgg

SEQ ID NO: 269513 - DNA, 460 bp, Glycine max
ttcatctctgcagctgagctccgccatgtcatgacaaatcttggggagaagctgacggacgaggaggtggatgagatgatccgtgaggccgatgttgacggtgatggacagatcaactatgaggagtttgtcaaagtcatgatggccaagtgaggaccattccaaccataacctaaatttgaaaagcatataaagagaagagggacagggcagataagttttgatgagaattctattcccattaggtccatcttgatttggggttattaggttttgttagttgagtgtctatttttcttgtttgctttaattgctactacttctctgctccctagttatcctacttgtttgctctgtcccttgtttttagtagcttcggtagctgtgtctcaccatgctttgttactctccgttttcatcttcttttggttattattattattattatgaacctagaaca

SEQ ID NO: 269514 - DNA, 341 bp, Glycine max
cccacgcgtccggtctttcttggaactttgttactctcacacatgtctcgctccgtgcctttggtttcaaccatttttgtcttgcttctgcttctggtggccactgagatgatggggccaacaatggtggcagaagcaagaacttgtgagtctcagagccaccgtttcaaggggccatgtttgagtgacaccaactgtggctctgtttgccgaaccgaacgtttcactggaggacactgccgtggcttccgtcgcagatgcttctgcaccaaacattgttaattttaaaaaattaattaagagtgctttgatagaagatgatagatctatcatctttctac

SEQ ID NO: 269515 - DNA, 492 bp, Glycine max
  unsure (1)..(492): unsure at all n locations
tgatgctcttgtgcgagggctagagaaatttggtggaagaatttctcttcaaagtcatgtggaaaacattgttgttgaaaatgacagagccattggagtcaagctgggaagtggtcaattcatacgtgctaaaaaggctgttgtcagcaatgcatcgatgtgggacactttaaaattgctacccaaagaagttgttccaaagtcctactcagatagggttaacacgactcctcaatgtgattcattcatgcatctccatttgggatttgatgctgagggtatacgcagtgatctgggaattcatcatatagttgtaaatgactggaaaagaggagttgatgccgaccagaatgttgtgttgatatcaatacctagtgtacttagtcctaatctggcaccgcacgggaaacacgtgttacatgcttatatgccaggaactganaccattgagttgtgggaaggacttgatcgtaggagtgctgaatacagaaa

SEQ ID NO: 269516 - DNA, 474 bp, Glycine max
tcgtgcatgtgtggatctctatcataaaggaactattattgaaatttacagaatgagtcgcaacaaaatgcagagaccttggcgtgtggatgattttgatgcctttaaacaaagaatgttaggaactggggacaagaaaccacccccacatagaagagctttactttttgtggacaatgcaggtgctgacattgttcttgggatgcttcccctggcacgagagctcctccgccgtggaactgaagtggtcctggttgcaaactcccttcctgctttgaatgatgtgaccgcaatggagctccctgacattgttgctgaggctgccaagcactgtgacattcttaggcgagctgctgaatctggtggcttgctggtggatgcaatgactaataccttggacagtcctagagaaaattcttcttctgttcccttgatggttgttgagaatgggtgtggtagtccatgtatagactt

SEQ ID NO: 269517 - DNA, 496 bp, Glycine max
cccacgcgtccgcggaactcttcagagaatttagggagaaaatgatgatcacagaagatgaaacagctcttacaacaggcaaagaacagcaaagtgaagtgatgaacggagacaaggacaatcatggaagcgaagatggcaaccccaaagagtggttgaacctgagcataggtggaacttcttcactatcaacatctggagacactgattcacaagcaagaccaccagccactgccaaagttttttcatgcaacttctgcatgaggaagttctttagctcacaagcactaggaggccatcagaacgcgcacaagagggaaaggggagctgccagaagataccaatctcagagatcgatggcaataatgggattctccatgaacacaccaactatgtttcgatcacttggtgttcagccccattcacttgtgcacaagccacgcagaggtggtggtaccatggtgacaccgggctttcatgatgcaaatgcacatgc

SEQ ID NO: 269518 - DNA, 296 bp, Glycine max
ctgacgcgtgggaaaaaatataagttacaaggaaattatcatgaatccaattattaatagctgctgctgatattgcatgctgagaaggccgaaaggcatagcttctattggacctgagagtagatcaaagcactgatggggggcaagctgtttaaaggattgcacgacaaccggatgcacagggaaaaatacgaggtactttattgcttagtatggcttttaaggaagctctaacactccatggactggttgtagcattagcacttatatccgctaatccttttgggaatcctaaa

SEQ ID NO: 269519 - DNA, 116 bp, Glycine max
  unsure (1)..(116): unsure at all n locations
tcggctgtgtgtcaacaagtcatgtaagagacttcactatgttgatttctctntcgtggctataataaattatgcgccctttgtccataaaacaggaagaccttaatgatgcaaaa

SEQ ID NO: 269520 - DNA, 444 bp, Glycine max
tccacgcgtccggggttttcgctcaccggtgtgcagtcgagcccccgaagaaaaagcgaaaatgccgtcgcacaagacattcagaatcaagaagaagttggcgaagaagatgaggcagaacaggcctatcccctactggatccgcatgaggaccgacaacaccatcaggtacaacgcgaagcgccgtcactggcgtcgcaccaagcttggattctgaggtgcttgctttgcctcggttctgcttatccaattaattagtgttttattttcttgagccaaaaacaatgctttggagattttaatattttgcattttgttccaagactatattgtgtaaggaacttattgtagttcagactaatggtggtgttggtcaccttttttttaaaagtattttggaattctttgcgtttggtttaaaaaaaaaacttaataactgaaccc

SEQ ID NO: 269521 - DNA, 462 bp, Glycine max
  unsure (1)..(462): unsure at all n locations
cccacgcgtccgggactttaggttgggatttgggaattagggttgttcgcgtggcgaagatgattgaggtggttttgaacgatcgattggggaagaaggtgcgcgtgaagtgcaacgacgatgataccatcggcgacctgaagaagcttgtggcggctcagactggcacaagagccgacaagatccgcatccagaagtggtacaccatctacaaggatcacatcactctcaaggattacgagatccatgacggcatgggtctcgaactctactacaactaaacacaacaaggtgtgttttatgcgtaatatactatgtgctgggaatgggataagcgctaaatgtaattctgacttgcgaaagttcccatgatttgaaataatgtacatctccaaatgatattgggtattatataccgttgacagcttaagtntgctttgtatataacctatatctgatgac

SEQ ID NO: 269522 - DNA, 493 bp, Glycine max
  unsure (1)..(493): unsure at all n locations
cccacgcgtccgtgtggtgtttctgagctgggtagggtttactccttctcgcgccaacccagttgcgagcttggaggagaagatccttgccgtggccaacgagtataaggccgtgaaggcctttctggtcgcttacagcaccgttgctgaggattgggctaatttttcgccacctatcttcnttatcactcntcatggccttctggtaactctgcggttaagggaagccgccattaaagtcattagtgacggccaccgcttctttcccgccaagtggatccctgaaattttattgttggctgcctctaaatgaatgaggtatgacatgaagggtgaacacgtatctcacaagtgttatgtgatatgtatgatgtgtgaatcttgaaataatatcttaagggcaagacgttattagttaaaattattagaggtagttttatgaatgggtcataataataaatgctagctatatgtaccactatggaataagatg

SEQ ID NO: 269523 - DNA, 461 bp, Glycine max
  unsure (1)..(461): unsure at all n locations
caaaaaatgaagagcactaccttgttcgctctctttctactttgtgccctcacttcatcatacctaccttcagccaccgctgatgtggtgctggacatggatggtaatcctcttggaaacggttggcaaaatgaatatttcatgttgccagttacaagaggaagcggtggtggaatagcactagctgcaactggaaatgaaagatgccctgtaactgtcgtgcaatctcacattgagcgcgataaggggtatgcggcaacttttagagctccattccacctcccttttatcgcagaaggccttcctttgacgatttcattcgataactntgaagtgttaccgcggtgtgtccccactcctctttggtgggctattgtggatggtctagctgaaggacccgctgttaaaattgagtatagagatatagtaaaaggttggtttaaaattcagaaagcttaccc

SEQ ID NO: 269524 - DNA, 493 bp, Glycine max
tagaaacccaacaacacgaatgaagaagatgattctaaccctcttcttcaatatcattttatctgtcctctccctctcccacgcctccgtggtggatttctgcgtagcagactacacaggccccaatggccccgcagggtactcatgcaagagcccagcaaaggtcacggtggacgacttcgtctactccggccttggcaccgtcggcaacacctcaaacatcatcaaagccgcggtgacgccggcgttcgacgcgcaattccccggcgtcaacgggcttggaatctccattgcacgcctagacctagcaaccggtggagtcatccctcttcacacgcaccctggtgcctcagagctgctggtggttgtgcagggaacaatctgcaccggcttcgttgcttcggacaacactgtgtacctcaaaaccctaaaaaagggtgatgtcatggtgtaccctcagggcttggtgcactttcagatcaacgatggagag

SEQ ID NO: 269525 - DNA, 496 bp, Glycine max
cccacgcgtccggagagagagaatggcagcacttggtggcaatcgtgatgtggcaggaagccagaacagccttgagatcgatggtttagctcgctttgctgttgaagaacacaacaaaaaacagaatgcccttttggagtttgaaaaggtagtaagtgcaaaacagcaagtggtttctggtaccttgtacaccatcactttggaggcaaaagatggtgggcaaaagaaggtttatgaagccaaagtttgggagaaggcatggttgaacttcaaggaagtgcaagagttcaagcttgttggagatgcacctgcatagtctagtgcttaattaggttgcagaagagtgaagagtgagacagcctggctcgaaggggaaagcctaaggatatatcaaagcatgctatatgtataaaataaatgtagcttttctaccttcggtattgatatttgaaatcgtgatttggcatcttatatatgatctctgtgtttgtctaaa

SEQ ID NO: 269526 - DNA, 445 bp, Glycine max
caacactgcagttgctgaggtgttctctcgcattgaccacaaatttgatctgatgtatgccaagagggcctttgttcactggtatgttggtgagggtatggaagaaggagagttctctgaagctcgtgaggatcttgctgctcttgagaaggactatgaggaggttggggctgaaggagcggaagatgatgaggaaggagaggactattcataaatgaaggttttattatcaatgtaattgtttcgagtaaaaagggtatatgcttcgttacattaccctgaaccagtattgttcgttcctttttgtttttactcctgtgtgatatagttctccattattcaaactgtgaagtgatatcatcattatgcttctattttggtggtttaggacctgttgtttgcgacctctggcatgttttcagaattggtcatgtcaaaagttgat

SEQ ID NO: 269527 - DNA, 387 bp, Glycine max
  unsure (1)..(387): unsure at all n locations
ctcttacacacccaagcactactactactactttctttctagatatgggttctggtgctgtgcaactgtttctgatcttggggctcttggctagctcatgcttagcccaagccccaggtgctgcaccgtcgcaaccacccactacaaccccatcaccaccaccacccagatcagcacctgcaccagcacccaccacaccagcaaccccaccatcaaggaccgcaccaccagcagcaactgcaccaccagcagcaacttcaccaccagcagcaacacccacaccagcaccagcaccaccaacggctgcacctacacctgctcctttactgcaggctctnctccttcacctttttctacagtgacaccaagctccacctcntctaacac

SEQ ID NO: 269528 - DNA, 440 bp, Glycine max
agacacgaacgctcactcaatgggctacatctttgaaagcccctcacacagaggaagccattcggggtactgagtccacagcaaactctttcataagtgaagctaggaaattcacaaacacacctgatgctcaaaaagtgcgagataatctcatctacaattacaaacctacttttggtggaacggctgggaaaggatatgatcaagtgtatctctttgaataattctatctgtaggaggtgtccttgaatttgattttatgcacaataaattatgaactggggatgtagtttgaagaaataaaaatttgtgcacagtgatgtttgtaagatgcttaatttcagggcaatgctctgcttatcaatgtgctatatcttgatattgccccaaccttggtgtattcttcattttgctataattctattaattgcacggataat

SEQ ID NO: 269529 - DNA, 423 bp, Glycine max
cccacgcgtccgaccaaatacttctcttggcattttgtgtcccttctctctttctcttgctccatattttccaaccaaaataattattaaaaccaaacgtagctaggcaccacttctaggaatggcaagtgagatatttcttgcccttctgatcacaacctttgtggttgcagcctctgctggtaacttcaaccaagactttgagataacatggggtgatggtcgtgccaaaatcctcaatagtggggaacttctcaccttgtccctagacaagacctctggctctggatttcgttctaggaatgagtacttgtttggaaaaattgacatgcaactaaaactcgtgcctggtaactctgcaggcacagtcacagcttaataatctatcttctctttggggaatactcatgatgaattggattt

SEQ ID NO: 269530 - DNA, 442 bp, Glycine max
acgcccacgcgttcggcggacccatggctgggtttgatatcctgagcgagccatagaaagagttgaattaatagagatacagattacgtgaaactgaaaggaaaatggcactctcagtctcctcaccctcatgcgtacgcgttccttcatgtttttggaaaccaaatggcaagagttgcaaagagcgtactaaggtttcatgtgcagctcacaatgataataagaatccgttggttggaatcggtattggggttgtaacgtcttgtgtgatgggtttaactgcattggatgcggacgccacgagaatcgaatactacgcaacagtggcagagcctttgtgtgagtacaactatgttaagtctggcctcggctactgcgatattgctgagggcttcggtgacgaagctccactgggtgagcttatcaatgttcactatactgc

SEQ ID NO: 269531 - DNA, 398 bp, Glycine max
gtgagcatgattgggcagttcggtgttgctttatactcggcttatcttgtgagctgataacgtgttgttaccacaaagcacaatgatgatgaacagtatgtctgggagtcccatgccggtggctcatttactgtgacaagagatacatctggtgagaaccttggtaggggaacaaagataactattgcttcttaaggaacatcgacttgagtatcttgaggaacgccgtctgaaggatttgataaagaagcattctgaattcattagctatccacatttctctctggattgagaagactactgaaaaggagatttctgatgatgaggatgaggaagagaagaaggatgaggagggtaaagttgaagatgtggatgaagattacgagaaggaggagaag

SEQ ID NO: 269532 - DNA, 476 bp, Glycine max
gcgagttgttgtaaagctagccttgttgcagccatggccacccacgcggctctagcttctacaaggatccccactaacaccaagttcccatccaaggcttcacactctttcccaacccaatgcgcctcaaagagacttgaggtgacagaattctctgggctaagatccacttcatgtgtgacatatgctaacgatgctagagaatcttccttttttgatcttgtagcttcccaactcactcccaagaccaatggatcatcaactcctgtgaggggagagacagtggccaagttgaaggtggcaatcaatggtttcggacgcattggtagaaacttccttcgctgctggcacggccgaaaagactcaccccttgaggtcgttgttgtcaacgacagtggtggtgtcaagaatgcttcgcacctgcttaaatatgattccatgctgggaacctttaaagcagatgtgaaaatactgga

SEQ ID NO: 269533 - DNA, 379 bp, Glycine max
  unsure (1)..(379): unsure at all n locations
cccacgcgtccgttcttcttctagtagtgcaccagcaacaactacagtgaagagtgaggaggggatgcaaggcatagggatagggtgctgctcaaacgacgtcgtagggcagctggagctaagtcccactatgagcaactcctcttcctcgctatcgatggagctggacgagtcccccgagagccgaatccaacggctgatatcggagcaccccgtcatcatcttcacccgatcctnctgctgcatgtgccacgtcatgaagaagctcctcgccaccatcggcgttcacccaccgtcatcgaatttgacgaccacgagatcgccttccttccccttcccgacaccaccgnnccccgccgcttcatcggcggcacctgca

SEQ ID NO: 269534 - DNA, 429 bp, Glycine max
  unsure (1)..(429): unsure at all n locations
aagaaatttaagtgaggagctagagaatgatgatgaagtctgctatgtgtgcagtggtggttgtagcacttcttcttctggcggaggtggggcccatggctgaggctgtgacatgcaccccaacagagttgagtccgtgtcttccagcaatcacttccggtgctaaaccttccaatgcttgttgcacgaagctgaagcagcaaaaaccatgcttatgtggctacctcaaaaacgctagcttgaagcagtatgttaactctcctaatgcccgaaaaaccgttgcttcttgtgggattccctttccaacttgttaattaattaagccttcttataattaaagtgtgggatatatatatatatatatatatatatatatatatataaacagtttaatntatacacactttgatcctacaaagcatcttgaca

SEQ ID NO: 269535 - DNA, 449 bp, Glycine max
  unsure (1)..(449): unsure at all n locations
gatcgagataactagaaacagtgtgatgaaaatgaaggtccttgctttcttcgttgctacaattttggtagcatggcaatgccatgcgtacgatatgttccctctccgaatgaacactggctatggtgcccgtactccggaggtgaaatgcgcaagttggaggcttgctgtggaagcacacaatctttggctttgagaccattcctgaagagtgcgttgaagcaacaaaggaatacatccatggcgaacaatatagatcagactccaaaacagttaaccaacaagcttacttttatgccagagacctcgaagtccatcccaaggacacatttgtgttcagtatagatggcaccgtactctctaatattccatactacaaaaaacatggatatggngtggagaaatttaactcgaccttgtatgatgaatgggttaacaagggcaatgca

SEQ ID NO: 269536 - DNA, 352 bp, Glycine max
ctttctccagatgcttatcttccgtcttggatggacttaagtacgctgattcacatgaatgggtcaagcacgaaggctcagtcgccaccattggtatcactgaccatgcccaggaccatcttggagaggttgtgtatgtggagctgccagaaccaggtggcacagtttccaagaagtctggcttcggagccgttgaaagtgttaaagcaacaagtgatataaactctccaatctcgggggagatcgttgaggttaacaaaaagctcacagaaacgcctggcctggtcaactcaagcccatacgaagatggatggatgatcaaaagtaagccaagcgatccatctgaattaga

SEQ ID NO: 269537 - DNA, 440 bp, Glycine max
cccacgcgtccggagtttgttgtgagctataagctagtttatcgtgaggagaatatgaagttgtttgttttctttgttgctgcagtagttttggtagcatggccatgccatggcgcaggctaccaaaggttccctctccgaatgaaaactggctatggtgagcgttcttcggaggtaaaatgcgcaagttttaggcttgctgtggaagcacacaacatccgagcctttaaaaccattcctgaagagtgcgttgaaccaacaaaggactacattaatggcgaacaatttagatcagactctaaaacagttaaccaacaagctttcttttatgctagtgaacgcgaagtccatcacaacgacatatttatattcggcatagataacaccgtactctctaatatcccatactatgaaaaacatggataatgggtggaggaatt

SEQ ID NO: 269538 - DNA, 403 bp, Glycine max
cagaaaaacaagtagttcagaactaagaagacggaaatggctatctcaatgatctcctcccgagctgataccaccgtcaaccgtgccggtgccggcatggttgctacattcaccggcctcaaattcatggctggcttgcccacgaggaagaccaacaatgacattacctccattgctagcaacggtggaagagtacaatgcatgcaagtgtggccaccaattgtcaagaataagttcgagactctatcctacttgccagaccttgatgattcccaattggcaaaggaagtcgaataccttataatgaaacgatggattccttgcttggaattcgagttggagcacggattcgagtaccgtgagcacaacaggtcacctggatactatgattgacgctactgga

SEQ ID NO: 269539 - DNA, 347 bp, Glycine max
cgatcctaacaaacttatgcaagttacaactttggatagatatgtgaagtaccatgtgcaggagtttgagaaagcttttgcaatcaagtttcctgcttgctctattgctgccaagaggcacattgattccagcaccacaatcttagatgttcacggagtgggccttaagaactttacaaagtctgcccgggaacttattacccgattgcagaagattgatggtgataattaccctgagactctttgccaaatgtttattataaatgctgggcctggatttaggctgttgtggaacactgtcaagtcttttctcgatcccaaaacaacttctaagattcatgttcttg

SEQ ID NO: 269540 - DNA, 442 bp, Glycine max
tgaagagaagagtctagaaacaacacaacacaacgcgaatggctacggcgctggagaagaaagcgaaggaggcattcttcgacgacgaattcggtctggccgtcgatctctactctgaagccatacgattggatccgaacgacgccaatctcttcgcggacagagcccaagcccatatcaaactcaacgctttcactgaagccgtttccgatgccaacaaatccatccaattaaacccttccttgcccaaggcctatcttcgtaaagccaccgcttgtatcaaactccaagaataccacaccgtcaaggtagcgcttcaaaacggtgccgcttttgcccaagacgattcaagattcgccaacttgattcaacaatgtgatcgctgcattgcagaggaatcaagtggccttactagcaccttgtcttcccatttgagcaataa

SEQ ID NO: 269541 - DNA, 390 bp, Glycine max
gccagacgtcggatagcttgccttgatgcattcattgccacccacgcgggtgtagcttctacggggatccggaataacaccaaggtccaatacaaagctggacactctttcccaacccactgcgcctcatagagactgatggagacaaaattctctggactaagatccacttcatgtgtgacatatgctcacgatgctaaagaatctttgcttcgtgatcttgtatctctccaactcactcccattaccattgagatcatcaacccctgcgaacttatagacaatggacatcatgaaggtggcaatcaatggtatcacactcattgttagacacttgcttcgctgcttgcacatacgaaataactcaccccttgacgtcgttgatatcaa

SEQ ID NO: 269542 - DNA, 340 bp, Glycine max
gaaaaacatggatatggggtggaggaatttaatgaaaccttatatgatgaatgggttaacaagggcgacgcaccggcattgccagagactcttaaaaattacaacaagctgttgtctcttggcttcaagattgtattcttgtcaggaagatatcttgacaaaatggccgtaacagaagcaaacctaaagaaggctggcttccacacatgggagcagttaattctcaaggatccacatcttatcactccaaatgcactttcatacaaatcagcaatgagagagaatctgttgaggcagggatacagaattgttggaatcattggagaccaatggagcgatc

SEQ ID NO: 269543 - DNA, 366 bp, Glycine max
  unsure (1)..(366): unsure at all n locations
cccacgcgttcgcagttaaccaacaagcttacttttatgccagagacctcgaagtccatcccaaggacacatttgtgttcagtatagatggcaccgtactctctaatattccatactacaaaaaacatggatatggggtggagaaatttaactcgaccttgtatgatgaatgggttaacaagggcaatgcaccggcactgcccgagactcttaagaattacaacaagctggtgtctcttggcttcaagattatattcttgtcaggaagaacactggacaaacaggccgtaacagaagcaaacttaaaagaaggctggctaccacacatgggaaaaaataattctcaaggatccacangatccttcc

SEQ ID NO: 269544 - DNA, 450 bp, Glycine max
gccaagccaaccaggctagcgccactagcgaggaatgcactgtggcttggggagtttgtaaccatgcttttcacttccattgcatcagtcgatggctcaagactcgtcaagtttgtcctctagataacagtgagtgggagtttcagaaatatggccactagaattatgatgtggttgagctcctcggacatttggaccatctatcctagattttgaatatttactgttctatctgttattttcgtttgcttgtgtactgaatttattatgttcaagaaatcagcttgtctgatggaatttgatatacgccgtggtaacatgtaaagttttactttaatgttttatgtatttcatatgcttcctttcagctgtttgtgtttgtggtgcttacaagctgtgtgacgtggttaatttttctcccttcccgtgtattgctttgtagttgatgat

SEQ ID NO: 269545 - DNA, 429 bp, Glycine max
gtatagagtgaaagaatgggtgagaaaagcaagattttgatcataggaggcaccggctacatcggcaaacatatagtggaagcaagcgcaaaggctggaaatcccacttttgctttggtgagggaatccacactctctgacccctccaaggcacaactcatccacaattttgaggctttgggcgttaatttggtccgcggggatctgtacgatcatgagaagttggtgaaagctatcaagcaagtagatgtcgtcatatccacgctgggtcacctgcagcttgccgatcagctcaagatcatcgctgccattaaggaagccggtaatgttaagaggtttttcccttcggaattcggtaacgacgtggatcgtgtccatgccgtggaaccagcaaaatctgcattagctatcaaagcccaaattcgacgc

SEQ ID NO: 269546 - DNA, 236 bp, Glycine max
gttttgattgtggaacatatcgcattacattacattagattggtggcaaagcaatggcatcggcactacaagcagcaggtactttcatgcaacccaccaagtttttgcagctaaagtctactcaagccatatttaaggcttttggtttggaacctgctagagataataatgtcacattcttccttcatgctgatcttaaggaacttgctcacaagtgtgttgatgctaccaaatat

SEQ ID NO: 269547 - DNA, 372 bp, Glycine max
  unsure (1)..(372): unsure at all n locations
gtgtctcagagggtctgtgacacacagactcacttccaagttccaagctttggccatttattcccactgtttattgaacatggcacagattttggctccctctacgcaatggcagatgagaatctcaaaatcctctcccaatgcaagtcccattacatcaaacatgtggagttctttattgtggaaacaaaataagaaagtttcacccacaagttctgctaaatttagagtgatggcaattaagtctgacaatagcatcatcaacaggctagagggtctacttaatttggatatcactccattcacggacaagataattgctgagtacattttggattgggggacaggaattgatgtgcgcagtanatcaag

SEQ ID NO: 269548 - DNA, 438 bp, Glycine max
cccacgcgtccgggaagatgagtttgagggcatcagagatagcgaagaagttgaatctgcagcctcacccagaaggtgggttttacgtggagacattccgagaccattccgtccagctttcgacctctcagctcccccccgaatacaaagtggatcgccctgtatcgacctccatctattttctcgttccttctgggagtgtgtctcgcctccatcgcataccctgcgccgaaacctggcatcattacatcggcgaccctctcaccgtatgtatatcttcatctctctctttcttttttaacctaatctgatatgaattgtattgcaggtagtggaattgaatgagaaagatgggagcgtaaaattcacttgccttggatcagatctgactcagaatcaggtgccgcagtacacggtgccttccaacgtctggtttgg

SEQ ID NO: 269549 - DNA, 468 bp, Glycine max
cccacgcgtccggaaaaacaaactcctctcactcttccttccatctcttcttcaacattccaatccaatccaaaacgctgcgttttattttgtattcaattctatcaatcccaaaattcctcgccggagatagagaatcttaacaattccaccactttccggcgagacatggccgtcgccgtctccgtccccgcccgccagaagccgagctccgacgcgagcctctttacactctgccccttctggagttcgcgcaacgccaatcaaagctcctccaaaacggtgtcttccgtcgccaggtcgctgctccctccccgccgcagactccgcctcgatccttccaattacctctattttccatatgaaccggggaagcaggtaaggagcgcggttcggttgaaaaacactagcaagtctcacgtggctttcaagtttcaaacgacggcaccaaagagttgttacatgcgg

SEQ ID NO: 269550 - DNA, 468 bp, Glycine max
cccacgcgtccgcttgatttgtagtttgttttgtgctttagataaaagttctgccaaatcaagaggggttttaagatcatagtgtgtgttttgcaacaatggctaagttctttgctgctatgatcttggcactctttgccatttccatacttcaaacagtggtaatggctgctaatgaacaaggaggccacttgtatgacaataagagcaaatatggaagtggaagtgtcaagagttaccaatgcccatcacaatgctcgaggagatgtagccagacccaataccacaagccctgcatgtttttctgtcagaagtgctgcaggaaatgcctgtgtgtgcccccggggtattatggtaataaagctgtgtgcccttgctacaacaactggaagaccaaggaaggaggacccaagtgcccttgagcttcaacttgttcaacttcaattgtcgctttcctacatttttatt

SEQ ID NO: 269551 - DNA, 303 bp, Glycine max
agaaaggtggactgaaaatcaaccccaacttctttgtggactttggaactgagcctgatgggccttctcttgcccatgagatgagatatcctggtggtgactgtacttcagatatatggatttaaacatacgtgtcattatttccctttaataaacggatctgtcatatggttgtaatgagctactatgctataaataatgctcttgtgaatcttcaactttttgaagacagtttgcaattgcataaatatattaagctcatcttagaaaaaaaaaaatgaattgcgctataatttgtagaat

SEQ ID NO: 269552 - DNA, 409 bp, Glycine max
gggtaatgggtttgcgatcgtggtggctgattcatcggcggtgcacagcatcctcgtccacaagtccaacgaggacaagatcatgctcctcgattcccacaaactcattgccgctagcggcgagcccggagacagggttcagttcacagagtacattcagaagaacgtcgccttgtatcagttccgtaacggcatccctcttaccaccgccgccgccgccaatttcacgcgtggcgaactcgccactgctctccgcaagaacccatactctgtgaacatccttcttgctggttatgacaaagagacgggccctgaactatactatattgactacattgcaacgctttacaagctttgaaagggggcttttggttatggctcctaattttcactgtcaatgatggacaga

SEQ ID NO: 269553 - DNA, 415 bp, Glycine max
aaaaaaaggaaatagaatacgaggaggatgattaataaaaaagagaaaaaaatactaaaaaaggggaaacaacgaaggaggggaacatgctaacaagaatcccacaaactcattgcacgatagcggctagcccggagacagggttcagttcacagagtacattcagaagaacgttgccttgtatcagatccgtaacggcatccctcttaccaccggcgtcgccgactatttcacgcgtggcgaactcgccactgttctacgcaagaacccatactctgtggacattcttcttgctggttatgacacagagaccgtccctgaactatactatattgactacattgcaacgctttacaagcttgaaaagcggacttttggttatggcttctatttttcactggccatggatggacag

SEQ ID NO: 269554 - DNA, 387 bp, Glycine max
cccacgcgtccggcttatgaagaagacggcgatggcgatggcgatggctcctttttcacttgcaatgaaaatcaaaagcaaaaggggtggtattaggtgcgaggtggctattaatgcggtggatgaggagtcgaggacgtcaccggaggagacgaagatcggagcgcgtgtgaaggtgaaggaagcgggtttgaaggtgtaccacgttcccaaagttggggagcttgacctaacgggtctggaaggcgagatcaagcagtacgttggcctctggaacggtaagcgaatcttcgccaatcttccttacaaggttcagtttcttaccgacattcccggtcgtggtcctgtcaagttctttgcccacctcaaggaagatgaattcgacta

SEQ ID NO: 269555 - DNA, 353 bp, Glycine max
gcaaaaatgaagacgattctttccaccgagaccatgaacatcccggacggcgtgagcatcaaagttcatgccaaggtcatcgaagttgagggcccccgcggaaaattggtgcgagacttcaagcatttgaatctcgattttcagctcattactgacgaaaacggtaaaagaaagctgaaaatcgacgcgtggtttggttctcggaaaacattcggcggcattcgcaccggcttgagccacgtggagaatcttatcaccggcgtcaccaagggctaccgctacaaaatgaggttcggttatgcccattttcccatcaacgcaagcattggcaacagcaacaagtctattgagat

SEQ ID NO: 269556 - DNA, 415 bp, Glycine max
ggaaaaaatggcgtgcaggagcatgcttcgttcatcgattctggtggaacccttccaattgcaacctcttcattttagtaacagacccgttagcgcttatccgtttcgccgtggcaaaggactaaccctccgttgctccagcaacgagacgccgtcgtttcaggacgatcagggtccacctcaagaggccgtgttgaaggccatttccgaggtgtctaaggcagaagggagggttgggcaaacaacaaacatggttattggaggcaccgtgtcggatgattcttctaatgaatggcttactttggaccagagggtgaactcatacccaactgttcggggattcactgcaataggaactggaggggaggacttcgttcaagccatggttgttgctgtggaatccgtaatccagcag

SEQ ID NO: 269557 - DNA, 423 bp, Glycine max
cccacgcgtccgatgtctgtcctgactgcagaggatctggtgaggtcattaacgagagagataaatgtcctcagtgcaaaggaaacaaaatttcccaggaaaagaaggtgctggaagtgcatgttgagaagggtatgcagcagggtcagaagattgtttttgaaggacaagctgatgaagctcctgacacaatcacaggagatattgtttttgtattgcaagtaaaggatcacccaaggttcagaagggaacaagatgacctctttattgatcaaaatctcagcttaactgaggcactctgtggctttcagtttgccgtcaaacatcttgatggtaggcaactattgatcaaatcaaatcctggggaagtcatcaagccaggtcaatataaagcattaaatgatgagggaatgccacaacaca

SEQ ID NO: 269558 - DNA, 455 bp, Glycine max
gttgcagactgggcctgatgctgctcctaaagcagcggctgaaagtggtgccggaactccggtggagaatttgttggtgaagaaaactgagatgaggggtcctgagatgtatatctcggaggagattagtgccgagtttagagaatcgttgcttaccagggtgggattgatgggtgttgtttacctcagaactttgccacccaaaactgctgtgataaggaaactgaattttcgttccgaattgagggaacagaagctgttaaaagatttgttatacaaagttcgcgtgttagtagccttggtaatgggatgtttcatgtgaggactgcagcctctgaggagccgatacccattatgaagtatagtttgggtcctagtctgacgcccttgcctttgagggttcgacttacaaaacgacatactgggagtttgctttctgtgatgatacaatatgc

SEQ ID NO: 269559 - DNA, 380 bp, Glycine max
taaatataaaaataatatatataaggtacaaatcgtaaatcgaggtacccattttatgataaactttccttccatttttgttcctctagtaggcctagtatttccggcaattgcaatggcttctttatttcttcatgttcaaaaaaacaagattttttagatacagaaaacaaagtaaaattctggggttttttattccccaattataatactaaattcaaaaaaaggagagtaatgagtataatctttcgctcagacgatgtactgatatattctatggcggaggttcgaagaacaagcaatttattttgggccgtcttcactctgttaggttcattggcgttatcgttcgttgcaatttccaagttatctggtatgga

SEQ ID NO: 269560 - DNA, 409 bp, Glycine max
cgagataactagaaacagtgtgatgaaaatgaaggtccttgttttcttcgttgctacaattttggtagcatggcaatgccatgcgtacgatatgttccctctccgaatgaacactggctatggtgcccgtactccggaggtgaaatgcgcaagttggaggcttgctgtggaagcacacaacatctttggctttgagaccattcctgaagagtgcgttgaagcaacaaaggaatacatccatggcgaacaatatagatcagactccaaaacagttaaccaacaagcttacttttatgccagagacctcgaagtccatcccaaggacacatttgtgttcagtatagatggcaccgtactctctaatattccatactacaaaaaacatggattatgggtggaagaaatttac

SEQ ID NO: 269561 - DNA, 438 bp, Glycine max
ggtttgtgcaatctcgtcatcaccgttctcaactctctcgtttcggcgtctcgtcgtacgcaatgcgacgccgtctccgtgcaagccgcgtgccgttaaacccttaacggcacttccgagcgcggggcggaggcagttgctgttttttctgacggcgacgacggcgttgacggcgagggaagcggcgtccgtggcgcaggacattcccttgttcgggatacggaagagtctgaagaaggtggaggaggaagcggaggagattgtgagagagggatttgaggctgcggataagggattggtggcggcggagaaggggctggagacggcggagaaggggttggtggcggcggagaaggggatagaggaagcggagagggagatagaggagacggtgagttttggggggttggcgcaggcgggagcggtggcgggagcgga

SEQ ID NO: 269562 - DNA, 434 bp, Glycine max
gccagacctcgatgatgcccaattggcaaaggaagtcgaatacctgctaaggaaaggatggattccttgcttggaattcgagttggagcacggtttcgtgtaccgtgagcacaacaggtcacctggatactatgatggacgctactggaccatgtggaagctgcctatgtttggctgcactgatgcttctcaggtgttgaaggagcttcaagaggctaagactgcataccccaatggcttcatccgtatcattggatttgacaacgttcgtcaagtgcagtgcatcagcttcatcgcctacaagcccccaggcttctaagtcattgaaaaatttgcaaagcatttttagccaccctactttgtttgttgtacttaaactacattcccatttgtttttgcttaatgagatttcatcattcctttatttttggttt

SEQ ID NO: 269563 - DNA, 472 bp, Glycine max
  unsure (1)..(472): unsure at all n locations
cccacgcgtccgcccacgcgtccgcacagagttagaggagaaatcatcatggcatcagcagcatctgggtttgtgttgtcacttaatgttgcagctgccaccacaaactcaagggtggtcatgttcaacacaaagaacaacgcttctaggcttgttgtaagggcttcagatgagcctgcagcggcggcacccgccaccgccacacccccagctgaagctgaagctaaaccaaagccaccacctattggccccaagagaggtgctaaggtgaagattcttaggaaggaatcttactggtacaaaggcactggttcagtggttgctgttgatcaggaccccaacactcgctaccctgttgtggttcgattcaacaaagtcaactatgccaatgtatcaacaaacaactatgctntggatgagattgtggaagtggaatgagtctaatttattgtacatttgattctggtcatgc

SEQ ID NO: 269564 - DNA, 217 bp, Glycine max
atgagtgggggggcttctgggagggtgaagtggttcaatgatcagaatgggtttggattcataagccctgacgatggcagcgaccatctcttcgttcaccaatctcacgatcaaatctgacggcttccgaagcctcgccgaaggagagtccgttgagttcgccattgaatctgaatctgacggacgcgcgaaggctgttgatgtcactggccccgac

SEQ ID NO: 269565 - DNA, 394 bp, Glycine max
atcgagatagctcgaagcagcgtgacgaaaatgaacgtccttgaattattcgatgctacagtcttgggagcatggcaatgccatgcgtacgatatgatccctgtacgaatgaacactggctatggcgcccgtactccggaggtgaaatgcgcatgttggaggctagctgtggaagcacacaacatctctggctctgagaccattcctgaagagtgcgctgaagcaacagaggaatacatccatggcgaacactatagagcagactccatagcagatcaccaacacgcttacttttatggccaaagacctcgaaggccataccatggacacatctgagttcatgatagacaggaccgtactctctaatatttcatactacaaactacatggatat

SEQ ID NO: 269566 - DNA, 413 bp, Glycine max
gtacaagcctccagtgtacaagcctccagtgtacaagccaccagtgtacaaaccaccgcttcataagcccaagccaccgctttacaagccgaagccaccgttttacaagccaccatataagaagccaccatacgggaagccaccttatggaaaggaccctacagatgaggacagcacgcatgcctgacgcttgccttgtggactattatctagttcagatatgagaggaactgctttgtgatttatagcatcgtgatttagaacttcctagcactgcgtatgcacgactatcgcatgcactttaaacgatcggagcattaatgatgtagcctagtcatcatgagcatgatactgattaccatgtgaatgtgaatcaaaatgatgctatagaaactggtgcttctgtacttcag

SEQ ID NO: 269567 - DNA, 350 bp, Glycine max
ccagaagtgactagtggtggaattgcattgaagatctttgcgtcggtgttgctagaaggtcgggctgcaggtaagataacgtctgctaaaggagatgaagaaattggccttaaagttcggttaagagtccaaaagatcatgggttcaaggccatacaaaatagctgaatttgaaattatatttggagagggtatcagtaaggtcggatgcattttagattgtgccgaaatgacggatattgtctcaaagaaaggctcttggtacagctatggagatcatcggatgggacaatgaacggacaaagcaatacaggacttaaaagagaatacacatcttttagaagaaattga

SEQ ID NO: 269568 - DNA, 434 bp, Glycine max
ctggacttccctaccactgcttgtctactgtactttaccagccatatgccttctgactggaaaatttattgtacctgagattagcaactatgccagtattgtgttcatggccctcttcatatccattgcagcaactggcatccttgagatgcaatggggcggtgttagcatagacgactggtggaggaacgaacagttttgggtgatcggaggtgtatcttctcatctttttgccctatttcagggtttactgaaggtcttggctggtgtgaacacaaacttcactgtgacgtcaaaagcagcagatgatggagaattctcagaactctacatctttaagtggacatcactcttgatccctgcaatgaccctactaatcatgaatattgctggggtggttgttgtggtctcagatgccataacaatggttatga

SEQ ID NO: 269569 - DNA, 405 bp, Glycine max
  unsure (1)..(405): unsure at all n locations
atgacctnccatgtccgcgttcctaagctggcaattcctacctccccattcctgacatttttttacgcccaggttttatgacccttccgacgggggcgctcttaaggagcttgtgactacattgcaaattggatgtcagccgttgaaatcgttgatgatgacatatacctaggtgcagaaaacagttttaatctgatcactgttcggaaaaatagtgcaggtgctactgatgaagagcgacgtcgtcttgaagtggttggtgagtatcacctaggagaatttgtcaatcggttccggcatggctcccttgttatgcgcttgccagattctgatgtgggccatattccaactgttatctttggcaccattaatggtgttattggagtaattgcgtctctttcacat

SEQ ID NO: 269570 - DNA, 387 bp, Glycine max
tgcgacgccatcgcgtacgctcacgcgtccgctcacgcgttcgatggaaaccaaaataataaatgcaagtacattcagccactgcaaatacataacttaaacatacacaactgatgaacgagacaaggttacaattgacggatatgaaactataataatgtcagatgagagtacagaatgagagacagagcatgcgttcttaagcgccatccttgagcaaccaattagtgtctgcattgatgcaaaagattttcatttatacaccgaaggaatttatgatggagataactgtacaagtccgtatgggattaatcactttggtttacttgggggttatggttcagcggatggcgtatattactggatagggaaaaattcatgggaaga

SEQ ID NO: 269571 - DNA, 412 bp, Glycine max
taaaaatggcatcatccatcgccggctccctaactacatcaatcagtcgcacaggtcatgtgctcaaacgacctgttggggcctcatcctctaccgttcttggattgccagcaatggccaaggcggggagagtgaggtgctccatggaggaaaagccttcaagcagctcaaacctagggatgggggcatccttgttagcagctgcagctgccgcaaccatgtcaagcccagcagccatggctttggttgatgagagactcagcactgaaggaactgggcttccctttgggcttagcaacaaccttcttggttggatcctgtttggtgtctttggtctcatatgggctctcttctttgtctacacttccacccttgaagaggatgaagagtctggattgtccctctaaacccc

SEQ ID NO: 269572 - DNA, 431 bp, Glycine max
gtgcttctctcctctgtctttttctctctcttgctatccttttggctagtggcactgctgcgagtgcaactccaagaagcgcagtgccaagccaccatgtttcaacattcaacagaagcctttttccttccacttttctctttggaattggttcttctgcttaccaggcagaaggagcagcaagtgtagatgggagaggaccaagcatatgggacacctacactagacagcatactgaaaagatttgggatcatagcaccggtgacatgggagctgatttttatcatcgatacaagggtgacataaaaatagcgaaagaaattgggctggactctttcagattctctatctcatggtcaagaatattcccaaagggcaaggggagcagttaacccccttggggttaaaatctacaacaatgtcatcgatga

SEQ ID NO: 269573 - DNA, 463 bp, Glycine max
aaccacctacggcacacggaaagaatttcgttgtagtgttcattacacccaacaaccaagtgcagcaatcaccaaaaaagaagaaggcaaatcaaagttttgaaccttggttcaatatctagagtccctgcaagctcaacacatcagagataatcaaaatgcatcctgcgcagatcgttttgtatggatcaactttatgtgtcatgataacagtgcacttctccatgaagctactcgctgaacatgttttgaactggaagaaaccaaaggagcaaaaggccatagtaattataatccttatggccccattgtacgctgtggactcctatgttggtttgataaatttcttttgaagtgaagcatttttcacattcttggactcaattaaagagtgctatgaagctcttgtgattgctaaagttttgggcttgatgtacaattatctaaacatcttcttaagtaa

SEQ ID NO: 269574 - DNA, 458 bp, Glycine max
cccacgcgtccgatgaacagtttatcaatggcacttctccacccaaatcttcttcccacttgcaattccaacactcttacctttccttccatcaaactcaaaccctcactctcgcacgtgccttctccaacccccacacgcttcagtctctctgtttccgcggcggaaaccaccgcttttgccgcccctcccactccccaacctgagaagcttggagttgtagttaagccaacggagaagccgagacttgtgttgaagttcatatggatggagaagaacattggaattgcgcttgaccagatggtaccgggccatggcaccattcctctgagcccatattacttttggccccgaaaagatgcctgggaagagctcaaggagttgcttgagaacaagccttggatctctcaaaagcagatgattattcttctcaatcaggccactgatatcatcaattt

SEQ ID NO: 269575 - DNA, 344 bp, Glycine max
  unsure (1)..(344): unsure at all n locations
gtggtttcagtgagtgatcggtgttcacttgatccttcataagtcgtcatcatcatcatcatcatcaccgttgattgaagaagatgccgatcagaaacatcgccatcggaaggcctgaagaggctactcaccccgacacgttgaaggcggggttggctgagttcatctccaccttgatcttcgtgttcgccggttcaggttccggcatcgcctacaacaagctcaccgacaacggcgccgtcactcccgncggcctcatcttcgcttccatcgcccatgctttcgccctcttcgtcggcgtctccgtcggcgccaacatcttcggcgggcacgtcaaccccgcc

SEQ ID NO: 269576 - DNA, 443 bp, Glycine max
gtgagctataagctagtttatcgtgaggagaatatgaagttgtttgttttctttgatgctgccgtagttttgagtagcatgggcatgccatggcgcaggctaccaaaggttccctcttcgaatgaaaactggctatggtgagcgttcttctgaggtaaaatgctcaagttttaggcttgctgtggaagcacacaacatccgagcctttaaaaccattcctgaagagcgcgttgaaccaacataggactacattaatggcgaacaatttacatcatactctaaaacagttaaccaacaagctttcttttatgctagtgaacgcgaagtccatcacaacgacatatttatattcagcatagataacaccgtactctctaatatcccatactatgaaagacatggatattagggtgagtgatctaatgaaaccttatatgatgaat

SEQ ID NO: 269577 - DNA, 428 bp, Glycine max
cccacgcgtccgcccacgcgtccggaaagaatgtgcattagactgttgggagctacaccaaagtcagttcttgagctcatggatgtgaaggatctcacattagctcatgtgaaaagccatttgcagatgtatcgaactgttaagaccactgacaagcctgctgcttcttcaggcctttcagatggatcaggagaagatgacatgtctccaatgggaagcagtggtggaatgcgtcaattttcagaccaaagaagcctttcggatcgaccagtgcaacaagatatggactactcttcagccaacaacacactatggagtaactcttcaagtagagaaccatggcaacaaaataactctaacgacatagatggtttcagacccccaatcttccagtcgcagcatatatcaggagggcatcaaattcaaga

SEQ ID NO: 269578 - DNA, 343 bp, Glycine max
acagaatgtcctccacctctttgcgcaagaaatctagccgaactcttgtctcaaaggttccatgtgccactctcagaaactttctttcaaatttgcaagaggttattcttggcaccaagctttccattctcatccctgctattccagctgccatcgttgctgagtgctttggctttggaagaccttggatttttatattaagcttacttggacttacaccacttgctgaacgtgtgagcttcattacagaacaagttgccttttacactggtcccacagttggaggacttctgaatgctacatgtgggaatgttacggagctcataatagcagtatttgccct

SEQ ID NO: 269579 - DNA, 401 bp, Glycine max
cccacgcgtccgcccacgcgtccgcccacgcgtccgaaattggttccgatgtcttcatttcaggcaatgctttccaatccaatatggattttattagtaacccacaagcgtacggttttatcacatcaaaagttgcatgctgtggtcaaggaccttacaatgggattggactgtgtactccggcgtctaacttgtgcccaaacagagatgtgtatgcgttttgggaccccttccatccaagtgagagagcaaacagattgattgtggacacattcatgatcggagactccaaatacatgcacccaatgaatctcagtaccatgttgcttttggattcaacttcaaggacctagctaattattatcttcttcctgttagggtcgtggcatacattctgcact

SEQ ID NO: 269580 - DNA, 344 bp, Glycine max
gtaataaggccagccactcatgtctcaacccctatccgacgatggatttgttggtcttttcaacagtcccttaaaggacaagtctctccaaaccgtggcgattgagttcgatactttctcgaacaaaaaatgggatcctgcaaaccgacacatcggcattgacgtgaactcgatcaagtccgtcaaaacggcatcgtgggggttgtccaatggacaagtggcggagattctcgttacctataatgccgccacgagcctcttggttgcttctctgatccacccttcaaagaaaacaagttacatcctctctgacacagtgaacttgaagagtaatctttccgaat

SEQ ID NO: 269581 - DNA, 454 bp, Glycine max
  unsure (1)..(454): unsure at all n locations
gttcgtcgtcttgtcttccagaatctgacaactttcctcatccgaacctaaattctctcatgaaaccctcacttatccaatccccacccaaattccccgcatcgacctcactcccctaaattcccccatcgccggctctctcacggccgaattcatcgcatcgccggttccgctacggtggctatcgcatgggtaagattctccgagaaaacgcgaagccgtcggcaaattcctcatcggcgtacccctctgcggcgcccgccaccacttcgtcgacatcggtgacggagacggtgagggggtcacaccagttcaagatcacggggtactcgctctcgaaggggatcgggattgggaagtacatggcctncgacgtgttttctgtcggagggtacaattgggcgatttatttctaccccgatgggaagagcgtggaggacaatgcaacctacgt

SEQ ID NO: 269582 - DNA, 446 bp, Glycine max
atgatgtgggaacacagtacagatctggaatatactactacacgccggaacaagagaaggcggccaaggagtcgttggaacaacagcagaagcagttgaacaggaagattgtcactgagatccttcctgccaaaaagttctacagggcagaggagtaccatcaacagtaccttgagaagggtggccgatttggtttcaagcaatctgcttctaaaggctgcaatgatccaatccggtgctacggttaattgtcataagtgaattgccatcaaagatcaatgtgaccggttctttagacgttgaaattccatagttttgttagtaagtatttgttaatatatcaacaaagcttgtgcacattgtatttgaggttgaagatggacatagccatatattcagttgtagagttgtatattggctttgatatataatatgactttgctttg

SEQ ID NO: 269583 - DNA, 368 bp, Glycine max
ataaattctcacaaatttaacacattacataggtacagggctgtaacaagtgcatactacagaggtgcattaggggcaatgcttgtctacgacataacgaagaggcaatcgtttgatcatgtagcgagatgggtggaggagctgcgtgcgcacgcagatagctccattgtgatcatgttggttgggaacaaagctgatcttgtggaccagagaatggtaccaactgaggatgcagtggagtttgctgaggaccaaggcctcttcttctccgagacttcagctctcagtggtgacaatgtggagagtgcatttctcaaattgctagaagagatcaataaggtagtgtccaaaaaggctttggaatgtgg

SEQ ID NO: 269584 - DNA, 320 bp, Glycine max
ttctagtattttccaagtaacttaaggtttcaaacctaggaagtcggaagtcatggcagcaacattgatggcagcaacaacttctggcactcttaaagcaactcctttcctaggccaaggcaagggtgccaatgccaatgctcttagggatgttgtttccatgggaactgggaagtacaccatgggcaatgatttgaggtatggaccagacagagtgaaatacttgggacccttttcagctcagaccccttcatacttgaaaggagaattcccaggggattatggatgggacactgctggcttatctgctgacccggaag

SEQ ID NO: 269585 - DNA, 352 bp, Glycine max
gatctctgtccccgctgcgtctctcgtaatcatgcctaagcaaatccacgagattaaggatttccttctcactgccagaaggaaggatgcgaggtcagtgaagatcaagaggagcagagatgtggttaagttcaaggtcagatgctccaagtacctctacacactttgtgtgtttgacccagagaaagctgataaattgaagcaatctcttccttcaggtttgagtgttcaagacctgtaaaggtactgggcgagagatcaagaagaagcaattcattgattcttctgaagtttgattctctgtagttgaagcttgagatttttgtcagttggtcttttattatagattatt

SEQ ID NO: 269586 - DNA, 436 bp, Glycine max
  unsure (1)..(436): unsure at all n locations
gctggatcaattacagcggtcgtgatccccatctttggaagaaaagtctcaatgaatattgtagtcttactgtaacaatccgtagtggtcacaagatgtccaccagctggaaccagtgccataaataggactacgctagcacacattccagatgccattatcacagttgattcagccccctccaatatacttatcttctcctccagaaccacagtcgttgggtttccatagcgcccgtattcataactcacttgacgattctcctgccaaatgatggaaaaatttagccacaccaataactgacatttatccactcattatgtcatgaggcgaataaatcttttaacaatccaaccttgaaatcaatgacatcagcggttntcttaagaaagtatgcagaagtgttcagcacaggggtggtaattccatcagtctc

SEQ ID NO: 269587 - DNA, 296 bp, Glycine max
tgagaaaattattccctcgctcatggaagagttctcctacaccaactaacaccaggtgcctagaattgagaagattgcggtgaactgtggtatcggagatgctgcacaaaatgcaaagggtttggacgcggcaattagtgatctagcactgatcacagggcagagacctattaagactcgggccagggcttctcttgccacctttaagatcagggaaggttaaccacttgggatttctgtgacactaagaggacatatgacgtactcattcctagaccgagttgccaacttgggac

SEQ ID NO: 269588 - DNA, 438 bp, Glycine max
  unsure (1)..(438): unsure at all n locations
cccacgcgtccgcccacgcgtccgcccacgcgtccgcccacgcgtccgctcgctgactgaaactcgcaaaaattagggttttgcagtgatggcactgtccaaccgcgtccgatcgggaatctctctcttcaccaaatccacgttcctcacttccgagcgatccactctccaacgattcctcgttgccccttccatttccttcgcctccagaaattacgccaacgtgccggggcaaaaggaaaacaaagttaaggtccctctggctttgtttggaggttcaggaaactatgcctctgctttgtatattgcatctgtgaaagctaatgcagtggcaaaggttgagtctgagcttctgcaatttgttgaggctgtaaagaatagtcccatattttcacagtttataagggacttgtctngtggctaagatgttagagtaaa

SEQ ID NO: 269589 - DNA, 206 bp, Glycine max
tttcttgaatctcacatagctattgactccattactaaaccaagtaataccctgaaatcatcaccgaattccattgttactctttccctctctagagactactattgcatacaactcaaccttcgtatagttaattcctaactaggacacttgaaaagtccacttccttatttataaaataattcattaattattctaacccttct

SEQ ID NO: 269590 - DNA, 357 bp, Glycine max
aaaaaaaaaaaaaaaaaaaaaaaaaaaataaaaaaaaaaaaaaaaaaaaaaaaaataagggatattaaaaaaaaaaaaaaaaaaaaaaaaaaaaaaaaaaaaaaaaaaaaaaaaaaaaaaaaaaaaaaaaaaatgggttccctttttaaagaatccatttttacttacccttcattgcaacctattactttttttttaggttaccttaatttaattttattggccgtttttttaaaactttatatttgtaaaaaccttgattttacccaatttaatcgcttttaaataaatcccctttttacaaatttgcgaaataccaaaaagcccctaacctaactcctttccaaaaattttacc

SEQ ID NO: 269591 - DNA, 138 bp, Glycine max
gattggcttctggaagtggactgtacatcaagcggcgggattatcaatagcggcggccgcgattgaagcatcgtattatgcaaggttcctgagtgggttgatggaggaaagagttgacgctgcaaaggtctttaaatc

SEQ ID NO: 269592 - DNA, 398 bp, Glycine max
gaaggtgcaagagtttgttgtgagctataagctagtttagggtgaggagaatatgaaggtgggggttttctttgttgctgcagtagttttggtagcatggccatgccatggctcatgctaccaaaggttccctctccgaatgaaaactggctatggtgagcgttcttcggaggtaaaatgcacaagttttaggcttgctgtggaagcacacaacatccgagcctttaaaaccattcctgaagagtgcgttgaaccaacaaatgactacattaatggcgaacaatttagatcatactctaaaacagttaaccaacaagctgtcttttatgctagtgaacgcgaagtccatcacaacgacatattgatattgcgcatagataacaccgtactctctaata

SEQ ID NO: 269593 - DNA, 451 bp, Glycine max
gacgcacttatcaatcaatcaaaacattcccaataacgatggtatacacatcttcaattaagctccttctcctatagccatggctctttctaagcttataattgcttcccttcttgcgtcgcttctccttcttcatttcgttgatgctgatcaatcggcacatgcacaaacgcaggggtctcttcttcagcagatagattgtaacggagcatgtgctgcgaggtgccgtttatcatctcgttcacgcctctgccaaagagcttgtggaacttgttgtagacgctgtaactgcgtgccacctggcactgctggaaaccaagaagtgtgtccctgctatgcaagtttgactactcatggtggcaaacgcaagtgcccttagacttaattggaccactatcctatgcatgcctttgatttatattataaaataaaaataatactatatataaca

SEQ ID NO: 269594 - DNA, 421 bp, Glycine max
aaacaagtagttgagaactaagaagaaggaaatggcttcctcaatgatctcctccccagctgttaccaccgtcaaccgtgccggtgccggcatggttgctccattcaccggcctcaaatccatggctggcttccccacgaggaagaccaacaatgacattacctccattgctagcaacggtggaagagtacaatgcatgcacgtgtggccaccaattggcaagaagaagttcgagactctttcctacttgccagacctcgatgatgcccaattggcaaaggaagtcgaataccttctaaagaaaggatggattccttgcttggaattcgagttggagcacggtttcgtgtaccgtgagcacaacaggtcacctggatactatgatggacgctactggaccatgtggaagctgcctatgttt

SEQ ID NO: 269595 - DNA, 332 bp, Glycine max
agacttcttatcttataaaaaatttgtcctatagggagctccattcttattgctaggcctactatttatatatttatcattatatatggtattcgcaagtttataacatatattaactcatatatcgttttcggtcgtatctattttaatttcaattcatatgataaccttattattattcaaagaaatcataggattatctgattcctccaaaaaaggcatgataataacttttctttgctatcaatatatttagttactcgatgactttaattcaagccatttaccttttatggatttatatgaatcatcaaaaattctttcatggactt

SEQ ID NO: 269596 - DNA, 305 bp, Glycine max
gatctctcattctctcgtgcctcaacgctttttggacggctttcgcttttccattggaacctctttcacacttcagatctgtttcttcatcggttgttcaagtaaatggcctttgtcaccactgctgaagtgtgtgatgctaacccacagttaattttgagtggggagcttcgtgcccttcagccattttttcatatatatggccgtcgacaggttttctctggacctatagttaccttgaatgtgtttgaagacaatgttttggttcgtgagttccttgaatataaatgctatcgaagagttct

SEQ ID NO: 269597 - DNA, 375 bp, Glycine max
  unsure (1)..(375): unsure at all n locations
ggcatctcttgagaccaatccccactcaaccgccagaccactctctctggtcttctgctacctttcaagtttttaaagtattaagatggcacagacattcctatttacctcagagtcagtgaacgagggacaccctgacaagctctgcgaccaaatctacgatgctgtcctcgactcttgccttgaacaggacccagacagcaaggttgcctgcgaaacatgcaccaagaccaacttggtcatagtcttcntagagatcaccaccaaagccaactttcactacgaaaagatcttgcgtgacacctgcaagaacatcttcttcctctcaaacgatctgcgacttgattcttacaactgcaaaggccttgtaaacat

SEQ ID NO: 269598 - DNA, 368 bp, Glycine max
gtgaactcaaagcgacagctgctgaataagtggagcagataacagcttctctagggagatcatcatctgatggcatcgcatcatcagaagcctcagacaggatcaaagctggtttcattcacttcaagaaggagaaatacgacaagaatccagctttgtatggtgaacttgccaaaggccagagccccaagttcatggtgtttgcttgctcagactcaagggtgtgcccatctcatgtgctagatttccaaccaggagaggcctttgtggtcagaaatgttgccaacattgtcccaccatatgaccagtcaaaatacgctggaactggggctgcaattgagtatgctggtttgcatcttaaggtgtcg

SEQ ID NO: 269599 - DNA, 306 bp, Glycine max
cacaaaacaactttcaaactctgataaagaatggctgccaacacattgatgagtactgcgatctcagccttcccatgtctgctttcttcctcaaaatccagatttgccaccgcagttcctctttctagctttggtgtcaccaatgcctcttcttctcgcttttctatgagtgctgactggatgccaggccagcctagacctccttaccttgatggttcagcacctggtgactttggattcgaccctcttcgtcttggtgaagtaccagagaatcttgagaggttcaaagagtcaaaactcattcac

SEQ ID NO: 269600 - DNA, 402 bp, Glycine max
caacaggtcttattgattatgatatgctggagaaaactgctactctgtttcgtccaaaacgcattgttgctggtgctagtgcttatcctcgggacattgactaccctcgtatgagaaaaattgcagatgaagtaggtgcttttcttatgatggatatggctcatataagtgggcttgttgctgcatctgtactttctaatccctttgagtattgtgatattgtgaccaccacaacccacaagtctttacgaggtccaagaggtggtatgatattcttcaagaaagatactgtgcatggggttgatttggagcctgccattaacaatgctcgttttcctggtctacaggggggtcctcataaccacacaattggaggactagtagtttgcttgaagtatgctc

SEQ ID NO: 269601 - DNA, 370 bp, Glycine max
acgcaacaggtcttattgattatgatatgctggttaaaactgctactctgattcgtacaaaacggattgtttctgatgctagtgcgtatcctcggtacattgactatccctctatgagaaaaattgcagatgaagtatgtgcttttcttatgatggatatggctcatataagtggtcttgttgctgcatctgtactttgtaatccctttgagtattgtgatattgtgaccaccacaacccacatgtctttacgaggtccaataggtggtatgatattcttcaagaaagatactgtgcatggtgatgatttgtagcctgctgttaacaatgctgattttcctggtgtacattggggtcctcataaccacac

SEQ ID NO: 269602 - DNA, 365 bp, Glycine max
cgatggagattgcttgtcagtgcgaagcgcaaattaaagcgcacggaccattctacttcggtgctcttgaaaacatgggaaaacagagcacagatttctctgccctcaactgcatcgacctctccaaccctgacatcaaccaatccgacaatttactcaaacaggcatgttaggattccggtttttactacgttgtcaatcatggaataagccaagaattcatggaagaggtttttgcacagagcaagaaattcttatctctttctcacaaggagtagatgaagattctcaggaatgaaaaacacaagggatacacccatgttcttgatgaagtgcttgatcctgaagaccaagtgcatcgagac

SEQ ID NO: 269603 - DNA, 323 bp, Glycine max
gattttagtacgatcagaatcaaacaacaccctgattgccaaacttcgcttaggcgaagacacttacttttcttcatgggttctatcggaattgagagctcgggacctgaggttgtcaccgcttatgtacatgcaaccaaggatctgatccagaccagtcatgtttatctggatatcaagacggtggaagagtttcataaagggcatgtggatacagagaggatcattaactgttcatacatgtttaatacaccataatgcacagtgaataattcacaatttctgtatgagttttcatatgcttgcaagaaagactatcatat

SEQ ID NO: 269604 - DNA, 364 bp, Glycine max
cggttgggtggattctgctgagaagtacaactcggaaggccggtgttgggagccgctcccaagaatgaacaagaatagaaagttttgctcaggttgtttcatggacaacaaattctatgtccttggagggcaagatgagcatggaaaggacctcacttgtggggaattctttgatggaaaggcaaatagttggaacttgattcctgacatgtggaaggatattgtttcacagtctccacctcttcttgctgttgtgaacaatgagttgtacacactggatgcttcttccaatgatctgaaagtgtatgtgaaaggaaccaacacatggaagactttgggaatggttccttgtatagcttattca

SEQ ID NO: 269605 - DNA, 374 bp, Glycine max
tggttctagtgtgtgattgtttgttgttgtggctggttcttcttcttttgttgttgtgtgtttgtgtttgttttttctctcacctgaaaatgtcttgctgcggtggtaactgtggttgcggaagctcctgcaagtgctgcaacggctgcggaggctgcaagatgtacccagacttgagctacactgagtcaaccaccaccgagaccttggtcatgggagtggcacctgttaaggctcaatttgagggtgctgaaatgggtgtgcccgctgagaacgatggctgcaaatgtggaccaaactgctcctgcaacccctgcacttgcaagtgatgtgttggaaagccagcttcaagcatagatcgcccttaattagga

SEQ ID NO: 269606 - DNA, 267 bp, Glycine max
tctacgcatacgaccacatacggcgacttattttgaaagaagatagcatgaaacacagtgcgacttgtaacgctgaatggaggacacaaaatgccagttataggcatggtaacttcagtggagaatcgtccatcaaatgcagacccttgcttctatctatgttgaaaacattgactatggttaccgtcattttgacactgcttcagcatattgaacacatgaagccatagccctaaacatggtcaaagccatacacataagccttat

SEQ ID NO: 269607 - DNA, 454 bp, Glycine max
gacaccaacacatccattcattgtcttaatgttagcaatgtcttcctctttctccatccatggctgcctcctcctgtcaatagcccttttctcagattgttgcttaacagcatctcaagctcccaccaccaaatcacacccctatatccttcccattaacaaagaccccgcaacaaatttgtactacacttcaattggcattggaactcctaggcacaactttgatttagtcattgatctttctggtgaaaacttatggtacgattgtgacactcattacaactcatcatcctacagacctatagcttgcggctcaaagcaatgccccgaaattggatgcgttggttgcaatggcccctttaaaccaggttgcacatacaatacatgccctgcttatgtaatcaaccaattagccaaatttatttacagtggaggcttatgtgacgatttcata

SEQ ID NO: 269608 - DNA, 302 bp, Glycine max
gaggaggtatgcattcaatcatgctaacgtcaagagaggacatgctcaattggtgtatgagtccaaaatgtacacaattctccagggaggaactggaattccaaatgtcagatggattctagtcggatggagattacaacgtactagtgatcgatctgcttgaaccgagtcctgaaaatctttttaacttctgcgatatacagctatcactaaagacagctgatcatgcttgctaatcaaatgatcaaccgagttcatacattcattcacaatcgatgctgcatctgtatatcaaacccgat

SEQ ID NO: 269609 - DNA, 246 bp, Glycine max
acacaacgggacggcataagacaacacgacggtgagatgcttccattgatgctctcaacaaaggcgggaatgataaattggtctgctggttatcaactcgtgctagaggtcttggtattaatcttgctactgctgatgttgtcattctgtccgatagtgactggaaccaacaagttactttcaggcctcagatcctgctcataggatttgtcaaaagaaagaaggtcaaggtttcccgttttggac

SEQ ID NO: 269610 - DNA, 345 bp, Glycine max
tatggggagtttcagacacatatagagggggttgacattggacggatggacgctacgtctcttcctcttctctttcgatccatccctcattcctaatcctacaatccaaccacctcagcctcacactcacatatacacatatctgaacgcatatcgtacctcctatggcttcaaagctcatcctcaaggagctcaaggacttgcataaagacccaccaacttcttgcatcgctggtccagtagctgacgacatgttccattggcaaacaacaataatgggtcctgcttatagtccttatgctggacgtgtattcctagtcactattcacttacctccggattatc

SEQ ID NO: 269611 - DNA, 198 bp, Glycine max
ctccattgacgaactgtaattccaaataacatattcttttcactctaaggagattacaatcttttagtgatccatctacatttaccaacactttaacatctttttaacttctacattataactctatcactaaatacatctctcatactcgctaatcaaatgatcaaccttattgacttcattcattcatactctttt

SEQ ID NO: 269612 - DNA, 420 bp, Glycine max
  unsure (1)..(420): unsure at all n locations
caaatatcttggagagttcaacgcctgtcgttgatgggaaacagtactacagtttggctgtgttgacaaggacagctgatggagatgaaggtggcaagcaccagctgattacagcaacagtgaaagatggcaaactatacatttgcaaggctcaagctggagacaagaggtggtttaagggagcaagaagatttgtggagagcacagcaagttctttcagtgttgcctaagaacttaattagtggagtgctattctgcatgtaaatcatcttgaaggggtgtgtatgtcttgaattatgtggcccctttttgtccacaagtttcattatttgaggcttgtggttggagtaagcacttcgattcttaatttttcatgtcttctaaggacttaccctnctctcttgtccccctttttctctc

SEQ ID NO: 269613 - DNA, 416 bp, Glycine max
ggcgagaaggaaaagttcggatattgatagaattcgtctaattcttctttgtaggggaagactttagtagattttgcttgatttataatagaatatttttcatttagtttagttttaattttgatttataagattttccattaaaaaaggagtctttatgtcacgttacagaggacctcgtttcaaaaaaatacgtcgtctggggtctttaccaggactaactagtaaaaggccaacagtcaaaagcgaacttagaaatcaatcgggcttcagtaaaaaatcttaatatcggattcggttaaaaggaaaaccaaaaatggggtttcattaagggcttaccggacggccattggttaaataccgtcgtattggcggaaaagcttaaggatcaactggtcaggttttattacaactac

SEQ ID NO: 269614 - DNA, 347 bp, Glycine max
gataagcagcatcaactaagcctaaaatcttctgccccacccagcattgtagcagagtgattctgttcactacaatgccatcatcactatcctctttcctccgtatggctcctattctctcccttcttgtactctcatgtgtgatttgttctagtagtgctcagggaccaccttcacctggctactatcctagttctaaaattagacctggtagtttttatcaagggtttagaaacctctggggatctcatcatcagagactagaccagggctagatgacaatctggcttgactctaactcaagaaatggattcaagtcactttacttctatcgatctgggtacttt

SEQ ID NO: 269615 - DNA, 378 bp, Glycine max
gacggacgagggtttcgtttggggtttgacgttgttcacaatcactttctgcgcttcactcactcccttcgtgcggttttctttctttgtcgaactcgtgcgaaaatgcgtgagattcttcacatacagggagggcaatgcggaaaccagatcggagcgaagttctgggaggtggtgtgcgcggagcacgggatcgattccacggtgaggtaccagggggacaacgagttgcaactcgagcgagtcaacgtctattacaatgaagcgagttgctgaatgttcgtgccgagggcggtgctcatggatctagagccagggaccatggacagcgtcagatctggtccctacggtcatgatttccgacctgataacttcgtc

SEQ ID NO: 269616 - DNA, 421 bp, Glycine max
tgttgttgtaactcgttcttcttcttttgttgttctgtgtttgtgtttgttttttctgtcacctgaaaatgtcttgctgcggtggtaactgtggttgcggaagctcctgcaagtgcggcaacggctgcggaggctgcaagatgtacccagacttgagctacactgagtcaaccaccaccgagaccttggtcatgggagtggcacctgttaaggctcaatttgagggtgctgaaatgggtgtgcccgctgagaacgatggctgcaaatgtggaccaaactgctcctgcaacccctgcacttgcaagtgaggtgttgggagagcaagcttcaagcagagatagcccttaattaggaataatgataaactattaatgtgtagctaaaaacttatgtattatgtctgtgatggttttcgtgcact

SEQ ID NO: 269617 - DNA, 372 bp, Glycine max
ccagaaaatgttgctaaagtaaaggcccggtacaatgagcttaatcttcagggtgtatttgaggagtacgagagtgggagctatgcgaagcttgtatcctccattgaagctcatcctatcaaagcagttcaagctgtattgaagtcctttttggctaaaatttacaaaaggcagaagtagagtcaacttaaggcgaggaccaaaattgtttaacatgcaatagaaactagagttctgatttctatctagtatctagagcagtatcatgtttcgtggcttggaatcttttaaaaattgattttcttcttgcctttggtttttctaattttggtttttcagtgttaagaatcttgtggaatttatcttgaaata

SEQ ID NO: 269618 - DNA, 342 bp, Glycine max
gagaggagagagtaacgaaggttgcttctgactgttcagaatcatgtcttggtgcaccattgagtccgatcccggtgtgtttacagaacttattcagcaaatgcaagtgaaaggagtacaggttgaggaactttattcattggatcttgactctctcaacagccttaggcctgtttatgggttgatttttcttttcaaatggcgtccaggagaaaaggatgaccgagtggttatcaaagatcccaaccctaacttgttttttgctagtcaggtaattaataatgcttgtgcaacccaagcaatcttgtccattcttatgaattcaccagacattgacattgg

SEQ ID NO: 269619 - DNA, 401 bp, Glycine max
ttattatgctctatcaacacattaaaaagatgagtagtgatatatctgctgtggaagtaggtcaacatttctattggcaaatagggagtttccaagtacatgcccaagtacttattacttcttgggttgtaattgctctcttattggtttcagccattctaattattcgaaatctgcaaaccattcccgctttcggtcagaatttctttgaatatgttcttgaattcattcgagacgtgagcaaaactcaaattggagaagaatatggtccgtgggttccttttattggaactttggttctatttatttttggttctaattggtcgtgggctcttttaccttggaaaatcatacaattacctcacggggagttagctgcacccacaaatgatataaatact

SEQ ID NO: 269620 - DNA, 350 bp, Glycine max
gaatatctatatcttggtgcccgttgattatgtatccaagtgaggggaagctataaacacccctaagaatgatgccatggtagtgataaaattcttaaagtacagagagccctaatcagtgatgggggaacacacttctgcaatgcataattgaagaagtttctggagtattacaatgtcagacataaggtggccacaccttatcatccccagacaaatggctaggcaaaagtttcaaatagagaactaaagcgaatccttaagaagactgttgcatcatcaagaaaggattgagctttgaagctggatgatgctctctggcttacaagatacgaacttaataaatttgt

SEQ ID NO: 269621 - DNA, 382 bp, Glycine max
gatagagagagagagtttttagagagagaagggatgaagatcacggcattgttggtgcttaaatgcacaggtgagggttccgatcccgttattctggcgaacgcttccgacgtcagccacttcggttacttccagcgttccagcgtcaaggagttcatcgtcttcgtcggtcgcaccgtcgcccgtcgcacccctcagggccaacgccaatccgtacaacacgaagagtacaaggtgcacacatacaacagaaatggtctttgcgcgttgggatttatggatgatcattacccgattcggagtgcgttttctcttctcaaccaggtaatagatgaatatcaaaaaaactttggcgagtcatggagaaatgctcaggaagaca

SEQ ID NO: 269622 - DNA, 326 bp, Glycine max
  unsure (1)..(326): unsure at all n locations
gtnaagtgacaaaaatacaatacaaaacaaaacagagcaaagagagagtgtgtgaaaagtgaaacaaaaaacagaacaacaatggcgacacttaaggttcctcagcctcttccccccgttgcagatgattgtgagcagctccgaaaagccttctcaggttggggaactaacgaggagctgattgtatcgatcttggctcataggaatgctgctcagaggaagcttatcagagaaacttatgcccagacctatggagaagatctcctcaaggccttggacaaagaactcacgagtgattttgagaggctggttcatctttggacact

SEQ ID NO: 269623 - DNA, 379 bp, Glycine max
ggtggcagagagcgaacccaaaactagagctgccttcccttcaaaccttccactcttctctccttttccaatcaagggaataatatttcttagagatattccgaaaccatggctcacgccaatcctatgatttttgttgttggaattctaggtaaccttgtctccttctgttgctttctagcaccagtaccaacattctatcgagtttgtaagaagaaaaccacggaaggtttccaatcacttccttacgtggctgcactcttcacttcaatgctttggatattttatgcttacataaagacgggcgaaatacttctcatcaccattaacgcattcggttgtttcatagagacagtttaccttgtcatctatatcactt

SEQ ID NO: 269624 - DNA, 338 bp, Glycine max
gaagtgaaatgcagattcatgctctttcaggacatgataacactgtctgctctgtgtttacgcggccgacggatccccaagttgttacgggttctcatgacactaccatcaagatgtgggaccttagatatggtaaaacaatgtcaactcttacaaaccataaaaaatctgttcgagcaatggcccagcatcccaaagagcaagcttttgcatctgcttcagctgacaatattaaaaagttcaaccttccaaaaggagaatttttgcacaacatgctctctcaacagaaaactatcatcaatgcaatggctgtcaatgaagagggtgtgatggttact

SEQ ID NO: 269625 - DNA, 338 bp, Glycine max
  unsure (1)..(338): unsure at all n locations
nncgccacgcgtnccgccacgcgtnccgggcactttaaattgcatcaaaatagttcattcttgtgcgcaattcctacctctgctttcaagatgcagatcttcgtcaagaccctcaccggaaagaccatcacccttgaggtggaaagctctgacaccatcgacaacgtcaaggccaagatccaagacaaggaaggaattcccccggatcagcaacgtctcatcttcgccggaaagcagctcgaggacggncgtaccctcgccgactacaacatccagaaggagtcaacccttcaccttgtccttcgtctccgtggtggcatgcagatcttcgtcaagac

SEQ ID NO: 269626 - DNA, 398 bp, Glycine max
gatcgatttgattgtttctgagtaatggcgtcgtcgcgagtagatctggatgggaaccccataaagcccatcaccatttgcatgattggcgccggtggcttcattgggtcccacctgtgcgagaagctcatgtcggagacccctcacagtgtcctcgccttggatgtctacaatgacaagatcaaacacctcttggaaccccacacgctcccttgggcctctcgcattcagttccatcgcctcaacatcaagcacgattcccgtctcgaaggcctcatcaaaatgtcagatctgactattaatctggctgccatctgcaactccgcggattacaacacgcgccctcttgacacaatttacagcaacttcatcgacgcgctttctgtggtgaagtactg

SEQ ID NO: 269627 - DNA, 360 bp, Glycine max
acaagggctggatgtaacttcttccttacgaggaggacttcaaattccatgattatagagccgtcatcaaatgtgaagacccaaatgcaaatttgtattcatttgttgggagcatggagtttggagagcaaaaatatcctctttctgcccaacaacttcttctgagagactctaagcttcgtaatacagactatgtgtttggagcagtcatctttactggtcatgacacaaaggttatccaaaactccactgatcccccttcaaaaagaagcaaaattgagaagaagatggataagattatatacttcttgttttgtgttttatttctaattgcatttgttggatctattctctttggca

SEQ ID NO: 269628 - DNA, 346 bp, Glycine max
gactgcggtttttttctgctccataagaagaaagatccttaaatcaacattctctctccctcccttggttataatagcaagcttttcaagcatatttccggggtttgttcccttttccttgtttagggttttctttggaaaaaaaaggtaattaggtataataatataattaaagcaaaaaaaaaaaaaataacatgggaaggggtagggttcagctgaagaggatagagaacaagatcaatcggcaagtaactttctccaaaaggagagctgggttactcaagaaagcacatgagatctctgtgctctgtgatgctgaggtcgctctgattgtcttctcccacaa

SEQ ID NO: 269629 - DNA, 366 bp, Glycine max
tggtgactggacgtagggacaagggtgtagccgaaccagtataaaactgagtttacattttctcttcccttaatctcctttatttattattgctttatattcatattcaaattgttttatttgaattaatatttaagaagattttcattaagggaattcataacttaaataaaaagtgaaatagatttttaattagggcaagtagtttggaatatcttaattcaaccccccaccccttcttaagatatctgaggccacttgtctaacaagtggtatcaaagcttcattcttgtataaagtttagaagcttcaagaaaaagatggtctcagcaaattccttattttcagaagggaattctatcaata

SEQ ID NO: 269630 - DNA, 387 bp, Glycine max
gcagaaaaggaacagatgttggaagatatgagagggttgcttcaggctgctgaagaaaaaaggcaagctgctctagctgagctctcagctaaacatcaaaagaatatcgagagtttggaggctcaaattaatgatgcattgtccgacagaagtaaggcaactgaatccatttcttcactgcaggttctagttgcagaaaaagaatccagaattgcagagatggaagcagcatcaacaggagaagctgcacgactcagagcagctgtggaaagtgtgaaaggggagctttctcacataaaagaggagcatgaaaacgaaagggaaagctgggaaactgcttctcaggcacttaaagcaaaacttgaaattgcagagagcaactgcata

SEQ ID NO: 269631 - DNA, 397 bp, Glycine max
tgggggcattatggtctcatgaaataaggcggccaccgcagccgcccgtacattaaacggcaacacagatctcctctccatctcttttttatttttgttttattttttcccactctttctcctcgtttccgaaccggaccgaaccgagccggaaacatgggagttccagcgttctaccggtggctcgcggatcggtacccactctcgatcgccgacgtcgtggaggaggagccatctgtcggctccggcgccgttgatgtgtctaaacctaatccaaatggcgtggagttcgacaacttgtacttggacatgaacggcatcattcacccctgttttcaccctgatggcaagtcagcacctactacctacgaagatgtattcaaatcaatctttgact

SEQ ID NO: 269632 - DNA, 396 bp, Glycine max
gaaacaatcatgagcttcattctgtgtccgattctctttgcatttacctttctgtcctcgcccgttctctctgcttcggatctggtcctcgccaaggttgaccgtcgcattgatctgacttcacagattgtgcgcatcactacttcactaaaggtgcagaatacgggatctgatgttgtgtctgagattttgctgtcctttcctgagaaccaggcaagtaacttggcatacttgaaggcaacacttggtgatgggaagggaaaatcaaaaccatcttctggtgttggtttacctgtcgaagttgtccggcctaaagatgtgccaccttccttgacaatttattccgtgtctttacctaaggggcttgggaagggagatagtctgacgttggatgtc

SEQ ID NO: 269633 - DNA, 385 bp, Glycine max
gatgcatagcaattccgaagtcctaattgtttaaacctaattctcatttcttcatcgttcgattcttctcctcctaaagatgcagatcttcgtgaaaactttgaccggtaagaccatcacccttgaggtggagtcctccgacaccatcgataacgtgaaagctaagattcaagacaaggaagggatcccacctgaccagcagagacttatctttgcgggtaaacagcttgaggatggtcgaacccttgccgactacaacatccaaaaggaatccactctccacctcgtgcttcgcctcaggggtggcatgcaaatctttgtcaagactttgactggcaagaccatcaccctcgaggtcgaatcctcggacaccattgataatgtc

SEQ ID NO: 269634 - DNA, 338 bp, Glycine max
ggtaggtggccctattgagaggcagttccccttcgcgtctctcttcaaacaaaacagaactgaactcgctgactgaaactcgcaaaaattagggttttgcagtgatggcactgtccaaccgcgtccgatcgggaatctctctcttcaccaaatccacgttcctcacttgcgagcgatccactctccaacgattcctcgttgccccttccatttccttcgccttcagaaattacgccaacgtgccggggcaaaaggaaaacaaagttaaggtccctctggctttgtttggaggttcaggaaactatgcctctgctttggatattggatctgggaaaagc

SEQ ID NO: 269635 - DNA, 337 bp, Glycine max
gatacaatacaacgattgaaagtccaagtcttggggaatttccaatttccagctccaccaagatccctcttttcctacaaacccatctctctttcatccctccaatcttcatcctgtgaaaaccgcgaacgaatcaacaaatgggtggttgcgtgttgaagctagtagattccgttctgttcctgttcttcctcctaatagcggtggtggctcctctgatcgacgctcaaacctgtcttcctctctcttacttccccgacatcctcgtccaactcaaggaacagtacaccaatgactacggcgattaccttgtcgcagaaaagccgcacttttttgt

SEQ ID NO: 269636 - DNA, 386 bp, Glycine max
  unsure (1)..(386): unsure at all n locations
gtgataataagaaagaagacggtgttgatatatcgctgcctgacatcaacaacggtgtatatggaacagatgagtttaggatgtacaacttcaaggtgaagccttgctcaagggcttactcccacgactggactgagtgtccattcgttcatccaggggagaatgcgaggaggagagacccacggaaatacccttacagctgtgttccttgccctgagttccgcaaagggacctgccagaagggtgattcctgcgagtatgctcatggtgtttttgagtcctggctacatcnccgccaataccggacaaggctttgcaaggatgagacgggctgtgctagaaaagtatgcttctttgctcacaaacctgaagagctacgccctgtg

SEQ ID NO: 269637 - DNA, 370 bp, Glycine max
gaccgggtgctctgcatcgtgtgcgggaagagcgtcgagaaggaggagcagaggggaggctggcaccgcgtcgagctctccagtggacagttcgttcagcgcctcactttgcctgagaattccatggtggatcatgttaaggcctatatggataacggggtgctcactatcacggttcctaaacaccacagaggggtcaataaccgtgttagaaacattaacatctcttctcgtccgtgagtgttgttgttgtgtgtctcatgaaatgaaagaattgaaacctagctaaccgctatctttgcataagaaacacggttgtctagataaataaataatagtaacaaaagttatgcgtccaagtctagacttt

SEQ ID NO: 269638 - DNA, 369 bp, Glycine max
gactcattctctctgcagattctaatcttcgcaaatcaacaacgtctctctctgttactctgaaaactgacttcaagttagtgtaactagctgccaagttgtgatggcattggtctctggaagaagttctgctctgaacccaaatgcacctatgttcatacctgctgcacttcgtcaggtggaggatttttcacctcaatggtgggatcttgtgaaatcttcaacatggtttcgtgactattggttgagccaacataaggaggaagaatttgaagaagttgccaatgactctactaatgatgatatggagaatatgctctcggaaacttttgatctaggcatggaagaagacttcaatgttctagaaaa

SEQ ID NO: 269639 - DNA, 371 bp, Glycine max
tgtacaagattggaggtggtggaactgtgccagtgggacgtgttgagaccggtgtcttgaagcctggaatggtggtgacttttgcaccaactggactgacaactgaagtcaagtctgtggagatgcaccatgaatctcttacagaggcacatcctggtgacaatgtgggattcaatgttaagaatgttgctgttaaggatttgaagcgtggttatgttgcctcaaactcaaaggatgaccctgcaaaggaggctgctaacttcacagcccaagtcatcatcatgaaccaccctggtcagattggaaatggctatgcccctgtcctcgactgccacacttctcacattgctgtcaagtttgctgaactcatg

SEQ ID NO: 269640 - DNA, 426 bp, Glycine max
gagggtgttgttacttcttctctggttgagtcggatctagagtcttcagtttctcctcgttgttcttcgctttcctgttttcaatttcgattctttcgttaatttaataagatgtttgggagggcaccgaagaagagcgataatacgaggtactacgaaatcctcggcgtctccaagaacgcttcgcaggatgatctgaagaaggcttacaagaaagccgccattaagaatcaccccgacaagggcggtgatcccgagaagtttaaagagctggcgcaagcttatgagggtcttagtgacccctgaaagcgtgagatatatgatcagtatggtgaagatgcgcttaaggaaggaatgggtggtggccggtgccatgatccatttgatatcttttcatctttctttggcggtggagttcctttggat

SEQ ID NO: 269641 - DNA, 387 bp, Glycine max
gggacttgtccttttcagacctgtctgtcgacgccactatttttccatcctcaccagaatatagagcgcagtcactcatctttctctctttttttttttttgccttcttttcattcctttcttttcttcaaatcaaggaactcagctatgactaccagagaaatccttcaaaagatgaaggtaaaagttggtttgggttcatcagaccctgactcagggaaaggaaagagcaagatgtcaaagaacataactcatgggtatcatttggtgaaagggaaatcatatcatgacatggaggattacgttggggctcaatttaagcaaatagataacaatgaattgggtttgtttgcaatattcgacggccatgcgggtcagaacgtacct

SEQ ID NO: 269642 - DNA, 360 bp, Glycine max
gactctgtggttctcttccaattacaacacaatcagtctgagattcgccaccgaaaaacctctcaccatggtttctcgccatttggtttcgctcttcctctgtttcctctgtttcgagatctctgtttcatcaattcgattgcccggtttggaccaagacgccaaggccacgcatggatcggtgcttaggttgaacagaggaggctcttcagtgaagtttgatcccacacgggtcactcagctctcgtggagtcccagggcttttctctacaagggctttttatccgatgaagaatgtgatcatttgataactctggccaaagacaagctggagaagtctatggtggcagataacgagtc

SEQ ID NO: 269643 - DNA, 386 bp, Glycine max
gataatgaaagtcaggagggagcagatgttgaaacagatgatgaggatagaacatattttgacacaaatgaatttttgtattctgatgccctaagaagtgcttcctatcgaagtagggaaggtatgggcaatgctagtatattcgatagagattatatttgttatgatggtgtgcatgggtttgacaaggagatcaaagatgtaagttatccatatgtcaaaagaagggataacctaccagagccaaaagaaaaagagaagcctgttggtttgtggtcaattattaaagacaatattgggaaggatctttctggagtttgtctccctgtttattttaacgaaccactgtcttcattgcataagtgttttgaagacctacagtattt

SEQ ID NO: 269644 - DNA, 376 bp, Glycine max
ggcacatttggaattggagcaagatgttgccacggaggatgagcctaatcaggtcattgattttcctggagggaaagtgggatttacttctgaaatgagattcatttctgagtctcctgagaaaagggtgccctgttatcgtgttcttgatgacaatggtgagatcgttaaatacagcaactatgtacaggttagcaaggaaatgggtgtgaagatgtattctgacatggtcactcttcaaactatggacaacatattctatgaagtgcatatgcaaggtagaatttccttctacctcacccaaatgggggaaagaagcagttaacattgcatctgctgctgcacttgcttctgatgatataatattgcctcagta

SEQ ID NO: 269645 - DNA, 369 bp, Glycine max
ggttcgagtgtgtgattgtttgttgttgtaactcgttcttcttcttttgttgttctgtgtttgtgtttgttttttctctcacctgaaaatgtcttgctgcggtggtaactgtggttgcggaagctcctacaagtgcggcaacggctgcagaggctgcaagatgtacccagacttgagctacactgagtcaaccaccaccgagaccttggtcatgggagtggcacctgttaaggctcaatttgagggtgctgaaatgggtgtgcccgctgagaacgatggctgcaaatgtggaccaaactgctcctgcaacccctgcacttgcaagtgaggtgttgggagagcaagcttcaagcagagatagcccttaat

SEQ ID NO: 269646 - DNA, 337 bp, Glycine max
acatgcccaatggaaacttggatgattgggtgcatggcaaaaataaaggagataatttggtcgccgattggttcactaggtataagatcgccttgggcgtggctcagggaatctgctatcttcaccacgactgtgatcccgtcatcgtgcatcgcgatctcaaacctagtaacatattattggacgctgagatggaggccagagtcgcagattttggtgtcgccaagttgattcagaccgacgagtccatgtctgtcattgccggttcctatggctacattgctccagaatatgcttacacccttcaagtcggtgaaaagagtgacatttacagcta

SEQ ID NO: 269647 - DNA, 348 bp, Glycine max
gcgacgatggtcgtttctgcgccgattgcttgaaaaccaacttgttcggcaagtttcgtttcgccgtcacttcaaatgccatgataactcccacggacaaggtcctcgttgccttctctggtggcccttcatccagggtagctttgcaatttgttcatgacatgcaagagagggctcagaggaacttcgatgcgagtagggaccggtcgttgccggtgtctggtgttggagttgtgtttattgatgagagtgccgtgttgccgattccttctaatgaaatggaggaagcggttgaggttgttagtgaggttgtgtcgagtttggccccaccaagggaaggagtgcata

SEQ ID NO: 269648 - DNA, 363 bp, Glycine max
gggctcctccttagactgccagcccaatatagccattggatcgaattcagtctgaattcggtctaatggtttgggagttctaattaagtctaagaattctgtacatatatatatttagaagatcacagggtgcttgatcagtggtgtatcaggatggacaaggtgacgaggttggcttctgaaaagggtgtggtgattttcacaaagagctcttgttgcctctgctatgcagtcaacattctgtttcaagaacttggtgtgaatcctgtggttcatgagattgatcatgaccctgaaggcagagaaatggagaaagctctattggggcaaagcttcactgctccagttccagctgtattcata

SEQ ID NO: 269649 - DNA, 346 bp, Glycine max
gatgaggtctaatatatcattcaaaagtttttgaaatgttgtcaccccttcttctatttctatgcctaactcttcctttgtttttgttgtccttcttcaaataccgtaaaaccttcaagaatccaccacttccaccaggtcctagaggccttcccataatagggaatcttcatcaactagatagtccttctcttcatgagcagctatggcatctctcaaagaaatatggtcctttattttcccttcaatttggattaaggccagccatagttgtttcctctccaaaattggccaaagaggtaatgaaagacaatgaccttgagtgctgtggacgacctaaattact

SEQ ID NO: 269650 - DNA, 403 bp, Glycine max
gacgacagaagggggaagaagggatggtagaaggagcagagctgatgtggttgagcagttcctcccagaccacaatgagtccatttctgcagttcttgacaagtttggtgccatgggaattgacacccctggcgtcgttgcactgcttggagcacacagtgttggtcgaacccattgtgtgaagttggtgcaccgtttgtacccagagattgatccagctctgaaccctgaccacgtccctcacattctgaagaagtgccctgatgccattccagaccctaaggcggtgcagtacgtgagaaacgaccgtggcactcccatgattctagacaacaactactacagaaacatattagacagcaagggtctcttgatagtggatcaccaactagccaatgacaag

SEQ ID NO: 269651 - DNA, 414 bp, Glycine max
aagacgacagaaggggaactacttaaagccaacttatatgagtttcacagattgaatcgagaatcagggggtgaagtgtatttcacgatgccaaggttgcagtcaattaccattcagtgtttggaagcacttcagtttttgcacagtcttggactaatacattgtgacttgaagccggagaatattttggttaagagctatagcagatgtgaggttaaagtcattgatctcggaagtagctgttttgagacagatcacctttgctcgtatgttcagtccaagtcttatcgtgctcctgaggttattttggggctttcatatgacaagaagattgacatctggtcacttggatgcatcttggcagaactttgtactggcaatgttctcttccaaaatgattcccctgcgacatta

SEQ ID NO: 269652 - DNA, 389 bp, Glycine max
atacggctgcgagaagacgacagaaggggaagggcagaaattgtagtgaaagcgacaattctagtactagtataataactagtacgaatgatacaaatgatagtgattccactataggagaaagttctaataatctcgatgaaagtcaaaaatataagcatttgtggcttgaatgcgaaaattgttatggattaaattataaaaaattttttaaatcaaaaatgaatatttgtgaatactgtggatatcatttgaaaatgggcagttcagatagaatcgaacttttgattgattcgggtacttggaatcctatggatgaagacatggtttctctggatcctattgaatttcattccgaaagaggaaccttataagatcgtattgattct

SEQ ID NO: 269653 - DNA, 369 bp, Glycine max
ttacggctgcgagaagacgacagaaggggggagtctaatatttgcagtgctgaaaatgtcgcagttgttggaaaaggccaaaaactatgttgcggagaaagtcaccaacatgcccaagccagaggcgagtgtcaccgacgtggacttcaagcgcgtgagccgcgacagcgtcgagtacttggccaaggtctccgttcagaacccttattccacttccattcccatttgtgagatcaagtactccctcaaaagtgctggcagggagatagcagcaggaacaatacctgacccagggtcattgaaggcaagtgacacaacaatgttggatgtgccagtgaaggtgcctcatagcatattactgaactttgc

SEQ ID NO: 269654 - DNA, 357 bp, Glycine max
  unsure (1)..(357): unsure at all n locations
acgaggggggcttggatttcgcaatagccgaagcaagaaaatatgggatcaagatggtgttgagtttggtgaataactatgagaacatgggtggaaagaaacagtatgtggaatgggcaaggagtcagggacagtccataaattctgaggatgacttttttacaaatcctgtggtgaagggatactacaaaaaccacatcaaggctgtacttacaagacgtaatagcatcactggagttgcttacaaagacgacccaactataatggcttgggaacttatgaatgagattaggtgcccttctgatcaatcangaaggacagttcangcttggatcactgagatggcatcttacctga

SEQ ID NO: 269655 - DNA, 427 bp, Glycine max
ggaagcatcgagaacatcgcagcgatggcgagagtgggtagaatgaagttgggttcacaaggcatggaggtgtctttgcagggacttgggtgcatgggcatgtctgcgttctatggtcctcccaagcctgaccccgatatgattgctctcatccaccacgctgttcaaactggtgtcacttttcttgacacttctgacgtctatggtcctcacaccaacgaactccttctaggaaaggctctgaagggaggggtgagagatgaggttgaattggctacaaagtttggaatcaacgttgctgaagggaagagagagatccgtggtgatccggcatatgtgagggctgcttgtgagggaagcttaaagagacttggcatcgattgcatagatctctattaccaacatcggattgatactcgtgtgccta

SEQ ID NO: 269656 - DNA, 404 bp, Glycine max
gatatatgtaggagaaggtgtcaaaacacttcaactttaggctccatctcaaaaaaatgggtggtttagctagcaatcttcctctaattgttatggtgggtctgcaaattcattatgcagcacttgctatattcacaagagccgctttgttagatggattgagtacgacggtctttgtagtgtacaggcaaggcatagccactttggctttggcgcctatgtttttctctcctaagcggagacaatcagtgaaagattctttgggattcaggagcttctttttgatgtttgtgaccgctcttgttggagtcacagcaaatcagaatgcatactttaaaggtttattttatgcatcctctactgcagctaccgctatgagtaatctgataccagcattaacgttt

SEQ ID NO: 269657 - DNA, 369 bp, Glycine max
ggtcctaaatcctcattccagccacacgcttcagaggacatgggctcattgggcgggttacaaaatgtgagcggcatcaattttcttatcaaagagggtccaaaagtcaatgcaaagttcgagctgaagccgccaccatatccactgaatggtttggagccggtgatgagccagcagacacttgagtttcactgggggaagcaccacaagacttatgtggaaaatctgaaaaaacaagttgttgggacagagcttgatgggaagtcactagaagagattattgtcacatcatacaataagggtgacattcttccagctttcaacaatgcagcacaggtatggaaccatgacttcttctgggagtgcatg

SEQ ID NO: 269658 - DNA, 315 bp, Glycine max
tgttcaattcgacagtgaagagtctgcacagaatgcgtattgagaagttaaatggcatgttgatcaatgataagcaggtctatgtaggccattttctgcgaaagcaagatagagagaatgctctcagtaagacaaaatttaataatgtctatgtgaaaaacttatcagagtcaaccacggatgaagagttgatgaaattttttggagaatatggtaccattactagtgctgtaataatgagggacgcagacggtaaatcaaagtgttttggctttgtcaattttgaaaacccagatgatgctgccaaagctgttg

SEQ ID NO: 269659 - DNA, 364 bp, Glycine max
gactcctcaacgctttctcatcgcttgatcaaacttcaaaccctagctaggatttcaaggtacgcttaacggtggcttcaaaacgcattactaaggagttgaaggatctgcagcaggaccctcctgtttcctgcagtgctggccctgttggtgatgacatgtttcattggcaagctacaattatgggtccaactgacagtccttatgctggtggtgtattcctggtgaccattcacttcccaccagattatccatttaagccaccaaaggtttccttccgaaccaaggtatttcaccctaacataaacagcaatggaagtatctgtctggacattctgaaagagcagtggagtcctgcccttac

SEQ ID NO: 269660 - DNA, 348 bp, Glycine max
aagaataaaaaaataaaaaaaaaaaaaaagaatctgtataaatagaaaaataatatatataaggtacaaatagtaaatcgaggtacccattttatgataaactttccttccatttttgttcctctagtaggcctagtatttccggcaattgcaatggcttctttatttctttatgttcaaaaaaacaagattttttagatacagaaaacaaagtaaaattctggggttttttattccccaattataatactaaattcaaaaaaaggagagtaatgagtataatctttcgctcagacgatgtactgatatattctatggcggaggttcgaagaacaagcaatttatttt

SEQ ID NO: 269661 - DNA, 398 bp, Glycine max
gggaaacgtgtgcacattctgcctattgatgatacgattgaaggtgtcactggcaatctgtttgatgctttcttgaaaccctatttcttggaagcttaccgtcctgtcagaaaaggagatctatttcttgtccggggagggatgagaagtgtagagttcaaggtggttgaaaccgatcctggagaatattgtgttgttgctccagacactgaaattttctgtgagggggagcctttgaaaagagaagatgaagagagactggatgaagtcgggtatgatgatgtgggtggtgtcaggaaacaaatggctcaaattcgtgagttggttgagcttccattgaggcattcacagctttttaaatcaattggtgtgaaaccacccaaaggaattttacttta

SEQ ID NO: 269662 - DNA, 351 bp, Glycine max
  unsure (1)..(351): unsure at all n locations
gatctatctgtcctgcataattttactacctcagcgcgaccagtgcttcttattatacatcacatctattgtatggccactgaaatattatagactgcgtactcattcataacatatcagctgtacgtgtttctgatatatatttgcctcttagtgggtcgatattaattgaagatcatggctganggaaaaacagcaactcaaaaatctcttcaagattttgatcctcaaaagacacccagaaggaacaagtatgctttcgcctgtgccattttggcttncatgacttccatattacttggctatgatgttggggtgatgagtggagcgattatatacataaagagagac

SEQ ID NO: 269663 - DNA, 382 bp, Glycine max
ggatcgtgttgttgtgtttgctttggagaaacgaggtggtgttcgttgttggcgaatactcactcacgcgtttgtagttgcaggctctaatcagatcccaaatggtaatccgtgagctcagtggaatgattctttcccgtgcgctcaagcaatgtaattttgtggaatggcgaggacataaagttgtttataaaaggtatgctagtctctatttctgcatgtgcattgatcaagatgacaatgaattagaagtccttgaaatgattcatcattttgtggagattcttgaccggtattttggcagtgtctgtgaactggacttaatattcaactttcacaaggcctactatatactagatgaaattctaattgcccgtgagct

SEQ ID NO: 269664 - DNA, 430 bp, Glycine max
ctataggctggaccctggcagacattcctggtattagccgatccacatgtatgcatcggataaatttagaagatagggctaaaccaataagacaaccacagagaagactcaactcgatgattcttgatgtagtgaagaatgaggtaaccaagcttttgcaagctagaatcatttatcctgtctccgacagccaatgggtgagtcccgtctaggtagtctcgaagaaaaccggcctcaccgtgataaaaaatgagaaggaggagctgatttctactcgggtgccgaacaattgaagagtctgcatcgactataggaagctgaaccaagttaccaaaaaagaccattttccactgccattcattgaccaaatgcttgagcgcctggtaggtaaatctcactactggttccttgatgggttttctggttatat

SEQ ID NO: 269665 - DNA, 451 bp, Glycine max
  unsure (1)..(451): unsure at all n locations
agacacatgaaggnngattttgtgcatgtgcaacttctncgagtttacgtgtggactgatggttaggactctgtangctgataaagacaacactcataccgttggaaagaaggatgctgctggccatgttgcttaaattagttcttgcnttccttgtcttcttgagttttatcagagacgggagtgcanggatcactagctctttcattcggtcagagtggccggcagttgacatcccccttgatcatgaagcatttgcagntccaaagggttataatgcacctcaacaagtgcacatcacgcaaggtgactatgatggaaaagcagtaatcatctcatgggtgaccacagaagagccagggcacaagcatatacagtatggcacatcagagaataaaattcaaactagtggagaaggcacaagtacaaactatactttccacaaatacaa

SEQ ID NO: 269666 - DNA, 288 bp, Glycine max
gggcgaggatggcaaacacaaacagcgacaccaaagaagaaagcaaaaaaatggatgaaggagagacaatacctctcctcacctcatacaagatgggaaattttaatctatcccacaggattgtgttggcaccgttaacacgatcaaagtcttacaacttcgttcctcagccgcatgctgctctgtattattctcaaagaactactaatggtggcttcttgatcggggaagctactggtgtatctgatacggcaaaggatgggtaccctaatacacctggcatttgga

SEQ ID NO: 269667 - DNA, 405 bp, Glycine max
ggcagcgcttgatttgaggccaggcaagccccactcagccaccacagctctcctcgttcacgctacccctttctgctcttcttctacctttcaagttttaaaagtataaagatggcagagacattcctatttacctcagagtcggtgaacgagggacaccctgacaagctctgcgaccaaatctccgatgctgtcctcgacgcttgcctcgagcaggacccagacagcaaagttgcctgcgaaacatgcaccaaaaccaacttggtcatggtcttcggagaaatcacgaccaaggccagcgttgactacgagaagatagtgcgtgacacctgcaggaacatcggcttcgtctcaaatgatgtgggactggatgccgacaactgcaaggtcctcgtcaacattgag

SEQ ID NO: 269668 - DNA, 340 bp, Glycine max
  unsure (1)..(340): unsure at all n locations
gacactaaacaagtggaaagaagagcatcactgaactaacaaagcaaccctatgtcgaaggtggtttgtgtcaccggagccagcggcgccatcggatcatgggtggtcctactcctcctncagcgtggttacaccgtccatgccaccgtccaagatatcaaggatgaaaatgagacgaaacatttggaggaaatggaaagaaccaagaagcatcttcaattttttggaatgggtcctcttggaattcaattcattggcggtggcataaaaggttggtccggcgtaatccaacttgcatggtctaacatcattggtcaagtcgaagataccgagaaacaga

SEQ ID NO: 269669 - DNA, 417 bp, Glycine max
gagggtgcaagagtttgttgtgagctataagctagtttatcgggaggagaatatgaagttgtttgttttctttgttgctgcagtagttttggtagcatggccatgccatggcgcaggctaccaaaggttccctctccgaatgaaaactggctatggtgagcgttcttcggaggtaaaatgcgcaagttttaggcttgctgtggaagcacacaacatccgagcctttaaaaccattcctgaagagtgcgttgaaccaacaaaggactacattaatggcgaacaatttagatcagactctaaaacagttaaccaacaagctttcttttatgctagtgaacgcgaagtccatcacaacgacatatttatattcggcatagataacaccgtactctctaatatcccatactatgaaaaaca

SEQ ID NO: 269670 - DNA, 311 bp, Glycine max
gtacacaaaagcacttgcaaacgggttttggtttgggaacatcatcacattacattagattggtggtaatggcagcgtcactacaagcagcagctactttcatgcaacccaccaagttgagcaggagcaacactttgcagcaaaagtctactcagtccattttcaaggcttttggtttggaacctgttggagctaaaaaggtcacatgctcccttcaagctgatcttaatgacttggctcacaagtgtgttgatgctaccaaaattgcatgattcgcccttgccacctttgccctcgttgtctctggggca

SEQ ID NO: 269671 - DNA, 415 bp, Glycine max
  unsure (1)..(415): unsure at all n locations
gggtatcaaattcagagtgttcttctggatttgatgggtagaaggacagtcccgcaagtatttgtgaatggcaaacatattggtggatcagatgatctcagtgctgccgtccaaagtggtgaattgcagaaacttctcagtgcaagttgatggtgtactagagatttacgagcactgacatccttcatggataatgaagttgtcaagcttttagaagcataatatgttttgatgcctttttagttttctgggtatttaggtgacagcgcgtattctttagaggaataggatgtcattctgcttaaaatcagcttgaattcttcacatggaaatgtangactcttgaaaagttgagctctaaaacatagaatccgagctctaattggtatattctacttgnttttatatttttttc

SEQ ID NO: 269672 - DNA, 407 bp, Glycine max
aacaccaagtgttatttttacccgaggctttgcgacttcggggcttttaacgaaatgcatgaatcgttaatattagtacctgctttacagtcccattggttaatgatgcacgtaagtatgatgatattgggttatgcaactcttttatgcggatcattattatcagtggctattttagtcattacatttcaagaactcatacaaattattggtaaaaagcaagaatttctattttttaaatgaatcattttcttttgccgaaaatcaatacatgaatatgactgttaaaaatatggtttacaaaaaacttcttttttgtcttaatgaaattaatatagatctcaatttcttcaacaaattggatcggtggggttaccgtactattaagcttaggtttatctttttaa

SEQ ID NO: 269673 - DNA, 431 bp, Glycine max
ggatgcccccggagcaaaggagtatgtgcatattggaattcagcagaggaatgggaagaagagtctgaccacagtgcaagggctgaagaaggagttcagctacgagaagatcctcaaggacctcaagaaggagttctgctgcaacggaaccgtggtgcaggacaaggagcttggcaagatcatccaactccaaggcgaccagcgtaagaacgtctcccacttcctcgttcaggctggccttgtcaggaaggaccagatcaagattcatggtttttgaccaattggtcttggttttgttagtagtaatttcaagttgttcttgagtttgtgagttttgaaaagttggattggttttctgtttgatgagtggtgttggaataagtttggtttggtttggttggtttgggtttccaatttttaatgattggatt

SEQ ID NO: 269674 - DNA, 233 bp, Glycine max
gaaggtgcaagagtttgttgtgagctataagctaggttatcgtgaggagaatatgaagttgtttgttttctttgctgctgcagtagttttggtagcatggccatgccatggcgcaggctaccaaaggttccctctccgaatgaaaactggctatggtgagcgttcttcggaggtaaaatgcgcaagttttaggcttgctgtggaagcacacaacatccgagcctttaaaacca

SEQ ID NO: 269675 - DNA, 368 bp, Glycine max
gatcccttccttgagccacatagggatgcttggaggctctaggctattaacaaggtggctgagcttgcatttagatgccttgcttttcatagtgacatgaggcctaccatgattgaagtggctgaggagctagatcttatcaggcgcagtgggtgggcgaccatggaggaaaccatatgcatggcttcttcggttgggtccgtgtgttcatcgcctcgaaatggaagtgttaattcacttagaggtgttagttttgagagagctgcaggacttgggagtgagacattgattgttccccacaagactgatgtttttttgcaatcaattgaggaggtgaaggacagctcttctgtgtctgtgcatgatag

SEQ ID NO: 269676 - DNA, 349 bp, Glycine max
gatgtttgtgagcgctccggttggagtcacggcaaatcagaatgcatacttcaaaggattattttatgcatcttctactgcagctaccgctatgagtaatctgataccggcattaacgtttgtaattgcagcaattgcgggatttgagaaagttgacataagcttaagaagcacggccaagatattagggacagtttgttgcgtggctggagccttaaccatggcattggtcaaaggacagaagctgttacacacggagttccttccttctatacatctcaccggcagtcaaggtgatgattggctgctgggttgcctattgctcttagcaagcagtgttttttggtca

SEQ ID NO: 269677 - DNA, 309 bp, Glycine max
gaagccccttataagtttacaaatgctcttgaagctgtcaagaagctgagggcagaaccaaaggccaatgaccaatatttgcctccttttgttattgttgacgagagtgggaaacctgttggtccgatagttgatggtgatgctgttgttacattcaacttccgagctgatcgtatgacaatgattgctaaagctcttgagtatgaaaattttgacaaatttgatagagttcgttacccaaaaatccgctatgctggaatgcttgaatatgatggtgaattgaaacttccaagtcattaccttgtttct

SEQ ID NO: 269678 - DNA, 402 bp, Glycine max
gggtgaagcaagtaaccctaatgctatgctatatgagtttctgagcgttctcacgacacgcctactcattgcactcttcgatcgcaactctctttttcttccaaaagggaaaacgaatctcaaacttcacaagtgtttgaggcgccatggcggatcggttgacgcgtattgccatcgtcagcaacgacaggtgcaagcccaaaaagtgccgccaggagtgcaagaagagttgccccgtcgtcagaaccgggaggttgtgtattgaggttacttcctcgtccaagattgctttcatttcggaggaattgtgtattggatgcggtatttgtgttaagaaatgtccttttgaagctattcagattatcaacttgccgaaggacttggacagggatactactcata

SEQ ID NO: 269679 - DNA, 347 bp, Glycine max
gacagccagttcggcgcgtcgtacggcacgcgcggcgcgacgttcgcaagtcggttcaccgcggcgtgcgtgggcgcgagtgccttgctgccgagcgcgagcccgagcgcggcagtcttcacttcgtccggcgttcgaccgagcaccagcaatagctgaccttcggcaggcgccggccgctcggcgatggcgagcatcggtccgtcgatggccggcagcgtcacgccgtccggatgatcgtcggtcgtcgcgaataccacggcattgcgcgattcgggcaggctgccgagcctggcgggaaaccgcgcgccgcgatacgaagccagcgcgccgaaccacgaagcgac

SEQ ID NO: 269680 - DNA, 361 bp, Glycine max
gactttccattctcttcaaacctaacgcagggtcgctatgctcttcattccatggctttgcccaaccagcaaaccgtggattaccctagtttcaaactcgttatcgtcggcgatggtggcacaggaaagacaacctttgtgaaaaggcatctcaccggagaattcgagaagaaatatgagccaaccatcggtgtggaagttcacccattggattttttcacaaactgtggaaagattcggttttactgcttggatactgcttgacaggagaaatttggtggcctcagagatggatactatatccatggacaatgtgctattatcaatgttgatgttactgcccggctaacatacaaaaatg

SEQ ID NO: 269681 - DNA, 363 bp, Glycine max
  unsure (1)..(363): unsure at all n locations
tatggggaccctggtggcaacgtattttcaagggatacactatcactacctggatggtggtattgaatctagggtctactggtcttttggtttcatggttaatgaaacatgctgataatattgtagaggtctattccacatcaatggcgatgctgctgacgatgatactttcactatttctcttcaacttcaaacctacactgcagcttttcttgggcattattatttgtatgatgtctctacacatgtattttgccccaccaaatatgctcttagatatgccattaacagttaagccagatgaagagaagctcattgaagtttctggtgatcgaagaacactttcatgatgttgnattgaca

SEQ ID NO: 269682 - DNA, 366 bp, Glycine max
ggcagttcaattccaatatattccattctctctgtgtatttggctacctctcccttcaagatgcagatcttcgtcaagaccctcaccggcaagaccatcacccttgaggtggaaagctctgacaccatcgacaacgtcaaggccaagatccaggacaaggaaggaatccccccggaccagcaacgtctcattttcgccggaaagcaacttgaggacggccgtacccttgctgactacaacattcagaaggagagtactcttcacctcgtcctccgtctccgtggtggcatgcagatcttcgttaagacactcaccggcaagaccataaccctagaggttgaaagctccgacaccatcgaatacgtc

SEQ ID NO: 269683 - DNA, 278 bp, Glycine max
  unsure (1)..(278): unsure at all n locations
ggagtgagatagagagagacgcttcgcaaatctcgatcnaatctcagaaaaatgagagaaatcatcagcattcacataggtcaggccgggatccaggtcggaaactcctgctgggaactctactgcctcgaacatggcatccagcccgacggcatgatgccttctgactccaccttcggtgtagcccacgacgccttcaacaccttcttcagcgaaaccggatctggcaagcacgtnccccgtgctgtcttcgtcgacctcgaacccaccgtcatcga

SEQ ID NO: 269684 - DNA, 414 bp, Glycine max
  unsure (1)..(414): unsure at all n locations
ggcatatccaaaggaacaaaaatattattaagatgagcaacattgttggagcacttgttctactctttgcatttctcttcctcagttgtgtgtatgcacaagacacaacaacccttgtgcctgcaatcataacttttggtgattctgctgtggatgtagggaacaatgactatcttcccacccttttcaaggctgattaccctccttatgggagggactttgttaaccaccaacctactgggaggttttgcaatggcaaattagctactgatttcactgctgacacattgggtttcaagacctatgctccagcatatcttagcccacatgcatcanggaaaaacctncttattggagcaaactttgcttcagctgcatctggttatgatgaaaatgctgctactttgaatcacg

SEQ ID NO: 269685 - DNA, 435 bp, Glycine max
  unsure (1)..(435): unsure at all n locations
gattgggtggaagagaaaagcagctcagtgcatgttggaggtggaggcgtgaacgtgcatacaggaaaaggaggtggcagtggcaccactgtcaacgttggtggaaaaggaggcggaggcgtaaacgtgcatgcaggccacaagggaaagccagtgcatgtttcagttggctcaaagtctccatttgattacgtctacgccgccacggaaactcaattacacgatgaccccaacgtggcactcttcttcttggaaaaggacttgcattctggaacaaagttggacttgcacttcaccaggagtacatctaatcaagccacgttcttgtcacgccaagttgcggattcgatacccttttcatccaacaaggtggactttatattcaacaagttttctgtcaaaccccggtcagaggaggctcanatcatgaagaat

SEQ ID NO: 269686 - DNA, 416 bp, Glycine max
acacggatgtcccattgagtcccatgatatatcgggacgctcgtaattgaaaacagaagcgctgaccaaattcaaacgacaataacttttgactcagatatccgattgtgtcccgtaatatatcgagacgctcgaaattcagaacaaagctattagaaaaatcaaacgacgataactttttacacggatgtccgattgagtcccataatatgtcgagacgtttgaaattgaaaactgaagctctgagaaaaatcaaacgacaataacttttaactcggatgtccgattgtgtcccgtaatatatcgagatgctagaaattcagaacagaagctattagaaaaatcaaacgacgataacgttttacacggatgtccgattgagtcccataatatgtcgagacgttcgaatttgaaaa

SEQ ID NO: 269687 - DNA, 302 bp, Glycine max
acgacagaagtggcacaagtgagtttgttgatcgagataactagaaacagtgtgatgaaaaggaaggtccttgttttcttcgttgctacaattttggtagcatggcaatgccatgcgtacgatatgttccctctccgaatgaacactggctatggtgcccgtactccggaagtgaaatgcgcaagttggaagcttgctgtggaagcacacaacatctttggctttgagaccattcctgaagagtgcgttgaagcaacaaaggaatacattcattgcgaacaatatagatcagacttccaaac

SEQ ID NO: 269688 - DNA, 354 bp, Glycine max
gacatcacaaactgcttatcctgctcttctgccaacttcaacaacacagacactacctcctctcctctcctcgctcttccaatgccgtcttctcagatctagttactttctattctgcgagctttcactactgcttcattcggaaaacgacagcgtttttggtagggttgttgtattccattggacatgcggccgagagtaaattactccttccccgaggaggtgctggagcacgtgttctccttcatcgagtgcgacaaggaccgaggctcgatctccctcgtctgcaagtcctggtacgagatcgagcgctggtgtcgccggagagtcttcgtcggaaactgctacgccgtc

SEQ ID NO: 269689 - DNA, 380 bp, Glycine max
  unsure (1)..(380): unsure at all n locations
tccctgatggtcgtgaaattgaccgaatagataagccacagtgtgagggctacaaattcgacccaaatggagaatacgtgcgacgctggcttccagaactttcaagattacccactgagtggatacatcatccttggaatgcaccagagtcagtgctacaagctgctggaattgagctaggatcgaactatcctcttccaattgtgggaatagatgcagcaaaaaacagattactagaagcactatcaaaaatgtggcaacaagaggcagcttcaagagctgcaatggaaaatggaacggangaaggacttggagactcttctgaatcagttcctgctgcttttcctcaagacacgcgaatggaggaaactcatgaacct

SEQ ID NO: 269690 - DNA, 421 bp, Glycine max
  unsure (1)..(421): unsure at all n locations
gggcgcgggtgaggtagaacccttccacggtggtgactgcgcgatgggtgcctacaagtatgtttcagagctatggcgcaagaagcagtctgatgtcatgcgcttcttgcagcgggtgaggtgctgggagtataggcagcaaccttccattgttcgcttgacaaggtcgacccgccctgacaaggctcgtcgcttgggcttcaaggctaagcagggctatgtgatataccgtgttcgtgttaggaggggtggccgaaagaggccagttcccaaaggtattgtttatgggaagcccacaaaccagggtgttacccaactgaaatttcagcgtagcaagaggtcagttgctgaggagcgagctggacggaagctgggtggacttanggtcctcaattcttactgggtgaatgaggactctact

SEQ ID NO: 269691 - DNA, 377 bp, Glycine max
cctttgttgtcttgggttgggtttgttttttctctcacctgaaaatgtcttgctgcggtggtaactgtggttgcggaagctcctgcaagtgcggcaaccgctgcggaggctgcaagatgtacccagacttgagctacactgagtcaaccaccaccgagaccttggtcatgggagtggcacctgttaaggctcaatttgagggtgctgaaatgggtgtgcccgctgagaacgatggctgcaaatgtggaccaaactgcttctgcaacccctgcacttgcaagtgaagtgttgggagagcaagcttcaagcagagatagcccttaattaggaataatgataaactattaatgtgtagctaaaaacttatgtattatgtc

SEQ ID NO: 269692 - DNA, 345 bp, Glycine max
agagaagggtctgagtgatttggcaacccattatctcagcaagcatggagttagtgcaatcaggaggctgaggaaaactgataataatagaattgcaaaggcttgtggtgctgttattgtgaacagaccagatgaattgcaggagtctgatgttggtactggtgctgggttatttgaggttaagaaaattggagatgagtactttgcatatattgttgattgcaaagaacccaaggcttgtactgttctactaaggggtgctagtaaggatctattaaatgaagttgaaagaaacctacaggatgccatgtctgttgcaaggaacattataaaaaatcctaaact

SEQ ID NO: 269693 - DNA, 358 bp, Glycine max
gatacggaggctgctgctatcgaatactcggataaggagggtaagggcggtgaagtgcggtacttcaatccccttttctctcttctccttttatttcatcactctcttcgttcctttcttcttctccaaagttttcaattttcacacttttcgaaacatcttttcaatggcgtcccaaattacccgtgagtggtctggaatcaatacattcgcacctgctacccagactaagttgcttgaactcttgggaaaacttaaacaagagaatgtgaactccttaactatacttgtgatgggaaaaggtggtgttggaaaatcttcaactgtgaactccatcattggggatagagtggtttcg

SEQ ID NO: 269694 - DNA, 348 bp, Glycine max
ggttctagtgtgtgattgtttgttgttgtaacgcgttcttcttcttttgttgttctgtgtttgtgtttgttttttctctcacctgaaaatgtcttgctgcggtggtaactgtggttgcggaagctcctgcaagtgcggcaactgctgcggaggctgcaagatgtacccagacttgagctacactgagtcaaccaccaccgagaccttggtcatgggagtggcacctgttaaggctcaatttgagggtgctgaaatgggtgtgcccgctgagaacgatggctgcaaatgtggaccaaactgctcctgcaacccctgcacttgcaagtgaggtgttgggagagcaagctt

SEQ ID NO: 269695 - DNA, 407 bp, Glycine max
ttgggggtttgggggcggactttcactgctgcaagcacaagattgagccaaagtgggaggaccctatctgcgccaatgggggaaagtggactatgaccttcccaaggggaaaatctgataccagttggttgtatacgttgttggcgatgattggagaacagtttgatcacggagatgaaatatgtggagctgttgtgaatgtcagaagtaggcaggataaaattgctatttggactaagaacgcttcaaatgaagctgctcaggtgagcattggaaagcagtggaaggagtttcttgattacaatgacacaattggctttatatttcatgaggatgcaaagaagctggacagaggtgctaaaaataaatacgttgtatgaagtgtatagcgtttttaactgggtagc

SEQ ID NO: 269696 - DNA, 332 bp, Glycine max
ggcagttcaattccaatatattccattctctcggtgtaggtccctacctctcccttcaagatgcagatcttcgtcaagaccctcaccggcaagaccatcacccttgaggtggaaagctctgacaccatcgacaacgtcaaggccaagatccaggacaaggaaggaatccccccggaccagcaacgtctcattttcgccggaaagcaacttgaggacggccgtacccttgctgactacaacattcagaaggagagtactcttcacctcgtcctccgtctccgtggtggcatgcagatcttcgttaagacactcaccggcaagaccataaccct

SEQ ID NO: 269697 - DNA, 428 bp, Glycine max
gaccaagccgtccgccaacccttcctaccggttgcaaaaaaactcattagggtggaacagcctaaccggctggatgggatcaaccccatgatcaaggccattatgaaggcgattaaaatggggatggaaccgattcctgtgcatagtgggttgggaggtgcttactatttcaaaaacagtaagggggaaagtgttgcaattgtgaagccaaccgatgaggagcctttggccccaaataacccgaaaggttttgttggcaaggcgcttgggcagcctgggctgaagcgatctgttcgggtcggggagactgggtttagagaggttgctgcttatcttcttgactatgatcattttgccaacgtgcctcctactgcattggtgaagatcacacactctgtgttcaatgtgaatgatggtgtcaatgggaa

SEQ ID NO: 269698 - DNA, 422 bp, Glycine max
ggtcctagtgtgtgattgtttgttgttgtaacgcgttcttcttcttttgttgttctgtgtttgtgtttgttttttctctcacctgaaaatgtcttgctgcggtggtaactgtggttgcggaagctcctgcaagtgcggcaacggctgcggaggctgcaagatgtacccagacttgagctacactgagtcaaccaccaccgagaccttggtcatgggagtggcacctgttaaggctcaatttgagggtgctgaaatgggtgtgcccgctgagaacgatggctgcaaatgtggaccaaactgctcctgcaacccctgcacttgcaagtgaggtgttgggagagcaagcttcaagcagagatagcccttaattaggaataatgataaactattaatgtgtagctaaaaacttatgtattatgtct

SEQ ID NO: 269699 - DNA, 272 bp, Glycine max
agggactcattcacatactataatactacgataggcgggactcttcccaattctgttgtgtgagtctgtgagtctttcttagctgatatggcggttgatcgctcccttacgaggtgctgtagcctcgtactgtggtcgtggatgttgctgaagatgatgatggcgcaaggtgcaaccgcgagggccaaccggaaggagtgggactcggtcataaagttaccggctgaaccggtcgatgctgactcggatcatgaagtgggaacacgatgggc

SEQ ID NO: 269700 - DNA, 319 bp, Glycine max
ggtgtgtgtttaaattcaatgagagactaagttgaagacttgaagccatgagatgaatcacttatctcttgacactgaagattctcttgcaagcttgctgctggagcttgcagccaacaacgatgtttcgggtttcaaaagattaatcgagtgtgaaccttcctccatagacgaagttgggttgtggtatggccgccacaaagagtcaaagaagatggtcaacgagcaaagaactcctttgatggttgctgccacctacggtagcattgatgtcatgacgttgattctttctctatcagaagctgatgtgaaccgatca

SEQ ID NO: 269701 - DNA, 376 bp, Glycine max
ggaaaagaaaagggtggtgaatgtgaagatagagggagcatgtggaatggttgtggtcactattatatatgttgtctcttacgctttgcatgtgactttctttctttctttatatcctttatatattaagtatatgctgcaatatatttaattaaagagagaagtaacatcaaggtgcagagagaggaattgaagcatgggaagagggaaggtggttctggagagaatacagaacaagatcaatcgccaagtaaccttctcaaagcgcagaaatggtttgctcaagaaagctttcgagctatctgttctatgcgatgctgaaatcgctctcgtcatcttcttcaacccgggcaagctttttcagtatagtagcact

SEQ ID NO: 269702 - DNA, 317 bp, Glycine max
gttattgtagagactgagaagagttacatcgagactgttgtcatggatgttccagcagctgagcatgatgggaagtgcaagtgtggcactaactgcacttgcacggactgcacctgtggccattaaggaatatgtatgaaaatgtaattgccatgtgtttggcaatacaaatatccaaataatgtaatcttcgtatgaataaatgtgtgtgctgttatcctacttcaggtctgtgtagtcatgcagtctgaatcatttcaagttcctgtcttagttaatataacagccatggttgtggcattctatggtttattaga

SEQ ID NO: 269703 - DNA, 330 bp, Glycine max
  unsure (1)..(330): unsure at all n locations
aattcgagcgggcgttttttttnnnnnttttttttttnnttttgggcccagaaataattatatggctttgtagattatttaagtgatctcatgaattattttttaaaaatattatattgaacgtgagtatttttatgattgcttaaatttggtacttaaaattatttaaaaagtaaaatggaaattaaaattatgttgctcctattagtatttaagttgataacttgtaaagaaaataaaaaatatgatactaatttttatgataaaaaattaagattcattttcaaattaattagaaatagacaatttacacaaccaatattttcaaat

SEQ ID NO: 269704 - DNA, 396 bp, Glycine max
tgatttcaaggactggccattcattttgaggactattgaatttagttttaccccagatgttataggctccatggcagcacaattgcactcagatacaggatttatcactctacttcaagatgatgaacatgttagtggtcttgagatgatagatgattttggcacatttaaggcagttcctcccataccaggggccttcctttgcattgttggagatgttggacatgtttggagcaatggaaatttttggaatgctagacatcgtgtaatatgcaaggaaacgggtactggttattcatttggtgcatatatgttatcaccaagggatggtaatgttgaggcgcctaaaaaattggtggaagttgaccatgtacaacgctatcgaccatttaagta

SEQ ID NO: 269705 - DNA, 394 bp, Glycine max
cgttcccctcttagctggtggatcaccaacgctgagtgcccgtacaccttgagtagcttgacattggagtcaatcgccgcctggacggccagggcacatgcttcatactcagccatattgttggtgcaatcaaaccccagcctggctatgataggcatacattgattgtctggagagaccaatactgctccaatgccatggcctagaatgtttgacgctccatcaaaccatacggtccatttgtcccggtcctcatctagtttttcctcaaacaaggccatgatgtcgtcatccgggaattcgggatgcatgggctgatagtcgttgagaggctgctaagccaaataatctgctaagatgcacgagaaatgcaatatgtattgggtatatatat

SEQ ID NO: 269706 - DNA, 329 bp, Glycine max
ggatgcattggggcatgcttttaattgcctagatctcccaaacaaattgtagcataagtcccatggccaaagagactagtgttgtttatctatatcccagcaaatcacaagtttggggtgagaattttgatcataaaaaacttgtaataacaacactagctgctaatggaaagaaggaggagagtaatggagcacctaatgacacatatcctgcgtttcccgggtggtatgctgatgtttcctggccaggagaagcacacacatataaaatagaaaagattctattccacgggaaatcagaattccaagagcttcttgtatttgagtct

SEQ ID NO: 269707 - DNA, 369 bp, Glycine max
ggtgtcatcgtgactgagattgaccccatttgtgccctgcaggctctcatggaaggccttcaagttctgaccttggaggatgttgtttctgaggctgatatctttgtcaccaccacgggtaacaaggacatcatcatggttgaccacatgaagaaaatgaagaacaatgccattgtttgcaacattggtcactttgacaatgagatcgacatgctggggctggagaactaccccggcgtgaagcgcatcaccatcaagccccaaaccgacagatgggtcttccccgagaccaatgtcggcatcattgtcttggccgagggtcgtttgatgaacttgggatgcgccacaggacaccctagttttgtgatg

SEQ ID NO: 269708 - DNA, 381 bp, Glycine max
gaccataaccactttttgtctcttgaatttcttttggcttggtcctttttgttttttcattgacatgttgaaggggtcttctttatctagctggagaaacaataatggttgctgtctagttctgtgaaattcaaccccatcatggatcttgagtctgtgatccacaggaacacaattaaggaagaatcatggaagacagttttgactttggcctatcaaagcttgggggttgtgtatggagacttgagcacttccccactttacgtttacaaaagcgcttttgctgaggatattcagcattcagacaccaatgaagaaatctatggagtgttgtcttttgtgttctggacacttacactgatttcactgctcaagtatgtg

SEQ ID NO: 269709 - DNA, 414 bp, Glycine max
ggtgtgattgtttgttgttgtaactcgttcttgttcttgggttgttctgtgtttgtgtttgttttttctctcacctgaaaatgtcttgctgcggtggtaactgtggttgcggaagctcctgcaagtgcggcaacggctgcggaggctgcaagatgtacccagacttgagctacactgagtcaaccaccaccgagaccttggtcatgggagtggcacctgttaaggctcaatttgagggtgctgaaatgggtgtgcccgctgagaacgatggctgcaaatgtggaccaaactgctcctgcaacccctgcacttgcaagtgaggtgttgggagagcaagcttcaagcagagatagcccttaattaggaataatgataaactattaatgtgtagcttaaaacttatgtattatgtct

SEQ ID NO: 269710 - DNA, 357 bp, Glycine max
  unsure (1)..(357): unsure at all n locations
gatcctgcagaaattccagagggatatgaggagaagtggatggttaatatccacgccattgatacgcgcggcgtggtggataggatggggtgcactgagtgtaggtgtgacctttacaatgttacaaagaaagaacatggggagcctctaagttcagactataaaggaggttattattgttgttatgatcaaacccagtgcaggttgagggaaggctttgagggcccaaagaggagcctctacctaagatacacagtgaagtgggttgaatggaacaagttcattgtgcctgtaaagatttatatacttgatgtcactgatactttnnannnntcagatgattctagtggaatgatc

SEQ ID NO: 269711 - DNA, 417 bp, Glycine max
gtagtatagtctgaattatatcaggtgtgtttcagtaaacttaatagtatgacaacgcattcatttcctatgcattgattcgatttctgatactatcggagtgaaaaaagtagatctaaagaaaaacgcgggttggattatattagtaacaagtaaattctttgtacgtaaaaagttccaagattttgttggacagaataacaattgcaaagtttgagatcacccagaaagcattatcaattttaaaagcctactcgggtattgagcgtttatcaaagtttacttaataagaacttaatttttttttttttcaataaagaatagtttgtaacttcggaaaaagagaatctagtttattttcttacatagaatcctcatatatgtgtgaataacacatacattttttctatagataca

SEQ ID NO: 269712 - DNA, 325 bp, Glycine max
gaaagagagttggaaaacaaagtatagagtgagagaatgggtgagaaaagcaagattttgatcataggaggcaccggctacatcggcaaacatatagtggaagcaagcgcaaaggctggaaatcccacttttgctttggtgagggaatccacactctctgacccctccaaggcacaactcatccacaattttgaggctttgggcgttaatttggtccgcggggatctgtacgatcatgagaagttggtgaaagctatcaagcaagtagatgttgtcatatccacgctgggtcacctgcagcttgccgatcagctcaagatcatcg

SEQ ID NO: 269713 - DNA, 338 bp, Glycine max
gccccccggaaaactattattacctccactccggatgggactcaaagtggcctctgaaacatcaccgactcccactgcgtcggttggcttatatgtagattggggttcaatatacgagactccgataagttttggggctacacatctgctagaacgaatggctttcaagaccactagaaaccggagtcactttcgggttgttcgtgaggtaaaagcaattggtggcaatgtgcaggcctccgcttctagagagcagatgggttacacttttgatgccttgaaaacctatgttcctgaaatggtcgagctacttgttgattgtgtcaggaaccctgttt

SEQ ID NO: 269714 - DNA, 366 bp, Glycine max
ggagctggagcagcttctgcagtgcatgaagggccagaagaagagaacaaaggagggtagtggcttctctgactcttcacccttttctgagttcttcatgttcccccagtactcgacacgtgccacacagagcagcagcagcagcagcagcaaaggctaccctggcacgtgcgaggccaataacaacatggcacggaacccttcatcatgggccgtggcggacatagaagtgaccttggtggatggccatgccaacatgaagatactctgcaagaaacgaccagggatgcttttgaagatggttgttggtcttttaagtcttggtctcagcattctccaccttaatgttaccactgttgacgatat

SEQ ID NO: 269715 - DNA, 357 bp, Glycine max
gcacgcacttagcaatcaatcaaaacattcccaagaacagtaatatacacatcttcaattaagctccttctcctatagccatggctctttctaagcttataattgcttcccttcttgcgtcgcttctccttcttcatttcgttgatgctgatcaatcggcacatgcacaaacgcaggggtctcttcttcagcagatagattgtaacggagcatgtgctgcgaggtgccgtttatcatctcgtccacgcctctgccaaagagcttgtggaacttgttgtagacgctgtaactgcgtgccacctggcactgctggaaaccaagaagtgtgtccctgctatgcaagtttgactactcatg

SEQ ID NO: 269716 - DNA, 305 bp, Glycine max
gacacgcacctctttctgattgccttcgaatcacacactctcttcaatttctagggttttgctattgctttgcctccgttccccctttctcacaaaaacaacgccttttctcttctccttcgtatctattctttgcgtttggtttttggttgattgaaggcattcacagcgtaattcgttgctgcattttaatcgatttatctaaccaggactgaatgacctaatggagtctaaaggtgggaaaaagaagtctagtagtagtagtagtaaatcaattttttacgaagctcccctcggatacagca

SEQ ID NO: 269717 - DNA, 362 bp, Glycine max
gaaagtacagtgaggtttttgaaggcataaatgttgatagcaatgagcgttgtataatcaagattcttaagcctgtcaagaaaaagaagattaaaagagagataaaaatacttcagaacctttgtggtggcccaaatattgtcaagcttcttgatattgtcagagatcagcactctaaaactcctagcttaatatttgagtatgtcaacagtacagattttaaagttttgtatccaaccttgactgattatgacatacgctattacatatatgagcttcttaaggccatagattactgccattctcaaggcataatgcatagagatgtcaagcctcataatgttatgatagatcatgaatta

SEQ ID NO: 269718 - DNA, 428 bp, Glycine max
cgagccggatctggtgtatcataagggatttgctgtttctattgattcctccggattgggtcaaaaacatttcttgaatgagttattcaactccagggatgaatcgaaaaatcactctttattggttctacctcctcttttttatgaagagaatgaatctttttatcgaaggatcataaaaaaatgggtccagacctcttgcgggaataatttggaagatccaaaacctaaaatagttgtatttactagcaacaacataatggaggcagtcaatcaatatagattgatccgaaatctgattcaaatccaatatagcacccatggttacataagaaatgtattgaatcgattcaattgcaacttcgaatatggaattcaaaggtatcaaataggaaatgatactctgaatcatcgaactataatgaaat

SEQ ID NO: 269719 - DNA, 329 bp, Glycine max
ataccgtgcgaattacgaatgtctgatgtctatttgttgattgtgttctataatttgagtgggcacggtgtaactcagatgcattgatacaagaacattctgtattttgttgactatgatataaaatttttagtacatgtaatatcaattaaaattattctcaacaagatcactgtccagcctgaaggttacggatttgcgtaatttgtatctcatgctccagcatatataattttgcagacatacaatggaactcagatgcctgtaacataacaaactattagattgaattgggccttctttggaattggagaaatgcgccctgatac

SEQ ID NO: 269720 - DNA, 371 bp, Glycine max
  unsure (1)..(371): unsure at all n locations
gatagcagcatcatacaaagcattgaattcaaaagacttaagttcattccttgtgttttgctttcttcctcaaaaccaaacatgtcgaacacatgcggcaactgcgactgcgctgacaagactagctgcaccaagggaaacagctatggtgttattgtagagactgagaagagttacatcgagactgttgtcatggatgttccagcagctgagcatgatgggaagtgcaagtgtggcactaactgcacttgcacggactgcacctgtggccattaaggaatatgtatgaaaatgtaattgccatgtgtttggcaatacanatatccaaataatgtaatcttcgtatgaataaatgtgtgtgctggtatccc

SEQ ID NO: 269721 - DNA, 255 bp, Glycine max
tccatctttccaaattggcctaaccgtccagacaagttcatcatgctgttgagaacataagtgtctagtttcagaccagatttacacatttggttaagaatctcctcacatttattcacacttgccattttggaataagcagacagaagaaccatgtgggacttcattggtggtggtattcccactcttttcatatctttaaaaacagcttcagcatctgaatttcattcataaagttgtgaaaggaaaaaaaca

SEQ ID NO: 269722 - DNA, 401 bp, Glycine max
gaatcaaccaaacacaacacttcactctgaagcttcaagcatgactgcttggtacttcctcctatttgccttcatccttttcctctccataaacttcttgatccaaacaagaaggttcaaaaaccttcctccgggaccattttctttccctataatcggaaacctccaccaactcaagcaacccctccaccgcacgttccatgccttatcacaaaaatatggccctattttctccctctggttcggctcccgttttgtcgtcgtcgtttcgtcgccgctcgcggtgcaagaatgcttcaccaagaacgacatcgtcttggccaaccgccctcacttcctcaccggcaagtatatagggtacaacaacaccaccgtcgccgtttccccctacggcgaccact

SEQ ID NO: 269723 - DNA, 437 bp, Glycine max
ggttctcatttctctttctgtagccctgggtcaccggagagagagtgagtgcaaagccatcgtcttcttctcagacaagtagtttggtaaaagatggctgatgctgaggatattcaaccccttgtctgtgacaatggaactggaatggtgaaggcaggatttgctggtgatgatgctcctagggctgtgtttcccagtattgttggccgacctcgtcatactggtgttatggttgggatgggtcaaaaggatgcctatgtaggtgatgaagcccagtcaaaaagaggtattcttactttgaagtacccaattgagcatggtatagttagtaactgggatgacatggaaaagatctggcatcacacattttacaatgaattgcgtgttgctcctgaggagcacccagtgcttctgactgaggctccactcaacccaaa

SEQ ID NO: 269724 - DNA, 252 bp, Glycine max
gaggagtgtcgcggatgagagatctctggtgaggtctgtggaaatggcatcatcggaggtgacgatgaagggaaattgcttgaaccacaacgacggcggagccacggagcctcattcgccgtccacggccaaagacgcagaagctgcacttttcagggaactatggcacgcatgtgccggtcctctagtcacggtaccgcgggaaaaagagcgcgtgttttatttccctcaaggacatattgagcaagtgga

SEQ ID NO: 269725 - DNA, 316 bp, Glycine max
gacaaccactctcttttattcttagctttgctttccagttcatacttcatcctattattactttccctctttgcattccaaatggccactgttgaggttgcacagcaaacaccaacaactgtgacagagaatgaaacaacgactgaggtaaccaagattgaggaaactaccccagaacagccagccaccgaggttactgccccagaaacagtcaacgaagaagcaaaagaggaagcagcagttgagactaatgaggcaacagaagttacagaggaagggaaggctgagaaaacagaagaagaagaagaagtgaaag

SEQ ID NO: 269726 - DNA, 419 bp, Glycine max
gacactccctgaggagggaagagaatctctctccgttttataaacccataaatttagggcgcgctttttcccggcctcccctcgccaccgcatctccatccatctccgccacgtcgcctcctctctctctcgcttttcgtagttatacttcttctctcgttcctagaaatgagcttctcaacatgcgcagagctgtcgcgttgtttcgccgcagcatcggcgaaacctaattccggtcagtcaaacggcacttccacaacaagcctcagttttctcactccaatcggtcgttacggcgccgtttcatcagtatcgaggtcgaataagaccaacagaatagtcgcggaagctactcaaggtcttacttacagggacgccggcgtggacatcgacgccggctccgaactcgtgcgcaggat

SEQ ID NO: 269727 - DNA, 240 bp, Glycine max
acgaattcgagcggccgcttttttttttttttttttttttttttttttgaggacaaccgttgctgtaatggaaatcgtttacataagatgatgatttattctagtttgcactttgccatgccagctatcattgttgaaacatgcgcgagaacacttaacagcaatttattcaaacagaaatttctttattaacacttaacagcaaacacgagaacattcaatcaccccaaattccttact

SEQ ID NO: 269728 - DNA, 363 bp, Glycine max
gatcctcagcaagaacaagaagaagaagaagaaacaatgtcttgctccaatctgacaatgttggtgtcctcaaaaccttccctttccgacccctcgaacctctccttccgctctgtcctgaacccttttcagctccctacacaaaacccagcttcatgcaccccttcacgctcctcaagcacccaaattcagtgtggtctgagagaactgagaacccgcattgagtctgtgaagaacacgcagaaaatcacggaggcaatgaagcttgttgctgcagccaaagtgagaagagctcaagaagctgttgtgaacggaagacccttctcagagaccctggttgaagcctctacaacatcaacgagc

SEQ ID NO: 269729 - DNA, 401 bp, Glycine max
gttggagggcttgatcgtttaagaaaggagtttgaacgggacattgtaagacgtataaaatatcctgaagattatgaggagcttggggtggatctcgagacgggatttttgctttatggacctcctgggtgtggtaaaacactgattgccaaagctgttgccaatgaggcaggggctacttttattcatattaagggacctgaacttttaaataaatatgttggagaaagtgagcttgcagttcgtacaatgtttagccgtgcaaggacatgtgcgccttgcatactcttttttgatgagattgatgctctgacaaccaaacgtggtaaagaaagtggttgggttgttgaacgactattgaaccagttgctcgttgagttagatggcgcttgacaacgaaa

SEQ ID NO: 269730 - DNA, 428 bp, Glycine max
gttggagggcttgatcgtttaagaaaggagtttgaacgttacattgtaagacgtataaaatatcctgaagattatgaggagcttggggtggatctcgagacgggatttttgctttatggacctcctgggtgtggtaaaacactgattgccaaagctgttgccaatgaggcaggggctacttttattcatattaagggacctgaacttttaaataaatatgttggagaaagtgagcttgcagttcgtacaatgtttagccgtgcaaggacatgtgcgccttgcatacttttttttgatgagattgatgctttgacaaccaaacgtggtaaagaaggtggttgggttgttgaacgactattgaaccagttgcttgttgagttagatggcgctgaacaacgaaaaggtgtttttgtgattggtgctacaaa

SEQ ID NO: 269731 - DNA, 463 bp, Glycine max
gaagacgacagaagggatcatttaaaaattatatttttactatctctttttctatgtaattgtttttattaatattttaaaaaataattaagtaaaaatatgtgagaaaaaataattaatatgtctaaaaattaaaaaataatcttataaaaaacaaataaatttatgaaaaaaatttataattaagattaaaggtattacactatcatgtattaagtcatgaatttaatttaatatttatagcttatttacttgcatggtttacatattagatcttggctttggatgtgaatcgcgaatactatgagttaggattgccaataattcaaaaagctggagtggctcacaagattgatttcagagaaggacctgctcttccgtttcttgacgagatgcttaaagatgtgggtgtacagtttctcaccatctcaagttttatccatgattttttgttaacattggg

SEQ ID NO: 269732 - DNA, 298 bp, Glycine max
aggtgggtatgagaggaacaagaatttggattgggggagtgacaagtttttgcatgtaaagaacgtgaagttaccgtagacaacctatgtgtttgtgaacaggagcatgaacccaagggagtgtcaggatttttgcctcagggattgttcttgcactgcttatgccaacattcagatcacaaacgaaggaagtggatgcgtgacgtggagtggtgaactcatagatatgaggctgtatagaagcggatgcgtgacgtggaatggtgatttgtagatatgaggttgtattggtacgtct

SEQ ID NO: 269733 - DNA, 351 bp, Glycine max
gtctctgttcacaagtttcgttggcaggtttcggcgcaatcggcttctgcttcaaggaaggagagcttgttattctctatcaacaagtaaaatgtcaggtgaagagggtgtcattgcagttgagccagctgctgctgctgctgccatcccaggcgagccaatggatatcatgactgccttacaacttgtgctcagaaaatctctggcttatggtggtttgtcgcgtggccttcatgaaggtgcaaaagtgattgagaagcatgctgcacaactttgtgttcttgcagaagactgtgaccagcctgactatgttaaactggttaaggccctttgtgcagagcacaatgttag

SEQ ID NO: 269734 - DNA, 420 bp, Glycine max
  unsure (1)..(420): unsure at all n locations
tatcacaaagttattagttagatggattaaacttggatgaatgcaagtcgcatgagccctgcatatgaggaaggcattgaagagttcttgtcatttgcctctgaaagaagtcgactcgataaggatggaaaatatttttgtccttgtataaactgtttgaatgcgagacggcaagtactagacgacatatgggaacatcttctgtgtgaagggattaagaagaattatacaacatggataaggcatggtgaattgatagacatgaatatggggtctaaaactaaaccgattgatgtagaaatgggagatcgattagaggatatgatttgtgatcttggacaagattcatttgagcaagaacacgcncttatgtgtgatacattggaaagtgattcgaaagagcctttgtatcaggaatgc

SEQ ID NO: 269735 - DNA, 380 bp, Glycine max
ctgggggctttacagagagtgatttcagtgagtgatcggcgttcactggatctcatcatcatgagccctgcctattgaggaagattccgatcagaaacatcatctgcctatggcctgaataggctacttaccgctacacattgaatgcggccttggctgaactgatctcaagctacatcttcatgttctacacctcatactccaacatcttctacgtcaagctaaccgacagcagcactcacatccattacggcctgatgtactgatatatatgccattcgtttgtactactaaaccccgtgttcgacaactccaacatctactgcaggctcttaaaccccatcgtcaacttcagtgccttcatcaacaacaccatcatc

SEQ ID NO: 269736 - DNA, 305 bp, Glycine max
atattatactacctatgttcctacagtgattttgacgaacactatgaataatcctgcttcgtatacgtgaaattactcgagatgaagcatgtgattacacatggacgtatagaatcagtgcttaattatcacactttaatgacagatctgactggtctgcctaagcacaatgcttaatcgcttgattaaagaactgcatctgctgaatctctggcaatgtgtaataatatactaatggggaactagaaatctgttgttattttcaaataattgccacctgcaaactattgatatttcatgttact

SEQ ID NO: 269737 - DNA, 394 bp, Glycine max
gtcggatgattttgatgttttgatggtaaccaaggacatggttaacaaaatcactaactcaaaagatgacagtggagacgacctagaaatggttcatggaagattgaaagaaaagttgtcggggaaaaaatatcttctcgttctggatgatgtttggaacgaacatcgagatcaatggaaggctttacaaactcctcttaaatatggggctaagggaagtaaaattcttgtcacgactcgcagtaacaaggttgcttcaatcatgcattcaaacgaagtacgtggactaaagcaattacgagaagatcacagctggcaagttttctctcagcatgcattccaagatgattattctgagttgaatgctgaacttgaagatattgggaataagata

SEQ ID NO: 269738 - DNA, 396 bp, Glycine max
gaaggccactccttttagcaagttaacaacactggggtcggcgttccattatctagggctcaattctcttcaccctttgcctctgaaagaaatgggtagtcttgaagcggaaagaacaacagtaggattggcagcaagagacccttcagggattctctccccatacacctacaatctaagaaacacaggccctgatgatgtttacattaaagttcactactgtggaatttgccattctgatctccaccagattaaaaatgatcttggcatgtccaactatcccatggtcccaggacatgaagtggttggtgaggtactggaagtgggatcaaacgttagcaagttcagagtgggagaattggtgggagttggactcctcgtaagttgctgaaaaac

SEQ ID NO: 269739 - DNA, 459 bp, Glycine max
acgtccacgcgttcgaccacgcgttctgagacgacagaaggggaggcaatagaaaggaaaaccgagtcatgttctcactttgaagagaaaataacaacgtaaagatgtctgcatcaggaggcagatgaagccaagaggaagagaagaagccttctgatcaaggagcacatattaatctcaaagtcaagggccatgatggtaatgaggttttctttaggattaaaagaagcactcaactcaagaaacttatgaatgcgtactgtgatcgtcaatctgtagattttaactcaattgctttcttgtttgatagaaggagactccgagctgaacagacccctgatgagctagagatggaggatggtgatgagatagatgcaatgctgcaccaaaccggatgtggacacaagtttctttaaatgtatgatgatcatcttcatcaaaatgcttgataaaacgcat

SEQ ID NO: 269740 - DNA, 422 bp, Glycine max
atcaaaacctgtggtactacaaagctactgcttgcaatcccacccatattgaaatttgctgaaatgctttccctcaatgttagatctgtgaattacaccaggggaagtttcatctttcccggtgctcagccctatccccatcgcaacttttctgaggaagttgctattcttgatggctactttggcaagcttagtgcaggaagcaatgcttatattttgggtggccaagacaaatcacagaactggcatgtctactctgtgtctgcagattctgtaactccatgcgacaatgtttacactctagagatgtgcatgactggcctggatagagagaaagcacaggttttctacaaagaacaatctgcttcagctgccattatgactgttaattctggcattagaaaaattctttcagattctga

SEQ ID NO: 269741 - DNA, 204 bp, Glycine max
tatgggggaaccttagcattctattcattcagggttcagggagtactttgggtaagcagataccaatatacttcgacatggcccgtgcaaagcaaactgctcgtcagtcaactgcaggaaaatctgccaacccgcagcttgcaaccaaagctgcacgtaagtctacaccaacaactgataaagtgaagaagcctcatctctatc

SEQ ID NO: 269742 - DNA, 396 bp, Glycine max
gcgagaatacgacaaaacgggaataatacaacagaaaataatatactacagaggtttgtggtataattaaaaaattagttgatattttcagagataggagacaaaatttacatggatggtaagtactgcttgggctgctttaatggtagttgtgccattttctatttccatcgtaacatgggtaagaaatgtactatacggatactcaaaattgacttaacggatcaaagtacccattctgatatctacttgggtcattcaatatcttaactctaactattgtattaaaatatttcatttatactaattaattgagtccaaatatacactattataatatacatctgcattttaggttgctattatattctagtagtgtaataataacctatgtat

SEQ ID NO: 269743 - DNA, 415 bp, Glycine max
ggttggcatttggcattgcgtacttttttaatccaagttccacagacaccaacaacgctttagctctctcgttctatccgtcaccgctaccggcgatatacatctgaacccgttccagacactagatctcatatatccaaatggataacctaatctattaggtcaacaaagtgcagagacgcttgtaccgtcttatgcgaccacggtgaaaacagtgcactccccacactatgggactctgttaccgacattgacgttatcagaggtcaatactcatgaaagtacctcgtcttggatagcactgtccttaaatatttcttacgttgtggatcaagccttgttgcgctacaaccttttgtgttgcaaatgaacatgatttactggggaagcaacgtgtacgcagagttactgcatc

SEQ ID NO: 269744 - DNA, 440 bp, Glycine max
gatgagataatggctcgcagtatatcgtacataacggggtcgcagcttctctctctcagacgccatccaagcatcgccgtcgtcgatgtaagggacgatgagaggagctacgacggacacatatcggggtctcttcattacgcaagcgacactttctccgataacatctcaaatcccattcaggcagttaaaggcaaagacactctcgtcttccactgcgctctaagtcaggttcgtggcccaacttgtgctaggaggcttgtcaattatcttgaggagaacaaggaagatactgggataaagaacattatggtcttggaacgtggcttcaatgggtgggaagcttctggtagacccgtttgccgctgcaccaatattccttgcaaaggagagttgtctccttaatcaaagacgtatttgtggttggatggaattatgga

SEQ ID NO: 269745 - DNA, 462 bp, Glycine max
tgcgagaagactacagagggggttctagtgtgtgattgtttgttgttgtaactcgttcttcttcttttgttgttctgtgtttgtgtttgttttttctctcacctgaaaatgtcttgctgcggtggtaactgtggttgcggaagctcctgcaagtgcggcaacggctgcggaggctgcaagatgtacccagacttgagctacactgagtcaaccaccaccgagaccttggtcatgggagtggcacctgttaaggctcaatttgagggtgctgaaatgggtgtgcccgctgagaacgatggctgcaaatgtggaccaaactgctcctgcaacccctgcacttgcaagtgaagtgttgggagagcaagcttcaagcagagatagcccttaattaggaataatgataaactattaatgtgtagctaaaaacttatgtattatgtctgtgatggttttcgtgcactc

SEQ ID NO: 269746 - DNA, 456 bp, Glycine max
cgaccgactcgaccggcgagaagactacagaaggggatgagataatggctcgcagtatatcgtacataacggggtgggagcttggctctctcaggcgccatccaagcatcgccgtcgtcgatgtaagggacgatgagaggagctacgacggacacatatcggggtctcttcattacgcaagcgacactttcttcgataacatctcaaatcccattcaggcagttaaaggcaaagacactctcgtcttccactgcgctctaagtcaggttcgtggcccaacttgtgctaggaggcttgtcaattatcttgaggagaacaaggaagatactgggataaagaacattatggtcttggaacgtggcttcaatgggtgggaagcttctggtagacccgtttgccggttgaccaatattccttgcaaaggagaagtggcttcttaatcaaagacgtatttgt

SEQ ID NO: 269747 - DNA, 394 bp, Glycine max
gatggacaatctttgtatgtgcggccatcaacactgctttgatcatacttcactttgtaacgtgacgctccacatgtagggcagctgcgcatttcagcaaattgatgtctatacaaaatacaatcattagggcaagcatgtattttgtggtattccatacccacagggcataatatcttttttgcctcataatggttcttgggtaatgtgttatctacaggaagcatattcttcaataacaaaagtaattcgttgaagcttttgtcactccacccaaatcttgctttcaaattcaccaaacctaagaccgctgataaccgtgtgtactttgtgcatcccatatacaatggagtcgtagaatcaatatctaagctttcatagtaaggtgaatgtg

SEQ ID NO: 269748 - DNA, 398 bp, Glycine max
tcaattgcttctacaaggtatggagacttttttggtggaaaaactgccagcttgtgtgtgcgtcgtgctgtttattatgatcctgagacaggaaaggaagatccttccaagaatggcatatgtagcaattttttgtgtaattcaaagcctggagacaaaattcagatcacaggcccttcagggaagataatgcttttacccgaggatgacccaaatgctacccatataatgattgccaccggtacaggtgttgctccattcagaggctatctacgccgaatgttcctggaatcagtccctacatacaagtttggtggactagcatggcttttccttggagttgccaacactgacagtcttctctatgatgaagaattcagcaaatacctcaatgacta

SEQ ID NO: 269749 - DNA, 421 bp, Glycine max
ggattgggaacgttatatacatgaactgctgaggatccagataccccagaactacaagatcaaagaaagcatcttcagcacctgtcagattctgtttcaactgattgtgatggtatgaatgaaaatacttctcaccgaattgctagattttcctgctctggttcaaatttggaaggtaaatttgatttagcagatttcaagtctcttgatcgacttctcactgaaaaggttggctggcaggatcaagccatatgtgctatcagtcaaactttgtccctttgtaaatctggtgcaggaaagcgtagaggctcaaatggtagagcagacatatggttggctttccttggacccgatagacttggaaaaaggaaaattgcttcagttcttgcagagactatatttggaaaccctgaaagcctaa

SEQ ID NO: 269750 - DNA, 255 bp, Glycine max
gatcaacaactacaacttgagacacatgactcacttaatctgcttaattctgatccttgcagctctcattctatcccctcaaattcttgcaaactatgagaatcccccactgtacaagcctaccactgataaaccaccactttataagcccccagttgacaatcctactgtctacaaaccttcagctgaaaaccccccaatctataatcctccaatctagaacccaccagcttacaatcccccagttgataaacc

SEQ ID NO: 269751 - DNA, 447 bp, Glycine max
agaatacgacagaagggcaagaagtgcattgagatgttctttgaaattgctgaaaagaaggaagactataacaggttttatgaagccttctctaagaacctgaaacttggtattcatgaggattctcagaacaagacaaagctagctgaattgctcaggtatcactccactaagagtggtgatgagatgaccagcctcaaggactatgttaccaggatgaaggaaggacagaatgacatctactacattactggtgaaagcaagaaagctgtcgagaattcccctttccttgaaaagcttaagaagaagggatacgaggttctctacatggttgatgctattgatgagtatgctgttggccagcttaaggaatttgacggaaagaagttggtctctgctaccaatgaaggcctaaaacttgatgagagcgaagacgagtagaaaaag

SEQ ID NO: 269752 - DNA, 362 bp, Glycine max
gactcgtggcagttgtgtgacagagaaattaagctagagcttcatagtttcttcttcttttctcaccttccttctctcccttcagacaaagggacaaaaaatcagtgtgtgagagagagagagagaaattccaaaaccatgtcccacagtcatctaagtttcgcctttgggattctaggtaacattgcctccttcgtgtgctttctggcaccactaccaacattttatagagtttgtaagaagaaatcaaccgaagggttccaatcaattccatatgtggctgcactcttcagtgcaatgctttggatcttttatgcctatgtgaagaccggagaaacgcttcttatcaccatcaatgcatt

SEQ ID NO: 269753 - DNA, 416 bp, Glycine max
tgggtttactgaaaaaagatatacagccttggcaatgacgccgttctgcggaatagatgactcatgctcctttaggttccttaaattccgtgggtggcgtagctacagagattaatgcagtcaattatgtttctcctagaagttggttagctacttctcattttgttctaggattcttcctatttgtaggccatttatggcacgcggtaagagctcgcgcagctgccgcacgatttgaaaaaggaattgatcgagattttgaaccagttcttttcatgactcctcttaattgagacatgagatcctatgaagtagaaatcactcttatattactataaatattactatcaatattgggttgaattgagcggatcgatttaaataagaacttctgttacttttttcttagagtctat

SEQ ID NO: 269754 - DNA, 434 bp, Glycine max
gatgtctttgctgacttcttgttaaggttgtcggtgatgcaggtgttgttggttttgtgctaagagaagaagctgttgggaaggtttctttcgtcttttgatgatgatgtcacacaacttaacggggcagcttgtgggtgcagagatacatggctttcacacgttggatgatttggatgttagtaatactatggaggaagcaaaaagcagatggcttcgtcccaatgagattcatgccatactctgtaatcacaaatatttcaagatcaatgccaagctagtaaatttgcccaaaagtggtactattgtactatttgaccgcaagatgcttaggaacttcagaaaagatgggcacaattggaaaaagaaaaccgatggaaaaactgttaaagaagcccatgaacacttaaaagttggcaatgaagaaaggatcc

SEQ ID NO: 269755 - DNA, 421 bp, Glycine max
ggttctagtgtgtgattgtttgttgttgtaactggttcttcttcttttgttgttctgtgtttgtgtttgttttttctctcacctgaaaatgtcttgctgcggtggtaactgtggttgcggaagctcctgcaagtgctgcaacggctgctgaggctgcaagatgtacccagacttgagctacactgagtcaaccaccaccgagaccttggtcatgggagtggcacctgttaaggctcaatttgagggtgctgaaatgggtgttcccgctgataactattgctgcaaatgtggaccaaactgctcctgcaacccctgcacttgcaagtgaggtgttgggagagcaagcttcaatcatagatagcccttaattaggaataatgataaactattaatgtgtagctaaaaacttatgtattatgtc

SEQ ID NO: 269756 - DNA, 296 bp, Glycine max
caaggatgaaaatgagactaaggatttttatgaaatggagggagcaaagagtcatctccatttttttgaaatggatcttcttgacatcgactccattgccgctgccataaagggttgttccggcgtaatccaccttgcatgtcctaacatcattggtcaagtcgaagatcccgagaaacagatattggaaccggcgataaaaggaacggttaatgtgttgaaggcggcgaatgaagcatgggtgtagcgcgtggtggcgacttcatcgatttcgtcgattatgccaagtcctaatt

SEQ ID NO: 269757 - DNA, 364 bp, Glycine max
attccaagaaccaccttattaaggcccacgaaatgagccacttcccaaccctgaaatcttgccaattttccatcaaggtttaatcctagacaatcctaagtcaacctttgtgcaatgaatgttcatatcatgaatggtaagttgagcttagcgcagaaactaaaaggtgcttttaagaatgacgtagttctaagaggttcaagttgttcacaactttgtgggcatcaacactctcatgtattacagcctaaccattgttcagtttgctggaattgccttcaactccacaggtcttgcactctctcttattacatctggtctaaatgcgcttggcactatcttgagtatggttttcattgataga

SEQ ID NO: 269758 - DNA, 430 bp, Glycine max
gtcccttaacgcaaactgtcatcttgtcattcaccgagaaagtcgtactgattcctcttcatctttcgttaaaacgagtacttttcgttcttgatctgttggttacgatgtcgtattcaaggagatctaggtattctccttctccttctccttctccatacaagcgatacggtaggtctgtgtccaggtctctctcaatatcaagatccagaagccgttcaaggagtttatcaagagatgcagaaaatccaggaaacaatttgtatgtgacaggattgtctcctaggattaccaagagagaactggagaaacattttgctgctgaaggaaaagtgatagatgtccatctggtagttgatccttggacaagggaatcccgtgggtttggctttgtgacaatggagactcttgaagaggctgaacgatgtgt

SEQ ID NO: 269759 - DNA, 330 bp, Glycine max
ttggaactgcctgaactagatgttgagtgtgggaactcggggttagcagggttctcagtcaattctcttggacaagatgccttgtctttcttcaaaaagatgctactactcggcttcttcccttctgagttttcttttgctaccgtaatgagctcttgtgcaaaactctcttccttatttcaaggtcaacagttttatgctcagatcgtaaaagatggtattctagattacatatatttgtggagttctcttatagaaatgtattgttaatgtgtgtatttaaacagtgcaagatgtttctttgacgtgatgcctgttataaatactgat

SEQ ID NO: 269760 - DNA, 348 bp, Glycine max
gaacgaggggcaccctgacaagctctgtgaccaggtcttcgatgctgtgctcgatgcatgcttggagcaggaccctgacagcaaggttgcctgtgaaacctgcaccaagaccaacatggtgatggttttcggagagatcacaaccaaggccaacgtggactatgagaagattgtgcgtgacacatgcaggaacattggttttgtctctgatgatgtcggtcttgatgctgacaactgcaaggtcctcgtcaacattgagcaacagaatgctgatataactcaaagtgtgcacggtcaccttacaaagaggcctgatgagattggtgctggtgaccaaggtcatatgtt

SEQ ID NO: 269761 - DNA, 337 bp, Glycine max
ggattacagacagtgagaaatgatgatgaagcaggtgttccttcaggttctcgtgggtctctatgtcacatttgagcatagtaagctactccaccacgtagaatccgatggtggatttgtaaaaacaagatgagtgcagcttatgctgaatgggagtccctactatgctaatggctttaatgcctattggcttatgtaccttgcctctgatccttaccagagaaacaaaatctcatcggtatatcaacacgcttcaaatcatggactcaacattgccagaacttgggccttcaatgatggtggatatcaacccctacaatactcttactgatcctac

SEQ ID NO: 269762 - DNA, 426 bp, Glycine max
ggaaaaacaaccccatcttgccttctgatccttgcgcatagagccttggctcgtttctgggccaagttcattgatgacaagtgcgtggctctagcagcgaaatctgtttttattgttgatgagaaagagaaagagaaggcaaaagaagaattatttgaggctctgaattatcttgagaatgagttgaagggaaagttttttggtggagatgagtttggctttgtggatattgctgctgtgatcatacctataattcaagagatagcagggttgcaattgttcccaagtgagaaattcccaaagctctccaaatggagccaagacttttacaaccattcacttgttaaccaagttatgcctcctaaggaccaactttttgcctatttcaaggctcgggctcaaagcctcgctgctaaaagaaagaat

SEQ ID NO: 269763 - DNA, 424 bp, Glycine max
aagacgacagaagggggcagttcaattccaatatattccattctctctgtgtatttccctagctctccctgcaagatgcagatcttcggcaagaccctcaccggcaagaccatcacccttgaggtggaaagctctgacaccatcgacaacgtcaaggccaagatccaggacaaggaaggaatccccccggaccagcaacgtctcattttcgccggaaagcaacttgaggacggccgtacccttgctgactacaacattcagaaggagagtactcttcacctcgtcctccgtctacgtggtggcatgcaaatcttcgttaagacactcaccggcaagaccataaccctagaggttgaaagctccgacaccatcgataacgtcaaggccaagatccaggacaaggagggtattcccccggaccagc

SEQ ID NO: 269764 - DNA, 391 bp, Glycine max
gaccacaaagtgtaacttgagtgattagatctgatgagtgcagaaagaaggaaggattgttggtgatcgatcatcgatcatcgatcatcgatggcgtctgctagccttggaagtggtggcgtgggcagttccaggtctgttaatggtggcttcaggggttcttccagttccgtcgattggcttggcagagagatgcttgagatgtctttgagagaccacaatgactattgagatagtgagcctgacatcattgatggtttgggtgctgagacttaatacgtgataatagctatcgtttgtggccgaaatggtcaatctaagcagaatgttagttatatttctgagcatgttttgggaacaggctcttttggggttgttttcaagcctaatg

SEQ ID NO: 269765 - DNA, 453 bp, Glycine max
cccacgcgtccggaagacgacagaagggtgagaaagctataatcgcaaatccaacatatgcagaagcatacaataacctaggagttctttacagggatgctggtgatatcgctctagcaattaatgcttatgagcaatgtcttaagattgatcctgattctcgaaatgctggccagaaccgtttacttgcgatgaattacatagatgaaggaaatgatgacaaactttttgaggctcacagggactggggtaggcgatttatgagactatattcacagttcacatcatgggacaactcaaaagatcctgaacggcctcttgtgataggatatgtctctcctgattattttacacattctgtgtcatatttcatagaagctccccttctctatcatgactataccaattataaagtggttgtttattcagcagttgtcaaggcagatgcaaaaa

SEQ ID NO: 269766 - DNA, 331 bp, Glycine max
gaagtcgaactaccaaaataaagagttagcaagtactaatggaaactccggaatttgcattcttggctttgcttcttctccttactagtgctactataagttcacttaacttaattagggcttcttcaaaaacacattccccaatgtggagcaaatggttcgctctgctgttgcacaaaagttccaacagacctttgtgactgctcctgccactcttaaactcttcttccatgattgctttgtgaggggttgggatgcttcgatttttcttgcaaattgtaagccagagaaagatcattctgatcaaaattctctagctggtgatgggttt

SEQ ID NO: 269767 - DNA, 355 bp, Glycine max
gaaattagaggattctaaagtgtttgttgttggatctggtgctttgggatgcgaatttttaaaaaatcttgctctcatgggagtttcttgtggaagtcaagggaagctcactattactgatgatgatgtgatagagaagagtaacttaagcagacagttccttttccgcgattggaatattggacaggccaagtccacagttgctgcttcagctgctgcagctataaatcctagttttaatattgaagctctacaaaatcgggttggttctgaaactgagaatgtgtgtaatgataccttctgggaaaacttgagtgtcgttgtaaatgcactggacaacgctaatgcaagacta

SEQ ID NO: 269768 - DNA, 446 bp, Glycine max
cccacgcgtccgaattcgagcggccgctttttttttttttttttttttttttttttttcagggaattctttttcttcacagcatttatttattatttttttttctgttcttctctttttattttattccgatctatcttttttttttcctgtactttgtttgttttacattctcttttttttctatttttttcttggcccttttttcccttgatcatctccttctgaaaaccgaagccaacttcaaacaccaccacaacaatgtcaatattgacatttttagttttatggcttttatctttcttgttagggttgttatgatatacatatgtgatttttttattacatcttttgttttggataagatatgcatgttattggaagtaaatattgatttatccatgttattacaggttcattagcatcatcaattacaaaattgcattt

SEQ ID NO: 269769 - DNA, 432 bp, Glycine max
ggtggcagagagcgaacccaaaactagagctaccgtcccttcaaaccttccactcttctctccttttccaatcaagggaataatatttcttagagatattccgaaaccatggctcacgccaatcctatgatttttgttgttggaattctaggtaaccttgtctccttctgttgctttctagcaccagtaccaacattctatcgagtttgtaagaagaaaaccacggaaggtttccaatcacttccttacgtggctgcactcttcacttcaatgctttggatattttatgcttacataaagacgggcgaaatacttctcatcaccattaacgcattcggttgtttcatagagacagtttaccttgtcatctatatcacttattgccccaagaaagctaggttctttaccttcaagatgattttcttgttcaac

SEQ ID NO: 269770 - DNA, 421 bp, Glycine max
  unsure (1)..(421): unsure at all n locations
gattccacgagatatggcttcggctctgcttcccctggcaaccttcttcttagttctctccgcttcttatctccagattgctggggcgaaagcacaaccgttgactagtctcaagcttaactctccgatccttcaggagtctattgctaaagagatcaatgaaaatcctgaggcaggatgggaggctgctataaatcctcatttctccaattatacagttgaacaatttaagcgccttcttggagtcaaaccaacgcctaagaaggaactgagaagtacacctgctatatctcacccaaagtcattgaaattgccaaagaattttgatgcaaggacagcttggtctcagtgtagcactattggaagaattctatatcanggtcactgtggttcttgttgggcatttggtgctgatgaatca

SEQ ID NO: 269771 - DNA, 361 bp, Glycine max
tcttcttaaatctctccgcttcttatctacagattgctggggccaaagcacaacctgtgactattctcaagcttaactctccgatccttcaagagtctattgctaaagagatcaatgaaaatccttacgcaggatgggacgctgctataaatcctcatttctccaattttacactcgaacaatttaagcgccttctttgaatcaaaccaacacctaataaggaactgagaagtacacctgctatatctcaccccaaagtcatttaaattgcccaagaatttttattcaaggacacctctgtctcaatgtaacactattgtaagaattctatatcacggtcactgtggttcttgttggcatt

SEQ ID NO: 269772 - DNA, 426 bp, Glycine max
taagatggttctgctagagaagctctgggatgatgttgtggctggccctcaacctgagcgtggccttggcaagctcagaaaactcaccaccctcaaaactattgatgaaggagaaagtagcaagctgcagaagacgttgtcgatgccgtcggcaccaacaaccccgatgactccgacgactccaacgacaccgggatcggcccgtaaagctgacaacgtttggaggagcgtcttccatcctgggagcaactccgccacaaagaccatcggtgctcagatgtttgacaaaccacttcccaacactcccactgtctatgactggctgtacagtggggagaccagaagcaggcaccgctgaagctgaagtctttagctaagatgaccgtgggttgcatgtaaatattgtcgttgttcgttaagcatctg

SEQ ID NO: 269773 - DNA, 443 bp, Glycine max
ggagctgaaacaaaacctcatccatggcttctcttctccggttcaacggcgtctccctctttcccttaccttcccaacccacacgtgaccccatcctccccaaaccgtcacgcctcgtaacggtgcgcgcggaggtgaaagagacctccgcacccgccgccgccacatcctccgacgaaaagatccgcgaaatcctccgcaaccgtgactacgacaagaaattcgggttcagcgtggagatcgagtccttgacgatcccaaaagggctctcaaaagaaaccattggtctgatctcgtccctgaaggaggagccccactggatgctcgaattccgcctgaaggccttggataaattcctctccatgaaggaacccacgtggtctgacaacacttaccctcccatcgacctccagaatatctgctactactccgcccccaagaat

SEQ ID NO: 269774 - DNA, 318 bp, Glycine max
cccacacatcgggtgtaacaatacgacatatcggggctccgcttgagcatacttaacaacagggcaaggggtgttactgtggggttgaagctaccatctatctttctctttcttaatgccttcttgccagaagttaaaatggcccaagaaactttcctattcacatctgaatcaatgaacgaggggcaccctgacaagctttttgaccagatctcccatgctgtgctcaatgcatgcttggaacatgaccctgacagcaaggttgcctgttaaacctgcaccaagaccaacattgtgattgttttcctagagatcaca

SEQ ID NO: 269775 - DNA, 432 bp, Glycine max
attgaatcttcagaccttaacttttcaagatacggggacaccttttttgagggtgctttcactgggggtcgtacacaacctggaactaccaagcctgatgagggggaccgccacccatactctataatagagtgtgagcctaagcgtgaagtcattttaccatctgtaatctacatacaaaagattttgcggcgaaggccatttctcatcaagaaccttgaaaatgttatgcggaaattccttcagtccttggaacttttcgaggaaaatgagaggaaaaagttggcaatcttcacagcacttgctttctctcagaagctgtctggtctcccaccagaaactgtgttccaaccacttcttaaagataaccttgtggccaaaaggctagttctgtcatttatgactgacttctttaaggagtatctgattgac

SEQ ID NO: 269776 - DNA, 397 bp, Glycine max
  unsure (1)..(397): unsure at all n locations
gagaatagtgagagtgagagatggatcagtttttgtggagggtgttgcctttgcttacaatccttgtttcctttggagtgttcttctacttgcaggattcttacacagcacagttatttcctctcataaagttaccgcgggataagtgcagccttcttccccatcgccacttctggatatccagcaaacgtattgtgaccccacaagggatcatttctggttcagtggagataaatgatgggaaaataatatctgtcgttgagggacatgctattcangggaagcctaagcaagaagaagtaattgattatggagatgctgttatcatgcctggcttgattgatgtgcacgtacatcttaatgagccttgaaaaactgagtgggaaagatttgatac

SEQ ID NO: 269777 - DNA, 430 bp, Glycine max
attgtctctcctggagctgatatgtcaatatatggcccctactctgaaaagcagaacaggcttacagccctgcatggttcaattgaaaagctgttatttgatcctgagcagactgatgaatacattggttcattgaaagacaagtcaaagcccataattttctccatggcaaggctagacagagtgaaaaacataactggattggtagaatgctttggtaagaacagcaaattgagggaactggtcaaccttgttgtagtagctggttatattgatgtaaagaagtcgagtgacagagaagaaattgcagaaattgagaagatgcacgagctcatgaaaaagtataatttaaatggtgattttcgttggattgctgcccaaacaaatagggcacgtaacggggagctgtatcgctacatagcagacacac

SEQ ID NO: 269778 - DNA, 431 bp, Glycine max
atttcaaatgcaaagttaccttgtgtgggccctgacccaaagaatgtcatacttttggcatgtgacgcatttggtgtactcccacccgttagcaagctaaacctggcacagaccatgtaccatttcatcagtggatatactgctttggtggctggcacagaagaaggtattaaggagcctcaggcaactttttcagcttgttttggtgcagcattcattatgctacaccctacaaagtatgcagcaatgcttgctgaaaagatgcagaagcatggtgctactggatggcttgttaacactggttggtctgctggaagctatggtaatggaagccgtattaaactacaatacacaaggaaaatcattgatgctattcactccggaagtctcctgaatgcagagtacaagaagactgaaatttttgggcttga

SEQ ID NO: 269779 - DNA, 400 bp, Glycine max
cagagacgtgttggagacattccatgtgcatagcagagcttccactagacaactttggagcatacatcatctcaatggcaactgcaccttctgatgtgcttgcagttgagcttctgcagcgcgaatgccatgtcaagcatccactaagagttgtgccattgtttgagaagctagctgatctagaagcagcaccggccgcgttggcgcgattgttctctgtagactggtacagaaacaggatcaatgggaagcaggaagtgatgataggctattctgattctggcaaagatgctggaaggttttcagctgcatggcagctgtataaggctcaagaggagcttataatggtggctaagcagtatggtgtgaagctgacaatgttccatggtcgtggagggac

SEQ ID NO: 269780 - DNA, 430 bp, Glycine max
ggtggtagtttggcagcgacacgtatgttcatcaataatcgcaggagcagtttccggtgcatctcatcgtcttccaaaatgaacgacgcatatgtctcgaagcaaatccagcagatggtgcgtttcatccgccaggaagctgaggagaaagccaacgagatctctgtatctgccgaagaggaattcaatatcgagaagctgcagttggttgaagccgaaaagaagaagatcaggcaagaatacgaacgcaaagagcgccaagtcgaaattcgcaagaagattgagtactcaatgcagctgaatgcttctcggattaaagttcttcaagctcaagatgacgtgatcagttccatgaaagaagctgcatccaaggaacttttgaatgtcagtcatcaccatgatgatcatgtgtatagaaaccttctgaaag

SEQ ID NO: 269781 - DNA, 443 bp, Glycine max
agaaggggtaccattgctcatgctctagaaaagaccaagtaccctgagtctgacatttactggaaaaaatttgaagagaaatatcacttctcatgccaatttactgctgatctttttgtaatgaaccacacagactttatcatcaccagcaccttccaagagattgctggaagcaaggacactgttggacagtatgagagtcacactgccttcacccttccaggactctaccgtgttgttcacggtattgatccctttgatccaaagttcaacatcgtctctcccggtgccgacatgagcatatacttcccatacactgaaactgagcgtaggttaacagagttccaccccgacattgaagagcttctttacagctcagtggagaatgaagaacacatatgtgtattgaaggaccgcaacatgccgatcatcttcaccatggc

SEQ ID NO: 269782 - DNA, 413 bp, Glycine max
gccaagtaaccttctcaaagcgcagaaatggttggctcaggaaagttttcgagctatctgttctatgcgatgctgaaatcgctctcgtcatcttctccagccgtggcaagctttttcagtatagtagcactgacattaacagaatcattgagaagtatcgtcaatgctgcttcaacatgtctcagactggcgatgtagctgaacatcaatcggagcagtgcttataccaggagcttttggtattaagagtcaagcatgagtcactccagcggactcaaaggaatcttctgggagaagaactagagccacttagcatgaaagaattgcatagtttagagaaacaactggatagaacgcttgcacaagctcggaagcacctgacacagaagctggtatcacgaaatgacgaatta

SEQ ID NO: 269783 - DNA, 345 bp, Glycine max
cctttactaagggatttcacttgggaaaaaaaatgtcccatactaatggattcgggtccacaaccattgggtcaaaatgtccaaatcttgtagcacttaccaaccagggcctatcgattagtattatacaaaaaaaattcatcatagacacttatataattagatctggtcttcataaacaaacttgggattttcgatctcaagtaagatcggttcaagatcatgggatccttttctatcagataagaaaggctgtttcacaaaatgtacttctaagtaattgctccataaatcctatatctatctatatgaagaaaaaatcatgtgacgggggggattcttatt

SEQ ID NO: 269784 - DNA, 418 bp, Glycine max
actctttcatatactaggggatttcacttggaaaagaaaatgtcccatactaatggattcgggtccacaacgatgggttcaaatgtacgagatcttgtagcacttaccaacgaggccctatcgattagtattatacaaaaaaaatccatcatagacactaatataattagatctgttcttcatagacaaacttgggatttccgatctcaggtaagatcggttcaggatcatgggatccttttctatcagataggaagggctgtttcacaaaatgtacttctaagtaattgctccatagatcctatatctatctatatgaagaagaaatcatgtgacgggggggattcttatttgtacaaatggtacttcgaacttggaacgagtatgaagaaattaacgatacttctttaccttttga

SEQ ID NO: 269785 - DNA, 430 bp, Glycine max
gagaatacataaacatcaagattgcagttccaaacaaaacttatcaaaatctcatatactgattcagttctatacataaccatcgagatttactatcaaaccaaaaattctcaaaatctcttcacctctgtgatgaccatggaatacagaaccttagaactcaacatcatatccgcaaaggacatcaagaacgttaacctcttctccaagatggacgtatacgccgtcgttacgctctccggcgaccctctccaccctcagggcgccaccacccacgtgcacaaagacgccggcagcaaccccacgtggaactaccccgtgaaattctccgtcaacgaatcgctggccaaggagaatcgtttgtctcttgagatcaagctcgtcttcgaccgcaccctcggcgacaccgttatcggcaccgtccatgttc

SEQ ID NO: 269786 - DNA, 421 bp, Glycine max
caagaccaatgcatgaaaactggagcgagtgtgtcgacaaaatggcggcggcggaagcggttacttatggcgtggtcgtgaattcttttgaggagttggagccagcatatgcaggggatttcaagaagatcagaaacgataaagtgtggtgtgttggccctgtttcactcagaaacaggaatcaattggacaaggctcagagagggaacaaggcctcaagtgatgcgcacagttgcatgaagtggcttgatttacaaaagccaaattcagtagtttacgtgtgccttggaagtatatgcaatttaattccgttgcagttgatagagcttggtttggccttagaagcatctgaaaaaccattcatttgggttatcagggagagaaatcaaacagaagagttgaacaagcggattaacgaatc

SEQ ID NO: 269787 - DNA, 435 bp, Glycine max
  unsure (1)..(435): unsure at all n locations
aatggatcgacattcatttcaaaatgggtgcagggcacataacatgtacaaatcatgctaataataaaaaagaatatattatttcacatataaatcatgctaataaacataacatcattttgcagtgaaaaaaataacatcattttaatctcatattcgattaattaagaaatacattaaaaaatcactatattagcaattttcaaacaatcggttgtaaattaaagggtcacacattagtgtcttgctttatagttcataatgaacatgcattaagaaaactgttttctctgccatggctagtgtgaaagtctatgaattaaggttatgttgttcttctaaaaaaaacgttatgttgtttaattttcaaaaagtgattttatgatacatnnttttaggtaaatatgatacattttatacagcttataactctta

SEQ ID NO: 269788 - DNA, 428 bp, Glycine max
gtttcccctgatgtagtagaccaggatcatgtaaataagatactcactgctgttgttcaagggatgaattcaacagaagaaaacaatgatgtcaggcttgctgccataaaagcattgtacaatgcattgggttttgctcaggcgaatttttctaatgacatggagcgggattatatcatgagaattgtgtgtgagacaacacaatctcctgaattgaagattcgacgagcagcttttgagtgcttggtagctatttcttcgacatactatgaaaagttagctccttatatccaagatatcttcaacatcactgccaaggctgtgagggaagatgaggagccggttgcacttcaggcaattgagttttggagttcaatatgtgacgaagaaattgatatactagaagaatatggtggtgattttagtgg

SEQ ID NO: 269789 - DNA, 401 bp, Glycine max
ggcagcgcttgatttgaggccaggcaagccccactgaaccaccacacctctcgtcgttcacgctacccctttctgctcttcttctacctttcaagttttaaaagtataaagatggcagagacattcctatttacctcagagtcggtgaacgagggacaccctgacaagctctgcgaccaaatctccgatgctgtcctcgacgcttgcctcgagcaggacccagacagcaaagctgcctgcgaaacatgcaccaaaaccaacttggtcatggtcttcggagaaatcacgaccaaggccaacgttgactacgagaagatagtgcgtgacacctgcaggaacatcggcttcgtctcaaatgatgtgggactggatgccgacaactgcaaagtcctcgtcaacat

SEQ ID NO: 269790 - DNA, 405 bp, Glycine max
ggatttcactcagttgcctcagggaggtaggaatactctagaggaagctggatggaaggtggggcgctctcctattttcgaaactgtaactgcagctgatggaactgttaagttgttgttgaagttggaggacaatagattgattgaaactgttggcattccagttatggttgataaaggcttgactcgcctcacagcatgtgtctcatcacaggttggttgccctttacgctgctctttttgtgccactggaaaaggggggttttcaaggaatcttcagagacatgaaatagttgaacaggtcttggccattgaagaggtcttcaagaatagggtgacaaatgtagtgtttatgggaatgggtgaaccaatgttaaacctgaaggcagtacttgaagcacacca

SEQ ID NO: 269791 - DNA, 369 bp, Glycine max
gtatacaaagtcaacagatctgggtgaataaaaaatagtgtgtatggctacgcaaaccgttgaggataattctagatctggtccaagacgaactgttgtaggggatttattgaaaccattaaattcagaatatggtaaagtagctccggggtggggaactactcctttgatgggtgttgcaatggctctatttgcgatatttctatctattattttggagatttataattcgtccattttactcgacggaatttctatgaattagattcacaagaatcgggtaattagtttttcaatagaaaggaaagttaagcattttggtttcttattgtttgttagtctatttcatttggatttggtagtttgatc

SEQ ID NO: 269792 - DNA, 423 bp, Glycine max
  unsure (1)..(423): unsure at all n locations
gagggcggtgttactccttctctcgttgattcggatctagagtcttttttcactcttcagttctcgttgttgttcttcgctttcctgaaactagggttttcaatttcgattcattcgttaataattaaagatgtttgggagggcaccgaagaagagcgataatacgaggtactacgaaatcctcggcgtctcgaagaacgcttcgcaggatgatctgaagaaggcttacaagaaagccgccatcaagaatcaccctgacaagggcggtgatcccgagaagtttaaagagctggcacaagcatatgaggttctgagtgaccctgagaagcgtgagatatatgatcagtatggtgaagatgcgcttaaggaangaatgggtggtggcggtggccatgatccggttgatatcttttcatctttctt

SEQ ID NO: 269793 - DNA, 407 bp, Glycine max
ggcatatccaaaggaacaaaaatattattaagatgagcaacattattggagcacttgttctactctttgcatttctcttcctcagttgtgtgtatgcacaagacacaacaacccttgtgcctgcaatcataacttttggtgattctgctgtggatgtagggaacaatgactatcttcccacccttttcaaggctgattaccctccttatgggagggactttgttaaccaccaacctactgggaggttttgcaatggcaaattagctactgatttcactgctgacacattgggtttcaagacctatgctccagcatatcttagcccacatgcatcagggaaaaacctccttattggagcaaactttgcttcagctgcatctggttatgatgaaaatgctgctactttg

SEQ ID NO: 269794 - DNA, 414 bp, Glycine max
gagagcgagagagaatcgtaacaaaagcggtaaccggaataagttgggtctacgatttgagccatggcaacaacaacaccctcaaaccgatcatcagaggcgtttgctctcatggcaatcctcagcactctgctttgcacggcggtggcggcgaaggagagcgtgtacgagatactccccaagtacggcctcccgagcggtctgttaccggacaccgtcaccgactacacgctcgacgaggacgggcaattcgtcgtcgttttggcgaaaccctgctacatacagttcgattacttagtttactacgagaccaagatctccggcaagctcagctatggctccatcaccaacctcaagggcattcaagtccagcgcctcttcatctggttcaacgtcgatgagatcaaagtcgat

SEQ ID NO: 269795 - DNA, 394 bp, Glycine max
ggatgcacgccaatgggacccgccctccaataagtctatcggatttttgttcaagaatgaaatcttattggaactgtccagttcaccctttggaaccatatcacattccggatatgatgaaataggatgaattgagacggtattttgtaagtacataattatcttgaataaattcactatttctttattttccgatcgtctggaaagaacaagatgtttcttttgttctttcttcaacaatttctgatctctattacacctctcactatgattcgaactcacatgaagttctgaccatctgtcagagaaaaaagaacgagtaactctgtattaatggaatctcatcatccatacataacgaattggagtggaatattcaaattataacatatga

SEQ ID NO: 269796 - DNA, 425 bp, Glycine max
  unsure (1)..(425): unsure at all n locations
gacagcgctaaccccttctctctctgctgtccggttctccgatcgccgtctttgccctgcccattcctgatcaatatgtctcgaagatatgatagccgtactacaatcttctcccctgaaggacgtctttaccaagtggaatatgctatggaggccattgggaatgctggtactgcaatagggatcttgtcaaaagatggggtagttctggttggtgagaagaaagtcacatccaagctgctgcaaacctcaacttccaccgagaaaatgtacaagattgatgatcatgttgcatgtgccgnggctggaattatgtctgatgctaacatcctaatcaatactgctagagttcaagcacagcgctacacgtatgcttaccaagagccaatgccggttgagcagatggttcaatctctttgtgacac

SEQ ID NO: 269797 - DNA, 405 bp, Glycine max
  unsure (1)..(405): unsure at all n locations
aggagcaagctgccacttggaatcagttgttatgcggtcatattatgtcgagtgtgtgtgctttgtggtccaagagctacaatctaccccaataatgcaattggcaaagtctaaaatcatggaattgatggctattcttaaggatgtagaatctgctcagcttcgcgtggcctggttgcggaacatagttgatgaaattgctgaaaacattgaactcattgatgagcactgcatggcggagatggcaaaggctaactctgatcgtgaaatggaaacattgaacaaagagctggaatcaaatctggaaagtntggctcagaaagaacaagaggtaactgatatcaaaacaagaattgaagagatcagagagcatttaagcgagcttgagctgaaatcttttgattt

SEQ ID NO: 269798 - DNA, 400 bp, Glycine max
ggtttgcctttgatcttcttagctctactgcttttatttgcagacacccaattaacgatggctgctctctccaacggccacggctcttccttcttcaagatgcccccaatcaagttcacaaagctcttcatcaatggggaatttgttgattccctttcagggagggagtttgaaacaagagaccctaggacaggggaggtgattacaagaatcgcagagggagcaaaagaagacgttgatgttgctgtcaaagcggcacgtgcggctttcgactatggtccatggccccgtatgcccggcgctgtacgttatcatttctccatttctttctctataactgttgtgttgtgagttatgacaattaatttgtgggtctcactaattaaatctactgcatttt

SEQ ID NO: 269799 - DNA, 384 bp, Glycine max
ggagtgagtagtgagaatggagtttcaagggttaccggagggttgcattgctagtatactctctcgcactacgccggcggacgtgtgtaggttttccgtcgtatcaaagattttccgttcggccgctgaatcggacgctgtgtggaaacgttttctcccttccgattaccattccatcatttcccagtctccttcgcctctcaactatccttccaagaaggagctctatctcgctctctcggatcgccctatcatcatcgatcagggtaaaaagagctttcaattggagaaaaagagtgggaagaagtgttacatgcttgctgctagagctctcagcattatttggggtgacactgagcaatactggaactggacaaccgatac

SEQ ID NO: 269800 - DNA, 436 bp, Glycine max
tacggctgcgagaagacgacagaagggtacgggtgcgagaagacgacagaaggggaaggtgcaagagtttgttgtgagctataagctagtttatcgtgaggagaatatgaagttgtttgttttctttgttgctgcagtagttttggtagcatggccatgccatggcgcaggctaccaaaggttccctctccgaatgaaaactggctatggtgagcgttcttcggaggtaaaatgcgcaagttttaggcttgctgtggaagcacacaacatccgagcctttaaaaccattcctgaagagtgcgttgaaccaacaaaggactacattaatggcgaacaatttagatcagactctaaaacagttaaccaacaagctttcttttatgctagtgaacgcgaagtccatcacaacgacatatttatattcggcatagataac

SEQ ID NO: 269801 - DNA, 384 bp, Glycine max
gaaactgcatagcgtcagcgtgggtgcaaattccaggtttgcttcctttagcctagcttttactcattatctctctttctctctctctcagaggttctagaaagatccactccgaaatggacggtgcgccacaatccgccggtgccggaggtccggcgccgttccttctgaagacctacgacatggtggacgatgcctccaccaacgacatcgtttcgtggagctctaccaacaacagcttcgtcgtgtggaaccctcccgagttcgctcgcctccttctcccgacctatttcaagcacaacaacttctccagcttcatccgtcagctcaatacctacggatttcgaaaaatacatccagagcgatgggaatttgctaatgatg

SEQ ID NO: 269802 - DNA, 309 bp, Glycine max
gagagtggtggagtgtgcagaagagcgtcggggtcgcagccctaatcagaagaagcgcagcttcaagcgagtgacagccaccagccatgggtcgtatgcacagccgcggtaagggtatatcctcttctgctttgccctacaaaaggacacctgctagctggctcaagatctcttcgcaagatgtcgaagaaaatatctgcaagtttgcgaagaaaggtttgaccccgtctcagattggtgtcattctcagagattctcacggtattgctcaagtcaatagcgtcactggcagcaaaatccttcgcattc

SEQ ID NO: 269803 - DNA, 446 bp, Glycine max
aagacgacagaagggggagagagagagagagagagagagagagagagaggtggatggtgtctctgaaacttcagaagcggcttgccgctagcgttctcaagtgtggtagaggcaaagtttggcttgaccctaatgaggtcaatgaaatctccatggctaattctcgacaaaacataaggaaattggttaatgatggtttcattatcaggaagccaactaagattcattcccgttcccgtgctcgcagaatgaatgaggccaagaggaagggacgtcactctggtaatggtaagcgtaagggtacaagataggctaggctccccaccaaaatcctttggatgaggaggatgcgtgtcctcagacgattgctccgcatgtacagggaagcaaagaagattgacaagcatatgtaccatgatatgtacatgaaagtaaagggtaatgtc

SEQ ID NO: 269804 - DNA, 233 bp, Glycine max
tccacacgtgcgacggggcgagaatgacgacagaagggcaagttttaaaagtatggagatggcggacacattggtatttacctcacaatccgtgaacgagggacaccctgacaagctctgcgaccaaatctacgatgctgtcctcgacgcttgcctcgagcaggacccatacagcaaaattggctgccaaacatgcaccaaaaccaacttggtcatggtctttggagaaatta

SEQ ID NO: 269805 - DNA, 425 bp, Glycine max
gttctcaatccaaggtcaaagctatccatgtgccaagcgatttattgttctctattccattttgaagagacaccaataaaaaaaaagtgatggtttttttctcttcatgcaactcactcaaatttattttttctcttcattttctcttcgtgttattgataaggagttgtatgccttagtgagagcgttgaaaatatggctacactatctttatcccaaggagtttgggatccatagtgaccatgagtccctaaaatacttaaagggacaaggcaaactaaacaaaaggcatgccaaatgggtagaatttcttgagtaattcccttatgttattataaaaagggaaaaggaaatattgttgcggatgccttgtcaaggaggcactttttgctttctatgcttgaaacaaaaatgattggatttga

SEQ ID NO: 269806 - DNA, 427 bp, Glycine max
ggttctagtgtgtgattgtttgttgttgtaactcgttcttcttcttttgttgttctgtgtttgtgtttgttttttctctcacctgaaaatgtcttgctgcggtggtaactgtggttgcggaagctcctgcaagtgcggcaacggctgcggaggctgcaagatgtacccagacttgagctacactgagtcaaccaccaccgagaccttggtcatgggagtggcacctgttaaggctcaatttgagggtgctgaaatgggtgtgcccgctgagaacgatggctgcaaatgtggaccaaactgctcctgcaacccctgcacttgcaagtgaagtgtttggagagcaagcttcaagcagagatagcccttaattaagaataatgattaactattaatgtgtagctaaaaacttatgtattatgtctgtgat

SEQ ID NO: 269807 - DNA, 343 bp, Glycine max
gattgcattgcagtgtaagtatttacaaagcaaagcgaagcaagcattcactgaatgcgctctatctctctctttcgatctgggtactaaccctaacccgcttcgaaccgtggcttcctcaggctcgcagaacctctctcgaagaaaaccttctccttcttcgtcttcgtcttctcaacaaacacccgggtcgacccggatcgtttaccgagaatctcggatcccatcggaatccgatttcccgatctggcagcagaactggttcatcgcattgctcttcgtcatggctctcggattcttcgccctcgccattttcctcttcctcactctcgactctgacatc

SEQ ID NO: 269808 - DNA, 428 bp, Glycine max
  unsure (1)..(428): unsure at all n locations
gagtgtgtgagttcattaacagatacaaattctctgtgttgtgttgtgtacttgtgttaattgtgttgttgttgtaggaaatttaagtgaagagagaatgatgatgaagtctgctatgtgtgcattggtgcttgtggcactggttgtggttgaagcggggcccatggctgaggctgcggtgacttgcaacccaacacagttgactccttgtcttccggcaattaattcaggttctgcaccttcgagtgcttgttgccagaagctgaaggagcaaaagccatgcttctgtggctacctcaaaaaccctagcttgaagcagtatgttaactctcctaatgccaaaaaaaccgntagttcttgtggtattgcctatccaacttgttaagcacctcttatatatatatataaaatgtgtgaacaatatatat

SEQ ID NO: 269809 - DNA, 441 bp, Glycine max
  unsure (1)..(441): unsure at all n locations
tatcaggttgctcttgtttatgttcttacaagattggttctcaacgtttcacaggcataccttgctttctttgtcatcaatgacctacaaatggcccaatcagccaaagctttggttcctgctctcatatacatctgcagctttgttgtgtctatagcattacaggagattgcatggactggccgaatgcttaaggcctactactctgctggatgcattctttggattttttgtggtgcaatgatccttcttttaaccacaaatatgagttatgtcatgtacatagtatcggtattcattggcatagcaaatgctctcatgatggtaactggagtaagcatgcagaattntctcattggagagaaccttaatggctgtgcatttgttgttggatcattgagttttttggacaaaatttcatgtgggcttgctttatatgtt

SEQ ID NO: 269810 - DNA, 422 bp, Glycine max
ggttctagtgtatgtgattggggtgactcgttcttcttcgtcgttatcttcttcttttgttgtttgtgtgtttgttttttctctcacctgaaaatgtcttgctgcggtggtaactgtggttgcggaagcgcctgcaagtgcggcaacggctgcggaggctgcaagatgtacccagacttgagctacaccgagtcaaccaccaccgagaccttggtcatgggagtggcaccagttaaggctcaattcgagagtgctgaaatgggtgttcccgctgagaacgatggctgcaaatgtggagctaactgcacctgcaacccctgcacttgcaagtgaggtgttggagagctaaagcttcaagcagaaatggcccttagaaataatgataaaaactatatgtagtttcaaaacttcaaaattatgta

SEQ ID NO: 269811 - DNA, 423 bp, Glycine max
  unsure (1)..(423): unsure at all n locations
gtgctggatctttattggtggcaatttcattttcttctgtttttggtggttggttaccatgcaaactgtttagttccaattcaggtacttttgaaactttgagttacagcatgtatgcagcaatcttcaatgtgggctgggccgctactcangtttcacacatgtaataatttcctctgattcatcttttccatttgatgctgaaaattaaaaccataagtttgaatgtcaaattataagtggttggctggtttggttacttataaaatgatattccaacttgtgctcttggtaacttaaactttaaatttgaagtatctaaacatcattgaccttttgatagttatgtgatatctatattgggataagccataattttgttgagaaaagccattcaaatgaaatgatgatgactggtatgtg

SEQ ID NO: 269812 - DNA, 413 bp, Glycine max
acataagccagatgaaggagcgggaagacctaggatgtagaagatcataacatgagtgattcggcagatttggattcctatatacccactcgtgcggtacttcattgtatgatctatatctatatatctatatctatatatctatctatagatatatagatatataagatccatctgtatagatatcatcatctacatccagaaagccgtatgctttgtaagaagcttgtacagtttgggaagaggttttgattgatcaaaaagaagaatctacttcaaccgatatgcccttaggcacggcaatacataacatagaaatcacactcggaaagggtggacaattagctagagcagcaggtgctgtagcgaaactaattgcaaaagaggggaaatcggccacattaaaattacct

SEQ ID NO: 269813 - DNA, 240 bp, Glycine max
tcgcccactctttcgttctgttacagtatgggattacaacataataggcgtgtacaggggtccatttcctaacatatcagggcctgtttacataacatgtctagatggtggaaatcaataaggtcttgcttcatggtttttggatccacagccagaatattctgttattcgagaagcatgctactgtcattccacactggagatatataataggacccatgctatctaccactggaatcg

SEQ ID NO: 269814 - DNA, 355 bp, Glycine max
gataacattatccattcactaatcataatcacttccaagggctctgactattcactactactactggagatggcttcaactgcctcttgcacttctatttccccttctagtgatggttgcctttgctggtgacttaaacaaagactttgacatcacttggggagatggccgcgccaagatacttaacaatggagagttactcactctttcattggacaaagcatctggttcaagttttcaatcaaaaaatgagtatctctttgggaagattgacatgcagctcaagctcgtccctggaaactctgctggtaccgtcactggctattatttatcttcaaaaggatctacttgggat

SEQ ID NO: 269815 - DNA, 459 bp, Glycine max
gttaacgtctggccgagatccaggcataattccacgcaatgcacatcctccagagccagaaggcttggatagtaatctagatgttggtgctggtcagactcctcaattgcggttgcctcgctttaaggaggttgaggtgaatggcatccctattaaggtcaagtactgtgatacttgcatgctctacaggcctcctcgatgctcgcactgctcaatctgtaataactgtgtggaacggtttgaccatcactgtccttgggttgggcagtgtattgggctgcgtaattatcggttcttcttcatgtttgtcttctcaactacgctactgtgtatatatgtttttgcattttgctgggtctatattgtaagaattatggcatcagaggagacaacaatttggaaggcaatgattaaaactccagccttcatagtggtgataatttacaccttcatatcaat

SEQ ID NO: 269816 - DNA, 410 bp, Glycine max
gataataaatcacattcatacctcggctataatttacgtgagctttcagagggagagagaaaaaatgcagaagcatggttttgcatcaaagcgtaacgtgttgccgtatcaaacgccgaggctaagggaccactacgttctggggaagaagctgggacaggggcaattcggtacgacgtacctgtgcacccacaaggttacagggaagctctacgcgtgcaaatcgatcccgaagaggaagcttctatgccaggaggattacgatgacgtgtggagggagattcagatcatgcaccatttgtcggagcatcccaacgttgtccagatacaaggcacgtacgatgattccgtggtcgtgcaccttgtcatggagctctgtgcatggggagagcttttcgacaggatcattc

SEQ ID NO: 269817 - DNA, 415 bp, Glycine max
  unsure (1)..(415): unsure at all n locations
ggcaccgcttgagcagacttaacaacagcacaaagcgggttactgtctgttcaagctaccatctctctctctctttcttagtgcctccttgccagaagttaaaatggcccaagaaactttcctattcacatctgaatcagtgaacgaggggcaccctgacaagctctgtgaccagatctccgatgctgtgctcgatgcatgcttggagcaggaccctgacagcaaggttgcctgtgaaacctgcaccaagaccaacatggtgatggttttcggagagatcacaaccaaggccaacgtggactatgagaagattgtgcgtgacacatgcaggaacattggttntgtctctgatgatgttggtcttgatgctgacaactgcaaggtcctcgtcaacattgagcaacagagtcctgat

SEQ ID NO: 269818 - DNA, 387 bp, Glycine max
attgtctcttctggagctgatatgtcaatatatttcccctagtcttagtagcagaacaggcttacagccctgcatggttcaattgaaaagctgttatttgatcctgagcagactgatgaatacattggttcattgaaagacaagtcaaagcccataattttctccatggcaaggctagacagagtgaaaaacataactggattggtagaatgctttggtaagaacagcaaattgagggaactggtcaaccttgttgtagtagctggttatattgatgtaaagaagtcgagtgacagagaagaaattgcagaaattgagaagatgcacgagctcatgaaaaagtataatttaaatggtgattttcgttggattgctgcccaaacaaat

SEQ ID NO: 269819 - DNA, 425 bp, Glycine max
  unsure (1)..(425): unsure at all n locations
ggaagtgtgaagcactgagcagttgaggaaatgggaacccttgggagagcgatctacagcgttggtaactggattcgagaaactggacaggccattgatcgtctcggttcccgtcttcagggcggttactacttccaagagcagctctctaggcatcgaactctgatgaacatatttgataaggctcctgttgttgataaggatgtatttgttgcgccaagcgcctccgtcattggagacgttcaacttggaagaggatcatccatttggtatggagttgtcttgagaggtgatgttaacatcatcagagttggaaatggaactaacattcaggacaactctctggtgcatgttgcaaagtcaaatttaagtgggaaggtgttgcctacaattattggggataatgttactgtcggncacagtgc

SEQ ID NO: 269820 - DNA, 410 bp, Glycine max
ggaagtgagtgagtagtgagaatggagtttcaagggttaccggaaggttgcattgctagtatactctctcgcactacgccggcggacgtgtgtaggttttccgtcgtatcaaagattttccgttcggccgctgaatcggacgctgtgtggaaacgttttctcccttccgattaccattccatcatttcccagtctccttcgcctctcaactatccttccaagaaggagctctatctcgctctctcggatcgccctatcatcatcgatcagggtaaaaagagctttcaattggagaaaaagagtgggaagaagtgttacatgcttgctgctagagctctcagcattatttggggtgacactgagcaatactggaactggacaaccgataccaattccaggttcccggaagt

SEQ ID NO: 269821 - DNA, 479 bp, Glycine max
gataccaaaaacaaaacacaagccaagtgaaagtgagaaaaaataaaaatcaaagagcataatgtcagggatcattcacaagattggggagacccttcatgtgggagggcacaagaaggaggaggagcataagggtgagcaccatgctggagaatacaaaggggagcaccatggtgaacacagtattgagtacaaaggagagcatcatggtgaacacaaagctggagagtaccatggtgagcacaagccagagcacaaagaggggttcctagacgaagtcaatgacaagatccatggtgagggcggcgccgccgagggcgagaagaagaagaaggagaagaagaagaaggagcatggccatgagcatggccatgacagctgcagcagcagtgacagtgattaaactgctgcatcacctatatatttaaaatgtttatgggaccatagtagcgagggctgtgcctaaattgatctctctc

SEQ ID NO: 269822 - DNA, 324 bp, Glycine max
ggttctagtgtgtgattgtttgttgttgtaactggttcttcttcttttgttgttctgtgtttgtgtttgttttttctctcacctgaaaatgtcttgctgcggtggtaactgtggttgcggaagctcctgcaagtgcggcaacggctgcggaggctgcaagatgtacccagacttgagctacactgagtcaaccaccaccgagaccttggtcatgggagtggcacctgttaaggctcaatttgagggtgctgaaatgggtgtgcccgctgagaacgatggctgcaaatgtggaccaaactgctcctgcaacccctgcacttgctt

SEQ ID NO: 269823 - DNA, 363 bp, Glycine max
gaattcacctatcccaataacaaaaaaacctgacttgaatgatcctgtgttaagagctaaattggctaagggaatgggtcataattattatggagaacctgcatggcccaacgatcttttatatatttttccagtagtaattctaggtactattgcctgtaacgtaagcttagcggttctagaaccatccatgattggggaacccgcggatccatttgcaactcctttggaaatattacccgaatggtatttctttcccgtatttcaaatacttcgtacagtgcccaataagttattgggcgttcttttaatggtttcggtacctacaggattattaacagtaccctttctggagaatgttaa

SEQ ID NO: 269824 - DNA, 360 bp, Glycine max
tacggctgcgagaagacgacagaagggtacggctgcgagaagacgacagaagggtacgcctgcgagaagacgacagacaggggttgcacttctgctgcgtgtaagaatccaggaaacggagatatgggattcgctggaacaactcataagtgcatggattgtgacacaacagcatatttggctgattagtcaacagcagataaccgagtgtaccataaggcttgcttcagatgccaccactgcaaaggaacactcaagcttagcaactataactcttttgagggggttctttactgcaggccacacttcgaccaactgttcaaaagaactggtagtctcgacaaaagcttcgaagggaca

SEQ ID NO: 269825 - DNA, 478 bp, Glycine max
gaaaaccaaagagccgaacccggcctttagggaagaaaagaagaaaaaaaaaatcccttctctttttgtttccctctcttctctcttccatggaaaaaatggctgcagcttctagaaaaccaggaagcgcagtaattggatccctttcttcaacccctaggttctgcaactctcactctacatcatcatcttcttcttcctcagctttcgcttcttccacctccagcttcacctctcgctcctcctccttctttcaccgctcttgctctccaacacgtgtcaacctctactgttccaccgctccctccgtccggttcttcctcgaccgttcggtctctacgaaccgctccatctcggtggcgccgcgaaccggcgcttctaggcaaagcagtagcccgcaccaccagcagaagcggacctgcatgtgctcgcctacgacgcaccctggctccttccgttgcagccttcacatgaagag

SEQ ID NO: 269826 - DNA, 270 bp, Glycine max
gatggatttaactggactcatttacaatatgtgggtaccatttttagtgcacctaacttctgttaccgatttttgaacatggcttacatatcggaggttgattattgcaagggccacacatttattcagtttgaacctgctcctatgagaggtgaaccttatgtcactctgagaacgccctattacttcttataatgtagctgacgaatgtcatactgctatatcaaggtttcctctactgcacttattttatgttgtttcgcattctta

SEQ ID NO: 269827 - DNA, 468 bp, Glycine max
gaagatgagcaacctaagaagaaagtgcgattggggagtcgggctactcagtggatatcagtgtataatgctcgccgtcccatgaagcagagatatcactataatgttgcagacactatgctacggcagcatgtagacaagggtattgaggatgggttgtatataagctgtgtggcctctgcaacaaatctgtgggctctaatcatggatgcaggaacaggtttttcttcacaagtttatgagttatccccggccttcctgcacatggactggattatggagcagtgggagaaaaattactatatcagttcaatagctggcgcagttaatggaagttccttggttgtcatgtccaaaggaactccttacacgcagcagtcctacaaagtgagtgaatcatttcctttcaaatggataaacaagaagtggaaagaaggattccatgttacctcaatgactactgctggc

SEQ ID NO: 269828 - DNA, 297 bp, Glycine max
  unsure (1)..(297): unsure at all n locations
ggctcacgatctgaggaagacaccaatcttctctccacgcccttcttgggtaaccgtctgaagtgcaggaatggcagatggattgcattcgcagcatccatcggtagttcagaagttatctggacagtcttatcttgtgtccaggcttgctcctaatcactccagaaactgttctaccactggtagttacttcaatggaggtttgcagtcttcaggtttggttccagtcacggcacacgcgccggctgagaaaggggtgtctggattnttgttggatttcctgatgggcggagtgtc

SEQ ID NO: 269829 - DNA, 322 bp, Glycine max
tacggctgcgagaagacgacagaagggtgggccaaaggagtgatattgggatggagcaaactaataagaacatgacgcaacggtggagggtcaacgacaacaccttcacgcgttttgctccgaaggcttgcgagcacatcggttccatcccaagtgcttgacccgacagcaccgaataacctgtgatgttcgcgaacgccattcctagggaccctgctggcagttctaactcttccaagtgtgccaagaacagcatcgataccatggaacgcgcgtagaatatcaacgccgttatttctatcggaaacgccagcttcaccac

SEQ ID NO: 269830 - DNA, 473 bp, Glycine max
ttctgctgctagaagacgacagaaggataccggtgcgataggaccacagaagggtacggctgccacaatacgacagaagggattgctgctctccaacaaagatgatccacttgtccaccctccctcaagacataaccgaagaggagattgtgagccttttggaggagcatgtaaccattgtcaacagcaaggtctttgagatgaatggaaaaaagcatgcacttgttcagtttgagactgaggagcacgctactgaagcccttgtgtgcaagcatgcaagcccactttctggatcggttgttcgcatctccttttcccatttgcagaatatatgatccagactttgataagggctgaagggaaacagttttatggttgcaacttgctcggcttattatggacaaagaattctgaattttggaaggataattttatgcaaataatgtcaccttcattgtcattgtaatggtctc

SEQ ID NO: 269831 - DNA, 479 bp, Glycine max
  unsure (1)..(479): unsure at all n locations
ctaccgttgctttagctttacttacatcaattgcatgtttctagtcgggtctttcaaaaaaaggattancttattttaataaatacatccaaccaaccccaatccttttaccgattaacatcttagaagatttcacaaaacccttatctcttagttttcgacttttcggaaatatattagctgatgaattagtagttgctgttcttgtttctttaatacctttagtagttcctatacctgtcatgttccttggattattcacaagcggtattcaagctctcatttttgctactttagctgcggcttatataggtgaatccatggaaagccatcattgaccagttttctacaaaatagtccttttcgtttagcttgccgcacatatattgcggctcaatataatctacttagtaaacatctatatctatctacctatatctatatagatataggtagatagatatagatagatattcgat

SEQ ID NO: 269832 - DNA, 416 bp, Glycine max
accgcccatcagagccatcgttaaccattggtctttaagaagacgtattctcaaaatacctatatctacggctgtggcaataggcgcatgatttggtaatactccaatttgtccgctattagtagataaaatgatttccttcacttccgaatcccaaacaattcgattgggggtcagtacacaaagatttaaagtcatttcttcaaattgctctccatttctaagttcgtagctttcgcagtagcttcatcgatattacctaccaaataaaaggcttgttcaggaagaccatctaattctccagaaagaatcaatttaaaccctctaattgtttctgctagactaacatatttccccggcgaaccggtaaaaacttctgctacgaaaaaaggttgtgataagaaacgctcaatttt

SEQ ID NO: 269833 - DNA, 505 bp, Glycine max
cccacgcgtccgatcacatatcctggatcaagtaaagactctgggattccgtcaagctacggatacatccatttcattaggaattgatgaccttttaacaataccttctaaaggatggctagtccaagatgctgaacaacaaagttttattttggaacaacatcatcattatgggaatgtacatgcagtagaaaaattacgccaatccattgagatatggtatgctacaagtgaatattttcgacaagaaatgaatcctaattttaggatgaccgacccctttaatccagtccatataatgtccttttcgggagctagaggaaatgcgtctcaagtacaccaattagtgggtatgagaggattaatgtcggatccacaaggacaaatgattgatttacctattcaaagcaatttgcgcgaagggctttctttaacagaatatataatttcttgctacggagctcgtaaaaggggtgtagatactgctgtacgaacatcagatgct

SEQ ID NO: 269834 - DNA, 429 bp, Glycine max
  unsure (1)..(429): unsure at all n locations
ggtagagaagagttaatggctggagcgtgaacagatcagaggcatacaggtggcaagtaagggaaattaatgcgagttacaggtgcatacatgtataccatgcttgtgatggcacagctatgaatgctggtgtcagtttcaatatggctttcttcgtgtttacattttccataaggaaatttgtcaaaggataattctcaaatttaatttccatgagtaatatcttcatactgtattaaatggagaaagtattgacttttttatatttttaatattgtttttattagaaaaaatcacaaacaaataataggaaatttataagttaaaaatatatcttatttaatcaattgagtttagactcttttatttttttaatatattaatatattttaatttttatntaatatttatatttaattacaactcatt

SEQ ID NO: 269835 - DNA, 391 bp, Glycine max
ggcctcatcgagacctacaagttgaacggccaattcagatggatatcctctcagatgaaccgtgtgaggaacggagagctctaccgtgtcatctatgacacaaggggtgcctttgtgcagcctgcagtttatgaggcctttgggttgactgtggttgaggccatgacttgtgggttgccaacgtttgccacatgcaatggtggtcctgctgagatcattgtgcatggaaaatctggttaccacattgatccttaccatggtgaccatgctgctgagatccttgttgagttctttgagaagagcaaggctgattcatctcactgggacaaaatctcccatggtggactcaagcgtattcatgagaagtacacatggcaaatttactcggaca

SEQ ID NO: 269836 - DNA, 279 bp, Glycine max
tattgggatggtgcaagagtttgttgcgagccattagctagtttatcgtgaggtgtatatcatatcggttgaactctttgttgcttcaatagtttttttatcaaggtcattccattgagcatgctaccaaattttctttgttcaaacgaaaactgtctttcgtgagcgttcttgttaaaaaaattcacaagtcctaaacttgctgaagaatcacacatcatatcttcctttaaaaccatttctgaaaaatgcgatgaaccaacctaatacttcattaac

SEQ ID NO: 269837 - DNA, 426 bp, Glycine max
gaaaattctaattaaaaaaaaagcaaaaataatttatatgttcttaaagaacaaaatgtttgttatgcttaatatctttaatttggtctgtatttgtattcactccgtcctttattcaagtagttttttctcggcgaaattgcccgaagcctacgctttcttgaatccaattgtggatattatgccagtaatacccttactcttttttcttttagcttttgtttggcaagctgctgtaagttttcgatgatatctgtaatttgagtaatgtcttaaaaaaaaattaagaatttatcagaaaactaaaattcgaacattttaacaatttaaaagatcaaataagtcttacagtgtgaattatcgattccaatattgaaatttttggatatttacgaaaaaatacggaccatctcatcatctacgttt

SEQ ID NO: 269838 - DNA, 272 bp, Glycine max
gtgtgcatggttgtgatgtgtgcacacaacactgtgcaaggcattacatgtgggcatggtcacggtaacctaacaccatgcctagggcttctacataatgggggggctgttaccataagatgctgcaaccgcctcaggagtattgggagcaatgctaggaccactgatgatcaccgtcgtgtgtgccaccgattgatgcttgctgctgatgctgttcgtaggagcaacacttacaatggttaagctctccccgggtaatgtgggggctacat

SEQ ID NO: 269839 - DNA, 400 bp, Glycine max
caacagaacggggtgcaattgaaagagagatttgatagcctaaactcaagtaagggttttctctttgagaaaatcgtatcttacaccttttggtgaccactttgagtgagagaagagaaattaagagagatactcaaattagattcaagagagatggccatcaaccatgaaacttgggctttcattttcggtcttctaggcaacgtgatctactttatggtgttactcgctccattaccaactttttaccaaatctacaagaaaaaatctacggatggggttcaatcactaccttatattgttgcactattcagatcaatgctctggatttattacgcactcgtcaaaaaggatgctagcctccttctcattactattaactcctttggatgtgtgatag

SEQ ID NO: 269840 - DNA, 417 bp, Glycine max
ggtatcaaaatttttgaacctgaaaattgttattttgatagggtttacagcaaatgcagcatagcctgcctcgtcacaaaatactgaacgccgcagctctgtggttgatcgacgcattcttcacttcaatcccacaatgtctataacgcacagcctcaccacttcactctcttcttcttcctctgctttcttagctccctcttccttcaattccagaggacaggtttcgttgcctgtgaagagcgtgagcatttgcaaatgcgttgccacacccgaagctgagaccgcctacaagacaggggtcactcgcaatccaaatatggggaaacttcaagctggctatctctttcctgagattgctagaagaaggtctgcacacttgctgaagtaccctgatgctaaagtaataagccttgg

SEQ ID NO: 269841 - DNA, 400 bp, Glycine max
ggaagagtgaagagaatggctcccaagggtttaacctttgtggctgtgttaatatgcgtttcagcactgtcactgagtccttctgttgcgggggaagggcaaaataatggccttgttatgaacttctacaaggaatcatgccctcaggctgaagacatcatcacagaacaagtcaagcttctctacaagcgccacaagaacactgctttctcctggctcaggaacatcttccatgactgtgctgttcagagttgtgatgcttcactgttgctggactccacaagaaggagcttgtctgagaaggaaacagatagaagctttgggttgagaaatttcaggtacattgagaccatcaaagaagcttggaaagaagatgccctggaagttgttcatgtgctga

SEQ ID NO: 269842 - DNA, 409 bp, Glycine max
ggaagagtgaagagaatggctcccaagggtttaacctttggggctgtgttgagtatgcgtttcagcactgtcactgagtccttctgttgcgggggaagggcaaaataatggccttgttatgaacttctacaaggaatcatgccctcaggctgaagacatcatcacagaacaagtcaagcttctctacaagcgccacaagaacactgctttctcctggctcaggaacatcttccatgactgtgctgttcagagttgtgatgcttcactgttgctggactccacaagaaggagcttgtctgagaaggaaacagatagaagctttgggttgagaaatttcaagtacattgagaccatcaaagaagctttggaaagagaatgccctggagttgtttcatgtgctgatatcctc

SEQ ID NO: 269843 - DNA, 394 bp, Glycine max
tatatatatttttaaattatgtttaattcggaaaatatgaatgacagataaaattgtgactaatactttaaaataataatatttcatgttacaattttattatttttattatggtaaattttatgataaatattattttgtgctttaatgttatatgtttataatacatataaataatttttaatataaactattatattaaatatttaacataatagtttataatacaatattagaataataatatttaaattttattataaatttaataataaaatattaatattgtatatgttatctcttaaataattagaattccaataaatattaatttggtaaccgtcatgttgatatgcataattagaatatttaaataattatattagactggttc

SEQ ID NO: 269844 - DNA, 440 bp, Glycine max
ggttttcgtgttgggttcaaaggaaactatcaagggagcaaggaggagaagtattttattaataaccacttgagtttcagagtcatgtatcacaaggatcctgaaactggttctgctcgtattgttggatttgaggtcaccccaaacagtataaatcatgaatacaaggagtggaatgacaagaatccacaggtaacaacatgcaataaagataccaagaatttgatgcaaggtagtactgtcccacaagaagttgatacaagcaaggatattgtattcacatatgatgtttccttcacggaaagtgatatcaaatgggcatcacggtgggacacatatcttttaatgaatgatgatcagatccactggttctgcatcattaactctctgatgattggtcttttcctgtctggaatggcggcaatgatcatgatgagaac

SEQ ID NO: 269845 - DNA, 415 bp, Glycine max
gaccacacaccacacacatagtagctattatactgtctagagtaattgcggaatctgctagaattttctaataatggcgaaagacgttgagcaggtcacagagcaaggtgaatactccgcgaaggactaccatgaccctcctccggcaccgttgatcgacccagatgagctcacaaagtggtccttgtacagagccgccatagctgagttcatagcaacactcctttttctttacatcaccgtgttgaccattattggctacaagagacagagtgacaccaaaatccccggtaacaccgaatgtgacggcgttggcattttggacatcgcttgggccttcggtggcatgatcttcatccttgtttactgcactgccggaatctctgggggacacatcaaccctgcggtgacattc

SEQ ID NO: 269846 - DNA, 447 bp, Glycine max
  unsure (1)..(447): unsure at all n locations
ggttctagtgtgtgattgtttgttgttgtaactggttcttcttcttttggtggtctgtgtttgtgtttgttttttctctcacctgaaaatgtcttgctgcggtggtaactgtggttgcggaagctcctgcaagtgcggcaacggctgcggaggctgcaagatgtacccagacttgagctacactgagtcaaccaccaccgagaccttggtcatgggagtggcacctgttaaggctcaatttgagggcgctgaaatgggtgtgcccgctgagaacgatggctgcaaatgtggaccaaactgctcctgcaacccctgcacttgcaagtgaagtgttgggagagcaagcttcaagcagagatagcccttaattaggaataatgatcaactattaatgtgtagctaanaacttatgtattatgtctgtgatggctntcgtgcactctggtg

SEQ ID NO: 269847 - DNA, 388 bp, Glycine max
gtcagagtcgaagaaatcagtgcttagttcggtggatattattgggcttggaactggacctgaattggagaagaaacttaagtatgcagctgacatttcttctggaatcattctcggaagggagcttgtgaattctccggctaatgtgctcacgccaggggtattggctgaagaggcatcaaagattgcttcaacatataatgatgtttttactgccaaaatattagatgctgagcagtgtaaagaattgaaaatggggtcctatcttggtgttgctgcagccttagcaaatcctcctcattttatccatctgtgttataaaccaccaactggacctgtcaatgtcaagttagcattagtcggaaaaggtttgacttttgatagtggt

SEQ ID NO: 269848 - DNA, 322 bp, Glycine max
gattactgggacatcccaagcggactgtgctgtgcttatgattgattcgaccactggtggttttgaagctggtatttccaaggatggacagactcgcgaacatgctctggtttaattcacccttggtgtgaaacagatgattgctgctgatacaaaatggatgcttctacacccaagtattccaaggccaggtatgatgaaattgtcaaagaagtctcttcctacttgaagaaagtaggatacaaccctgacaagattccttttgttcctatctctggttctgagggagacaacatgattgagaggtccacataccttgact

SEQ ID NO: 269849 - DNA, 279 bp, Glycine max
gtgatagatcacttattgtgcacctaaatatcaattaacagacactgtggtaaacaacgaatggactaggaaaaccctgaagttaccgatcttaataagatatgcatacatacagatattgccggctggactattactgaagatgacaacgccgatcgccttatcgaacaactgcacaagatgattggataatgggacacgatctgtatcgatgcattaattacataatatgttgatgttacacacagcgtgacacaggacacttgccattgccctata

SEQ ID NO: 269850 - DNA, 416 bp, Glycine max
ggaagagtgaagagaatggctcccaagggtttaacctttctggctgtgttaatatgcgtttcaacactgtcactgagtccttctgttgcgggggaagggcaaaataatggccttgttatgaacttctacaaggaatcatgccctcaggctgaagacatcatcacagaacaagtcaagcttctctacaagcgccacaagaacactgctttctcctggctcacgaacatcttccatgactgtgctgttcagagttgtgatgcttcactgttgctggactccacaagaaggagcttgtctgagaaggaaacagatagaagctttgggttgagaaatttcaggtacattgagaccatcaaagaagctttggaaagagaatgccctggacgtgtttcatgtgctgatatcctcgatctctc

SEQ ID NO: 269851 - DNA, 507 bp, Glycine max
  unsure (1)..(507): unsure at all n locations
accggnccggaggtccacgctcgacccaaccatacaacgggtagtatgaacgacgtaagggattaagtacggaactaaaccaaacatggggacaatgggatataagcggctcaaagcggccttagcaattcctgaccagactcctgccatgataatttccactcacatgaagcaattactcgatgatggatccttctcagataattcactggctgacaatatcaccgatgatcccgctttgcgaggatttattagacattgggatgcaattgaggatttggtgcaccatgttttgaatacctgccatctataacaaaatggcaatgaaggacaaatactatttacacatccactttgcaccccaaaagcgaacaaagaacagttgatgcaactaatgtttgaaacattcaatatatcacgattttatgcctcacaacacgcaatgttatcactctatgctgagggacgtatctcatgctgcacttgtgatattggacatggaaaaat

SEQ ID NO: 269852 - DNA, 351 bp, Glycine max
gacacttgattagctgaggaggaagagagaaaaaccatggcaataacactcaacaatggcttcaagatgcctatcattggattgggcgtgtggcgcatggaaggaaacgaaatcagggacctaattctcaattccatcaaaattggttatcgccattttgattgtgctgctgactacaaaaacgaagcagaagttggagatgcgcttaaggaggcttttgatagtggccttgtgaagagagaggatctcttcattaccaccaagctttggaattctgatcaaggccacgttcttgaggcgtgtaaagacagtctcaagaagcttcagttaacgtatctagatttatatctt

SEQ ID NO: 269853 - DNA, 464 bp, Glycine max
ccacgcgtccgcccacgcgtccacggacgcgtgggcggctgcaagaacacggcagaagtgtatagcagcatcatacggggcattcaattcaaaaactaagttcatttcttgtgctttgccttattcctcaaaaccaaacatgtcgaacacatgcggcaactgtgactgcgctgacaagactaactgcaccaagggaaacagctatggtgttatagtagagactgagaagagctacatcgagactgttgacatggatgttccaccagctgagcatgatgggaagtgcaagtgtggcactaactgcacttgcacggactgcacttgtggccattaaggaatatgtatgaaaatgtaattgccatgtgtttggcaatacaaatctccaaataatgtaatcttcgcatgaataaatgtgtgctgttatcctacttcagggtctgtgtagtcatgcagtctgaatcatg

SEQ ID NO: 269854 - DNA, 398 bp, Glycine max
cttcagtttcaagacctaaatgagcacaaaagaagcatacatttggaggttattcgagatggtagaagagtcgagatctccatatatgatgttgttgttggtgatgttataccccttaacattggtaatcaggtccctgctgatggagttttgatcactggtcactctcttgcaattgatgaatcaagtatgactggggagagcaagattgtcgaaaaaattctagtgatccttttctgatttctggatgtaaagttgcagatggcagtggaactatgctggtaacagctgttggtattaatactgaatgggggcttctaatggccagcatttcagaagacaatggtgaagaaactcctttgcaggtacgcttaaatggtcttgctaccttaattggt

SEQ ID NO: 269855 - DNA, 347 bp, Glycine max
cggccactcatttttaaaatatcaattgggtaaaatcttgcgaaagtggtttattgttctctatcattatagacaatatcatctatattctatatggaagacgaacctgaaccttatttacaattctttttttttcaatctcatcagctttcgtatttcatcatgagacaattcatacttagcatatttttttacctactttttttcccgggagaagtctgcctatttttacatataggatttacatatacaacatatatcactgtcaagattaaaagtgaatttttggattatttacattaaatatttctattcctaaagaaacattaaaatcatttccaggaaaa

SEQ ID NO: 269856 - DNA, 444 bp, Glycine max
ggcacaagtttgttgagatagctagaagcaataagatgaaaatgaaagtgcttgttttgtttgttgctacagttttggtagcatatgaatgccatggctcagactaccagaagttccctctccaaatgaaaactgggtttggtgggcaatacagcaatgaggtggcatgtgccagttggaggcttggcgtggaagcaaacaacgtagtcaagtggcaaactgttcctgcagcttgcggagagtacatagctgactacgttctaggagaccaatatagatcagattccaaaacagttaaccaacaagcttatttctatgctaaatccctcaaactcaccaacaaagatgtctttgtcttggacgttgacgacactactctctctaatctccagtattttgctaaccatggatttggtgtggaaccacacaatacgacggcgttta

SEQ ID NO: 269857 - DNA, 379 bp, Glycine max
gctccttcttgggccacctttggcctcatgaaacccgccatgcagcatatcgctgtccaggaaggcatgctgtggggttctgttgcggagcgagtcagaggaggctccgattttgacttcgagaatggcagagtcaaaccctgggagggtgagagaatacacgaggttggaatggatgatttggagcttactctaggagttggaaaggcttgatttgttgcaatcccttgcttggatctgctactctactactaccctcagggcaattggttgttatgcttaatttctctatatttttcccttttatgtgtacagtttccttttcatatagcagtggttaggtgttacatttcattacttggaatttgacttcattgta

SEQ ID NO: 269858 - DNA, 369 bp, Glycine max
cataattttttaattttttctaacattaacacttctgctaaactgctaaaactgatatcaacattaataattttaacatataatctaataaatatgaactgaaccattacatcttacataatatattcatacatacgaagacttctaatttacacaactaaacatgcaatgcttcctatccactaatcttatctaaatatgatctcaaaatgcacattcaatttcttacaacttatactatatataaccatatttccccataactacaaccattctatacttttaatatgtatacaataccaaccatttatcaaactctttcactcattaaatattaggtggttcatatccttacctcatatccaatat

SEQ ID NO: 269859 - DNA, 368 bp, Glycine max
gatacaaagcattgaattcaaaaactaagttcatgtcttgtgcttcgctttattcctcaaaaccaaacatgtcgaacacatgcggcaactgtgactgcgctgacaagactaactgcaccaagggaaacagctatggtgttatagtagagactgagaagagctacatcgagactgttgacatggatgttccagcagctgagcatgatgggaagtgcaagtgtggcactaactgcacttgcacggactgcacttgtggccattaaggaatatgtatgaaaatgtaattgccatgtgtttggcaatacaaatctccaaataatgtaatcttccgatgaataaatgtgtgttgttatcctacttcagggtct

SEQ ID NO: 269860 - DNA, 326 bp, Glycine max
acccttttcatccaacaaggtggactttatattcaacaagttttctgtcaaacccgggtcagaggaggctcagatcatgaagaatactattagtgagtgtgaagagggtggaatcaaaggagaggaaaagtactgtgccacttcgcttgaatccatggttgatttcagcacttccaagcttggaaataatgttgaggttgtgtccacagaagtggacaaggaaacgggattgcagaaatacaccgtagcaccgggagtgaagaagttatcaggggacaaggcttgtgtgtgccataagcaaaactacccttatgcttgtttttact

SEQ ID NO: 269861 - DNA, 288 bp, Glycine max
acgtacagccgcccgaacacgctccaatatacactatccaatctacttattaacttattaaatagcactaattgagacacttgggctcatcctcttcattattcaaactaacacttccttacatctttcaaaagttttatatccttttctatcattatctacaactccatctatatactccatctatctttcaccagaacctcatttacacctctttttttactcattatcattaccttttctaatttcatcactacacactctacacttaccataactccttaccta

SEQ ID NO: 269862 - DNA, 395 bp, Glycine max
gggataacaacaacatgcttttgcttgttagcgctagaagccgaaagatgctttacgaatggatttctccttgtgagaatatgggagttgcagctgaacatggttactttctaagaatgaaacgagatgaagagtgggaaacacatgttgcagcaacagacacgtatttggaaacaaattgccgaacctgtaatgaaactttacactgaaacaactgatggatccaccattgaagacaaggagactgcacttgtgtggcgctatgaggatgcacatccagactttggatcgtgccaagctaacgaactccttgatcatcttgagagtgtgcttgcaaatgaacctgtaacagttaagaatgaccagaacaatgtagaggttaaaccacatggtgt

SEQ ID NO: 269863 - DNA, 397 bp, Glycine max
gattcaaaatacaaataaacgctcgcgctccaagggcagatatgaaagttcaccactccgaccaactccttctttctctatttctactgcttgcatttcacgttcctcatatggctgttggcactgcggagcttacagctctgatggagttgaagtcccctctggatccagacggcaagatccttgggtcatggataagtgatggtgatccatgcaatggcttcttcgaaggggttgcgtgcaacgaccaccgtaaaggggccaacatctacttgcagggaaagggtctttctggttggatatcttcaacactggctgaactcaaatgcttgtcggctttatacttgcactacaacaacctttctggtgagatacccccacacatttccaatctcac

SEQ ID NO: 269864 - DNA, 429 bp, Glycine max
  unsure (1)..(429): unsure at all n locations
agaagttaaaagctactctacttcagtttaacttcaagtgcangtgtgacccttcggtattcatctacactgattccaataacactggtttatatgctactgtatgttgatgacatcattgtcactggaaacaacttctccatcaaatcactagttactaaactcaattctgagttttctcttaaggacctaggaagtcttgactatttcttgggaattgaagtcagatctcagcccaatggtgctcttattctaactcagtccaagtacattagggatttgttgagtaaaacaaagatggacgaagctaatctcatctcttctccaatggttagtggttgcaaattgactaagtcagggtatgaatctttccctgatcccacacactacangtctgttgtgggagccttgcagtattcaactattact

SEQ ID NO: 269865 - DNA, 298 bp, Glycine max
gataccaaatacaatacacaagccaagtgaaagtgagaaaaaataaaattcaatgagcataatgtctgggatcattcacaagattggggagacctcttatgtgggagggcacaagaaggaggaggagcctaagggtgagcaccatgctggagaattcaacggggagcaccatggtgaacacaggaccgagtacaaaggagaccattatggggaacacaaagctggagagtaccatggtgaggacatgccagtacacaaagaggggttcctagacaaagtgaaggacaagatccatggt

SEQ ID NO: 269866 - DNA, 410 bp, Glycine max
agacgacagaagggggatcacaattgtgtttttctctttctctccttcaaaatcgttgacggggacgcctgtttctttgtgaactcccttagattctctccatcgggtcttcaaaaatgcggatgagctgcaatggatgtcaaggtctcagaaaaggttgcagtgaaaattgcagcataagaccctgtttacaatggatcaaaagcccagaatctgaagccaatgctactgtgtttcttgccaaggtctacggacgcgctggtctaatgaacctggttaacgcaggccccgaacatcttcgtgcagcgatctttacctcggtggtggacgacgcatgcggtcggatattgaacccgatttacgggtctgtcaggttgttatggtccgggagctggcagatatgtcaagcc

SEQ ID NO: 269867 - DNA, 411 bp, Glycine max
  unsure (1)..(411): unsure at all n locations
cccacgcgtncgaagacgacagaaggggaccgcgcgctcattctgagtattctgatcgctcggtgagagagctcgtcgcggaggttgctgaaaaagattgcatcgatgaagttcaacatcccgaattccaccactggattccaaaagaaagttgaaaaccgccgcgaaccttaactgtgaaccattttggaacaaaagattctcacagaaggacttcgaaaacgcactcggtgaggaattaacggactatgtcttcaaaattaccggaggtggtgacaaacaaggatttccagtgaatcagggagtgctgactcctgatcgtgttagacttttgcttcacaggggaactccttgcttccgtggatatggaaggcgtaatggagagcgtaagaaaaagtctgttcgtgggtg

SEQ ID NO: 269868 - DNA, 393 bp, Glycine max
ggactgacatgttctcgaaaaacgtgcactatgggaactgggtgtaacgatggttgcctaacatgaatacttccccatgctatgaatgtgttgtttagcaaacttgggaccctaaagcaccagattgattatcagttgcctgtttcctttattgagattcttaatgaagaagtatgagactggctgcatcccttctccatgagtaaaccagaaactgctaacggacatgcaggaaaaatgacctctactgagaagccaccaatacaaatttgtgagacctcaaatggtgtcatcaccctcgcatgatctactgaaattagtgtatctacactaatagaaatggctgcttgcttgtaacatgtatcattgagcagaccaactgggatcacagat

SEQ ID NO: 269869 - DNA, 378 bp, Glycine max
gacattggttttgtatcgaaatgcgaccaaatgggttcttctcctgtgatggaggacgagcataaaaagttggattctttgcctgaaattgaattatcagagtcagaggaatattccaaggaattggaggtggctgttagagcagtgcaaatggcgtgttccctctgccagagagtgcaggacactttgatttccaacgctgggacaaatcatcgtcaggttcagtccaaggacgacaattctccggttacagttgcagattggagtgttcaagcaattgtcagctggatgttgtcagaatgtttagggagtcaaaatgtctcaattgttgctgaagaagatgttcaaactctttccaaggctaatgcatccgaactg

SEQ ID NO: 269870 - DNA, 439 bp, Glycine max
  unsure (1)..(439): unsure at all n locations
aagactacagacggggacactcaactatttctgactacgttttgctctgcgcctctgcctctctctcggaaatcggtctcttcnattttagggttttgttttgctgctgcctccgttccccccttctcataaacaacgcgttttctcttctgcttcgtatctattctttgcttttggttttggttgattcaaggccttcacagcattcgttgcggcattttaatcgatttatccaagcaggactgaatgaactaatggagtctaaaggtgggaaaaagaactctagtagtagtagtagtaaatcattgttctacgaagctcccctccgatacagcattgaagacgttataccaaacggtggaatcaagaaattcagatctgctgcttactccaactgcgctcgcaaaccttcctgatatccatccagattgatagttca

SEQ ID NO: 269871 - DNA, 429 bp, Glycine max
agaaggggacatatctccattgagagaattaaaaggttagtgaggggatggggtacccaatactctagattttgctgactttaagacttgtgtggactgcattaagggtaagcaggccaacatgtctaagaaaggtgctaacaggagttcaagcatattagaaataattcatactgatatttgttgtccagatatggatgcacgtggtcagaaatattttatcacctttatagatgattattcacgatatatgaatatttatttgcttcataacaaatacgaagcattggatgccttcaaagttgttaaggctgaagttgagaaccaatgtggaaagcaaataaaaatagtgagattagatagaggtggagaatactatggcaggtatactgagaatggacaagcacctggtccctctgtgaagtttct

SEQ ID NO: 269872 - DNA, 420 bp, Glycine max
gtctcttaattggtaatatcaatttattgtgtttgggtcattgcagacctgtgattcatcagttcagctgcggaaggccgggaaagtcactgtcagagaatcaaacttgaaaaaattaggtgctacccattttagaaccggcgtagcaaacgagcatttcgaggtatataaacatcttagtatgagtataattgccaaattaaacattgtttattagcaagggtcaatttatagattgaaaatgacatttgctcataactatttatatcaattgttacattcaaaaatataattggcataaataagtgatggcaagacttgtatttatttgtgttttttaactacactttggagggtaattctctagaagcatgatgtatatagtttattgtttggttttaaagtgacaaagtttgcact

SEQ ID NO: 269873 - DNA, 410 bp, Glycine max
ggtccacccgctcattagatctaacggggactgatccactttgtggttctaactactgaggaaaaatggcgcgtatgaagatcagagagtatgactcatagaggttgatgaaggagcactttaagagactctctggcaaggagtggccgatcaagtctgcacaaattaccgcatcaactgatttcactgagctacaagagatggaaccctggctttcatcttctaaattggttgataaacctgacatgttatttggaaagcgtggcaaaagtggtttggctgccttgaattcggattttgcacaagttgattcatctgtgaaggagcgtcttggaaaagaggttgagatgagtgcatgcgaaggacccataacaactgtcattgttgaacctttcatgccacacaatgaa

SEQ ID NO: 269874 - DNA, 404 bp, Glycine max
ggaacggaaaagcactggcgcaggtaccctgaggcttctcttctcttctcttctctgtcgtgagtcatcatggtgagggttagtgtgctgaacgatgctctgaagagcatgtacaatgctgagaaaaggggaaagcgccaagtcatgattaggccatcctccaaagtcattatcaaattccttttggtgatgcaaaagcacggatacatcggagagtttgagtatgttgatgaccacagggctggtaaaatcgtggttgaattgaacggtagactgaacaagtgtggggttattagtccccgttttgatgtgggcgtcaaagagattgaaggttggactgctaggcttctcccctcaagacagattgggtatattgtattgactacctctgctggcatcatgga

SEQ ID NO: 269875 - DNA, 448 bp, Glycine max
gcgtactcccactcgtcctttcttctagattacgacttaagggggaacggaaaatcactagcgcagcgtcccttaggcggctctgctcttctcttctctgtcgtgagtcatcatggtgagggttagtgtgctgaacgatgctctgaagagcatgtacaatgctgataaaaggggaaagcgccaagtcatgattaggccatcctccaaagtcattatcaaattccttttggtgatgcaaaagcacggatacatcggagagtttgagtatgttgatgaccacagggctggtaaaatcgtggttgaattgaacggtagactgaacaagtgtggggttattagtccccgttttgatgtgggcgtcaaagagattgaaagttggactgctaggcttctcccctcaagacagtttgggtatattgtattgactacctctgctggcatcatggat

SEQ ID NO: 269876 - DNA, 371 bp, Glycine max
gacctcaacgcagcagaagcagcaatgaagaagaagatgatggcaagcacggccatctccctcgtcttcgccgcgctcttcctcttctcctccgtccactctttctacctccctggtgtcgctcctcgcgatttccaaattggtgaccccctctttgtcaaagtgaacaagttatcatctaccaagactcaacttccatatgactactacttcttgaagtattgcaaacccaaaacgatattgaacaatgcagaaaatttgggagaggttcttagaggtgatcgtattgagaattcagtatatacatttcatatgaggaaggaacagtcatgtactggtgtttgtcatgaaacattggatgctgaatctgc

SEQ ID NO: 269877 - DNA, 254 bp, Glycine max
agacgacttaagggggagcacatggaatcattattgtttatgacgtgacagatgaagatagcttcaataatgtgaagcaatggctcagtgaaattggccgctatgccagtgataatgttaacaaacttttggttggaaacaagagtgatctgacagcaaatagagttgtctcatatgacacagctaaggaattcgcagatcaaattggcatacctttcatggaaacaagtccaaaaaatgctacaaatgtggaa

SEQ ID NO: 269878 - DNA, 407 bp, Glycine max
gactcaaacatatgggccccggttccctagtttagctacttacctcaatctttctcatgggaaagtttgccctagccaatatcctcttggtccttctcttgaacttgagcactttgctcaatgttcttgcttgtccctattgcccttacccttctcccaagcctccaaaaaagcctcccgttgtgaaaccaccggttcacaaaccaccaaaaccatgtccaccacccaagtcatctccaaaaccaccccatgtacaccctccctatgttccaaaacctcctcactaccttaaaccaccagttcatccacatccaccccatgtcccaaaacctcatccaaagcctccagtgcatccccatccaccttatgtcccaaaaccaccagttgtgccagttacaccaccatat

SEQ ID NO: 269879 - DNA, 415 bp, Glycine max
tatgctctatcaacacattaaaaagattatatgatatatctgctgtggaagtaggtcaacatttctattggcaaatagggagtttccaagtacatgcccaagtacttattacttcttgggttgtaattgctctcttattggtttcagccattctaattattcgaaatctgcaaaccattcccgctttcggtcagaatttctttgaatatgttcttgaattcattcgagacgtgagcaaaactcaaattggagaagaatatggtccgtgggttccttttattggaactttgtttctatttatttttgtttctaattggtcgggggctcttttaccttggaaaatcatacaattacctcacggggagttagctgcacccacaaatgatataaatactaccgttgctttagctttact

SEQ ID NO: 269880 - DNA, 397 bp, Glycine max
ctatcaacaccttccaaagatgaaaccgttatctcttggggaagaagctcaacatcactatcaccaaatccttattttccaagtacatgcccaaatacttaccacttcttgaactgtaatcactcacttattcccttaagccattcacattattacaaatcatgtaaaccattctctacattcgctcaaaaaacacttgaatatcctctctaattcacaccatacatgaccaaaactcaaatagttgaaaaatatcatccgtgcgttacttctattgaaacttcttttctatttattttacattctaattcgtcgggtgctcttttaccttgtaaaatcatacaattacctaacctttagatagcttcacccacatattatataaatactatccgtt

SEQ ID NO: 269881 - DNA, 398 bp, Glycine max
ggcagtggagagagagtgttagcaccaaaaatgtggaagttaatcttcgtggtccttgcactaattcctcttctctgcacctccctctcgccagagaaaccctcagatcggcgcatcctcgttttgctcgatgacttcgccatcaaatcctctcactctctcttcttcaactccctcaaatctcgcggcttcgatctccaattccacctcgccgacgaccccaaaattgcgctccagagatacggccagtacctctacgacgccctaattctcttttcccccaccattgaacgttttggaggatccattgacgcggctgcaattttggattttgttgattcgggtcatgatttgatcgttgctgctgatagcaatgcatctgattaatcagggaaata

SEQ ID NO: 269882 - DNA, 384 bp, Glycine max
gatccaattggaatgagaagaaccaaaattatacaactagcatatttaagggtccatttgctaagaagaaaagaaataggtacaaattagccttttttttatttttttgtttttgtaagtttatttttttaattttaacacaaacttatgtaaacaaaaatttaaaaaataaacttggaatgaaaaaaattaaaaaaaaatgctaacttacaaattataaaaatatatttaagcgaaaaaaaaacgatggatgaaagtagggaaagggaatgaaaataactaaatggttatctcaaaattctcaacaagcggcacttttcatacttcacgtcattgattatctcaataaaaccttaattaaatcatgggcacacgttttatttt

SEQ ID NO: 269883 - DNA, 424 bp, Glycine max
ggtggctgagagcgaacccaaaactagagctacgttcccttcaaaccttccactcttctctccttttccaatcaagggaataatatttcttagagatattccgaaaccatggctcacgccaatcctatgatttttgttgttggaattctaggtaaccttgtctccttctgttgctttctagcaccagtaccaacattctatcgagtttgtaagaagaaaaccacggaaggtttccaatcacttccttacgtggctgcactcttcacttcaatgctttggatattttatgcttacataaagacgggcgaaatacttctcatcaccattaacgcattcggttgtttcatagagacagtttaccttgtcatctatatcacttattgccccaagaaagctaggttctttaccttcaagatgattttct

SEQ ID NO: 269884 - DNA, 396 bp, Glycine max
ggcaagtcggttggcgttggcacgatgcagagatttggttcgctgcctgaaacctaatggctccgaagcccaaaccggcgccgtcgcagcctgctcctcctcctgccctcgaagatctctttaccacgctcaaccgccacattcaggctttcgcatacgacaatgccgtcaggctcacggatcagattctcgccattgctcccggcgacgaggacgcgctccgatgcaaggtcgtcgcgctgataaaaaatgaccgcgtcgaggacacactctccgccattcggtcctctaagaagcagctcgatgattttcatttcctcaaggcatactgcttatacagacaaaacaagttggatgaagctttggagtctttgaaaagacaagagagcaatgatg

SEQ ID NO: 269885 - DNA, 415 bp, Glycine max
cgcctggatacagcccaacctcacccggatatagcccaacctcgccatcgtatagccctacttcccctagttacaatccacagtcagcaaagtatagtccttcgttagcatattctccaagcagtccgagattgtctccatcaagtccatatagtcccacatcaccgaactatagcccaacgtcgccatcatattccccaacatctccatcttattctccatcaagcccaacatacagtcccagcagcccttataattctggtgtgagcccagactatagcccaagttcgccccaatttagtcccagtacgggttactcaccaagtcaacctggttactcaccatcttcaaccagccagtacactccacaaactagtgacaaggatgatggaggcactcgctgaggtaaactaac

SEQ ID NO: 269886 - DNA, 370 bp, Glycine max
gatagcagcatcatacaaagcattgaattcaaaaacttaagttcattccttgtgttttgctttcttcctcaaaaccaaacatgtcgaacacatgcggcaactgcgactgcgctgacaagactagctgcaccaagggaaacagctatggtgttattgtagagactgagaagagttacatcgagactgttgtcatggatgttccagcagctgagcatgatgggaagtgcaagtgtggcactaactgcacttgcacggactgcacctgtggccattaaggaatatgtatgaaaatgtaattgccatgtgtttggcaatacaaatatccaaataatgtaatcttcgtatgaataaatgtgtgtgctgttatcct

SEQ ID NO: 269887 - DNA, 419 bp, Glycine max
acatacacaaatgccttaaagatagtcaggttggggaatgatgtccgtgctgttgtcaacagtgatcctgaggtcaacggctacttgaaagttgtgtttgtcccaaattacaatgtgtctgtggcagaggtgctgattccaggaagtgagctttctcagcatattagcactgcaggcatggaagcaagtggcacaagcaacatgaaatttgctttaaatgggtgccttataataggtaccttagatggagccaatgtggaaatcagggaggagattggtgaggataattttttcctttttggtgccacagcagaagatgtccctcgactgaggaaggaaagagagaatggactgttcaaacccgatcctcgatttgaagaggcaaagaagtttattaggagtggggtgtttggaagcta

SEQ ID NO: 269888 - DNA, 323 bp, Glycine max
ggttctagtgtgtgattgttggttgttgtaactcgttcggcttcttttgttgttctgtgtttgtgtttgttttttctctcacctgaaaatgtcttgctgcggtggtaactgtggttgcggaagctcctgcaagtgcggcaacggctgcggaggctgcaagatgtacccagacttgagctacactgagtcaaccaccaccgagacctttggcattggaattggcacctgttaaggctaattttaagggtcctgaaatgggtgtgcccgctgagaacgatggctgcaaatgtggaccaaactgttcctgcaacccctgcacttgc

SEQ ID NO: 269889 - DNA, 378 bp, Glycine max
ggaccttgtcacagcctaaaaaccccctcctctttttcagattcggattaggtaaaatagcctacgcattaacagggaagtgctaaccatgctaagaccgtttacgctgcaaatttaactgattactagtcataaatcctatgcatcctctcttcatgccaaagcagatttgtccacttcttcgagaataagaacaggagattcttgctaaactggggattaacaagtagagctaagactgtagccctgtattgattgcagtctccgaaggtaggtgaatgaggacgcataccacagcacccagaataggtaagttaggaaagttaacatcaaaccaccaggcatagcgtgatgccaatgaagacaagcaaaataatg

SEQ ID NO: 269890 - DNA, 430 bp, Glycine max
gaagacgacagaagggggttcaaatgtacgagatcttgtagcacttaccaacgaggccctgtcgattagtattatacaaaaaaaatccatcatagacactaatataattagatctgttcttcatagacaaacttgggatttccgatctcaggtaagatcggttcaggatcatgggatccttttctatcagataggaagggctgtttcacaaaatgtacttctaagtaattgctccatagatcctatatctatctatatgaagaagaaatcatgtgacgggggggattcttatttgtacaaatggtacttcgaacttggaacgagtatgaagaaattaacgatacttctttaccttttgagttgttctgccggatcggtcgctcaagacctttggtctctacccggacctgatgaaaaaaatgggatcaca

SEQ ID NO: 269891 - DNA, 418 bp, Glycine max
ggtacgtcacaattgtgaagcacagaagaatgaggaattctgagagaagcagtgtaagaaagtacaacaaatctgaacttccacgcctgcggtggacacctgaacttcatcaacactttgttgaagctattcaaagtctaggtggatcacacaaggcaactccaaagcgaattttgcagcagatgcgtgtgaaaggactgaggatcgctcacatcaaaagccatcttcagatgtacagaaacatgaaaggacatgccattgttgcaccagtggatcagttgctggaaggaaaggcaaaagatttcaaaatatgctccaatatttgtccaaccgaaaggaatctcaagcgggaacttcatttgttagactacaaagatgggctttcacaaaccagtgaggaaactgattatgatctaaa

SEQ ID NO: 269892 - DNA, 417 bp, Glycine max
ggtttggccgatgttcctttcttgtgagccgaggagaacgaagagtcgttcctgagaagctcgtcgctatgggttctctccctgtgcccgcatttccatccaaacactgccttgacgagagcagccacattgacgaagccaccctctcggcgctattcaagtcgcagcagagccacctgaacttcttcttcgaccacatcgaccactcccaaaccctagccttcacgcgcgcgctcctcaatgccgtcggcaccgtcttcttcaccgtcgtcagaaaatccggcttcgtcgcgcacaagatctcgcagacgctcgtctctctgggcgttcgctccgcgttcctctcgccggtggacgctctccacggcgacattagaatcctcaccaatcgcgatgtgctcatcctcctcagcaagg

SEQ ID NO: 269893 - DNA, 368 bp, Glycine max
tgggttgtcttatgtatatcctcgtctgccgttcttactttattataaccacttctaatatccattttaaaaaaataacatgccccatttaattcattcaacaatacctatattagtgacataagaaacctatttttgatggaaaacgcattaactctcctgaaatctgtgcaacacctccaaaagtcattcttctttcttacgaacacctactaataagcataataactactccttctccttatatatcctgttaccaataaatcctgcacttgattatcaatctcttcttttgggacattaagatatctataggctttccatcagacagatgtgtcattgattatatcgatcttatcatcacattc

SEQ ID NO: 269894 - DNA, 370 bp, Glycine max
gaaggtgcaagagtttgttgtgagctataagcgagtttatcgtgaggagaatatgaagttgtttgttttctttgttgctgcagtagttttggtagcatggccatgccatggcgcaggctaccaaaggttccctctccgaatgaaaactggctatggtgagcgttcttcggaggtaaaatgcgcaagttttaggcttgctgtggaagcacacaacatccgagcctttaaaaccattcctgaagagtgcgttgaaccaacaaaggactacattaatggcgaacaatttagatcagactctaaaacagttaaccaacaagctttcttttatgctagtgaacgcgaagtccatcacaacgacatatttatattc

SEQ ID NO: 269895 - DNA, 445 bp, Glycine max
tccacacatccttacagatgtgataagcgtcttattgttcgctgataccattcgggtagcgtgatcttcctgtgctgtgaacctttcactctctctctaatttcacattcaaatgaataatattccttagagatattacgaaaccattgctcactccaatcctatgatttttgttgctaagaattctaagaaaccttgtctccattccgttgctttctatcaccaataccaacattctatcgagtatgtctgaagaaaaccaccgaatgttttcaatcacttccttacttggctacactcttaactccattgctctgaatattttatgcttacataaagacgaacgatactcttttaatcaccatttacgcattagatttgtttatagacacagattacctcgtcatctatatcacttattgccacaagaaagctaaattcttta

SEQ ID NO: 269896 - DNA, 390 bp, Glycine max
gcagcatgggtgttgttggagtgccagaggggctcccattagcagttactttaacgctggcctactcgatgagaaaaatgatggcagataaagccttggtaaggaggctttctgcctgcgagaccatgggctctgacacaaccatatgcagtgataagactggtacattgactatgaatcagatgactgtggttgatgcttacgcggggggtaagaaaattgatcctcctcacaagttggagtcctatcctatgcttcgctctctgctcattgaaggtgttgcacagaacactaatggcattgtttatgcacctgaaggtgccaatgatgtcgaggtttctggatcaccaacagaaatggcaattttacaatggggaatacagattggga

SEQ ID NO: 269897 - DNA, 394 bp, Glycine max
  unsure (1)..(394): unsure at all n locations
attganggaccgaccgacgcatacgtccactcatcctcccacacgtccttccacttttctattccaataatacaacagggggtgtgagctcattacaagcagggtcacacgtattcaccacataaatttacgccaaataaaattccctacacggatgacttatgaccaactttcatgataaacaatttcttttttctaatcaataatcattaatattattgtcgacaccccactaactcacatactcaataccaacacctatatccatcttacctcttctactacaaacgacctttataagcctaacttcaaacctatcacttttgatacgactatccaaaacaataagtatctcatcccaaatcaccatgactatctcatttactatcttatg

SEQ ID NO: 269898 - DNA, 409 bp, Glycine max
  unsure (1)..(409): unsure at all n locations
cctataccaataattaaggagcgtntgggaactgatggcgaacagttcctcaagtatccaccacctaaagtgatgcaagtcgacaagtctgcatggatgactgatgaagaatttgcaagagaaacaattgctggtttgaatccaaatgtcatcaagattattgaggagttcccactaagtagcaagctagatactcaagcctatggtgatcatacctgtataataacaaaagagcatttggagcctaacttatgtggtctcactgttgagcaggctatccaaaacaagaagttgttcatcttagatcaccatgactatctcattccatatttgaggaaaataaatgcaaataccacaaagacttatgctacaagaaccatatttttcttgaaaaatgatggaactttga

SEQ ID NO: 269899 - DNA, 389 bp, Glycine max
ggcagttcaattccaatatattccattctctctgtggagttccctacctctcccttgaagatgcagatcttcgtcgagaccctcaccggcaagaccatcacccttgaggtggaaagctctgacaccatcgacaacgtcaaggccaagatccaggacaaggaaggaatccccccggaccagcaacgtctcattttcgccggaaagcaacttgaggacggccgtacccttgctgactacaacattcagaaggagagtactcttcacctcgtcctccgtctccgtggtggcatgcagatcttcgttaagacactcaccggcaagaccataaccctagaggttgaaagctccgacaccatcgataacgtcaaggccaagatccaggacaagga

SEQ ID NO: 269900 - DNA, 242 bp, Glycine max
ggcacaagtgagtttgttgatcgagataactagagacagtgtgatgaaaatgaaggtccttgttttcttcgttgctacaattttggtagcatggcaatgccatgcgtacgatatgttccctctccgaatgaacactggctatggtgcccgtactccggaggtgaaatgcgcaagtcggaggcttgctgtggaagcacacaacatctttggttttgagaccattcctgaagagtgcgttgaag

SEQ ID NO: 269901 - DNA, 442 bp, Glycine max
cccaaaccaaaacttttgtgacttacacacaaacacgcactcccttataactatgtctgggtccaacccatgtgccagttatcatctccctccactctgtgtgaaaacaatgagggccatccaaacatgcccccaaccaaaattcatgaggagcctgacatgttcgtccttttgatccccaaacccccaacaacaacaacattcttcgaacaacgccaaaataaccaaaagccccataaaacccatttttccctcgccctcgacgaagtcaaatgcgtagccaacatagcattacccatggtgctaaccgggttactactctattctcgctccgtaatctccatgctcttcctcggtcgcgtcggtgagctcgccttagctggtggctctctcgccattggattcgccaacatcacgggctattctattctctcgggcctcg

SEQ ID NO: 269902 - DNA, 458 bp, Glycine max
  unsure (1)..(458): unsure at all n locations
gggcgacagacgcgtgctcccaaaccaaaacttttgtgacttacacacaaacacgcactcccttataactatgtctgtcttcaatccaggggccagttatcatctccctccactctntgtgaaaacaattaaggccatccaaacatgcccccaaccaaaattcatgaggagcctgacatgttcgtccttttgatccccaaacccccaacaacaacaacattcttctaacaaggccaaaataaccaaaagccccataaaacccatttttccctcgccctcgacgaaatcaaatgcgtagccaacatagcattacccatggtgctaaccgggttactactctattctcgctccgtaatctccatgctcttcctcggtcgcgtcggtgagctcgccttatctggtggctctctcgccattggattcgccaacatcacgggctattctattctctcgggcct

SEQ ID NO: 269903 - DNA, 430 bp, Glycine max
agaagggggatctggggtttgcatatcttccttgcaaatctgtgggctactttggcttggctttctgaattttggtttttcaacgctgagagctgaacaagaagatggggggtggaaatcaagaggcagtcaagcagctgcagaccctgatggaaaatgtggatgatgagcagctgaagaatacattccagattatgcaccacggttatcaaacggaaacgttaatacggtttctcaaagctagggactggagtgttgccaaagcccataaaatgttaattgattgttcgaactggagggtggaaaatgagattgacaatgttttaaggaagcctatccctactgatttgtacaaagccatactggattctgaacttataggaatgtctgggtactcaaaggaggatctacctgtcattgtctgtggtgt

SEQ ID NO: 269904 - DNA, 372 bp, Glycine max
gatagctttttcagaggaacaatggcggtcgggggttcgacgtgcttcttcttcgtgtttgctctttctctccttcttccttttgagatctccgctgaggaatcatcggcgaaagagttcgtactcacattggatcactctaactttcacgacactgtcagcaagcacgatttcatcgtcgtcgagttctacgctccatggtgtggccactgtaacaagcttgctcccgagtatgagaaagctgcttctatcttgagtagtcatgatcctccggctgtttcggctaaaattgatgccaatgaggagatgaacaaagaccttgcatctcaatatgatgttaggggatacccaacaattaagattctgagaaat

SEQ ID NO: 269905 - DNA, 414 bp, Glycine max
  unsure (1)..(414): unsure at all n locations
gaaggcacagttgcaaactacactttggataactacaagtctggctacattcatcattgtcttattgaaggccttgagtataagacaaaatactactatagaattggaagtggtgattctgctcgagaacttttggttcgaaacacctcctaaagttgggccagatactccctacanatttgggatcattggtgatttggggcagacgtttaattctctttcgacccttgagcattatttggagagtggaggagaggctgtgttatatgttggagatctttcttaatctgatgaacatgactacaaagatatgggtttacggtgggatacatggggccgatttgctgaaaggagtgcagcatatcagccatggatgtggaatgtgggaaaccacgaagtagaggttttgcctga

SEQ ID NO: 269906 - DNA, 433 bp, Glycine max
ggttctagtgtatgtgattgttgtgactcgttcgtcttcgtcgttatcttcgtcttttgttgtttgtgtgtttgttttttctctcacctgaaaatgtcttgctgcggtggtaactgtggttgcggaagcgcctgcaagtgcggcaacggctgcggaggctgcaagatgtacccagacttgagctacaccgagtcaaccaccaccgagaccttggtcatgggagtggcaccagttaaggctcaattcgagagtgctgaaatgggtgttcccgctgagaacgatggctgcaaatgtggagctaactgcacctgcaacccctgcacttgcaagtgaagtgttggagagctaaagcttcaagcagaaatggcccttagaaataatgatgaaaactatatgtagtttcaaaacttcaaaattatgtagtatgtattat

SEQ ID NO: 269907 - DNA, 435 bp, Glycine max
gctcttgccatggagacccctcagcagaccgacgatttctcatcgtacctgcactcgtatcaggtcgagtatatgtggttgatgtgaaaacaaatccaagggctccatctttgcacaaagttgtcgagcctgccgatatcatacagaagactggattagcttatccacacacatctcactgccttgcttctggtgatataatgatctcgtgtcttggagataaagatggaaatgctgcaggaaatggatttcttcttcttgattctgagtttaatgtgaagggaaggtgggagaaaccgggtcacagcccactatttgggtatgacttttggtaccaaccacgtcacaataccatgattagcacatcatggggtgctcctagtgcttttacaaaaggttttaacttacagcatctctctgatggattatacggga

SEQ ID NO: 269908 - DNA, 317 bp, Glycine max
ggcacaagtgagtttgttgatcgagataactagagacagtgtgatgaaaatgaaggtccttgttttcttcgttgctacaattttggtagcatggcaatgccatgcgtacgatatgttccctctccgaatgaacactggctatggtgcccgtactccggaggtgaaatgcgcaagttggaagcttgctgtggaagcacacaacatctttggctttgagaccattcctgaagagtgcgttgaagcaacaaaggaatacatccatggcgaacaatatagatcagactccaaaacagttaaccaacaagcttacttttatg

SEQ ID NO: 269909 - DNA, 373 bp, Glycine max
gatggaattttgctacgagaagttcagaatgatattttggtgaagcgctattctgtcttaattcttgatgaggctcatgagaggagcttgaacacagacattctgattgggatgctctcacgtgtaattaaaacccgccaaatgatttattatgaacagaagaagatgatactttctggggaaagagtaagtcctgaaaaaatgatttttccattaaaacttgtgcttatgagtgccaccttgcgagtacaagacttcacttctggaaagttattccatactacttcaccagtgatagaagttcctacaaggcaatttccagtaacagcgtattttgcaaagaaaacagagaaaacagattacattggagaag

SEQ ID NO: 269910 - DNA, 421 bp, Glycine max
gactttagcgaaggatcaaaaaccctgtgaaagtgtgtttgtttggtcgagttgattgaattcgctggcagcttacagctatgatcatcaacaacgccccttttcctctatgattgattcgattcgattgaagtcgattccgtagagagtgagaaatcagatcacaataatcatcgatgggtaatttgttcgtgaagaagcccaaggtaacagacgttgataaagcaatcctcgcactcaagacccagagacgcaaactcgcccaatatcaacaaaagctagatgctgttattgaagcagaaaagcaagctgcacgagacttgattcgtgaaaagaagaaggacagggccttgttagcactaaagaaaaaaaagacacaagaagaattgttgaagcaagttgatgcttggcttataaatgt

SEQ ID NO: 269911 - DNA, 437 bp, Glycine max
  unsure (1)..(437): unsure at all n locations
ggaacctttgcattctattcattcaagattcagggggtgcgttttggaagcagagaccgaaatacttcgagatggcccgtacaaagcaaactgctcgtaagtcaactggaggaaaagctcccaggaagcagcttgcaaccaaggctgcacgtaagtctgcaccaacaactggtggtgtgaagaagcctcatcgttatcgccctggaactgttgctcttcgtgagattaggaaataccagaagagcactgagctcctaatcaggaagcttcctttccagaggttggttcgtgaaattgcccaggatttcaagactgatctgcgtttccagagccatgctgtgcttgcattgcaagaggctgctgaggcataccttgttgggctctttgaggacactaactngtgtgccattcacgccaagcgtgtgactattatgccc

SEQ ID NO: 269912 - DNA, 424 bp, Glycine max
gacacatttttcatgaccgccgtgataacacactaacaccaccacttcatcaactttacttgacaacaatattgtacaactcaaaatctagtgtcatactatctttcttctacttgaaatggctctacaggctgcttctctagttcctgcttctttctcggttcttaaagagggaaagagtggtgtgactctcaaggactccaccttgttcgaacattcattctcagaacctatcaaagctaacttcaactcttctgcattgaagcgcaagagggaattcgaacataagctctgtgctgagagggccgaaacagtggctacagtctgtccatcaattaccaagtctacaccataagggaagaaaacattgaggaagggcagtgttgtgataactgaggcttcatctggactaggcccggacact

SEQ ID NO: 269913 - DNA, 336 bp, Glycine max
gccagagtaccatttgtggacaaagagtttatcagagttgcagggaacattgatcctgaggggaaaatgataaataaggacgaaggtcgaatcgagatatggacactgcagatgacctttgatgatgaagatcatccttatatggctaagcacatcttatataatcataacgaacaatccagtgatggagtaggctatggatagattgatggccttaaagcttatgatgaacaacatgcaactgacagatttatgctgaatactggccacactatcacctgtaacacttacaccgccaatgaactataccactacagaatgatatcagagagggtc

SEQ ID NO: 269914 - DNA, 227 bp, Glycine max
aaatataacaaagaagataacagattacacagcagaggatatatcagccatagtgggcaccaattttgagtccgtttaccatttgtgtcaagttgcacacccacttctaaaagattctgggaatgggagcataggtattaattctttcgtaacaaggttaaaaggctttcctggggtccctggttattcaacctttaaaagagccatggattaattcaacaaaaact

SEQ ID NO: 269915 - DNA, 345 bp, Glycine max
  unsure (1)..(345): unsure at all n locations
aagccatggtggcaaaagatgcaaactcgtgaagagttggttgaagcttccgctaccctcatatggattgcttcagctcttcatgctgctgttaactttggacagtatccatatggaggtttaatcctgaataggccaactattagcaggagattcatgcctgagaaagggtctcctgaatatgatgcgttagctaagaaccctgagaaggagtttttgaagactattactggcaagaaagagaccctcattgaccttacaattatagaaattntatcaaggcactcatctgatgagttctaccttgggcagagagatggcggtgactactggacttctgatgcc

SEQ ID NO: 269916 - DNA, 393 bp, Glycine max
ggcagcaagtgccattttattttgcgctacctcgtcgattctagggtctcaacaatggcgctgttccttctctacgaatccgcttcgggctacagcctgttcgaggttcacggcgtcgatgaaatcggccagaacaccgaagcggttcggaactccgtgtcggacctgaacaggatcggcaaagtcgttaagcttcgctccttcaaccctttcacttacgctctcgatgctctcaaacagtgcaacgccgtctccgaaggcatattaactgatgagctgaggactgtcttggagaccaacttgcctaaagtgaaggaagggtagacgtccaagttcagtttaagtgtgtccgatcctatgattggttcccagatatctgaaatgactaacatt

SEQ ID NO: 269917 - DNA, 411 bp, Glycine max
ggcttcaattggccggttcggcggttcggttccgatccgattggctcgtcttcagtgtgaaattcctcgctcatcgcgttccgaatcttcctctcttgttatccagcaaccggtttggcggcgcggcttttcacacgcgtctcacaattcgtccacgtttttgttttttttgttttttggataacgagaattctagatctcttgaacgcaccgtttttggcggttatagaggatcgggacgcgaggcggatgacggcgaggaggttatcggatgtggtgctggactgcgtgatgccatacatacacgactccaaggaccgcgacgccgtgtcgcaagtgtgcaggcggtggtacgagctcgactcgctcactcgtaaacacgtcactattgcgctgtgttacaccaccacg

SEQ ID NO: 269918 - DNA, 374 bp, Glycine max
gaaggtaagatcgattgcagaaaaggaaaaaatgacgatggacgatgatagctgcatatatgtagggggtcatccctacgacgccaccgacgaaaccattcgcaccgtcttcaatttgtatggcgctatccttgatgctaagataatcaacgacccacgcaccacgggcaagtgctattgatttggtacattcacaaatgctaggtctgcaattgatgccatcaacgacatgaatggcaaaaccattgactgacgtgtggttaaagttaacggggtgaggactcgtggaggcaggtcaaacttttggcagataacgttattactatcataatgattagaggaatggtaattgggatcgcattaagtatctaaac

SEQ ID NO: 269919 - DNA, 443 bp, Glycine max
  unsure (1)..(443): unsure at all n locations
ggttctagtgtgtgattgtttgttggtgtaactggttcttcttcttttgttgttctgtgtttgtgtttgttttttctctcacctgaaaatgtcttgctgcggtggtaactgtggttgcggaagctcctgcaagtgcggcaacggctgcggaggctgcaagatgtacccagacttgagctacactgagtcaaccaccaccgagaccttggtcatgggagtggcacctgttaaggctcaatttgagggtgctgaaatgggtgtgcccgctgagaacgatggctgcaaatgtggaccaaactgctcctgcaacccctgcacttgcaagtgaggtgttgggagagcaagcttcaagcagagatagcccttaattaggaataatgataaactattaatgtgtagctaanaacttatgtattatgtctgtgatggttttcgtgcactct

SEQ ID NO: 269920 - DNA, 414 bp, Glycine max
cgcgacatcttcttttacgtattgaatctcacaattggctaaattagatcttttggtgctctttgaataaataaagctcttttctttattttgtacatatctctgctctcatatctcatcaaccttaacctctcctataccacctacaagctgatcgcatagtacatattgatctatagatcacgaatggacctttcgtgcaatccaatgactatatcattaccacttaacaacccttcacatcttcccaagtagcactatcattgtaccatcacatgtcaatctactgttgaaaacaatgaaatgattttatacccacatgccattttcatgcatccattcacaagtgctaacaatattctagttatctgtgatgcctacactccttctggaaaacctatttccacttacaat

SEQ ID NO: 269921 - DNA, 411 bp, Glycine max
ggcagcgcttgatttgaggccaggcaagcccgactcaaccaccacacctgtcctcgttcacgctacccctttctgctcttcttctacctttcaagttttaaaagtataaagatggcagagacattcctatttacctcagagtcggtgaacgagggacaccctgacaagctctgcgaccaaatctccgatgctgtcctcgacgcttgcctcgagcaggacccagacagcaaagttgcctgcgaaacatgcaccaaaaccaacttggtcatggtcttcggagaaatcacgaccaaagccgacgttgactacgagaagatagtgcgtgacacctgcaggaacatcggcttcgtctcaaatgatgtgggactggatgccgacaactgcaaggtcctcgtcaacattgagcagcag

SEQ ID NO: 269922 - DNA, 417 bp, Glycine max
  unsure (1)..(417): unsure at all n locations
tctcttgcatctttggcccaatcttcgtggagtctgctatccaatgcccttggggggtaggattgcatcagttgccttacccctcttgcgtgcgagaggttcgttcttttcttggtcatgcagggtttataggcgctttatcaaggattttagcaaagtggcccttccactatccaatctactgcaaaagaatgtggagtttgattttgatgaccggtgcaaagaggcttttgattgcctcaagcgtgcagtggctaccacccctatcattcaggcacctgattggacagccccatttgagctaatgtgcgatgcattcaattacgcattgggggttgtccttgctcaaaagattgacaagctatctcaagtgatctactatgctttcagaactttggatgctgnccaagaaaatta

SEQ ID NO: 269923 - DNA, 472 bp, Glycine max
gatcaccttcagttcgtgcagcactcgaagtacgccatttcgcgcgtagcctgcttcgaccagcgtctggaaccagccttgatcagctcgacggtaccgacgacagcacggcctgctcgccgaacaggtcggcttcggtttcttcactgaagttcgtctcgatgatgcctgcacggccgccgtcgttcgctgccgcgtacgacagtgcgatgtcacgtgccgcgcccgacttgttctgcgcaaccgcgatcaggtgcggcacgccgtcaccttgcgagtacgtgccgcgcacggtgtggcccggtgccttcggcgcgatcatgatcacgtcgaggtcggctcgcgggatcacctggccgtagtggacgttgaagccgtgcgcgaatgcaagcgccgcgccctgcttgatgttcgcgtgcacttccttcgcgtacacgtcggcgatctgctcatccggcatcagcatcatcac

SEQ ID NO: 269924 - DNA, 441 bp, Glycine max
agagatattgagcttttacagcctcagacattcattaatgatactatcattgacttttatatcaagtatttgaaaaagaaactcccaactgatgaacagaacaggtttcactttttcaatagcttcttctttcgtaagcttgctgatttagacaaagatccatcaagtgcttgtgatggtagagcagcatttcaacgtgtacgcaaatggacaagaaaagtgaacctttttgaaaaggattatatcttcattcctgtaaactacagtcttcactggagtttaattgtcatttgtcatccgggtgaagtgtcatgcttcaaagatgaagaaattaaggaatcttccaaagtaccttgtatcttgcacatggattccctaaaaggaagtcataaaggtctcaagaatgttttccaaagttacctatgtgaagaatggaaagag

SEQ ID NO: 269925 - DNA, 415 bp, Glycine max
ggaaacaaaacacagtgaaaatcaaggtaaatccgacgagatgtgagtcctctgtaaagaggtgcgtttcttggtgcttggtataaagcgcaagcgtttttgggttcgggaaaagaaggaatgaagagaagggtctagaacaacgcaacactacggattgaatattgaattaaacgacgctcatggctacggtgccggagaagaaagcgaaggaagcattcttcgacgacgaattcgctctggccgttgatctctactctgaagccatacgattggatcccaacgacgcaaatctcttcgcggacagagcccaagcccatatcaaactcaacgctttcgctgaagccgtttccgatgccaacaaagccatccaattaaacccttccttgttcaaggcctatcttcgtaaaggcac

SEQ ID NO: 269926 - DNA, 381 bp, Glycine max
cggagaacaattcaaggctctgtaattgcgtcttcttgcgtcaatatcttccttgggtttagtaagacgtgcggaaatttgacaaggttgtttagtcccataatcattgtacctttggtatgtgtggcgggtcttggcctgtttgccaggggatttccattggtagcaaactgcgtgcagattggattacctatgctcattctactggttataacacaacagtatttgaagcgccttcatcatgctgctcatcaagtacttgacaagtttgctctacttctctgcattgctgttatctgggcatttgctgctatccttactgaggctgttgcatacaatactgctaaaccacatgacccaagtgagctgtcgcacatatcg

SEQ ID NO: 269927 - DNA, 394 bp, Glycine max
  unsure (1)..(394): unsure at all n locations
gaatcaaacacaacacacacacggaacttcagctgngttggaggaaaaacgaaaaaggaaaacaatgggttccgataatcaccagaacttggagttcttgaaggagatcggtttgggctcttccaacattggctcttacattaatggccagtggaaagccactggttcttctgtcacttctgttaatccttctaacaatcagagtatagctcaagtgaccgaagcaactttgcaagattttcgaggaggggttgcaagcttgcagtgaagcagctaagacatggatgactataccggcaccgaagagaggtgagattgtgagacagattggtgaatcattgagggccagattggatcctttgggtatgctggagtctcttgagatgggaaaaat

SEQ ID NO: 269928 - DNA, 322 bp, Glycine max
aggcgtgagaacacctgagagaggacaaccgaagagtgccgctaggatattgcggctgataggctatgacatacaggaatgactgccatggatcctacctatgccgctcagcatatacgcatccgataactgatgcttaatgcttctgctgatatgaaccggcctaattacgatctcattatgaacgtttacaaggaatcatgcactaagagtgacgacataatcatagaacaggtcgtgcttatatacagctcgactataacactggtatgtatatgctcaggaacatactacatgacatgatgctcagagatgcgatgct

SEQ ID NO: 269929 - DNA, 438 bp, Glycine max
tatgtggcatctggcctgagaatgaatgtgtagaggtgagttaacctgtcagtttcacattgcaggtccttctttatggggtaattttgaccgtggtaggagagtatcacatggagcttctttgtatccgtgccacataaatctggtccaaacattaaactatagagaatgtgtcaacaggacattctttctttctgactcttaaggtaaaaatagaaagcatggataaagaaactaaaaatgaagttagaccatatgtggtacataaagtttcctaaaaataatgcaagtgaagcaaaatgagatttactgtaataaaacgatgacaataacatgcatataaaataactgcataagctctctgtcttatgttacttctggacatagttttatacactataatgaagtctctataatagcatattacacccctgatta

SEQ ID NO: 269930 - DNA, 413 bp, Glycine max
caatgaagccgtttctcagactattagtacaaactgcatattctggcaggtatatgatgatacaactgaaggcagaaaagtctgcacttattacagactggattcaattcctgttgtacttgttattgatcccatcactggccaaaagatgcgctcttggattggaatggttcaacctgaaagcttattggaaggtctactagcattccttgatgcagggcctaaggatcatcatattaccatgtctcacaagcgtcctagaggaagttctagcccaccaaaatctaaagccttggtagaatcagatgagaataaagaggagtatgaagaagttcaaagagctctggcagcttctatggagagcatgaaagaatcaactgctatggctggaagagacaataaagatgcagatg

SEQ ID NO: 269931 - DNA, 422 bp, Glycine max
  unsure (1)..(422): unsure at all n locations
gggggatttagagagagagagaacttcaactgagggtgagagtgacacaaatctagggagcactactctaaaagttctattagattcttcaaaacatgaccatgcatcgcgagtcttgggcttttgtcttcggcgttatgggcaacatcatctcctttggagtgttccttgctccattgccaaccttttaccaaatctacaagaagaaatccactgaagggttccagtcacttccttatgttgttgcactgttcagtgcaatgctttggatttactatgctttcgtcaaaagggaagctgccctccttctcattaccattaacacatttggaattgttgtggagtcaatttaccttgcaatcttcctactttatgccccaaggaagcctangcttacaaccatcaagcttcttctcttactg

SEQ ID NO: 269932 - DNA, 420 bp, Glycine max
ggcccccctctctctcaccctcctcttcacacatgttctgtgcgctctaacaaacattctcgttcacactttcagattgtgtgaagatgggggcgggtggccgaactgatgttcctcctgccaacaggaagtcagaggttgaccctttgaagcgggtgccatttgaaaaacctccatttagtctcagccaaatcaagaaggtcattccacctcactgtttccagcgttctgttttccgctcattctcctatgttgtttacgacctcaccatagccttctgcctctattatgttgccacccattacttccacctccttcccagccctctctctttcttggcatggccaatctactgggctgtccaaggttgcatccttactggagtttgggtcattgcccatgagtgtggccaccatgcat

SEQ ID NO: 269933 - DNA, 405 bp, Glycine max
gattcttctaactggtaagcaggtgatcctcctcttgctgctctctgtgttctttgctgtaatttctaatttttgaggatccacagaatggaactgttggttctcgatggtatcatcagtaccctgattcaagtcatactctgacctgagaaacacgttcaactttcaaaggcagatatcaagcagctttttgcgacttgcatagatatctttactatacagcccaatctgttactactggatccaccaattaagatatgtggagacattcatggtctatattctgaccttctgagactttatgagcatggtggattgcctactatgtccaactacttatactcaggcgattatatcgaccgtcgaaagcacatctctgacactatatgtattcttttggcatac

SEQ ID NO: 269934 - DNA, 417 bp, Glycine max
aactttctttcgagcataatgatccatgcaactcggccatttatagtaaacgagtggattcaaacgaagattgaaggatatgaggtttctggcacagttgagcatgtaggctggtggtcaccaaccatcatcagaggtgatgatcgtgaggcagttcatattcctaaccacaagtttacagtaaatgttgtgagaaatctgagccagaaatctcattggcgtatcaagagttacattgctatcagtcacttggatgttaacaaagttaataatattgtagctgatatgcgcaaggttttgtctaaaaatcctcaagtagagcagcaaaaattacacagaagggtctttttggagaatgtcaatcctgaaaatcaggctcttatgatattaatatcttgctttgtgaaaacttctcat

SEQ ID NO: 269935 - DNA, 340 bp, Glycine max
ggtgcagttcaaagcgaagaaagattcgaaacgaagaatgaaagcgttgtgaagaatggcggaagagggacaagtgatcggtgtccacagcgtagaggagtggaaggaacatctcaagatgggagaagagtccaagaaattgattgtggtggattttactgcttgttggtgcggtccatgccgtttcattgccccaattcttgcagagtttgctaaaaagttgccgaatgtcaccttcctcaaggtggatgtcgatgaattggagactgtttccaaggagtggggaattgaggctatgccaaccttcctgttcttgaaagaaggcaagctggtggacaag

SEQ ID NO: 269936 - DNA, 283 bp, Glycine max
caattcgagggaggatgtattgagagggctgatgaggcgatgtgcgtatttgaaatatgttgagggaagattgggtgatcgtgtcctttatgcagatgagattttgaaagatggattttgcttgaacatgattgacacccctctttgccctctcaaggttgtcacaaacctgcaggatgctgtgtgggacgcatatattgtgattaatggcttgccatcaacggaaacccgtgaggtatttgaagaaattagcatgtactggaaagagagaatcacagtgcct

SEQ ID NO: 269937 - DNA, 446 bp, Glycine max
agaagttaaaagctactctacttcagtttaacttcaaatccaggtgtgacccttcgttattcatctacactgattccaataacactggtttatatgctactgtatgttgatgacatcattgtcactggaaacaacttctccatcaaatcactagttactaaactcaattctgagttttctcttaaggacctaggaagtcttgactatttcttgggaattgaagtcagatctcagcccaatggtgctcttattctaactcagtccaagtacattagggatttgttgagtaaaacaaagatggacgaagctaatctcatctcttctccaatggttagtggttgcaaattgactaagtcagggtatgaatctttccctgatcccacacactacaggtctgttgtgggagccttgcagtattcaactattactagacctgagataagttt

SEQ ID NO: 269938 - DNA, 216 bp, Glycine max
gtcaaacttttattggctcatatttcatacctcgtcagccatatactaataagggcctactaatctacgatatgcttctattacttgcaacaattcgtacatccagacatttcctacatacagtaacctttcacactgctgcttctttctcgctcattctagagacaactctaagaactgaaacatcttattattcagatgaaaagaaagctaatg

SEQ ID NO: 269939 - DNA, 330 bp, Glycine max
ttttctaacgtatgtcattgatattaccgccgcttcttaatcacgggctgcttcttttgttctttgtctgtttgttttttctctcacctgaaaatctcttgctgcggtgataactgtcgttgcagcagcccctttttttctccaactgcttcccatgctgcaatatgtacccacacttgatctacacctagtcaaccaccaccgacaccttggtcattgtaatggcaccacctaatgctcaattccaaaagtctcaaatgggtgttccccctcgaaaccatggctgcaaatttttatcttacttcaccttcaacccctgaactttcaaat

SEQ ID NO: 269940 - DNA, 377 bp, Glycine max
ggtttctttgagactaatctcagaaaccttaagagtgttttttccagcgaccgtggcattaacgcttacacactctggcggtcaacgattcgcgcgtggagacaattggtacggacagtaacaagtaacaaagtagttcctatgtagctgattatggcggagatttcaagttcagggtacaaggaatatgcggctggcttgttcgctggtgttgccgctgtagccactggccacccctttgacaccgtcaaggtgatgctgcaaaagcacaatgcagaagcacataagattcagtataaaaatggatggcattgcactgctaggatattgaagactgaaggaatcaaagggctttatagaggagcaacatcatcttt

SEQ ID NO: 269941 - DNA, 62 bp, Glycine max
  unsure (1)..(62): unsure at all n locations
aaaaanaaaanaagaaacaaagaaaaaaagaaaagaaaaaaaagaagaaagagaagagggag

SEQ ID NO: 269942 - DNA, 416 bp, Glycine max
agaaggggatggcaactctaaccccaatgtgttactcatgttcgaacggccatattcaatggtcggcaccatcatcatggctatcaactaaaactaaaaccctcagttttgaatttcagacctcataagcaaaatagaagcatcagaatccgatcaccctctgcctccaacccgaaccagaatgagtcttcttctcccggattatactctgccaagaaattccacctcaccgcatccaacgtcgacctcgttctcgacgatgttcgcccttacctcatcgccgacagcggcaacctggacctggtgtccgtggaagaccgcgtggtatctctccgtcttcaacgaacatgcgagagctgcctccacttcaccaccaccatgaccatggggatcgagcgcgttcttaaagaaaaatt

SEQ ID NO: 269943 - DNA, 406 bp, Glycine max
ggacaccaacaccaaaacaaacccactaagatggcttcctttgtatccttgctagtgctgcttcttgcagcccttatcctcatgcctcaagggcttgctacttactacaaaccaattaagaagccaccagtgtacaagcctccagtgtacaagccaccagtgtacaaaccaccggtttataagccaaaaccaccggtttacaagccgaaaccaccggtttacaagccaccatataagaagccaccatacaagaaaccaccttatggaaagtaccctccagtagaggacaacacccatgcctaaagcaagcaatgaggtctattatctacttaataaataagaggaactgctttgtgttttctagcattgtgatttacaacttcgtagcaatgcatattcttgactc

SEQ ID NO: 269944 - DNA, 385 bp, Glycine max
gggcagcgcttgatttgagggcaggcaagccccactcaaccaccacacctctcctcgttcacgctacccctttctgctcttcttctacctttcaagttttaaaagtataaagatggcagagacattcctatttacctcagagtcggtgaacgagggacaccctgacaagctctgcgaccaaatctccgatgctgtcctcgacgcttgcctcgagcaggacccagacagcaaagttgcctgcgaaacatgcaccaaaaccaacttggtcatggtcttcggagaaatcacgaccaaggccaacgttgactacgagaagatagtgcgtgacacctgcaggaacatcggcttcgtctcaaatgatgtgggactggatgccgacaactgc

SEQ ID NO: 269945 - DNA, 405 bp, Glycine max
gatagcagcatcatacaaagcattgaattcaaaaacgaggttcatttcttgtgctttgctttattcctcaaaaccaaacatgtcgaacacatgcggcaactgtgactgcgctgacaagactaactgcaccaagggaaacagctatggtgttatagtagagactgagaagagctacatcgagactgttgacatggatgttccagcagctgagcatgatgggaagtgcaagtgtggcactaactgcacttgcacggactgcacttgtggccattaaggaatatgtatgaaaatgtaattgccatgtgtttggcaatacaaatctccaaataatgtaatcttcgtatgaataaatgtgtgctgttatcctacttcaaggtctgtgtagtcatgcagtctgaatcatgt

SEQ ID NO: 269946 - DNA, 417 bp, Glycine max
agaaggggataggtagctactcactagcattttagttcccacgattcgtatcccttcctgggatgaagactctccctcaaacaccagggaaaaccatcccagatgcttgcgactacaaaggtcacccagcagagaggtccaaaaccggtggttggactgctgcggccatgattttaggagtggaagcatgtgagaggttaacgacaatgggtgttgccgtgaatttggtgacatatttgacgggtacgatgcatttgggcagtgctaattctgccaacacggtcaccaacttcatgggaacctctttcatgctctgtttgttcggtggttttgtagctgacacttttatcggcagatacctcactattgccatcttcgcgactgttcaaaccactggtgtgacaatattaacaatat

SEQ ID NO: 269947 - DNA, 392 bp, Glycine max
gagagtgcgcagagagcatggcaataataccacattaccacttccaccctcaccttgctgagcctatccctatggcggccataacccgactcgaaaagcgcacctcccccctatcttccatggcgcgtgagttatcatataacgcgcctacgagcaacgaggagacgaatgttcagagcatgtttctgggttgccctggcgtccgaaaatgcacctataccaaccgactatacaaccttctcagagatcctcacatagccactggcgaacttgttcgccacgaactaccatccaacggacccctttcttcccaactatcagaaattgctaatcaaggcaaattggtgtcagatgaaatcataataagcttattgccaaagacgctggctgat

SEQ ID NO: 269948 - DNA, 412 bp, Glycine max
ccacataaggggacacacttaacaatcaatcaaaacattcccgggcgcaataatatacacatgggcaattaagctccttctcctatagccatggctctttctaagcttataattgcttcccttcttgcgtcgcttctccttcttcatttcgttgatgctgatcaatcggcacatgcacaaacgcaggggtctcttcttcagcagatagattgtaacggagcatgtgctgcgaggtgccgtttatcatctcgtccacgcctctgccaaagagcttgtggaacttgttgtagacgctgtaactgcgtgccacctggcactgctggaaaccaaaaaatgagtccctgctatgcaagttttactactcattggggcaaacgcaaatgcccttagacttaattggaccactatccta

SEQ ID NO: 269949 - DNA, 366 bp, Glycine max
ggcgtcggaaggaagagaagatgagggagaatttgatggagaaagtgagcgcactgggagagcgcctgaaaatcggaggcgtggaagtggggagaaagatgagcgaggggatgagctccatgagtttcaagctcaaggagttcttccagcctgggcccaatcaggccgacaagcttgtggaggacgctacttccgaggccctggacgagcccgaatgggccctcaatctcgatctctgcgacctcgtcaacaccgacaagctcaactgcgtcgaactcgtccgcggaatcaagaagcggatcattctcaagagccctagggttcagtacctcgcccttgtcctcctcgaaaccctagtcaagaact

SEQ ID NO: 269950 - DNA, 398 bp, Glycine max
  unsure (1)..(398): unsure at all n locations
aggccatttttttctatatcatcccacggctgtattctcaccagggacggggggccatggacatcngaaagaacaagcgcatctccaaggggaagaagggtggcaagaagaaggcagctgatccctttgccaagaatgattggtatgacattaaagctccttctgtttttcaagtgaaaaatgttggcaaaaccctcgtctctcgtactcagggtaccaagattgcttctgaaggactcaagcatagagtgtttgaggtctccttggctgatcttcaaggggatgaagatcatgcattcaagaagattaggttgagagcttaagatgtgcaacggaagaatgttctgacaaatttcttgggaatggatttcacaacagacaatctgaagtcattggta

SEQ ID NO: 269951 - DNA, 402 bp, Glycine max
tatcttaaagattttattgacagtaacaacactttaatatttataaataaaaaattaaatatcatactcattatatatttataaataaaaaattaaatatcatactcattataaaaaaaagtatacacatatctcaagtcaaatctcttggtgatataacaataaaagtcaaccaaatactcctgttttagtttttttttttatatttggatttctctctattttgttacaccacatcatcacttatattggttactgatctgatctctcatatagtcatattttagtatctgagttgtatcataaccaatatttactccaaaacaaaatatctttccgttcatatatgcgtcaagtcaaaagctttatatatgtccgtttagtgaagagcaaactggatta

SEQ ID NO: 269952 - DNA, 153 bp, Glycine max
agcacaggcttatctttgcgggtaacatctagaagagggacgaaccctttcaaattataacatccagaaggaatctaccctgcacttggatttgaagcttcgttgtggcatgcaaatctttgttaatactttgacctgaaaaacaataacttt

SEQ ID NO: 269953 - DNA, 391 bp, Glycine max
atcctgcaattgcaattcttggtatctgctgcggcgggcagttatccagagtgaggcccactgtttcggagctttttggtttgaaagacttcggtctattgagcaacttcatggctttggggaacccacttggtgcatttcttttctctgctcttctagcaggacatatatacgacaatgaggcagcaaaacaacacggtgtaggcctcattgcttcaagtgttgcatgcatgggtccaaattgtttcaagctaacctttttgactctggctggtgtgtgtgttgcgggaaccatctccagcattatcttgaccgtaagaattaagcccgtttaccaaatgctttatgccgggggtgcttttaagctacctcaaacttcaggccagtaaaa

SEQ ID NO: 269954 - DNA, 389 bp, Glycine max
gagaacgatggctgcaaatgtggaccaaactggtcctgcaacccctgcacttgcaagtgaggtgttgggagagcaagcttcaagcagagatagcccttaattaggaataatgataaactattaatgtgtagctaaaaacttatgtattatgtctgtgatggttttcgtgcactctggtgttttgtgttaaacaaacatccttagaataaagtggtcatgtcttgcctttcagcaagttcaagtgttttggacttgtgatgggtgtgttaagctcatgggtgcttcttttttttttttttttaatggttgggaattggtcgcttctgtattaagttcggctaatctgaattatgaatctctggttataatattaaatactattactggat

SEQ ID NO: 269955 - DNA, 381 bp, Glycine max
gggaaacactcccctttgccgctgttgttgggggtgcaccaccgaacagctggccctgtaaatcgcgtttcgtttgtgcaaggttttaaaagatggctgatgctgaggacattcaacctcttgttgttgataatggaactggaatggtcaaggctggttttgcaggtgatgatgctcctagggccgcgttccccagcattattgggagaccacgccatactggtgtaatggttgggatgggtcataaagatgcttacgtgggtgatgaatcccaatcaaaaaggggtatactcaccttgaagtatcctattaagcatggcatattcagcaacctgggacgatattggagaagatttggcatcacacattttacaatgagct

SEQ ID NO: 269956 - DNA, 373 bp, Glycine max
ggcagagcaaagcaaagcagagccgacaacaagaagaacaaaaccggcatcaacaaccacaagaagaagaagcttgcaaattagaagaatcttcagttgaaagggaagaacacacaagaacaaagagaggaagaaacgcgaatgaagggagaattagagttgccaccagggttcagatttcaccccactgatgaagaattggtgaatcactacttgtgtaggaagtgcgcgggtcaaccaatcgcggttcccatcatcaaagaggtcgatttgtacaagtttgatccatggcagcttccagaaattggctactacggcgagaaagaatggtacttcttttctcctcgggatcggaaatacccgaacggttcac

SEQ ID NO: 269957 - DNA, 128 bp, Glycine max
  unsure (1)..(128): unsure at all n locations
aaaaaacaaaaagcnaaaaacaagaaaaaaggggaagataaaaggagggaaaaagaaaaacaaaaggggggtgatagaaaaaggggggggggaccaacagatttgtgcttgaagcctttacagagggc

SEQ ID NO: 269958 - DNA, 409 bp, Glycine max
agaaggggtggaaagagttttagactaaggtggcttaattatcttagggccaacattaagcgtgggcggtgctctgaagcagaagataaaataatctgtagcctctttgctagcattggaagcaggtggtccataatagcatctcagttgccggggaggactgacaatgatatcaagaactattggaacaccaagcttaagaagaaaatgatggccatgaatccttcactccaaaagaagcctcaacaaattacccttttatccatccttcaaagttcagcatattcatcaccatcgtcattcagagacagtaacaacatctcatactaccaccctcacgggtccttttcctactcgtcaaatcttctgagtggtaacaacacttctgcttctgcttattccttctttt

SEQ ID NO: 269959 - DNA, 403 bp, Glycine max
gaaccaaaacacgttgtttcaattattctattcgcgcactccctgaggagtgaagagaatctctctcctttttataaacccataaatttagggcgcgctttttcccggcctcccctcgccaccgcatctccatccatctccgccacgtcgcctcctctctctctcgcttttcgtagttatacttcttctctcgttcctagaaatgagcttctcaacatgcgcagagctgtcgcgttgtttcgccgcagcatcggcgaaacctaattccggtcagtcaaacggcacttccacaacaagcctcagttttctcactccaatcggtcggtacggcgccggttcatcagtatcgaggtcgaataagaccaacagaatagtcgcggaagctactcaaggtcttacttac

SEQ ID NO: 269960 - DNA, 334 bp, Glycine max
gactattccctcctccttcctttgcgtctttcgcttttgctttctaggtttttttttttttttcttgctctttctctgtgtcgatggcgggaaaaggagggaaggggcttgtggccggaaaaaccacggcagcgaacaaggacaaagacaaggataagaaaaggcctgtctctcgttcatcccgtgctgggatccagtttcctgtgggtcgtatccataggcagttgaagcaaagggtgcaagcaaatggacgtgtgggggcgactgctgctgtgtacttggcctccattctggaatatctgactgctgaagtgctggagctggcggggaatgc

SEQ ID NO: 269961 - DNA, 433 bp, Glycine max
gaccaaacctcaatttataaacactctagaataagcctgagggcaagattcacacactcactcctgtcacttccctacactcctgcatggccgaaccactatatctagaggaagattacaaaccaaaagattatacccctgaagccaaaagtctatccttccttgcctctattgttgcccttttcatctacatatgtgtcttctataccttcaacctatctacctattctatcctcaacaacaacatcttttggtttttcatgtccaataccctcaatctcatcattgctgctgactatggagcatcctcttcaaacaaacataaacaagatctctatgaagagtatgtgcgacatagtcaagcaagaaactgtgactcgtcatcatacgtgcccaaatatgatcatgaacaattttataaaaaatgcattta

SEQ ID NO: 269962 - DNA, 423 bp, Glycine max
ggtggcagagagcgaacccaaaacgagaggtaccttcccttcaaaccttccactcttctctccttttccaatcaagggaataatatttcttagagatattccgaaaccatggctcacgccaatcctatgatttttgttgttggaattctaggtaaccttgtctccttctgttgctttctagcaccagtaccaacattctatcgagtttgtaagaagaaaaccacggaaggtttccaatcacttccttacgtggctgcactcttcacttcaatgctttggatattttatgcttacataaagacgggcgaaatacttctcatcaccattaacgcattcggttgtttcatagagacagtttaccttgtcatctatatcacttattgccccaagaaagctaagttctttaccttcaagatgattttc

SEQ ID NO: 269963 - DNA, 319 bp, Glycine max
gaaccaacacacgctgtttcaattattctatgcgcgcactccctgatgagtgaagagaatctctctcctttttataaacccataaatttagggcgcgctttttcccggcctcccctcgccaccgcatgtacatacatcttcgacacgtcgcctcctctctctctcgcttttcgaaaatatacttcttctctcgctcctagaaaggagcttctcaacatgcgcagagcttgcgcgttgattcgccgcaacatcggcgaaacctaattgcggccagtcaaacggcactttcacaacaagcctcaattttgtcactccaatc

SEQ ID NO: 269964 - DNA, 368 bp, Glycine max
gttggactgagtcatctagtgctaatgtgagaggcccaccggcacttcctttcaaattgcctcagttggatgaaaaacttagagctggttataagcttaccactgctgggaaattcactgaagctcttaagacatttgttaatattcttcatacaattcctttgattgttgttgagtcaaggagggaagtggatgatgtgaaggaactaattgtcatagtcaaagagtatgttttgggcatgcagatggagctgaagaggagggaagttaaggacaatatagtacggcagcaggagcttgcagcatatttcactcactgcaaccttcagacacctcacttgaggttagctttgcagaatgcaatgact

SEQ ID NO: 269965 - DNA, 431 bp, Glycine max
ggagagagagagagaaacaaagcagcacccatttggatcctctcttctcttctttgatctccgttaccctttttgttttctcaacagagagagagagagagaatctttcgaagttcgtttgcgtgtgttgtgtggtcagtcaccgatggcagcaccacctgcgagggcacgtgccgattacgattacctcatcaagcttcttcttattggcgatagcggtgtgggaaagagttgtctgcttttgcgattttctgatggttccttcacaaccagttttatcaccaccattggcattgattttaagataagaaccattgaacttgatggcaaacgcattaagttacaaatctgggatacagctggtcaggagcgatttcgaactattaccacagcttattaccgtggagccatgggtatcttgctcggttatg

SEQ ID NO: 269966 - DNA, 389 bp, Glycine max
acacacaccacaatcatggaagttgatagtaggtttgggaacactggcctcctccttgtggccacaatccttgtggtcaagctcatctcaaccttcatagtgcccaaatccagaaagagggtacccccaattgtgaaggggtggcccttaattggaggactcatccgtttcctcaaaggtccaatctttatgctccgtgacgagtaccctaagcttggaagtgtcttcactctcaaactcttccacaagaacatcaccttcctcattggccctgaggtttctgcacacttcttcaaggcctcagagactgatctcagccagcaagaggtgtatcagttcaatgtgccaacttttggacctggggtggtctttgatgttgattactctgt

SEQ ID NO: 269967 - DNA, 440 bp, Glycine max
  unsure (1)..(440): unsure at all n locations
aagaagaaaccagcagcagagaagaaggaggaagttgaagtgacagaagggaagaaggaagctgaagtcatagaagagaagaaggaagtggaagtgacggaagagaagaaggaaattgaagtaacagaagagaagaaggaagctgaagtcatagaagagaagaaggaagtggaagtgacggaagagaagaaggaaattgaagtaacagaagagaagaaggaagcagaagtgaaagaagagaagaaggaaggggaagtgacggaagagaagaaggaagttgaagtgacggaagagaagaaggaagcggaagtgatagtagaagagaagaaggaagttgaagtgacggaagagaagaaggaagtggaagtgaccgaaggaaagaaagaagtggaagtgatcgaagagaagaangggaacagagtgacagaagaaaagaaaga

SEQ ID NO: 269968 - DNA, 385 bp, Glycine max
gaccgttccattgctgagcaacttctgctacttcctactccaaccgcacttctgctccgcaattatcatgggcaaggtcaagatcggaatcaacggatttggaagaattggccgtttggtagccagagtggctctgcagagagacgatgttgaactcgttgccgttaacgaccctttcatcaccaccgattacatgacatacatgtttaaatacgacagtgttcatggacactggaagcatcacgatgtcaccgttaaggacgagaagacccttctcttcggtgacaagccagtcactatttttggacacagaaaccctgaagagatcccatgggggtcaactggagctgacatcattgttgagtccaccggagttttcaccgat

SEQ ID NO: 269969 - DNA, 389 bp, Glycine max
gagaagaaaaaataaataagcttgggctataagctacaattagcttatgcataagttgaaattatttttttagagaagataaaatcatttagcttctccaaaaagctgattctaatttatacataagttaattttggtttatgaaggagtttatttcatttttttttgcaagtacgtgcttatagagaagtttattcaaatatggccacattaacattcatatcttgcagtaaaatgatgtttttctttctaaccaatcttatgatgctttataggttttgtggaggcaaacagaagatgctgtggtaccgggactgtagagacaacatccttgttgtgtaatccaaaatcaccaggaacttgttctaatgccacacagtatgtgtttt

SEQ ID NO: 269970 - DNA, 363 bp, Glycine max
ctaagaaattatacaatgtaccaggaactgtgtgctgcccttgagaaaatgttcagctgtttcactctaggtcaatgtggttcccatggagctccaggaagagaaatgttgagtgagagcaagctgaaggacctcctgcatggttcagaatatgtactcacttatgaagataaagatggtgactggatgcttgtcggagatgtaccatgggatatgttcattgacacatgcaaaagactgaaaatcatgaagggttctgatgccattggcttaactcccaaggccatggaaaaatccaagagcaagtgctagttggtattggaacatgaagagtgtggaaagagaacttatgatataaatgac

SEQ ID NO: 269971 - DNA, 299 bp, Glycine max
cactcttccattgttgctttcaacacttgtgttcttctccactttcacacatgccttctcttcttctgtgtttccggaattgaatcctattaaacctaggcactcacgtcttctcaggagtgctgtgcaacgagaaactcctacatctcagttgtctgaactatggtcacctctggaaagccaaggatggaaaccttatgttgaatcaaataagccaacattaccagagaagtcagagggatatatccaggtctttcttgatggaggttttgaccaacaaaagatggggatatgtgatg

SEQ ID NO: 269972 - DNA, 327 bp, Glycine max
ggttctagtgtgtgattgtttgttgttgtaactcggtcttcttcttttgttgttctgtgtttgtgtttgttttttctctcacctgaaaatgtcttgctgcggtggtaactgtggttgcggaagctcctgcaagtgcggcaacggctgcggaggctgcaagatgtacccagacttgagctacactgagtcaaccaccaccgagaccttggtcatgggagtggcacctgttaaggctcaatttgagggtgctgaaatgggtgtgcccgctgagaacgatggctgcaaatgtggaccaaactgctcctgcaacccctgcacttgcaagtg

SEQ ID NO: 269973 - DNA, 393 bp, Glycine max
  unsure (1)..(393): unsure at all n locations
cccacgcttgcttacngataaaacaacacaacttaatttattcatccaacatcacacacatctggtacgtttactttcttacaatcaaaaccaacaacaactactacaacttatcacaaacactaccattatcaaagacacacagcttactaatattgcaacgatcagaagcaaaccgactaatacatctaccttctccatgctactattgtcacctatgtacacaccaaaactactgctttagcttacagacataacattcataaccaacattataccaccaatgcctactccattaacactgantaacaccattctacttgctgctacgaatgtcacactaataaacatcatataactacttgtgcccttaatgataacaccaataaacat

SEQ ID NO: 269974 - DNA, 418 bp, Glycine max
gatgatgaaagcggcagcatcaccctttaacctaaagtattaaaatgttggtttattattattactcatagctcaaaacccaattttaccctaccaattaaggtctctcatacagtagtattttatttgcactacgtactggctactttatttatttaagcagaagcaggtgagtgagtgagtgagcaagagtgaagagcgaagagaatggctcccaagggtttaatctttttggctgtgttatgcttctcagcactgtcactgagtcgttgtcttgcggaggataatggacttgttatgaacttctacaaggaatcatgccctcaggctgaagacatcatcaaagaacaagtcaagcttctctacaagcgccacaagaacactgctttctcctggctcagaaacatcttccatgact

SEQ ID NO: 269975 - DNA, 412 bp, Glycine max
  unsure (1)..(412): unsure at all n locations
gatcatccaacatcacacacaactgctacgggtacttccttacaatcaaaaccaacaacaactatggcaagttatcaaaagcactacgatgatcagggtcgcaaggttgacgagtatggcaacgttgagaagcaaaccgacgaatacggcaaccctgttcatgctgctagtgtcacctatgtagccaccagaactgctgctggtggttacagtgatgacattaataagcaacatgataccaccaatgcctacggcgtagacactggtagacagcattctagtggtggctacgatggtgacactaataaacatcatggaactactggtggctataatgatgacaccaatagacatcatggaactaccggtgtctatggtatagacaccgataggcaacaacantggactactg

SEQ ID NO: 269976 - DNA, 296 bp, Glycine max
gacatatgatcttgagtctgccgcatttgccatatcacgacggttcctaccaattggtccattgattgcaagtgacagcaacaaaagttcactctggcaaggagacacaactttcttagactggttagatcagcagccacctcaatcagttatatatgttgcctttggtagtttggcagtaattgatcacaaccaacttaaggaattagctctaggactcaatttccttgacaagccttttctttgggttgtacggccgagtaatgataatgaggcaaacaatgcatgctctgatg

SEQ ID NO: 269977 - DNA, 410 bp, Glycine max
gagagtggtggagtgtgcagaagagcgtcgcggtcgcgaccctaatcagaagaagcgcagcttcaagcgagtgacagccaccagccatgggtcgtatgcacagccgcggtaagggtatatcctcttctgctttgccctacaaaaggacacctcctagctggctcaagatctcttcgcaagatgtcgaagaaaatatctgcaagtttgcgaagaaaggtttgaccccgtctcagattggtgtcattctcagagattctcacggtattgctcaggtcaatagcgtcactggcagcaaaatccttcgcatcctcaaagctcacggacttgcgcctgaaattccagaggacctgtaccatttgattaagaaagcagtttcaattaagaagcatcttgagaggaacaggaaggac

SEQ ID NO: 269978 - DNA, 440 bp, Glycine max
gggaactgtttataatttcattttgactctctctcgctctgattgcttccttttcccttttattttgctctcttctctgcacaacaattccttctcattccagatattccaaccatcgaccgatctcaattctcaaccttaacctctcagaatgtcttacgcttatctcttcaaatacatcatcatcggtgacaccggagttgggaagtcttgtcttctacttcaattcacagacaagcgctttcagcccgtccatgacttgaccatcggtgttgaatttggtgccaggatgatcacaattgataacaagccaatcaagttgcaaatatgggatacggctggtcaagaatcattcagatctattacaaggtcttattatagaggggctgcaggtgcactgctttgttatgatataaccaggagggagacatttaatcact

SEQ ID NO: 269979 - DNA, 443 bp, Glycine max
taaataagacaattgacgagcttaatgcagagttggaccgtattggcaggccaattgctgtggactcaggggcccaactttacactattttagagatgtgtcgtgcatttgacaaagtgtttagagaacacctggatggaggacgtcctggtggggaccggatatatggagtttttgatcaccaattaccggctgctttaaaaaagctcccttttgatcgccatctttctttaaaaaatgtccagagagttgtcactgaagctgatgggtatcagccccatctgattgctccagagcagggttatagaagactcattgaagggtcaattggctatttcaaaggcccagctgaagcctccgtggatgctgtccactttgttttaaaagaacttgtgcggaagtcaatttcagaaactgaggaactaaaaagatttcccacactt

SEQ ID NO: 269980 - DNA, 474 bp, Glycine max
  unsure (1)..(474): unsure at all n locations
aattcgagcggccgctnnnnnnnnnntnnnnttttttttttttttgcagtacaatgaaatcctgggcgaaggagcttccaagacagtatatagagcatttgatgagtaccaagggattgaagttgcttggaatcaggttaaattgtatgattttctgcagagccctgaagatctcgagaggctttactgtgaagttcatctcctcaagacgttgaagcacagaagcataatgaaattttacacttcttgggttgatacagcgaacagaaatatcaactttgtgactgaaatgttcacttctggtacccttagacagtgagttccctccattttcaaccttttgccactcctctatattatatttgtatgatcattatcctttttgtgcttttgagaagntttgntattttttcttcttttatttattttaattatcacaatagatataggcaaaagcacaagagagttaacatt

SEQ ID NO: 269981 - DNA, 391 bp, Glycine max
acgacagaagggtgaaggagatatattagttacatttatctatgaaaaatcgagatcgggtgagataacacaaggtcttccaaaagtagaacaggtattagaagttcgttcgattgattcaatatcgatgaacctagaaaagagagttgatacttggaatgggcgtataacaaaaattcttggcattccttggggattcttgattggtgctgagctaacgatagcgcaaagtcgtatttctttggttaataaaattcaaaaagtttatcgatcccagggagttcacattcataatagacatatagaaattattgtgcgtcaaataacatcaaaagtcttggtttccgaagatggaatgtctaatgtttttttgcccggtgaactaattgga

SEQ ID NO: 269982 - DNA, 445 bp, Glycine max
ggaggcgaaagggtcatagggtactgttgtggttagggattcgaattttgattatcgaatcgcaaaattctgaatcaatcaatcagtaattagagccattaacgactgcaatggtctgcgagaagcgtgagaagaaattatcgaaggtgatagtaccagacaaatggaaagaaggggccagcaatactaccgagggtggtggccgcaagatcaacgagaacaagcttctctccaagaaaaacaggtccttttaacttaatctctagctttacatactttgataatttctttttttcttaattttaaaattgggtataagaattaagaagcataacttggctctgtcacctgtgtattttataattagctgataacatgttaaagcgatcatttctagttccatagcagagcctttggaatgtaaatgacttgacagttgacactt

SEQ ID NO: 269983 - DNA, 414 bp, Glycine max
acaccgatttacaaagtatcgtagggtattttatattagaaatgattgacgaaatcgtttctgacaagaatatccaaataccaaatccgacctatatataacctctgcaaagtaaaagaagttcttggaaaaatcaaagaaaaagtctcttcttcttctgtaaagaattcttccaataatttttctgaccctaatcttttcaaaaaagtgcgcgcagtacttttgtgcttacgagccaaagtttttatacaagaaagccgaagtatatatcttatttgatacaaactcttttttttgcggatccattgtaataatgagaaaaatttcggcatatccgcaaaaaccggtcaataatatcaaaatcagataaattggcccaaaccggcttactaatgggatggccaaatacattac

SEQ ID NO: 269984 - DNA, 432 bp, Glycine max
aggatcatagatgttgtactgatcaatgttaccaagcgcttgatccatggcatagctatacccagactcacactcatcagattccttctgcctgtgaaaatcacatctactcattagttgccggaaagtctggtcggagatcatagcatggctccaccaatacgtcactgtgcccaagttatcatagtagttgtctgtcactgcatttcctacctgcattgcattattaatattaacaaaacttcaccatcaatattccaccccttcttataacaacgtctatataatcttatcttaaaatgtcaagatattacattttaagttgttaaaaagtgtaatttactcttgggtccggctaatcattcaaggtcctaagagtattaattaaagaattaaaaaggataaatctttttggtgagatacataaaggta

SEQ ID NO: 269985 - DNA, 425 bp, Glycine max
cgacagaagggggagaaagagaaagcatagaaaggaaacgaaaaaacagagtgccgcgcagaatttgaaaacaaaggctgaaatttgaagaaactgagatcattgggtgtgaaatatatggcagaggttgtcctgctagtcgatgatttgaaattactttctgcgagtcctcgttgtagaatttgtcatgaagaagagtttgaaagcgtagaaaccttggaagcaccttgtgcttgttctgggaccgttaagtttgctcatagagattgcatacagagatggtgcaacgaaaaaggaaatacaacctgtgaaatatgtctccagcaatatgaacccggatatacagctcctccgccaaagaagtctaagataaatgatgaaacaatgtccattagggaggaggaagaaccgtccaacgcaagaat

SEQ ID NO: 269986 - DNA, 428 bp, Glycine max
  unsure (1)..(428): unsure at all n locations
catatactaggggatttcacttggaaaagaaaatgtcccgtactgatggattcgggtccacaacgatgggttcaaatgtacgagatcttgtagcacttaccaacgaggccctatcgattagtattatacaaaaaaaatccatcatagacactaatataattagatctgttcttcatagacaaacttgggatttccgatctcaggtaagatcggttcaggatcatgggatccttttctatcagataggaagggctgtttcacaaaatgtacttctaagtaattgctccatagatcctatatctatctatatgaagaagaaatcatgtgacgggggggattcttatttgtacaaatggtacttcgaacttggaacgagtatgaagaaattaacgatacttctttaccttttgagttgttctgncggatcg

SEQ ID NO: 269987 - DNA, 452 bp, Glycine max
cgggccggccgacgcgtacgcaagaagactacataaggccatatactttttgatttcacttggaaaaaaaaatgtccggtctgatggattcggatccacagcgatcggttcaaatgtacgagatcttgtatcacttaccaactaggccctatcgattagtattatacaaaaaaaatccatcatagacactaatataattagatctgttcttcatagacaaacttgtgatttccgatctcacgtaagatcggttcatgatcatgggatccttttctatcagataggaagggctgtttcacaaaatgtacttttaagtaattgctccatagatcctatatctatctatatgaagaagaaatcatgtgacgggggggattcttatttgtacaaatggtacttctaacttgtaacgagtatgaagaaattaacgatacttctttaccttttgagtt

SEQ ID NO: 269988 - DNA, 336 bp, Glycine max
gacttactcctgggtttttcatggcaagcatggcaagaggaaaagcaaatgtgaactccaaaaaaaaattggtcacagctgtgttggttttggtgattggtggggggtttttctatttctattctcaaaataatgattcatcttctggtgggtatggggataaatctttgagccactttggtttgggaggggacaaagattatggtgaatctttcttcacagttgttggaagagagggcaatgttgtaccaaagagcattccaatctgtgatgatcgattatccgagctgattccttgtctggacagaaatctcatataccaaacaagattgaagc

SEQ ID NO: 269989 - DNA, 366 bp, Glycine max
ggttgcagctgaaagacgacaggttgatgaaaaagttaaaaaaatcattgaactgaagaataaggtttgttctggtaatgatagcaattttgttgtcctcaatcaaaaaggaattgatcccccatctctggacctgcttgcaagggaaggaataattgctcttcggagagcaaagaggagaaacatggaaagattggttttggcctgtggaggggaggcagtaaactctgtagatgatttgactcctgaatgtctgggttgggcaggattggtatatgaacatgtccttggtgaagagaaatatacattcgtagaaaatgttaagaatcctttttcctgcacaatcttgattaaaggtcctaatga

SEQ ID NO: 269990 - DNA, 343 bp, Glycine max
taaaatcatcttactttctgtttcgagaagactatttaaaggattaattctatatctaatacgtgcgacatactcctacttttggaagggatgcatttattatactaaaattcaacacaggctcttcctgttacttttactactcaagataactcctctgatcatactaccttttttctctctacacattattcaaatttctcccctatcaacttttcattgttctatagttttctaccatttttgttacagttgaccataaattatatttctattcctgtaacgtaacctgacaaacgtctaccacttccaatttatttcatcatactccccaattacccat

SEQ ID NO: 269991 - DNA, 370 bp, Glycine max
ggaacctgaaaggctagtttcttacaaggctctactctactgcttcaccttctgctctagaaaattcagtggtgatacatggcttcggctactctctctgtagccaaaccagcccttcaggcaaatgggaaaggcttctctgaattctctggcctccgcagctcatcaggcttccttcccttttctagaaaatcttcagaggatttccattctgtcattgccttccagacctatgcagttggaagcagtggaggatacaagaagggtgtgacagaagcaaaactgaaggttgccataaacggatttggaaggattggaaggaacttcttgaggtgctggcacggtcgcaaagactcccctcttgatgtca

SEQ ID NO: 269992 - DNA, 391 bp, Glycine max
cttgtaagcgaacaggtgttctctttttggctcagtggtggtccaaaagcgaaagatggtggtgaactaatttttggaggtattgatcctaaacacttcaaaggagatcatatttatgtcccagttactaaaaagggctactggcagattgaaatgggagatttttttattggaggtctctcaacaggtgtttgtgagggtggctgtgctgctattgtggattcaggaacatctttgcttgctggtccaactactgttgtaactgaaatcaatcatgctattggagctgaaggagttctaagtgtggaatgtaaggaagttgtttctgaatatggagaattgttatgggatctcttggtatcaggggtacgacctgatgatgtatgctcac

SEQ ID NO: 269993 - DNA, 335 bp, Glycine max
aaatataatattgaaaacgggggatctgcaccagagggaattacttacaatatatattaaaacacaacaacaattaatgagtacttgattgcatcatatctgccagatgtgtatattaccacaacatgtgttacaagctatacagtcccttaaggaccatttgatgttgaggtttttgattcagcaattgattatatataatataataattcaatttttgatttttaatttatcatgaaactgctgtcatcttataaattcacattctttttattatgcacttcattaggttttttgtagcatattcaaatattatattttttgattaacttttt

SEQ ID NO: 269994 - DNA, 426 bp, Glycine max
gacaacacaacgcggcagagcgaagagaaggggcaaaagagaaagaggcgcttatcgaactcggacggaagcactgagttgactcggagggagtggaaagtgttgttgcgtaatgtctggtggtatcgctcgtggacgcctcaccgaggagcgcaagtcgtggcggaagaaccatccccatggttttgtcgcgaagccggagacgctgcccgatggaaccgtgaatttgatggtgtggcattgcactatttccgggaagactgggactgattgggagggtggctacttcccacttacgctgcactttagtgaagactaccctagcaagcctccaaagtgtaaattcccacaaggtttcttccaacctaatgtttattcttctgggactggttgcttgtctatacttaacgaggatagtgggtggag

SEQ ID NO: 269995 - DNA, 438 bp, Glycine max
  unsure (1)..(438): unsure at all n locations
ttctcgcttctttgatcactgcttcgcaaattgatcgttcggcgactaattgtgcattggtgtgctggtgatgggtatggtttggatttcaaatgtctttcttctcgggtaatgagatgcatcaagttttgaagcacagtgagcagggatggatattgctgctcttttaacttctgctggaattaatattgctgtgtgtgtggttctcttttcattttattctgtattaagaaaacaacccagtaatgttaatgtgtactttgggaggagactagcctctcagcattcaagacgcattgatctctgcttggaaagattntgtccctcccctagctggatattgaaagcatgggaaacatctgaggatgagatattggctattggtggcttggatgctgtgggttttgtgaggatacttgtttcagtattcgagtgttt

SEQ ID NO: 269996 - DNA, 373 bp, Glycine max
ggattctacaggtgctttataagagattttagcaagggagggcgtccactatccaacttgttgccaaaggaggtggaatttgacttgaatgataaatgcaaagaagcctttcattgcctcaaaagagcattgactaccacccctatcattcaatcacttgattggacagccccatttgagctaatgtgcgatgcatccaattacacattgggggttgtccttgctcaaaagatctccttacttcaactgacttcttttccaccatgacttagggagtttttctttttctatctcctttcttacttttatcacaatttgtcgattctatttgattggttaattgcttttaatctttaaattgggctacattgag

SEQ ID NO: 269997 - DNA, 463 bp, Glycine max
acgacagaagggaattcagaattaataataataagagagtaaggaagggcactccaagactttggtggagagcaagagctataagtgtgagaagtgattggaaattgttggaacccaccctatcaacaaggagaagctgttttcgttcgtcgccactaacactaatcgtttcttcaatgccttacgagaaggaactcgccgctgcaaagaaagcagtcactctcgctgctcgtctctgccagaaagttcagaaggctcttctgcaatccgatgtgcactcaaagtcagacaaaagtcctgtcacagtggctgattatggttcacaagcattggtcagctttatacttgagagagaacttccttctgaatcattttcattaatagctgaggaagattcaggtgatcttcgtaaggaaagtggccaggatactctgaatcgcattacagaacttgtcaatgatac

SEQ ID NO: 269998 - DNA, 418 bp, Glycine max
gacctccaagtccatgctttttgttcttgcaagaggaacagagaggaggtggacaaacaaagctataatttttagaggggttaccaccctcaccttctgccaaaccaaacccacccttttctctctttaagctactattgtgctgagagctgaagaggagatggggggtggaaatcaagaggcagtgaagcagctgcagaccctgatggaaaatgtggatgatgagcagctgaagaacacattccagattatgcaccagggttatcaaactgaaacgttaatacggtttctcaaagctagggactggaatattgccaaagcccataaaatgttaattgattgtttgaactggagggtggaaaatgagattgacaatgttttaaggaagcctatccccatggatttgtacagagccata

SEQ ID NO: 269999 - DNA, 407 bp, Glycine max
gaagtaaaagaatctctgtgttgtcatcacacttcggtagatccagccccatcatggcttcagagaagcaagcggctcttgccgtcactccctctgatgctgatgctcctaccatatttgacaagatcatcaataaggaggttccttctactgtggtttatgaggatgacaaggtgcttgccttcagggacataactcctcaagctcctacacatattcttatcattcctaaattcaaagacgggttaagtggtctatccaaggctgaagagaggcactttgagattcttggccgccttctgtacactgccaagctggttgcgaagcaagaaagactcgacgacggcttcaggattgtaattaacgatgggccgaaaggatgccaatcaagttaccacattcatgtg

SEQ ID NO: 270000 - DNA, 394 bp, Glycine max
cagggtagtgaaactcatttgtaagtactggtaattgttgattgccgaacttcattttgtgttttatattttggtaggagactttggagggcttcatcttgttgaatacctgcaaaacgagaaaaaatatcaacaacaacattattaactccttttatatgttcaaaatttatctttattccgttatcataaacatattcttggaataaaagccatcttttctgagattttttatcggtatttatttgttggctactattacttcgcaatcagttcttatggtgatttcacttttattaatcagaaagagtttaaatccttctagagcgtttatcacaacattgacttcataatctgtagaagttgagtatacctatggtttcgtgtgatattt

SEQ ID NO: 270001 - DNA, 370 bp, Glycine max
cataactttatttatatctagtttcaaattacttggttagcacttaataatcttgagcccttcaaccaacatatttcattttatttagtttataggttagactgaaatgttatctttgtgtattcaaatacgtgaagctgacatctttcgacttttttttgcagatgatctttgtttaaaaatttattggaagtttgcctcttgattaacattttatttgtttaaaataatatcatctttaattattaatgttgctcttcttatccttttaatattgctttgtaaaacaatttttttggggataaatatgatatattaacttttttttgcttgattcacaaaattctgcccatacctaaatttgcaacta

SEQ ID NO: 270002 - DNA, 353 bp, Glycine max
ctctctggtaatcgattaccaatggcaagttttgtgttcgaaaagctttcaactgaatttacaacattccaatgaatttcaaaatggtgtgtaatcgattacaatgatttggtaatcgattaccagtgtgtttgaacgttgaaattcaaattcaattgtgaagagtcacatcctttcacaaaaaagttttgtgtaatcgattacaatgatttggtaatcgattaccagtgataagttctgaacaaaaatcaaaagatgtaactcttccaatgattttcaagtttttctaaaagttataacttttccaatggttttcaagtttttctaaaggttataactcttctaattggttt

SEQ ID NO: 270003 - DNA, 270 bp, Glycine max
ttatgggatagcgtcatcatacaaagcatcgaattcaaaaactaagttgattgcttgtgctttgctttattcctcaaaaccaaacatgtcgaacacatgcggcaactgtgactgctctgacaagactaactgcaccaagggaaacagctatggtgttatatgtgagactgagaatagctacattgagactgttgacattgatgttccatctactgatcattgatgggaagtgcaagtgtgtcacttactgcacttgcacggactggactt

SEQ ID NO: 270004 - DNA, 310 bp, Glycine max
gaagtttttaaactcttggacgcatgcatcaacccggaggaatttatctaattcatcatctcaccccccaatttgtcagctttttaatttaataataagggagcttgtttcttttttcggcgtatatcaagtgcttgttatgatgagtcagaatgttagcttgttgtactaggtggattgtaaatcacgtattttgctagagtcatccgcgtaaagcgtgaaaatgcagaaaattacaaatgtctaagctgcgtctgtagtatacctactgccaaccattgttctttctacaagtaactcctcaatccca

SEQ ID NO: 270005 - DNA, 339 bp, Glycine max
gagaggaatgatcatggaagaatcctcggtacacgagatcaaaacccctctcctgtcatctaacaaggaggaagatgaagttggaagcagtactagccataggcagcaaaatgaagagaactcgcccataaaacaagtggccctaacggtgccaaccaccgatgacccatctctttcagttctgacgttccgaatgtgggtgttgggaactctatcatgcgtgctgctgtcgttcctgaaccagttcttctggtaccgcattcagcctctcaccatcaccgcgatctccgcccagatcgcggtggtgccgctcgggcaactcatggccgcaacgatcac

SEQ ID NO: 270006 - DNA, 393 bp, Glycine max
gactttgagcgatgaaaatgttcagattggtgatacaacttgcccatgggttgcaaaggtatggaattctgttgaaaaacacatgcatggagattatacctctgtaattcatggtaaatatgcccatgacgaaactgtagcaactgcttcttttgctggcaagtgtataattgtgaagagtatgaaggaggctgaatatgtttgcgactacattcttggtggtgaattgaatggatccagttcaaccaatgaagcctttttagagaaatttaaatttgcactttctgagggctttgatccaaacagagacctgattaaagcttgcattgcaaattatactacaatgctcaagggagagacataaaacatttggaaacttttggagaggactat

SEQ ID NO: 270007 - DNA, 340 bp, Glycine max
gtcagagtcgaagaaatcagtgcttagatcgatcgagattattgggcttggaactggacctgtattggagaagaaacttaagtatgcagctgacatttcttctggaatcattctcggaagggagcttgtgaattctccggctaatgtgcttacgccaggggtattggctgaagaggcattaaagattgcttcaacatataatgatggttttactggcaaaatattagatgctgagcaatgtaaagaatttgaaaatgggtgtcctatcttgggggttgcttgaaccctagcaaattcttctcattttatccatctgggttataaaccaccaactggacct

SEQ ID NO: 270008 - DNA, 392 bp, Glycine max
tacggctgcgagaagacgacagaagggtacggctgcgagaagacgacagaagggagaagcacaaagagaagcattagcactaggagcagcaacaactagtctcagctgaaatggcctcttcagtgatggcatctgtggccctcaaacctgcccctttcactgttgagaagtcctcagtgagaggccttccctctctctcaaggaactcttcttcattcagagttgtggccagtggcaagaagatcaagactgacaaaccttatggaattaatggtggcatggctttgagggatggaactgatgcatctggcaagaaaggaaagggaaagggtgtttaccagtttgtagacaaatacggtgctaatgtcgatggttacagtcctatctacgac

SEQ ID NO: 270009 - DNA, 422 bp, Glycine max
gctatttttggatcctctaactgtacatgttggtgattaaatgttatgttcaaatgatgcaggataaggtcctacaggaacaaaataacactctcgcaaagaaggtaattaatgtattttgtatttaatcaacaactttagttgactctagttagtttggactttggatactaaatgtatgtttggattcatgttttaacacctttttagataaatgtttatataagcatttatagaagaagaaataaaaaaaatattaaaatttaaaataaacttatagaagctaatatgaaaagatttctataaaataacttacaataaattaatttaaacttataaagaaatttaatttttttcatttgtctttatcttataagctcttatgaaaaaatgtatccaaacagaccttaatctttcagtgt

SEQ ID NO: 270010 - DNA, 419 bp, Glycine max
gacgcacttagcaatcaatcaaaacattcccaatgacaataatatacacatcgtcaattaagctccttctcctatagccatggctctttctaagcttataattgcttcccttcttgcgtcgcttctccttcttcatttcgttgatgctgatcaatcggcacatgcacaaacgcaggggtctcttcttcagcagatagatcgtaacggagcatgtgctgcgaggtgccgtttatcatctcgtccacgcctctgccaaagagcttgtggaacttgctgaagacgctgtaactgcgtgccacctggcactgctggaaaccaagaagtgtgtccctgctatgcaagtttgactactcatggtggcaaacgcaagtgcccttagacttaattggaccactatcctatgcatgcctttgatttat

SEQ ID NO: 270011 - DNA, 400 bp, Glycine max
  unsure (1)..(400): unsure at all n locations
gacacctttgttcactcttcttctcttgcggctagggttttagcgcagcttcttctagatttaaggaagatgggtaaggaaaaggttcacatcagtattgtggtcattggccatgtcgactctgggaaatccactaccactggtcacctgatttacaagcttggaggcattgacaagcgtgttattgagaggtttgagaaggaagctgctgagatgaacaagaggtctttcaagtatgcctgggtgctggacaaacttaaggctgagcgtgaaagaggaatcaccattgatattgctttgtggaagtttgaaacaacaaagtattattgcacagttattgatgcgcctggacatatggatttcattaagaatatgattactgggacatnccaagctgact

SEQ ID NO: 270012 - DNA, 365 bp, Glycine max
gacactaaacaagttaaaagaagagcatcactgagctgacaaagcaaccctatgtcgaaggtggtttgtgtcaccggagccagcggcgccatcggatcatgggtggtcctactcctcctacagcgtggttacaccgtccatgccaccgtccaagatatcaaggatgaaaatgagacgaaacatttggaggaaatggaaggagcaaagagtcatctccatttttttgaaatggatcttcttgacatcgactccattgccgctgccataaagggttgttccggcgtaatccaccttgcatgtcctaacaccattggtcaagtcgaagatcccgagaaacagatattggaaccggcgataaaaggaac

SEQ ID NO: 270013 - DNA, 408 bp, Glycine max
gattacctataatttcagagctagctagttcacagcttcagttcgtttttgttgatcctgtgaacttatggctgacggggtggttctgttggatacatgggccagcatgtttgggatgagggttaggattgcattagctgaaaagggtgttgagtatgaatacaaggaagaaaatctcaggaacaagagtcctttgcttttgcaaatgaacccaattcacaagaaaattccagttctgatccataatggcaaaccaatttgtgaatctgcaattatagtgcagtacattgatgaggtctggaatgataaagctccaatcttgccctctgacccttatgagagagctcaagccagattctgggtagattacattgacaaaaaggtgtatgacacttttgaggaaatgtg

SEQ ID NO: 270014 - DNA, 424 bp, Glycine max
gacttgcggctgcagtagagaagcactcttcgttcttcgactgtctacgatctgctttctctgaattgtgaaaatgtcgctcggagaaactgcttgttcatacgcagctctcatccttcatgaagatggaattagtgtaactgctgacaagatcagcaccttgttgaaaactgcaaaggttccagtagactcttattggccaaccttgtttgctaaacttgctgagaagaaaaatcttggcgatttgatagcaaatgcggcaggcggtggtgcaccagttgctgttgcagctgccccagttgctgctgctgctggtggtgctgctgccgcagctccagctgctgaggagaaaaagaaggaagaaccggaagaagagagtgatgatgatatgggattcggctcggttgattagggacattctcaa

SEQ ID NO: 270015 - DNA, 380 bp, Glycine max
ggtggcagagagcgaacccaaaactagagctaccttcccttcaaaccttccactcttctctccttttccaatcaagggaataatatttcttagagatattccgaaaccatggctcacgccaatcctatgatttttgttgttggaattctaggtaaccttgtctccttctgttgctttccagcaccagtaccaacattctatcgagtttgtaagaagaaaaccacggaaggtttccaatcacttccttacgtggctgcactcttcacttcaatgctttggatattttatgcttacataaagacgggcgaaatacttctcatcaccattaacgcattcggttgtttcatagagacagtttaccttgtcgtctatatcactta

SEQ ID NO: 270016 - DNA, 376 bp, Glycine max
gacttccagaacaactttctcatcatcgaagcccgtcgcgagaagaagctgcttcgtcgcggttcccaaaatcgcgtttcccaagctccgtttcaaacccgtcgctatggctacgctcggcgctcgcatggtggccgccgcacccaccgtcactccgccggcctcgctcgacttcgaaacctccgttttcaagaaggagaagattaacctcgctggacacgacgagtacctcgtgaaaggagggagggatttgttccctctgttgcagggtgctttcaaggggattaagcagattggcgtcattggatggggttcgcagggacctgctcaggcacagaatttgcgggactcgcttgctgatgcaaagtctgatatt

SEQ ID NO: 270017 - DNA, 372 bp, Glycine max
gacaggaggtgatactagatatcacactacatagttagcaatagtgaataaattaggacatatgtactaaatggctggggtccataaatggtatcatactttttgaacacggacaggtcctttctatacaacggagcctttctttcttttcattcttattacatgaacctaatgatattgttaacttgtacaggtcacactatttggctctacccatccaatatttagttcagtaagtagattttttcacaatgaaatctagttatacagtaacggtatttaattatgaaaatttgctgggtagctgaccttcttattccgttcgtccaaaatccatcaaaattcattcattaaggacatactttatcttta

SEQ ID NO: 270018 - DNA, 364 bp, Glycine max
gatcacaaatctttcgctaacactcattaatggcgagaatggcacttcggtgcttggtgatgtccctttctgttctcttcactcttggtcttgcgagagaaagccatgccagagacgaagatttttggcatgctgtttggccaaacactcccattccaagttcattgcgagatcttctaaagcctggccctgcaagtgttgaaatcgatgatcaccctatgcaaattgaagaaacacagtacccgaaaaccttcttctataaagaagaccttcatccaggcaaaacaatgaaagtacaattcatcaagcctccctttcaacaaccatggcgtgttggtacatggttaaaggaaattaaagacac

SEQ ID NO: 270019 - DNA, 427 bp, Glycine max
agccagccggcctcgttgccgccgacgatcccgtagacggccagcatcagcgacccggtcacggtgatcgcgcccgcgacgtcgagccgcgcggcgccggccggcgcgcgcatgcgcggcagcagcgcggcgcacatcgcgtagaccgcgatgccgatcggcaggttgacgaggaagatccagtgccacgacagcgagctcgtcagcagcccgccgagcagcacgccgatgctgtcgccgcctgtgcagacgaaaccgtatacgcccatcgcgcgcgcccgttcgccgggttcggtgaacaggttcatgatcagcgacagcgagacggtcgacacgaccgcgccgtcgagcccctgtaccgcgcgcgcggcgatcagcatcgtctgcgattgtgcgaggccgcatgccaacgacacgagcgtgaaca

SEQ ID NO: 270020 - DNA, 447 bp, Glycine max
ggcaaccagagaattgacattcccagtagatgaaaggggaaccatgaaatctgttgtggagtgcttctatgagacatatgggtttgtcattcaacatactcagtggccttgtctgcaagttggcaatacacagagacctaactatttgccaatggaggtttgcaagatagtggaaggtcaaaggtactcaaaaaggcttaatgagaggcaaatcaccgctttgctgaaagttacatgccagcgtcctgttgagagggagcgtgatatcatgcagacagtacaccacaacgcataccatgaagatccttatgccaaagaatttgggatcaagatcagtgagaagcttgctcaagttgaagctcgcatccttcctgctccatggctcaaatatcacgatacgggcagagaaaaggattgtcttcctcagttgggcaatggaatatgatg

SEQ ID NO: 270021 - DNA, 384 bp, Glycine max
gggcagagagcgaaccccaaactagagctaccttcggttcaaaccttccactctggtctccttttccaatcaagggaataatatttcttagagatattccgaaaccatggctcacgccaatcctatgatttttgttgctggaattctaggtaaccttggctccttctgttgctttctagcaccagtaccaacattctatcgagtgtgtcagaagaaaaccacggaaggattccaatcactttcttacgtggctgcactcttcacttcaatgctttggatattttatgcttacataaagactggcgaaatacttctcatcaccattaacgcattcgggtgtttcatagagacagtttaccttgtcatctatatcacttattgccc

SEQ ID NO: 270022 - DNA, 349 bp, Glycine max
gatcatttacaatttcaatgtcgctctctctctgtgggtgtctctctagacttagattttgtgaatggctgaagtggaagagggacacgtcatcggcgtccacaccgttgatgagtggaaactgcaactccagaatgcaaaagactccaataaactgatcgtggtggattttactgcttcctggtgtggtccatgccgttatatggccccagttcttgcacagattgccaagaaaactcctgtattgatcttcctcaacgtggatgtggatgaagtgaggcctgctgctgaggaatattccattgaggccatgccaaccctgctcttcttgaaagatggctagatcgtg

SEQ ID NO: 270023 - DNA, 254 bp, Glycine max
tgacgacctatcggacaacaattcaaggggctgtaagtgcgtcatctttcgtcaatatgatccttatgtgcattaagacgtgctgaaatttgacaacggaggttagtcccataatcattatacctttggaatctaacgacagccttctcctgtctgccaggatatgaccattggttgcacaatgtgtacagattgcattacctatgctcattctactgtacattacacaacagcatttgtcactcttacatcat

SEQ ID NO: 270024 - DNA, 402 bp, Glycine max
tacggctgcgagaagacgacagaagggtacggctgcgagaagacgacaaaaggggacaagtgagtttgttgatcgagataactagaaacagtgtgatgaaaatgaaggtccttgttttcttcgttgctacaattttggtagcatggcaatgccatgcgtacgatatgttccctctccgaatgaacactggctatggtgcccgtactccggaggtgaaatgcgcaagttggaggcttgctgtggaagcacacaacatctttggctttgagaccattcctgaagagtgcgttgaagcaacaaaggaatacatccatggcgaacaatatagatcagactccaaaacagttaaccaacaagcttacttttatgccagagacctcgaagtccatcccaaggacacat

SEQ ID NO: 270025 - DNA, 347 bp, Glycine max
gactcataatctgagactactgagtggttcaaaggtgagaagtcgccaagatgggtccattcagtcacaagggtcaaatgataaagggcactatggtggttatgcagaagaatgtgttggatatcaacagcatcaccagtgtttaccggatccatggctccgtcttaaactttttaggcattgcacttgattcagttacttttttagcctacttcatatgcatccaacttattactgctaccaaagctgatggtgctaaaggaaaagtatgcaaatgcttcaaatttgagaggaaagataacattacccaccatatgaactaacgaagaagcatactatgctcaatt

SEQ ID NO: 270026 - DNA, 174 bp, Glycine max
aaattaaagtccttgttttcttcgttgcttcaattttggtagcatggcaatgccatgcctacgatatgttccctctccgaatgaacacttgctatggtgcccgtacttcggaagttaaattctcaagttggaagctttgctgtgaagcacacaacatctttggcttttagacca

SEQ ID NO: 270027 - DNA, 428 bp, Glycine max
gacctagtgctagtagtaaagagtagaagaacgtgttttttcatattgttttgctatcctaatagacgcgaggactattttaaaatccggaccgtcgaatcggaccaccatcgttccaccggcgccgtcgacctcaaaggctcgaaccaccttccttctactcaactgcactcgcactcgtcggcgcaagctcccaccgtcgcacgcctcagccgcttccagttaacaagggaaatagcatttggtcataagaaaggaaggaaggaaaatggtgtttgggcaaatagtggttggtcctcctggctctggcaaaacaacttactgcaatggcatgtctcagtttcttagtcttattggaaggaaggttgctgttatcaatttggatcctgctaatgattcgttaccatatgattgtgctgtgaacattg

SEQ ID NO: 270028 - DNA, 405 bp, Glycine max
ggcctactgtcctgttgttcatgcatttgctatggggacattcaattctgctgtcatttatgtggacaaacaaaaggtttctgttgaggtacaaactcatttagtggagaatggaattgaaattcaagagtatacagccgtaagctctgatgcgacattgcttgcaactgatgagctagatgctgtatctactgccaaggctgctttagccgaaacagaggccagaaaaattcccagtgaaattgataagagtgtaaatggtgaacatcaagcagaagaaaatagtaatgacctcatatgggctgatccagtttcatgctgttatgcactgtatgcaaagttgaaccccgatacagttctcttgcagcaatcacctttagcccttgcaaaagctttaaagaactc

SEQ ID NO: 270029 - DNA, 425 bp, Glycine max
ctctattctttaactactacatttttataatcataatttgtagtgactttttcttatcctcaagtaaaataatacgatgaagtagacggaataatacataaataaaacaaaatccgcaaagtttttgagttttaaaaataaatttgggaataaatatcaataaattataattaaataaacaaatttaaataaagataaaagaagcaactttatgtaaagatgtttgtgccgtcgtatgttagtatataatttaattttaatatacttattagtctaagttttattatcaattaattaaaaaatttcctgaatataatttcaatatattattacaaaaataatattatgaattgccgttgttaactcttaaataacaattcaaagtagatctctaattaatttcaaagctttacttaaggattttt

SEQ ID NO: 270030 - DNA, 389 bp, Glycine max
gacaacaccacacacagatcaattgcaacggttgaattttgactgaagacaaagttagaaaaaaaaacatgtcttgctccgtcgcggtttccaattcgccggtgttctctccttcttcttccctcttctgctcgaagccctccatcatctcttcttcgccggaatccctctccctctctctgtcgcatctcaaaccttcgaactcttctacgtcgtcgtcttgttcttcgccttctgctgctgctgcttcttcttctccttcttctccgtttcgacttcgccttaccaagccttccaccgcgttctccgcgtcttctgctgcttctgcttcgtctacctctccgaactgcaccgctttgaagaggaagcgacccgctatggtggacata

SEQ ID NO: 270031 - DNA, 423 bp, Glycine max
gatcacttattaattgtgttaagaaatttaagtgaggagctagagaatgatgatgaagtctgctatgtgtgcagtggtggttgtagcacttcttcttctggcggaggtggggcccatggctgaggctgtgacatgcaccccaacagagttgagtccgtgtcttccagcaatcacttccggtgctaaaccttccaatgcttgttgcacgaagctgaagcagcaaaaaccatgcttatgtggctacctcaaaaacgctagcttgaagcagtatgttaactctcctaatgcccgaaaaaccgttgcttcttgtgggattccctttccaacttgttaattaattaagccttcttataattaaagtgtgggatatatatatatatagataaacagtttaatttatacacactttgatcctacaaagca

SEQ ID NO: 270032 - DNA, 338 bp, Glycine max
agggatcactcattaatcgtgttaataagattcaagtgaggagctactgaatgcagaggtagtctactaaacatgccttgctgcgtctcgcacttcaatttctcgcggatgtctcccccatggctgacgctttgacatgcaccccaacagagtttagtccgtgtctaacagcaatcactttcggtgctaaacctttaaatgcttgctgcactaaactgaagcatcataaaccatgcttatgtggctacctcaaaaacgctagcttgaagcaggatgctaactctcctaatgcccgtaaaaccgctgcttctgcgggattccctttccaacttgttaat

SEQ ID NO: 270033 - DNA, 408 bp, Glycine max
ggagtgagcaagagtgaagagcgaagagaatggctcccaagggtttaatctttttggctgtgttatgcttctcaacactgtcactgagtcgttgtcttgcggaggataatggacttgttatgaacttctacaaggaatcatgccctcaggctgaagacatcatcaaagaacaagtcaagcttctctacaagcgccacaagaacactgctttctcctggctcagaaacatcttccatgactgtgctgttcagagttgtgatgcttcactgttgctggactccacaagaaggagcttgtctgacaaagaaacagatagaagctttgggttgagaaattccaggtacattgagaccatcaaagaagcctatggacagggaatgcccaggatttgttatctgggctgatatt

SEQ ID NO: 270034 - DNA, 383 bp, Glycine max
agcgaggatgagatattgcacgcgaggattttgaagaacttcacattcaatgagctaagaactgctacaaggaactttcgtccggatagtatggtgggcgaaagtgggtttggatgtgtgtttaaggggtggatcgatgagcatacacttgcccgtactaaaccagagacaggaatggtcattgctgtgaataggcttaaccaagaaagcaaccaggggcacattgaatggttgacagaaatcaactacctggggcagctcagtcattctaatcttgtgaaactaattggttactacttagaagatgatcaccggattttggtgtatgaatttgtggccaatgttagtttggataatcacttgttcaagaggggttcttactt

SEQ ID NO: 270035 - DNA, 316 bp, Glycine max
gattcctcaagaactagggtttgcagtcactgcgctgtttcaccgagtttgggcgtttagatcagaaccaaatcgtgttctcttccattggcaaacacggcaactcaaatgagcaagaagagaaagtttgttgcggacggagtgttctttgccgaactgaacgaggttctgacacgtgaattggcggaggacggttactccggcgtcgaagttagggttacgccgatgcgcaccgagatcatcatcagagccaccagaacccaagccgttctaagtgagaagggaaggagaattagggaacttacctcagtggtgc

SEQ ID NO: 270036 - DNA, 398 bp, Glycine max
aagaacatggatgccataatgggaaacatacgaccacaggagtctgaataccaggatgacaagaatgaaccgaggaatgtggttgtagcaggggaatttgacaccagtactgtgcagttcataaagaatgaagatcttgaagagttgcgagagctgggttctggtacatttgggactgtgtaccatggaaaatggagaggatcagatgttgcaattaaaagaataaagaaaagctgcttcgctggtcgatcttcagaacaagaaagattgaccatagagttctggcgggaagctgacatactttccaagcttcaccatccaaatgtggtggcattttatggtgtagttcaggatggaccaggagcaacattagcgactggtaccgagttcatggtgga

SEQ ID NO: 270037 - DNA, 401 bp, Glycine max
gaaaccaaatcgaatcacttgttagttcaacatggctggcagtggcacctttgcagagatcatagatggtgatgtgttcaagtactatgcacaaggccattggaacaagtcctcttctggaaaattcgttcccatcatcaatccaaccactaggaagacccacttcaaggtccaagcttgtacacagaaagaggttaatagggtcatggaatcagcaaaaacagctcaaaaatcatgggccaagactccactgtggaaaagagcagagttgcttcacaaggctgcagcaatactgaaggagcacaaagcacctattgctgagtgtcttgtaaaggagattgcaaagccagctaaggatgctgtcactgaggtgatcagatcaggggatttggtgtcatatt

SEQ ID NO: 270038 - DNA, 371 bp, Glycine max
ggttctagtgtatgtgattgttgtgactcgttcgtcttcgtcgttatcttgttctcttggtgtttgcgtgttcgttttttctctcacctgaaaatgtcttgctgcggtggtaactgtggttgcggaagctcctgcatgtgcagcaactgctgcggacgctgcaagatgttcccagacttgagctacaccgagtcaaccaccaccgagaccttggtcatggtagtgtcaccagttaaggctcaattcgagagtgctgaaatgggtgttcccgctgagaacgatggctgcaaatgtggagctaactgtacctgcaacccctgcacttgcaagtgaggtgttggagagctaaagcttcaagcagaaatggccct

SEQ ID NO: 270039 - DNA, 447 bp, Glycine max
ggttctagtgtatgtgattgttgtgactcgttctgcttcgtcgttatcttcttcttttgttgtttgtgtgtttgttttttctctcacctgaaaatgtcttgctgcggtggtaactgtggttgcggaagcgcctgcaagtgcggcaacggctgcggaggctgcaagatgtacccagacttgagctacaccgagtcaaccaccaccgagaccttggtcatgggagtggcaccagttaaggctcaattcgagagtgctgaaatgggtgttcccgctgagaacgatggctgcaaatgtggagctaactgcacctgcaacccctgcacttgcaagtgaggtgttggagagctaaagcttcaagcagaaatggcccttagaaataatgatgaaaactatatgtagtttcaaaacttcaaaattatgtagtatgtattatgttgcactctggtg

SEQ ID NO: 270040 - DNA, 426 bp, Glycine max
  unsure (1)..(426): unsure at all n locations
ggaaaggagatgtttgaataaaaataattcccctgcaagttctgattttttgagaggactggacaatatgaatgttttattatgctctatcaacacattaaaaagattatatgatatatctgctgtggaagtaggtcaacatttctattggcaaatagggagtttccaagtacatgcccaagtacttattacttcttgggttgtaattgctctcttattggtttcagccattctaattattcgaaatctgcaaaccattcccgctttcggtcagaatttctttgaatatgttcttgaattcattcgagacgtgagcaaaactcanattggagaagaatatggtccgtgggttccttttattggaactttgnttctatntatttttggttctaattggtcggnggctcttttaccttggaaaatcat

SEQ ID NO: 270041 - DNA, 392 bp, Glycine max
gcattttcccttgtctcttccttggtctctctacaaagagtgtgtgtgagagagagaaggatttggaattttggataactagagcgaaagcgtgacaccaccaaaaaccgaactgttcccagatctccctctctctctctctcttccaacaatccaaatccaaatccaaaaccctaccaacaccacactcaatcgatcgatggggcagaagtctctgatctacgcgttcgtgtcgcggggaactgtgattctcgcggagtacacggaattcagcggaaacttcaactccatcgccttccagtgccttcagaagctccctgccaccaacaacaagttcacctacaactgcgacgcacacaccttcaattacctcggcgacaatggctacacat

SEQ ID NO: 270042 - DNA, 408 bp, Glycine max
gtaccaaagacggtgagtttatcagcaaactacctttacttcagtatattcactccaagtggggccttctcaatgttgcagctaaattgcctcattactccttgcagaatgatgtaggacccaagatatatatatcttatgggattagtgatgaacttggtagaggtgattcagtgacaaatctccacttcaatatgcgtgacatggtgtaccttttggttcatacaaatgaagtaaagctgaaggactggcagagaactaaaattgaaatgatgcaaaaagctaaagctaataaggaatttgaggcaaaagaatcacatggggatcctcaaatatcttcaagggggagttcacctgattcctcacttggtacaaaaagtagtggactggaaatagactcaaaccaga

SEQ ID NO: 270043 - DNA, 311 bp, Glycine max
gcgcatagagattgataggacaggaaggatacctatgttgaagctccgcgatcgagagtcatatgtacggaataagacaaaggaatatgatgatattgctatgaagtatttgatctatgttctatttctccttgctgctggtttttctggctactagctgatgtatgagcgtcacaagagctggtattcttggattctgtcttcggtcacaagttgtgtatacatgaacggctgtattattatgggccctcaattgctcatcaactactagcttaaatctgatgctgatctaccttgggagaaatgacata

SEQ ID NO: 270044 - DNA, 431 bp, Glycine max
  unsure (1)..(431): unsure at all n locations
tctgtccagttacaacataccgttggtggctgatgttcattttgctccctctgttgctttgcgggtagctgaatgctttgataagattcgtgtaaactctggaaattttggtaagcatctcttcttaattcattagtcttatgtttttttctatcatttttttttcatgtgttggctttcattctgattccaagatgttggtcttctacagctgatagacgggctcaatttgaaacattagagtacacagaagaagactatcagaaagaacttgagcatattgaaaaggttaaatcatccatctgttagttttataactcaaatttcagtgaagagcatgctgtatgctaatttatcagtacttcttttgaggtccctcttctgtcatacacatatacatncctncttagtccttactgaagatgtgggaa

SEQ ID NO: 270045 - DNA, 455 bp, Glycine max
ggcctgctacatttcaccaccccctttatccttatctcctctcttcttcatttgttctgctcgtcccctctatttaaagctcacacaaagggatcatataccttggttgcactttggtaaggtgagagaataggaaaaagggaaatatggcatttgcaggaacaactcagaagtgcatggcttgtgacaaaacagtttatctggttgataagttgacagcagataaccgagtgtaccataaggcttgcttcagatgccaccactgcaaaggaacactcaagcttagcaactataactcttttgagggggttctttactgcaggccacacttcgaccaactgttcaaaagaactggtagtcttgacaaaagcttcgaagggacaccaaaaattgctaaaccagaaaaaaccggtgaagaagaacctgcagcaaccaaagtcttaagtatgtttggt

SEQ ID NO: 270046 - DNA, 411 bp, Glycine max
aaccacaagctcaccgatgctgttcttcctccaacgaaagactggagaaaagaaggtatagtgagttcagttaaagatcaaggcagctgcggatcatgctggacattcagcacaactggggctttagaagcagcctatgcacaagcatttgggaagagtatctctctttctgagcagcagctagtggactgtgctggccctttcaacaactttggctgccatggtgggttgccatcacaagcctttgagtacattaaatacaatggtggactagagacagaggaagcatatccctacacaggaaaagatggtgtctgcaaattctcagctgaaaatgttgctgttcaagtccttgactctgtgaatatcaccttgggtgctgaagatgaactaaaacatgcaagtgcattt

SEQ ID NO: 270047 - DNA, 455 bp, Glycine max
cccacgcgtccgaattcgagcgggccgattttttattgtttattacttttttttttttactggaattttaagcttcaattcttttatcgtttattttaatcagccaaaaaaaacataatattatataatgaggtacgacctcccttttacaactgtatccatcaaatttcctttccagaaaaaaaaaccccaccaaaatatagagtacagatgttctttttaagaggattacagatgttataaattatttaatattttaccctatgatttggttaattaacattaaaggcggttaaacaagagcttaattgtttaatttttacttttaaaattttaaattataataattattatacacactattgattatcaacttatcgatgatttgagtaaaattagatttatatctcttaagcaagattcaattggaatgagtaattagctaattttttgac

SEQ ID NO: 270048 - DNA, 384 bp, Glycine max
ggaagcgtcgcatttgatggcttcgaaccctttgcgacaagatggggcccacaagtccgggtcggttgggaaacccgtgggtcaggaaatgggcattttagacgaatcgggtcgggtccaagaggctggtatcagtggagaggtttgcattcggggatccaatgttacgaaaggatataaaaataacgtggcagcaaatacggcgtcgtttctgttcgattggtttcatactggtgatattggatactttgattctgatgggtatttgcatctcgtgggtcggatcaaggaactcatcaaccgaggaggtggaaagatatcaccaatagaagtggatgctgttcttctttcacatgcagaaattgctcaagcagttgcttttgg

SEQ ID NO: 270049 - DNA, 406 bp, Glycine max
ggaggaacctttgtctctcatcaatggctgccacgagaccggtgcagtgtttgttacgaagggtttgcaggggaagtaggagttttggggttgccacagaagttaatgcttcttcttcatcttcttctcagaaaatcatcgacaaggaatatgaacacagtgcccacaattaccatccccttccgattgtattttctcaggcaaagggaacctctgtttgggatccagagggaaacaaatatcttgattttctatctggttactctgctgttaatcagggacactgccatgctaaaattctcaaagcattacaagaacaagcacaaaggctgactgtgagctctcgagccttctacaatgatcgctttccagtctttgctgagtatgtgacaaacatgtttggtta

SEQ ID NO: 270050 - DNA, 416 bp, Glycine max
ggatcaccgtcgatggcgtgcaggggctctgggtgccagtccggtggctgctacaaagacgaagacgcaacatgtaagcaaccacccaagtccgaagaagccgattcaaaaaaccctagcaatgtctgcatcaagtgcaagctcaacgacgccgtttcgggctacggcggaatcgacgatggtcgtttctgcgccgattgcttcaaaaccaacttgttcggcacgtttcgtttcgccgtcacttcaaatgccatgataactcccacggacaaggtcctcgttgccttctctggtggcccttcatccagggtagctttgcaatttgttcatgacatgcaagagagggctcagaggaacttcgatgcgagtagggaccggtcgttgccggtggttggagttggagttcgtgttattga

SEQ ID NO: 270051 - DNA, 432 bp, Glycine max
aagaaggagttgatctctatctttaagcaattagaagagacacttactgacagacccttttatggggatgacacgtttggctttgatgatctttgtttgatcactttatctagttggttctatacttatgagacatatgggaacttcaaaatggaagaagagtgtcctaaactcatggcttgggtcaagagatgcatggagagagagactgtgtacaatactcttactgatgctaagaaggtgtatggtcttattgtggaactgcagaagacacttgaatcgaaatagaagatttcaatagatcaacccattaaataatattatcatgttaaatatgatggtgtaaggtcttgtgtacttttactctatggctgagtgggttgggtcagtcatttatgtggtttactagacactaatacatctactctattg

SEQ ID NO: 270052 - DNA, 437 bp, Glycine max
aagaaggagttgatctctatctttaagcaattagaagagacactaactgacaaacccttttatggggatgacacgtttggctttgttgatctttgtttgatcactttctctagttggttttatacttatgagacatatgggaacttcaaaatggaagaagagtgtcctaaactcatggcttgggtcaagagatgcatggagagagagactgtgtccaatactcttcctgatgctaagaaggtgtatggtcttattgtggaactgcagaagacacttgaatcgaaatagaagatttcaataaatcaacccattaaataatattttcatgttaaatatgttgttgtaaggtcttgtgtacttttcctctatggttgtgtgggttgggtcagtcatttatgtggtttactagacactaatacatcttctctattgaagat

SEQ ID NO: 270053 - DNA, 420 bp, Glycine max
gacatcttcttttacgtattgaatctcataattctctaaaagagatctttttctgctctttgaagaaagaagggtctttgcttgattttggagatgtctctgctctcagatctcatcaaccttaacctctccgataccaccgagaaggtgatcgcagagtacatatggatcggtggatcaggaatggacctgaggagcaaagcaaggactctcccaggaccagttagcgacccttcagagcttcccaagtggaactatgatggttccagcacaggtcaagctcctggtgaagacagtgaagtgattttatacccacaagccattttcagggatccattcagaaggggtaacaatatcttgcttatctgtgatgcctacactcctgctggagaacctattcccactaacaagaggcacgct

SEQ ID NO: 270054 - DNA, 355 bp, Glycine max
gattatcatagtagatattcattcgccttatctttctctcttctctctccccgcccaaaccctaactccctaccctattccgctttctctcatccatcatgaaaggaggaaagtccaagaccgaatctaagagagccgatgccaaacttgctgtgaataagaagggcgccgccaccaagactaggaaacccgccggaaaggggaaggcagcgaaagatcctaacaagccaaagaggcctccaagtgctttcttcgttttcatgtaattataatatattggtatctctacgattcatttgacttccgatgcgctctcttatctttcctccgaataattttatcgtcaaaactttta

SEQ ID NO: 270055 - DNA, 355 bp, Glycine max
  unsure (1)..(355): unsure at all n locations
gattatcatagtagatattcattccccttatctttctctcttctctctccccgcccaaaccctaactccctaccctattccgctttctctcatccatcatgaaaggaggaaagtccaagaccgaatctaagagagccgatgccaaacttgctgtgaataagaagggcgccgccaccaagactaggaaacccgccggaaaggggaaggcagcgaaagatcctaacaagccaaagaggcctccaagtgctttcttcgttttcatgtaattataatatattggtatctctacgattcatttgacttccgatgcgctctcttatctttcctccgaataattntatcgtcaaaactttta

SEQ ID NO: 270056 - DNA, 404 bp, Glycine max
gacatcttcttttacgtattgaatctcagaattggctaaaagagatcttttggtgctctttgaagaaagaagggtctttgcttgattttggagatgtctctgctctcagatctcatcaaccttaacctctccgataccaccgagaaggtgatcgcagagtacatatggatcggtggatcaggaatggacctgaggagcaaagcaaggactctcccaggaccagttagcgacccttcagagcttcccaagtggaactatgatggttccagcacaggtcaagctcctggtgaagacagtgaagtgattttatacccacaagccattatcagggatccattcagaaggggtaacaatatcttggttatctgtgatgcctacacttctgctggagaacctattcccac

SEQ ID NO: 270057 - DNA, 248 bp, Glycine max
cgacatcttcttttacgtattgaatctcataattcgctaaactagatctttgggtgctctttgaataaagaagggtctttgcttgattttggacatgtctctgctctcagatctcatcaaccttaacctctcctataccaccgagaaggtgatcgcatagtacatatggatcggtggatcacgaatgtacctgaggagcaaagcaaggactctcccatgaccacttatcgacccttcacagcttccca

SEQ ID NO: 270058 - DNA, 452 bp, Glycine max
aggcgtgcgaacacgtccgagaggaccacacaagggaagtgttgttacggggtgagttgtaaaatgaggggaattgtgctttggttagcttgttatacttatgttatatatatgtgcttttgaatatctatgcatgtttaggaatgtgatatacttactccatgtgtgatgtttgtgtttggatcctatgatgatatcggaccttgttttcatgagatcaaatgatgagatatatgactataaacaaccttatgctaaatgacgattaacactatactctgatatgatatgacattagagcttatgatttgacattgattttatcatttgctattataacatatgtcaatgaacatgatttatttatatatatctcattgaaatttcaattgtaatactagcaagtttcacctcttgaaggtctcaaagaagttgttaccctttcgtacatg

SEQ ID NO: 270059 - DNA, 383 bp, Glycine max
gagtgaagagagagagaagacgaacactatcatggcttcttcactcagaatctcaagacttatctctcgctccttttcttctacttctttcttttcacgaggtgggaatggtttccttggttcaagacaaagtaaattcagcacttctgctgccattgaggaagaacccattaaaccatcaatacaagtagaacacacccaactcttaattgatggaaaatttgtagatgctgcttctggtaaaacttttcaaactttagatcctaggacaggtgaagtgattgctcatgttgctgagggtcactctgaagatgttgatcgagcagtttcagctgcacgaaaagcatttgatcatggaccatggcctaagatgacagcttatg

SEQ ID NO: 270060 - DNA, 406 bp, Glycine max
gtcgcaagtgggtcatccacatcgagcgcataaccggcgagaaggtgaatggctccaccgtcaacgttgggattcacccctccaaggtggttgtcacaaagctcaaattggacaaggatcgcaaggccattctcgatcgcaaggccaagggtcgtgccgccgccgataaggagaagggtaccaagttcgctcccgaagacatcatgcaaaccgttgattagtctctttatcatacaaaccaattttatgtatgggttttggtagcctttttctatctctccattttgcaggattttgttatcttttcttatgttaatcaaactgttttatcccatgagcttatcattaactattttaattcgttttcatgcgtgaagacagtgatgccagttatttcaagcgaatc

SEQ ID NO: 270061 - DNA, 440 bp, Glycine max
gatcccctttttcttctgcaagaactacaccaacgaaaacctccttcttctttgtttttttttggaggctggtgtgtgtttttctttttcttcttcttcttcttccaatccttaaggaaaaaaactaacgaaaaaaaagtgagccatgtcaggcttgtataatcccaacttctctcctgctagagcagcttctcctcagattaggagcaatccagaagtggacagtcagtacctatcagagttgctggcagaacatcagaagcttggacccttcatgcaagtgcttcccatatgcagccgcctcctaaatcaagaaatattaagggtttctggaatgttgtccaatcaaagttttggtgacttcgatagactgcgacatagaagccctagtcctatggcttcttcaaaccttatgtccaatgtcagtgggactgggttgg

SEQ ID NO: 270062 - DNA, 368 bp, Glycine max
actgatttatacgggtcacaccctgtgtacatggatctcagaaatgaaggtggcaagccttatgcacatggtgttcttttgttgaatagcaatggaatggatgtgttctatagaggaacctctctcacgtacaagattattggaggggtgctcgatttttacttctttgctggacccacccctctcaatgttgtggatcagtacacttccttaattggcagacctgctccaatgccttattgggcttttggattccaccaatgcagatggggctatcacaatctatccgttgtagaagatgttgtcgagaattacaagaaggcaaaaatcccggttgatgtgatctggaatgatgatgatcacatgga

SEQ ID NO: 270063 - DNA, 442 bp, Glycine max
agagatattgagcttttacagcctcagacattcagtaatgatgctatcattgactgtcatatcaagtatttgaaaaagaaactcccaactgatgaacagaacaggtttcactttttcaatagcttcttctttcgtaagcttgctgatttagacaaagatccatcaagtgcttgtgatggtagagcagcatttcaacgtgtacgcaaatggacaagaaaagtgaacctttttgaaaaggattatatcttcattcctgtaaactacagtcttcactggagtttaattgtcatttgtcatgcgggtgaagtgtcatgcttgaaagatgaagaaattaaggaatcttgcagagtaccttgtatcttgcacatggattccctaaaaggaagtcataaaggtctcaagaatgttttccaaagttacctatgtgaagaatggaaagaga

SEQ ID NO: 270064 - DNA, 395 bp, Glycine max
gaatcaaacacaacacacacacgtaacttcatctgggtttcaggaaaaaagaaaaaggaaaacaatgggttccgataatcaccagaacttggagttcttgaaggagatcggtttgggctcttccaacattggctcttacattaatggccagtggaaagccactggttcttctgtcacttctgttaatccttctaacaatcagagtatagctcaagtgaccgaagcaactttgcaagattttgaggaggggttgcgagcttgcagtgaagcagctaagacatggatgactataccggcaccgaagagaggtgagattgtgagacagattggtgaagcattgagggccaaattggatcctttgggtaagctggtgtctcttgagatgggaaaaattc

SEQ ID NO: 270065 - DNA, 383 bp, Glycine max
caataattgattggattgagtaacagtatgcattgaagtttacatgattgcttttgactgtgccggattttgtagtgtttgatatattataatggtatcattctgcctattgaaacttaagttgacaagttactgactgcataagctatgctattggcagttaatttctcccccccaaagctagtgattcttcatatgaatatggcactacatgtgtatgaagatatcatgaggatgactgaaaacctgagtgagaagtatataattggatatggagcatcaagtacagtttataaatgtgttcttaagaattgcaagccggtggctatcaagaggatctattctcactatccccaatgtattaaagaatttgaaactgaact

SEQ ID NO: 270066 - DNA, 383 bp, Glycine max
tgactcgtgtttatcataaaaaaatggaagatctatctactgcttttatgtggacaacatgttcatagcatctcaaaatttgttggtaattcaaaggttgaagtcactacttaatggtgaactttagatgaaggacatgtgagctattagaaagattatgggcatggagatcaagagggatcaagtctaaaagaagatctttttgtgttagaaagaatacattttgaaagtgtttaatcattttgggatggcattcacaaaatcagtatgttttcctctaacaccgtccattcgtctatctgaactcaatactactcgatcaaaattagagaaggaatacatgttttgttccttatgcaagtgttgtaagttggctcatatat

SEQ ID NO: 270067 - DNA, 424 bp, Glycine max
gaaggtgcaagagtttgttgtgagctataagctaggttatcgtgaggagaatatgaagttgcttgttttctttgttgctgcagtagttttggtagcatggccatgccatggcgcaggctaccaaaggttccctctccgaatgaaaactggctatggtgagcgttcttcggaggtaaaatgcgcaagttttaggcttgctgtggaagcacacaacatccgagcctttaaaaccattcctgaagagtgcgttgaaccaacaaaggactacattaatggcgaacaatttagatcagactctaaaacagttaaccaacaagctttcttttatgctagtgaacgcgaagtccatcacaacgacatatttatattcggcatagataacaccgtactctctaatatcccatactatgaaaaacatggatat

SEQ ID NO: 270068 - DNA, 431 bp, Glycine max
ggatacactgatacctctgcttttgctttgtttggctcttcttttgtaatggaaattgatctttctccccagttggccaagaaggtgtatgaaagcaatggtgggtcttaccatgcatggtccccttctgagcttcccatgttgcctgaagggaacattggtgctgccaaactagctcttcaaaaaaatggttttgcccttccttgttactctgactcttccaaggttgcatatgttctccaaggaagtggagttgcaggaattgtgctccctgaatcagaagagaaggtggttgcaattaagaagggtgatgctttggcactcccttttggtgtgataacctggtggtacaacaaggaggacactgagttggttgttctgatcttaggtgacacttcaaaagcccacaagactggtgaattcactgattt

SEQ ID NO: 270069 - DNA, 439 bp, Glycine max
tatgtggcatctggcctgagaatgaatgtgtagaagtgagttgacctgtcagtttcacattgcaggtccttctttatggggtaattttgaccgtggtaggagagtatcacatggagcttctttgtatccgtgccacataaatctggtccaaacattaaactatagagaatgtgtcaacaggacattctttctttctgttttttaaggtaaaaatagaaagcatggataaagaaaaaaaaaatgaagttagaccagatgtggtacataaagtttcctaaaaataatgcaagtgaagcaaaatgagatttcctgtaataaaaagataaaaataacatgcatataaaataactgcataagctatcttttttatgttacttctggacatagttttatacactataatgaagtctctataatagtatattacacccctgattac

SEQ ID NO: 270070 - DNA, 416 bp, Glycine max
gaaggagagagagagagacgcatttgtaacgacaaagaagcagaaggtgtagtaatactgagtggtcaaattaaggatcgggattcaggaatttccattctgagacacacagaagaacagaaagaaactccttttaattttcaatttcaagtcaagatcgatctgacatcatagaaaatgaccatggatgtcgttcagctgcagaggaagctgcgcgaacaccaagccgctatgtttcaacagggttttttggatgatcagttcagccagcttcagaaactgcaagatgagagcactccagattttgtgattgaggttatcactatgttctttgatgattctgagaatctcctaaaaaacatggcacgttgtctagaacaagtgccagctgatttcaaacaaatagatgctcatgc

SEQ ID NO: 270071 - DNA, 429 bp, Glycine max
tagaagacgacagaagggggcgctagttctgagtattctgatcgctccctgagagagctcgtcgcggcggttgcagaagaagattgcaagatgaagttcaacatcgcgaatcccaccactggatgccagaagaagctcgagatcgacgacgatctgaaactgcgagcattttgggacaagaggatctcacaggaggtcatcggagatgcactcggcgaggaatttaagggctatgtcttcaaaattaccggaggttgtgacaaacaaggatttccaatgaagcagggagtgctgactcctggtcgtgttagacttttgcttcacaggggaactccttgcttccgtggatatggaaggcgtaatggagagcgtaagagaaagtctgttcgtgggtgcattgtcagcccagacctctctgttttgaacttg

SEQ ID NO: 270072 - DNA, 436 bp, Glycine max
tacggctgcgagaagacgacagaagggtacggctgggagaagacgacagaagggtacggctgcgagaagacgacagaagggggtgctctgctcgtgcctctagggttatcatttctccatttccattttctctctcacttttcaagaatcgtaagctatgggaaagtcttacccaactgtgagtgctgattaccagaaggccgttgagaaggcgaagaagaagctcagaggcttcatcgctgagaagagatgcgctcctctaatgctccgtttggcatggcactctgctggaacctttgacaagggcacgaagaccggtggacccttcggaaccatcaagcaccctgccgaactggctcacagcgctaacaacggtcttgacatcgctgttaggcttttggagccactcaaggcggagttccctattttgagctac

SEQ ID NO: 270073 - DNA, 409 bp, Glycine max
  unsure (1)..(409): unsure at all n locations
ggaaacgaacctcaacaacgctgagcgcagaaaggggaaaaggggattagggtttaggaagcagcgacaacaatggatttcacagtggagaagaaggaatcagagaacaacgccgaaaatgctcacccaacaacgttagattcttcttctcaattggcatcggcacttgattccaacaacaaagaaatcgaagaacgacaagctcgtgaactcaaagccggacttcaccccctaaagcacaagtttgtcttctggtacactcgtcgaacacctggagttcgaaatcaaacatcatatgaggacaacataaagaaaattgttgaatttagtacggttgaaggattttgggtctgctactgccatctngctcgtnctgcttctttacctagtccaacagatttgcaccttt

SEQ ID NO: 270074 - DNA, 414 bp, Glycine max
gacaccaaacgagccatttgggagttaggttctgcacgctctgcttccagcgagtgttctttcttcgtttcaacaccttaatttgcacacgctgcttcttcagcttgagaaatggcacaagaaacctttctattcacatctgaatctgtaaacgagggtcaccccgacaagctgtgcgaccagatctctgatgcagtgctcgatgcgtgccttgaacaggaccctgacagcaaggttgcctgtgagacatgcaccaagaccaacatggtcatggtctttggagagatcacaaccaaggccaacgtagactatgagaagattgtccgtgacacatgccgcgaaattggattcatctctgatgatgttggtcttgatgctgacaaatgcaaggtgttggtcaacattgagcagcag

SEQ ID NO: 270075 - DNA, 437 bp, Glycine max
gattcaaaatacaaataaacgctcgcactccaaagatcagatatgaaagttcaccactccgtccaactccttctttctctatttctactgcttgcatttcacgttcctcatatggctgttggcactgcggagcttagagctctgatggagttgaagtcccctctggatccacagggcaagatccttgggtcatggataagtgatggtgatccatgcagtggcttcttcgaaggggttgcgtgcaacgaccaccgcatagtggccaacatctccttgcagggaaagggtctttctggttggacatctccagcactggctgaactcaaatgcttgtcgggtttatacttgcactacaacaacctttctggtgagatacccccacacatttcatatctcactgaactgcttgatctctatcctgacgctaatactttatc

SEQ ID NO: 270076 - DNA, 391 bp, Glycine max
ggcgtgtgtgtgtgacaaaagcaaaaggaaagaatatcaacaaggtaaagtagattccttactagacatggcgttgaaggacacattctacatatctcatggatcaccaactttgtccatagatgaatccattcaggccaggaagttccttcagtcatggaagaaggacgtgtttcctcaaagaccctcttcaattcttgtcatctctggtcattgggaaaccgcagttcccacggtcaacgtcgttgactccatcaacgacaccatctacgatttctatggcttccccaaacaaatgtaccagcttaaatatcctgcacctggagctccacaattggcaaggaaggtgaaagaactactcaagaaatctggtttcagccatgttgatgaa

SEQ ID NO: 270077 - DNA, 435 bp, Glycine max
gatagaggcgtatctagtgattccctaagattcctgaggcttttcctttggttgctctgctagggtttccaagcgttaacgagaaggagaagagattggagccttagtttcactatttttgtgtgaggggacatttctctctctacagttattattttgtaaattccaatggttggaatgtaagggattgaattccaaagttggtgtccaaatttcaggatgatccaacggttaatgagtccaggattatagttttaccaggacaaatttgggtgtatgcagaaaaaattaaagggttttggaagaggaagaagggataacaaatttatgaagaagaagaaacatagaaacgcatcgtaaatgtaaaaactaacctaatatgtctctatttatagctgggatactctgagtctattatttactcaatttttcttt

SEQ ID NO: 270078 - DNA, 363 bp, Glycine max
tacggctgcgagaagacgacagaagggtacggctgcgagaagacgacagaagggtacggctgcgagaagacgacagaagggtacggctgcgagaagacgacagaagggtacggctgcgagaagacgacagaagggtacggctgcgagaagacgacagaagggtacggctgcgagaagacgacagaagggtacggctgcgagaagacgacagaagggtacggctgcgagaagacgacagaagggtacggctgcgagaagacgacagaagggtacggctgcgagaagacgacagaagggtacggctgcgagaagacgacagaaggggatggatgatggaagaaaaagctaatgaacaattttatt

SEQ ID NO: 270079 - DNA, 432 bp, Glycine max
agaagttaaaagctactctacttcagtttaacttcaaatgcatgtgtgacccttcgttattcatctacactgattccaataacactggtttatatgctactgtatgttgatgacatcattgtcactggaaacaacttctacatcaaatcactagttactaaactcaattctgagttttctcttaaggacctaggaagtcttgactatttcttgggaatcgaagtcagatctcagtccaatggtgctcttattctaactcagtccaagtacattagggatctgctgagtaaaacaaagatggacgaagctaatctgatctcttctacaatggttagtggtcgcaaattgactaagtcagggtatgaatctttccctgatcccacacactacaggtctgtcgtgggagccatgcagtattcaactattactaga

SEQ ID NO: 270080 - DNA, 321 bp, Glycine max
  unsure (1)..(321): unsure at all n locations
actactctacttcattctaacttcaaagacccacttaaaacttcggtattcatctacaacacatccaataacacnttattcatattctactacctctttattacatcattttcacttataacaacttctccatcaaatcactacttactaaactcaattccaaacttttctattaaataccctacaactttttactttttatttctaattcaaaacatattttatcccacatactgctcttattctaactcaatccaaactcattaaatatctaactaattaaacttatatttactaaactaatctcatcttttcttcaat

SEQ ID NO: 270081 - DNA, 438 bp, Glycine max
ggtgtgattgtttgttgttgtaactcgttcttcttgttttgttgttctgtgtttgtgtttgttttttctctcacctgaaaatgtcttgctgcggtggtaactgtggttgcggaagctcctgcaagtgcggcaacggctgccgaggctgcaagatgtacccagacttgagctacactgagtcaaccaccaccgagaccttggtcatgggagtggcacctgttaaggctcaatttgagggtgctgaaatgggtgtgcccgctgagaacgatggctgcaaatgtggaccaaactgctcctgcaacccctgcacttgcaagtgaagtgttgggagagcaagcttcaagcagagatagcccttaattaggaataatgataaactattaatgtgtagctaaaaacttatgtattatgtctgtgatggttttcgtgcactctggt

SEQ ID NO: 270082 - DNA, 424 bp, Glycine max
gactcgctgtacttgtgttgtgttgtgttgtgtggggtaacaatggctcaggggaaagcattccctgttactgctccttcccttcatacaacaggtgttgccctacgtggaaaattgagtaaggttgtgctggcttacagaggtggcttagacacatcagtcattgttccatggctcagagagaattatggatgtgaagtcgattgcttcactgctgatgttggccaaggtatacaagaattggaaggtttagaagcgaaagctaaagccagtggggctagtcaattagtggtaaaagacttgaaggaggaatttgttagtgactatgtatttccttgcctacgtgctggtgcaggttatgagaggaagtatttgcttgggacctcaatggcccgccctgtaattgcaaaggccatggttgatg

SEQ ID NO: 270083 - DNA, 273 bp, Glycine max
  unsure (1)..(273): unsure at all n locations
aggagaaaacgaagacgaaagagaacagggaagcagcagaagncnaggaagcaaggccaagccanggcgcaggcaaccaaaggaacccacnccgaaagaaaaccggccacggngagcgnncnncggaggaaaaaagcgcaagnanaaggcacgcagaggaagcacacaacaaccgagcccngaaaaccaaacccgaagagngcgnngaaccaacaaaggacnacaanaaaggcgaacaanngagaacagacncgaaaacagggaaccaacaag

SEQ ID NO: 270084 - DNA, 186 bp, Glycine max
accaactttttaccaaatctacaagaaataatctacgggtgggtttcaatcactaccttaggttgttgcactattcacttcaatgctctggatttattactcactcttcaaaaaggatgctagcctccttttcattactattaacttctttgaatgtgtgatataaactatataccttacaatctt

SEQ ID NO: 270085 - DNA, 447 bp, Glycine max
gcttgctcattggtgacatcaggggtgatgacaacagggtccgctggcttccagtttgctggggtagcaaccttgaactttgaggccttctgcaatgactctatcaccctcggcacttcatccatgttccttccagtagtggcagggtacagaaaactcatcttgatctacaacaattaaccctcatattaaattaattaacatgttaattagcccaaaaaaaaaactacatattcattaatttaactagtcaaagaacaagtttcaccttcaaatctgggccaacaatatgaagagcccttgagggtaggttgccagtggagtctttctcatcagggtcaaccatgttgagttgcttgatgatttctctcttcggatcagcaattattggataattcactttcgcacctggctgcatacaaagggaaagatcaaaatctattcaac

SEQ ID NO: 270086 - DNA, 393 bp, Glycine max
ggttgtagagtgtgattgtttgttgatgtaactcgttcttcttcttttgttggtctgtgtttgtgtttgttttttctctcacctgaaaatgtcttgctgcggtggtaactgtggttgcggaagctcctgcaagtgcggcaacggctgcggaggctgcaagatgtacccagacttgagctacactgagtcaaccaccaccgagaccttggtcatgggagtggcacctgttaaggctcaatttgagggtgctgaaatgggtgtgcccgctgagaacgatggctgcaaatgtggaccaaactgctcctgcaacccctgcacttgcaagtgaggtgttgggagagcaagcttcaagcagagatagcccttaattaggaataatgataaactattaat

SEQ ID NO: 270087 - DNA, 436 bp, Glycine max
ggggactcgaagtgtaagcactaagtggttgaggggatgggaacccttgggagagcgatctacagcgttggtaactggattcgagggactggacaggccattgatcgtctcggttccctcctccagggcggttactacgtccaagagcagctgtctaggcatcgaactctgatggacatatttgataaggctcctgttgttgatgaggatgtatttgttgcgcctagtgcctccgtcattggagacgttcaacttggaagaggatcatccatttggtatggagttgtcttgaggggtgatgttaacagcatcagagttggaactggaactaacatacaggacaactctctggtgcatgttgcaaagtcaaatttaagtgggaaggtgttgcctacaattattgggaataatgttactgtcggccacagtgctgtca

SEQ ID NO: 270088 - DNA, 422 bp, Glycine max
gaacctatatttgcccaatggatacaatctggtcatggtaaaacttcctatgggttcgatatacttttatcttcaacgaacagtccggcgttcaatgcaggacgaagcatatggttgcctggttggttaaacgctgttaatgagaatagtaattctctattcttaacaatagggcctggagacttcttggttcatcatgctattgctcttggtttacatacaactacattgatcttagtaaagggtgctttggatgcgcgtggttctaagttaatgccagataaaaaagattttggttatagttttccttgcgatggcccgggacgaagcggtacttgcgatatttcggcttgggacgcattttatttggcagttttctggatgttaaataccattgggtgggttactttttattggcattg

SEQ ID NO: 270089 - DNA, 403 bp, Glycine max
gctgttactaatatgagatttgatgaggagcccgggtatgccaagcttatatcactttttgaaagcttgattgaaccatgcactccgttgagacctattagaatagatggagctttaaaggttggccaaaagcgaggaaggatgcttataaatctggaagaagatgagcaacctaagaagaaagtgcgattggggagtcctgctactcagtggatatcagtgtataatgctcgccgtcccatgaagcagagatatcactataatgttgcagacactaggctacggcagcatgtagacaagggtattgaggatgggttgtatataagctgtgtggcctctgcagcaaatctgtgggctctaatcatggatgcaggaacaggtttttcttcacaagtttatgagt

SEQ ID NO: 270090 - DNA, 423 bp, Glycine max
gaaagaggtgcatacaactacaaaggttgctgtaggagataagatattgaagtagtgctaagtgcctaacacctgcagtgaacaatggcctctgcatcagcatctcttctcaagtcttcacttgttcttgacaagtctgagtgggtgaagggacaagcacttcgacaaccttctgctgcatcagttgtgagatgcaaccccaccaccccatcaggcctcaccatcagagctggttcctatgctgatgagctcgttaagaccgcgaaaacagtggcttcaccagggaggggtattttggccatggatgagtccaatgctacctgtgggaagcgtttggcttcaattgggctagagaacactgaagctaaccgccaggcataccgtacccttcttgtgacagttccaggacttggtcagtacatc

SEQ ID NO: 270091 - DNA, 351 bp, Glycine max
  unsure (1)..(351): unsure at all n locations
cccacgcgcgcgaacaccacgagaagacgacagagggggcgagacaacanaaagaggcgagacccaaggcgagggcggaggaaacggcccacccaaaccccgaacaagacgacgccgagacccgagacgcgcncagacgaaccacaaaggaggaaagaacgggaccgaaacacacacagccaangccaaacaagccgagagcaccaaggacaccgccaccaagacaacaaaacccgccagaaaggcgaaagccgcgaaagaaccgaacaagccaaaacggcccccaagngcnnacnacaannncagggaagccaagnaaagaagcaacacaacgagncacaagacaaccga

SEQ ID NO: 270092 - DNA, 405 bp, Glycine max
ggagttgattaaggcgaggggtgtgatgagattagttttgagaagaaaccagcaatcggcgattaggagtgagagagatatggagggaattgaaggaaatagcagcagatacagtctgaaaccctcgcgaatttgcaacgaagatgttctgatctgcgtcgacgtcgatcctcagtgcctcgtcgaaatgaaaggtgccaccggtcccaatggcagacccctcacccgtttggactccatcaaacaagccatcgttctcttcgtcaatgccaaactcaccatcaaccccgaacaccgttttgccttcgccactctcttcaacaccctcgtctcttgggtcaagaaagagtttagcagtgaaattgagtcaacacttgcagcaatgcgtgttctttcagcttcttc

SEQ ID NO: 270093 - DNA, 417 bp, Glycine max
  unsure (1)..(417): unsure at all n locations
gatgtaaaaggtgagggtgacccgtgattcgtgaacacgaacaccatcnccatgggcttcaatattctgagaaccacttccatctccactcctatctcttcctccaaatccaaacccattttctcaactcttcttcgttcttctccttccaccattttccccccaaagtccgttactcccaccactcttttcgtttctgccacccccttcttcactctccatcccaagcttggttttcgtggtgggattgtggccatggccgcacctggctctctccgcaaatccgaggaagagtggcgcgcaattctctcccctgaacagtttcggatcctcaggcaaaagggcaccgagttccctggaacaggagagtatgacaagttctatgaaaagggagtttacaactgtgctggttgtggg

SEQ ID NO: 270094 - DNA, 441 bp, Glycine max
  unsure (1)..(441): unsure at all n locations
gacgcccgagtgggagtaggcgtttgccatgcttgtgcgtgagggatgggcttaacgttaatctcatgtcatgctttttaacccactcacacactctctcttctttcttcatgcccgcctccctttcttcttcctttgatccgttcatacggtggttagatgatggaatcctgtgattgtatagacacacagtatcctccagatgaacttctcgtaaagtatcagtatatctcggatgtgctaattgctcttgcctatttttctattcccgtggagctcatctattttgttcagaagtctgctttctttccatatagatgggtgcttatgcagtttggtgcttttattgatctctgtggagcaactcatttcataaacctgtggacattctccccacactctaaggctgntgctgntgtcatgacgattgccaaagtgtcg

SEQ ID NO: 270095 - DNA, 345 bp, Glycine max
ccggcgttgacagcgcggcacctgacggaagagcagtgggaggactactgatatatctcggagctggcgatccaaggggactatgaaacgcgcctgatggacacggaggagatgaaagagcggagcgtgtagcagaccacgcaggggacggagtgtatggaacagctggcagcgatggaagggatgagtgaatggctgaggaaggctgaaggagcggcggaatacggctcggagatatgacggagacttgtctatttgtcacgtgcggcacagacgccaggggcattgaccaggcgtaagacatgaacgccattcaccggctggaggaaaagccttcagtgaggg

SEQ ID NO: 270096 - DNA, 289 bp, Glycine max
gacaattgagactagagaacagggaggtgcttgtaccctagtcgtgagaagaaaggaaagggataagaggaaaatggtgtgcataacgaaagcgacggttaaagaccttatgtcgatgcacgcatgcaacctgttctgccttcctgagaactaccagacgaagtactacctctatcacatcctgtcctggccccaactactctacttctgcgaagactacaacgggcgcatcgatcgctacgtgctcgacgagatggaggaagaaaccaccgactgccacggccacatg

SEQ ID NO: 270097 - DNA, 460 bp, Glycine max
cgacagaaggggacaccaacacatccattcattgtcttaatgttagcaatgtcttcctcttgctccatccatttcttcctccggctctcaatagcccttttctcagtttgttgcttagcagcatctcaagctcccaccaccaaatcacacccctatatccttcccattaagaaagaccccgcaacaaatttgtactacacttcagttggcattggaactcctaggcacaactttgatttagtcattgatctttctggtgaaaacttatggtacgattgtgacactcattacaactcatcatcctacagacctatagcttgtggctcaaagcaatgccccgaaattggatgtgttggttgcaatggccccttcaaaccaggttgcacaaacaatacatgccctgctaatgtaatcaaccaattagccaaattcatttacagtggtggcttatgtgaagatt

SEQ ID NO: 270098 - DNA, 419 bp, Glycine max
  unsure (1)..(419): unsure at all n locations
ggggngactggataaaataaaactaagcccataaaataggatagagtgacagacagattcgggatttaccatttaccacaccaaaaccaatcggatcgtttcctctgcggagtcagaaatccatggatccctacaagaatcggccatcaagcgccttcaattctcccttctggactactaattccggtgctcccatctggaacaacaactcatcgctgactgttggatctagaggtccaattctgctggaagattaccatctggtggagaagcttgcaaactttgacagggaacggatccccgaacgtgttgtccatgctcgtggagctagcgcaaagggtttctttgaagtcacgcatgacatttctcaccttacatgtgccgattttctccgagcccctggagttcagacccctctc

SEQ ID NO: 270099 - DNA, 295 bp, Glycine max
  unsure (1)..(295): unsure at all n locations
gacgggagaagacaaacgacgggaggcggaaggagggagggaaccaagcagcaggaggggggggcggcgaaggaagagggaagggaccaanagaagacacaggcagggaggaggcacanaggaaaacagacacgaacgagggacanggcgcaagacacaaaggccaggagccaaanacaggcaaggaggaccgacccanagccagggcgaccgaaacaaaagagggggagaaggacacaggaggaaaccagagcagaaaaggagaacgaagacgaccacgcaagcgacaccagag

SEQ ID NO: 270100 - DNA, 424 bp, Glycine max
ggcccaaaaatctctcaagaaatcatagcgaaagggcaactagcacttcaaattcgctgtctcagtccctcgtatccaactattttgcttaggattttccttcttcatcacaacctcgtaataaattcgttaagttcctccttgtttggtcccaaacaatctgagaaccctctttcaattcctcttcctcaactccatcgttcatcgccgtccactattattagcaattggtatttagtaattaattaattactaacattagttaataataatggaccctgcagagctgaagcgcgttttccaattgttcgaccgcaacggtgacgggagaatctcattgaaggagctgagcgattcgttggagaatctaagcatcttgatcccggacaaggaccttgctcagatgatcgagagaatcgacatg

SEQ ID NO: 270101 - DNA, 392 bp, Glycine max
  unsure (1)..(392): unsure at all n locations
cggggccaaccgncgaagacatgggncagaagaatcagggcctggtcgtcttcacttccaaatcagccaatgaagcttctgagggcattgcctatcagtggacatacgtagtataaaaccaatatggagatgatggcatgaaagctgtgtcttgtccaagccgtgcagaatcacccgcattgaacacaaagtctagatcatcggttctggtcaactactttcattctgcttcaaatcgatcttaagcctgcgcttacaattctgcttcactacttgacatgatgaagacttgtcactaaacagccggtaaccgttgggccaatttcattgctgctgattattaccaaaggagtgattgcgcaagagcaccactagccgatgattaagcaaat

SEQ ID NO: 270102 - DNA, 449 bp, Glycine max
aagaatggagtggacattgtctctggcacacgcggcatgtctcactttgccaaacccaattggcgcagtgtctacaagcgcattgcgcttaatcatccagatgcccgagttggggtattttactgtgggccatcagcccccacccatgagcttcgtcagctagcattggatttctctcacaacacatccaccaagtacgacttccataaagaaaatttctgacaagataggggaattatcggagatcaggtgaaggatgatgtggaacgagctaaggcgtccaccttgatccccattccccaccacctagatgattgcctataaataattaagtttctacatatggttggttgttatggctttgtaaaagcacgaaggctggcggctgctaaatggttgaagtagtgagttggctaccaattacaaaaagtgtgggcgtctggttggat

SEQ ID NO: 270103 - DNA, 420 bp, Glycine max
  unsure (1)..(420): unsure at all n locations
gggaagcaaagacagacactagctattcgaatttgaggtctcccaaataactaggatgatttggatagcactttttttagtttcactggcttttctgcggttatggagaagcaataagaatgcaaagaaattaccacctggtccaaaagggttgccaattttgggaagccttcacaagttgggaccaaatcctcatcgtgacctgcacaaactagcccaaaaatatggacctgtcatgcacttacgtttaggttttgtgccgaccatagttgtttcttcacccaaatctgctgaattgttcctcaagacccatgaccttgtctttgctagtagaccacgtttcgtggcggatcaatacatcttttgggggcagaggaacttangctttgctgaatatggttcttattggcgcaacatgcc

SEQ ID NO: 270104 - DNA, 250 bp, Glycine max
taaggttctggttctatgtttcataatgtgttcaagatgtacataatcattgttagtttaaattgtttgttttaccccgttttgtggtttgcattaattcttttgttcattttacatttttttttgcttattttaagttttgtttttaataataatcttaatttgctttttatttatataaattttacttatattattttttattgaaaatctttttacatttaatggtttgaacttttattatttaatt

SEQ ID NO: 270105 - DNA, 316 bp, Glycine max
gaaacagggctgggctatcgactctttctaggggtctacgaattcacgtgtaggttgtcagtgaatgttattgagtttgcgcatgccgcgttgcagatatgggatcttgggcggtactttgcaacgggaaagcacttggcaggagcaccagctaatggggtatatcactttcacgctggatcagatcctgacataccttctaatgtcactatcatcatcagctgacactagagcctatgactgggaggccaattgccgtgaagacaagttcccttacatggctaatgcatatggggctttgacctcggttgctttt

SEQ ID NO: 270106 - DNA, 412 bp, Glycine max
gacctcaccgagtcgcagcgatcgaagtttcacatgagccttatccagtttagggtttcggttccttaccctacctttgacgtatcgaaaccttaaatttgggattaggtctgagcaatctggttggtagaacctttggtcttagagagtcaagttttatgtctggattagacgatcaaattcctactgccttcgatccttttgctgatgcaaatgctgatgactcgggtgctgggtcaaaggagtatgtgcatattcgcgttcagcagcgaaatggtaggaaaagcctgacaaccgttcagggattgaaaaaagaattcagctataacaagatacttaaagacgttaagaaagagttctgttgcaatggaacagttgttcaggacccagaactaggacaggttattcaact

SEQ ID NO: 270107 - DNA, 412 bp, Glycine max
ggcacaagtgagtttgttgatcgagataactagggacagtgtgatgaaaatgaaggtccttgttttcttcgttgctacaattttggtagcatggcaatgccatgcgtacgatatgttccctctccgaatgaacactggctatggtgcccgtactccggaggtgaaatgcgcaagttggaggcttgctgtggaagcacacaacatctttggctttgagaccattcctgaagagtgcgttgaagcaacaaaggaatacatccatggcgaacaatatagatcagactccaaaacagttaaccaacaagcttacttttatgctagagacctcgaagtccatcccaaggacacatttgtgttcagtatagatggcaccgtactctctaatattccatactacaaaaaacatggatat

SEQ ID NO: 270108 - DNA, 388 bp, Glycine max
ataaaaaataaacatatattgagaatggagggttgtgtgaagaagttgctatgccttgttgggtttgtggtgcttgtgagtactattggtggggtggagagtgctggtgaatgtgggaaatctacaacccctgataatgaggcttataagcttgcaccatgtgcctcagcagcacaagatgagaatgctagtgtttctcagagttgctgtgctcaggtgaagaaaattgggcagaaccctagttgcctctgtgcagttcttctctctaacacagccaaaatggctggcgtcaaccctcaagttgctgtcaccattcccaagcgttgtaacctggctaatcgccctgttggttacaagtgtggaccttacactctgccttgaaagagtt

SEQ ID NO: 270109 - DNA, 401 bp, Glycine max
agaagggcaacataagtcatcgaaaggatctcgaagacccaccagggcacgaaagccgggatctttcagaaaatggattcctattcgaagggtgcataaccgcatggataagctcacactaacccgtcaatttgggatccaattcggttccttaggaggtatcgggaaggaattttggaatgtaataatatcgattcatacagatacagaagaaagggttctctattgattcaaacgctctacctacgagatagggatagagaaagaggaaaaaaccgaagatttcacatagtacttttggtcgaaaaatcgatctgatttttttcgtacttttcgctcaatgatgaaatgggtcagattctacaggaccaaaccttgtgggagttaaagaatgatggaag

SEQ ID NO: 270110 - DNA, 114 bp, Glycine max
ttttattaaaatgtatgatctcatatattacttttctacaatttatatatcatatcaattccatgcttactatatattccctctccgaattaacactgtctattgtgcccctac

SEQ ID NO: 270111 - DNA, 347 bp, Glycine max
ataaaaaataaacatatattgaggagggagggttgtgtggagaagatgctatgccttgttgggtttgtggtgcttgtgagtactattggtggggtggagaatgctggtgaatgtgggaaatctacaacccctgataatgaggcttataagcttgcaccatgtgcctcagcagcacaagatgagaatgctagtgtttctcagagttgctgtgctcatgtgaagaaaattgggcagaaccctaattgcctctgtgcagttcttctctctaacacaggcaaaatggctggcgttaacccttaagttgctgtcaccattcccaagcgttgtaacctggctaatcgccctgt

SEQ ID NO: 270112 - DNA, 400 bp, Glycine max
ggcgccactcccatttctcgctctcattcttcttcagatgccaaacctaacctaacctcccaaacaaactcaaccttatcatcatcatcgtcgtcgtttaaataaattctgatctccacgcacacgctctgagtcagatcatgctgcgtttgtgctacggccctctggattgctgcttccgacgccgccgtgccgactgactcctctggcacaccgacttgaagccccacgcctccggcgacttctccatcgccgtcgcccatgccaattactgtctcgaagatcagagccaagtcttcaccttcccctacgccacctacgtcggcgtctacgacggccacagcggccccgaagcttctcgattcgtcaacaagcgcctcttcccttatttgcacaaatt

SEQ ID NO: 270113 - DNA, 413 bp, Glycine max
ttcctttaatttttttcattatatctattcattgagtaagtgatgatccaacagttcttactcagggaatttttggacttcgatttaaggtttttttgaatcatcgtggttatagtatgaatctgatgtttttttaattgattcatagggtcctaacaagagaattcctatcaataataaaaattcaataataataaagaagacaacagtaaaatcatattatacacaataaaaaatgaagtaaatagtagaatattcaagaggccttaaaagatcaagataaagacgaaagaaccgacttgatattttagcattataaccaaaaagaatagctttcggatctctattttttattatcgtcaaagaaaattagaatcataggattaaataaagaaatttcaaactttctatta

SEQ ID NO: 270114 - DNA, 415 bp, Glycine max
gtgtgaattattgtacatttcctatataatgtgtgtgttttaatttgacagatatgagaatagcttgccgagagtggacatgtttgtgttcacggcagacccaatcattgagccacccatgatggtgattaatacagtgttatctgtgatggcttatgactatccagcagagaagctcagtgtgtatctctcggatgatgcaggctcagacataactttttatgctcttttagaggcttctacctttgccaagcattgggtgccattctgcaagagatttaaggtggaaccgaggtcacctgctgcttattttaatacccttgtatcaacaaactcacacgaccataaccatgccaaagacttagatgccatcaaagtgcggagtaatcacatttttttaggctcatgtcacttg

SEQ ID NO: 270115 - DNA, 417 bp, Glycine max
gagggcggtgttactccttctctcgttgattcggatctagagtcttttttcactcttcagttctcgttgttgttcttcgctttcctgaaactagggttttcaatttcgattcattcgttaataattaaagatgtttgggagggcaccgaagaagagcgataatacgaggtactacgaaatcctcggcgtctcgaagaacgcttcgcaggatgatctgaagaaggcttacaagaaagccgccatcaagaatcaccctgacaagggcggtgatcccgagaagtttaaagagctggcacaagcatatgaagttctgagtgaccctgagaagcgtgagatatatgatcagtatggtgaagatgcgcttaaagaaagaatgggtggtggcggtggccatgatccgtttgatatcttttcatc

SEQ ID NO: 270116 - DNA, 404 bp, Glycine max
gggtggagagtggtgagtagtgaccaaagcaaacgcacgcactctattattgaagggaagatgaaagatgaagatggcacaccccaaagtgcaggtaagggacagtacaagttgtgggtgttgggtgctatcattcttcttgctctttggtccatgttcactgcttctctcactctcaaatggtcagctgggaacctcaaccgtgacttcgattctgccactctcaacgatttcgatgtcctggaagtggaggagagggagaaagtggtgaggcgcatgtgggatgtgtatactcaaagcaagagtggcaggggaagtggcttacctcgtttttggagtgatgcttttcatgcggcttacgaccacttggtcagtgatgttcagagcgttcgaaatgctgctgt

SEQ ID NO: 270117 - DNA, 416 bp, Glycine max
tcaaaaaatggagagtaatccgtatcatctttcggggggacgatatactgatgtatactatggctgaagttcgaacaacacgcaattcattttgggccgttttcactttgttagggtcattggctttaatgttcgttgcaatttccacctatctagctatggatctcgctctttatttctgagaaaattaccgattacctcttctattactgactctatttatactacatttattccacaaggggccacgatggctttatatggaatcgccgctctctttagtagtttacatttagcgtcaattattttttgagatatataccgtggttttgatatcttcaattaaaaacggaaaaaggcactttttgatcgatggggattacctgcaaaaaactgttggattattctcgaaatac

SEQ ID NO: 270118 - DNA, 415 bp, Glycine max
ataagcagcatcaactaaacctaaaatcttctgcgccacccagcattgtagcatagtgattctgctcactacaatgccatcatcactatcctcattcctccgtatggctcctattctctcccttcttgtactctcatgtgtgattagttctagtagtgctcagggaccaccttcacctggctactatcctagttctaaaattagtcctgttagtttttatcaagggtttagaaacctctggggatctcagcatcagagactagaccagggctcattgacaatctggcttgactctaactcatgaagtggattcaagtcacttcactcttatcgatctggttactttggtgctgccattaagcttcaacctggttacactgcgggagtcattacatcattatatctttcaaacaac

SEQ ID NO: 270119 - DNA, 402 bp, Glycine max
ggcacaagtgagtttgttgatcgagataacttggaacagtgtgatgaaaatgaaggtgcttggtttcttcgttgctacaattttggtagcatggcaatgccatgcgtacgatatggtccctcttcgaatgaacactggctattgggcccgtacttcggaagtgaaatgcgcaagttggaagcttgcttgggagcacacaacattttggtttgagacattctgaaagtgcgttgagccacaaggaatacattcatggcgaacaatatagatcagactcaaaacagttaaccaacaagcttacctttatgctagagacctcgaagtccatccaggacacatttgtgttcagtatagatggcaccgtactctctaatattccatactacaaaaaacatggatatg

SEQ ID NO: 270120 - DNA, 411 bp, Glycine max
ggcacaagtgagtttgttgatcgagataactaggggcggcgtgatgaaaatgaaggtccttgttttcttcgttgctacaattttggtagcatggcaatgccatgcgtacgatatgttccctctccgaatgaacactggctatggtgcccgtacttcggaggtgaaatgcgcacgttggaggcttgctgtggaagcacacaacatctttggctttgagaccattcctgaagagtgcgcttaagcatcacaggaatacatccatggcgaacaatatagatcacactccaaaacagttaaccaacaagcttacttttatgctagagacctcgaagaccattccaaggacacatttgtgttcagtatagatggcaccgtactctctaatattgcatactacaaaaaacatggata

SEQ ID NO: 270121 - DNA, 350 bp, Glycine max
aaacggtcctcggccgtgaacaatatgtcttggggggaagacggcagtggtggtggctgcttctgaacgatgtggtaccgtggcatgaggcgcatgccgtgggggcgttacgcggcggatataagggacccttaatcttaggagcggcgattgctgggaaccttggacacggttgaagaagccgtttgcgcctacgactgctctgctagagccatgacgtgtctcaaagctcgcaccaacttcgtttacccaacttttatcgtaaccttctttcgacaccactgaacacttgttccctaacttcaataacttcaacatctttcacatacacttactcttcaatcaccatc

SEQ ID NO: 270122 - DNA, 410 bp, Glycine max
ttgagggggaagcacaagagaagagaagaggggagaggagagggggggagaaggggttgcagagagagagagagagagatgtcatcatcttcagacctggacaggcaaatagagcagttgaagaggtgtgagcctcttaaggagtctgaagtgaaggcgctttgcctcaaagccatggaaatccttgtcgaagagagcaacgttcaaagggtcgacgcccctgtcaccatatgtggtgatattcacggtcagttttatgacatgaaggagcttttcaaagtaggaggggattgccccaaaactaactatttgtttctgggggattttgttgatagagggttttactcggttgaaacgtttctgcttctgctcgctcttaaagtgaggtatccggatcggataacactcat

SEQ ID NO: 270123 - DNA, 395 bp, Glycine max
ggttcaccacagtttacactcacgagagtacccagtttctcttctcaatttctcaagtgtgccgagaaaatcatggtggacgcagcagaacgtagatacttggaggatgatgattcatctctcatgaaaactatcaagggcgcaacaactggtttagtggctggaactatctggggtactgtagttgccacctggtatgatgtcccccgtgtcgagagaaatgttgctcttccagggctgattaggactatcaggatgatgggcaactatggtttgacctttgctgccataggaggagtctacataggtgtagagcagttggtgcagaactataggatgaagagggatttagtcaatggagctgttggcggatttgttgcaggtgcaactattct

SEQ ID NO: 270124 - DNA, 411 bp, Glycine max
ggttgccactagtgactactatgaattttataaaggtggcataagacatattcttactaacttcttgggtgccaatgcacagaagcgacaccatatccaccgagaaaccatgatggaaaatattttgagccaatttagtgaacatgtcaagaccttctctgatttggcagttaattttatgaaaatattcgtaactcaactttttggattagcactgaagcaagctctgtgaagttatggatagaccatttatgtgtaggagcttgcgagtacattatcaaaagaggacatatataagattctagaggttgatataatggagggtgcaactgaagtgtattgacgagatttctttccatacttgaagtggatatcaaataggaggctggagatgaaaattcagaatcttta

SEQ ID NO: 270125 - DNA, 408 bp, Glycine max
ggttctagtgtatgtgattgttgtgactcgttcttgttcgtcgttatcttcttcttttgttgtttgtgtgtttgttttttctctcacctgaaaatgtcttgctgcggtggtaactgtggttgcggaagcgcctgcaagtgcggcaacggctgcggaggctgcaagatgtacccagacttgagctacaccgagtcaaccaccaccgagaccttggtcatgggagtggcaccagttaaggctcaattcgagagtgctgaaatgggtgttcccgctgagaacgatggctgcaaatgtggagctaactgcacctgcaacccctgcacttgcaagtgaggtgttggagagctaaagcttcaagcagaaatggcccttagaaataatgataaaaactatatgtaggttcaaaac

SEQ ID NO: 270126 - DNA, 410 bp, Glycine max
gaatggacatggtgctccaaaatctagataaggggcttaattgaattgagacatgagtgagaatagtaaaaccctgcgtttcggcatcttaagctgcgccaacatcgccagaaaagtggctcgagccattgctctcgctccgaacgccactctctgcgccatcgctagccgttccatagagaaggcggagaagttcgccgacgagaacgggtttcctgcgaccgtgagggtttacgggagctacgatcaggtgttggaagatccatgcgtggacgccgtgtacctgcccctgcccacgagtctgcacgtgcagtgggcggttatggccgccagtaaaaagaaacacgtgctggtggacaagcccgtggctcttgacgtggcagaacttgatcgaatcttggatgcagttg

SEQ ID NO: 270127 - DNA, 418 bp, Glycine max
tgattgttcaagagtttgttgcgagctataaggtggtttatcgcgaggagaatatgaagttgtctgttttctttgttgctgcactaattttggtagcatggccatgccatggcgcatgctaccaaaggttccctctccgaatgaaaactggctatcgtgagcattcttccgaagtaaaatgcccacgttttaagcttgctgtggaagcacacaacatccgagcctttaaaaccatttctgaagaatacgtttaaccaacataggactacattaatcgctaacaatttatatcagactctaaaacagttaaccaacaagctttcttttatgctagtgaacgcgatgtccatcacaacgacatatttatattcggcaatagatacaccgtactctttaatattccatactatgaaaaaca

SEQ ID NO: 270128 - DNA, 403 bp, Glycine max
gttacaaatccgcatgttagaaggtaatgctttgcttcaggcccatttctctaggcaatttgttggtgggaaccttgcattggaccagaaggaggtgcttctttctgcaaatagactgcttcaggcaatggtagatgtgatatcgagcaacggttggctgagcctggccttacttgctatggaagtcagtcaaatggtgacacagggaatgtgggaacgcgactccatgctgcttcaacttcctcatttcacaaaggatctggctaagaaatgccaggagaacccaaggaagagtatagaaactgtgtttgatttattagaaatggaggatgaggagaggcaaaaattgttgggcatgtcagatttgcagttgttggatattgcccgattttgtaaccgattc

SEQ ID NO: 270129 - DNA, 421 bp, Glycine max
gtcggagatatcgaactgcagctacagcaaaggggcaccggtgacggtgacggcgcagttctcggcggcggatagggaggctagagtgttgaggtacagggagaagaggaagaaccgaaagttcgagaagaccattcgttacgcatcgagaaaagcgtatgccgaaacgaggccaagaatcaaaggaaggttcgcgaaacgcactgatgcggaccctctggctggatacggcgtcgttccgtcgtgttgatgattatcatatatatcatatatgaatatgaatgcttacttttttgttttcttatgtttgcttttgctgctgtatatatggactacgccttcttttgtttgaattatgcaatgtaaagttgcaaaaaaaaaaatttaatataaaaaaaaaaagcggccgttttaaaggatc

SEQ ID NO: 270130 - DNA, 399 bp, Glycine max
attatataaacatttgtagaccatctcatgacgaaagatctaacaagatagagcatagatgagataatcaacattggacgtctgacaagcaagtctcatagggcaccatatcatgtagtaaccacagaggctccaataagtgacatagccacaattagaccttcaactgtgggttcactttgtaattgaaactccctttctatgtacaacataaatcctgcatgcgaactcaggttattggttatatcaaccaattttaattcatcgcaaaataaataaaatcaattcaccatacctgcaataatctcattatcccatccttgtaataagttacctatggcatcagcaacagctacaagaacagctacactcatcgtttcagttagtttcctaatcaat

SEQ ID NO: 270131 - DNA, 401 bp, Glycine max
gagagagatagtgtgtgcagaggatgtggctattcggcagagaaggggcttctgggttttcatcatcatccactgcagagcaagtcactgaaggaattgatggaactggtttcactgccattgtcacaggggcatccagtggtattggcactgagactacgcgtgttcttgctttgcgtggtgtccatgtgattatgggtgtgagaaatatgcttgctgctaaagatgtcaaataaacaatactcaaggagattccctccgctaaagttgatgccatggagttagatctcagttcgatgaactctgtcaggaaatttgcatcagagtttaagtcctctggtcttccatcgaacatcttaattaacaatgcatgaattatggcttgccctttcagtctctct

SEQ ID NO: 270132 - DNA, 397 bp, Glycine max
gaaccaaacacaacacttcactctcaagcttcaagcatgactcctttttacttcctcctatttgccttcatccttttcctctccatgaacttcttgatccaaacaagaaggttcaaaaaccttcctccgggaccattttctttccctataatcggaaacctccaccaactcaagcaacccctccaccgcacgttccatgccttatcacaaaaatatggccctattttctccctctggttcggctcccgttttgtcgtcgtcgtttcgtcgccgctcgcggtgcaagaatgcttcaccaagaacgacatcgtcttggccaacccgcctcacttcctcaccggcaagtatatagggtacaacaacaccaccgtcgccgtttccccctacggcgaccact

SEQ ID NO: 270133 - DNA, 416 bp, Glycine max
tataaagatggcagagacattcctatttacctcagaggcggtgaacgagggacaccctgacaagctctgcgaccaaatctccgatgctgtcctcgacgcttgcctcgagcaggacccagacagcaaagttgcctgcgaaacatgcaccaaaaccaacttggtcatggtcttcggagaaatcacgaccaaggccaacgttgactacgagaagatagtgcgtgacacctgcaggaacatcggcttcgtctcaaatgatgtgggactggatgccgacaactgcaaggtcctcgtcaacattgagcagcagagccctgatattgctcaaggtgtacacggccaccttaccaaaaaacctgaagaaattggtgctggtgaccagggtcacatgtttggctatgccactgatgaaacccctg

SEQ ID NO: 270134 - DNA, 420 bp, Glycine max
tataaagatggcagagacattcctatttacctgagaggcggtgaacgagggacaccctgacaagctctgcgaccaaatctccggtgctgtcctatacgcttgcctggagcaggacccacacagctaagctgcctgcgaaacatgctccaaatccaacttggtcatggacttcggagaaatcacgaccaaggccaacgttgactaccagaagatagcgcgtgacacctgcatgaacattggcttcatgtcaaatgatgtgggactggatgccgacaactgcaaggtcctcgtgaacattgagcatctgagccctgatattgctcacggtgtacacggtcaccttaccaaaaaacctgaagaaattggtgctggtgaccagggacacatgttaggctatgccactgatgaaacccctgaatt

SEQ ID NO: 270135 - DNA, 359 bp, Glycine max
acaccacatatggtataaatattgcagagacattcctatttacctcagaagccgttaactaaagacaccgtgccaagctcttcaaccaaatcttcgatactgtccttgacgcttgcctctaacaaaacccatacagcaaagtttccttcgaaacatgcaccaaaaccaacttgctcattgacttctgaaaaatcacgaccaatgccaacgttgactactataatatagtgcgtgacaccttcaagaacatctacttcgtctcaaatgatgtgggacttgatgcctacaactgcaaagtcctactcaacattaaacatcataacccttatattgctcatggtgtacacagtcaccttacc

SEQ ID NO: 270136 - DNA, 407 bp, Glycine max
caaatggatacatccatctatggcggactggtccaccaagtctagcttcatatgcaaaatgaataggcagatgctccattaaatcaaaaaacccaaggggaaatattttctccaacttgcacagaattaatggaatattttgttccattctactcaagtcatccttcatcaaagttgtagaacacaaatatttaaagagatgaattatttcaataagtagatttaagacatgtggcgaaaataagccaaaaacaataggaagtaagcactccatgaatacatgacaatcatgaattttcatcccatgcacagttcccttatcaacattggcacatatggtcaagttagaagaataaccatttgacattcatagttcttttatccattgacatactaactttgtttgg

SEQ ID NO: 270137 - DNA, 400 bp, Glycine max
  unsure (1)..(400): unsure at all n locations
gatccaaagggaaaacaagaagctcaattgtctagttgaagagcttcaaaacaagatttacaagagtaaaaggggaaatgggtattgcttatctcaacatgccaggcttcatgagggcaatgtttattatgttatgtgctatgatgatattgccagaactaacacatgcaaagcatgcaagagtaactaggcactacaagtttaatatcaaaatgcaaaacttcacaaggctttgccaaacaaagagcattgtaactgtcaatggacgatttcctggtcctagaatcatagcaagagaaggagacagaattgtggttaaagtcgttaaccacgttcaatacaatgtcacccttcattggcatggaattcgccaactaanaagtgcatgggcagatggacc

SEQ ID NO: 270138 - DNA, 386 bp, Glycine max
ctgttcatggctagcgacactagaggtattgcgctgttgtcagattcgcctgatgagggaggaaatttcagctgcgtggattagctcaggacataaaccttgcccgtgcaactatcgggtacacgataactgcttcaattcctatgggggcatggaataggtcgaattcgctatccaagcctgggcatcatgttaagtgctataccgtgaacaacccttgaatgatcctttttgcctgcatgacagatcgacgcttatccagataccagcatggtcataagctctggtggctctccattgctgcagatttatgtgttgtgcacagtcttccattggcctaaggctctcaaaatctaacttgtcacctgggggacagccttgtctgt

SEQ ID NO: 270139 - DNA, 417 bp, Glycine max
gaaagaaaccatcttgctcgacggctgctacttcgggcactggctcgtcgtcatggagaagcccgagggcgaccctacccgcgatgacatcatcgatagctacattaaaaccttggccaaggtcatcggaagtgaagaggaggcgaggatgaagatatattcggtttcgactaggcactactttgcgtttggggctcttgtgtctgaagagctttctatcaagcttaaagaattgcctggagttcggtgggtgcttcctgattcttacttgaatgttaaggaaaaggattatggatgtgagccctttattaacgggcaagcagttccctatgatcccaagtatcacgaagagtgggttagaaacaatgcacgtgccaatgagagaaacaggcgcaatgacaggccttgtaatgctga

SEQ ID NO: 270140 - DNA, 400 bp, Glycine max
cactaggtttggaactcatttgcgagcattcttatcattgggaattacgaaaacatgttggagctaagagaaataccctttgtattgtagttgtttcttttcccgcagaaactcaaaactgttttagaaaaataacgatctcagactcgttaaccgttgtattattgtgaaattttaatatgtggtttgcgattcatttccgcacatctttaccattgggattttcaaaataacatctgttggggggagaaatccccatcgcgtgtagacagtggaatggaggcttcaatccattctccttctctctaacgtttgggaaccctattagagtagtcagaggaatctcaggaaatcgctagagatgctgctattgctgtcacaatacacacgtgagttcgct

SEQ ID NO: 270141 - DNA, 424 bp, Glycine max
gatgattgaagtgcaagcaaatgccatggagcagagtgggtgggccaatatgcctcacgagcttctcagagaggtcctcctccgaattgaatcgtcggagtccacgtggccgctgcggaggagcgtcgtggcttgtggcggagtgtgccgcacctggaggaggctcatcgtcaaggagattgtcaagccacctcaattctcttccaacataaccttccccatctctctcaaacaggttcagtgctctttctctctattcaaattaaatcaattttgtttattttcttgctttaaatttggcagcctggcccgagggaacatctactttagtgctttattaggcgcaacagtgcctcacagacatattatctgtttctcaggttatctagtggttagtacttagttaatactacttgagcttata

SEQ ID NO: 270142 - DNA, 418 bp, Glycine max
tgggatgattgaagtgcaagcaaatgccatggagcaggggtggtgtgccaatatgcctcacgagcttctcagagaggtcctactacgaattgaatcgtctgaatccacgtggccgctacggaggagcgttgaagcttgaggcggagtgtgccgcacctggaggaggctcatcctcaaggagattgacaagccatctcaattctcttccaacataaccttccctatctctatcaaacaggttcagtgctcatttctgtctattcaaattaaatcaatcttgtttattcacttgctttaaattttgcagcctgtcccgagggaacatctacttcagtgcttcattaggcgcaacagtgccttacagacatattatctgtttctcagtatatctagtggttagtacttaggtaatactact

SEQ ID NO: 270143 - DNA, 410 bp, Glycine max
cagatttgaaagctcatttagagcacaaaatgtggtgctcttctctccctctcccctcattcatctccttcttcctccaagctcttatccatggcctcctatggtggtgagcttcttctagactcatcttctccttgaagtagcgtctcctctctctcttcctttccccattccgctgccattcatcttccaagaagcaaaggaatccattgatgaagaagatcctaggcctacaagctccaatggagcttacatcatgtggtatcagagcatcttcatctaggtgatgttcttttgcttcctctatctttatgtttggagaattctctttaattccttgttcttcatcttattctccatgtatatactccattgtcttgtggtttggtgcttgctaaagtagattaatt

SEQ ID NO: 270144 - DNA, 415 bp, Glycine max
attcttatttgtacaaatggtacttcggggttggaacgagtatgaagaaattaacgatacttctttaccttttgagttgttctgccggatcggtcgctcaagacctttggtctctacccggacctgatgaaaaaaatgggatcacatcttatggactcgttgagaataattctgatctagttcatggcctattagaagtagaaggcgctctggtgggatcctcacgtacagaaaaagattgcagtcagtttgataaggatcgagtgacattgcttcttcggtccgaaccaaggaatcccttaaatatgattcaaaatggatcttattctatcgttgatcagagatttctctatgaaaaatatgaatcggagtttgaagaaggggggggagtcctcgacccacaacagatagagga

SEQ ID NO: 270145 - DNA, 413 bp, Glycine max
  unsure (1)..(413): unsure at all n locations
cctaccggttgcaaaaaaacaacaaaagggtccattttggggtttatttcatctattccatgaggcgaacantgggagatacacgttacaccacgattttgaatcanaagagatatttcaagaaatggcagatctattcactctatcaataaccgagccggatctggtgtatcataagggatttgctttttctattgattcctccggattgggtcaaaaacatttcttgaatgagttattcaactccagggatgaatcgaaaaatcactctttattggttctacctcctctttttatgaagagaatgaatctttttatcgaaggatcataaaaaaatgggtccagacctcttgcgggaataatttggaagatccaaaacctaaaatagttgtatttactagcaacaacataat

SEQ ID NO: 270146 - DNA, 296 bp, Glycine max
  unsure (1)..(296): unsure at all n locations
tttcttcnttnctacaattttnntagcatggcaatgccatgcgtactatatgttccctctccgaatgaacactggctatttttcccttactccggaaaaaaaatacgcaagttggacgcttgctgtggaagcacacaacatctttggctttgagaccattcctgaagagtccctttaatcaacaaaagaatacatccattgcgaacaatatatatcacactcccaaacagttaaccaacaatcttacttttattcccacaacctccaaattccatcccaaggacacatttttgttc

SEQ ID NO: 270147 - DNA, 265 bp, Glycine max
ttctattgattcctccggattgggtcaaaaacatttcttgaatgagttattcaactccagggatgaatcgaaaaatcactctttattggttctacctcctctttttatgaagagaatgaatctttttatcgaaggatcataaaaaaatgggtccagacctcttgcgggaataatttggaagatccaaaacctaaaatagttgtatttactagcaacaacataatggaggcagtcaatcaatatagattgatccgaaatctgattc

SEQ ID NO: 270148 - DNA, 412 bp, Glycine max
  unsure (1)..(412): unsure at all n locations
ggaccttntgcatctagaacatcctacggcggacttctacgggcggttaagagggagacacttaagctgattgagacattcttggataaggcagaagaccagccacaaattggtaaacaatttgtgccgccaatgatggatcctgttcttggagattatgccaggaatgttcctgatgcaagggaatcagaggttttgtcactttttgcaacaattgtaaacaaatataaagctgcaatgattgaagatgtacctcgcatatttgaagctgtttttcagtgcacacttgagatgattacaagaaattttgaagattacccagagcatcggctcaagttcttctctctactccgtgccatagccactcattgttttcctgcattaatctgcttgtcaagtcagcaactgaagc

SEQ ID NO: 270149 - DNA, 399 bp, Glycine max
gataaaacaacacaaagggaaattaaatatttaaattaataaaattaatcatccgcgattctattttatgaatccctttttttttacaatacctaatcctaatcaccgaacttacacaatcagctagaatgggttataaagatatctatagatatatatagatttatttatctatcgatatctctaaaaaaaaaaaaactaaaataaacaaataacacctctcattttatttatactaaaggggaattatgagacaaaaaataaatccgcttggtttcaaactttgtacaactcaaactcatgattctatttagaatgctcaaccaacaaaatattccgacaatatacaaaaagataaaaaaatacgatattgtatcaaaaattatatacaaaaaaata

SEQ ID NO: 270150 - DNA, 482 bp, Glycine max
  unsure (1)..(482): unsure at all n locations
ggaattncccgggtgcgggccgacgcgtaccgtagcttgcgagaaagacgacccagaaggggaattgcgaatcaaattagtgtcaattctcttttgcgcggggtnccctacctctccggtcgaggatgcannnatcttcgtcaagaaccctcanccggaaagaaaccatcacccttganggtggaaagcgtctgacanccatcgacgaacgtcaanggccaagtatccagngacccaaggaaggaattcctcccggatccagcaacccgtctcaatcttcgcnccggaaagcagctttcgaggaccggccccgtaccctcgcccgactacccaacatccagaagggagtcannacccttcaccttgtcccttcgtcttccgtgggtggcagtgcgagaatcttcgtcaaagacttctcnnactggcaaaaccccataacccnntagaggtcgaaagctttctgacaccattgacanacgtca

SEQ ID NO: 270151 - DNA, 423 bp, Glycine max
  unsure (1)..(423): unsure at all n locations
ggtgaatagtgtttgtgttgcctttatctgcggcggttaatttaaccaggcctaccctttttatnaacatatgaaaagatcggttttttgtggttcctccactcattgttgttgaagggtctcgcgaaatcaatcaagtttttagacctgttttctggtagaggtgtaagtacaagatcttaataataaggattttgtacaaaggaaaagttgagaataagatgggggaagatggttattcttggattaggaggacaaaattttcacacactgtctgccatcgtttggatcctgctaggttaggctctattcctatcagtgttcagtcagagcaaaaatcaaggcctgctgcctcaaaggctcagagacaccccataacaaacaagcagagatctttgtcaccattgcctgagacttatcttt

SEQ ID NO: 270152 - DNA, 446 bp, Glycine max
  unsure (1)..(446): unsure at all n locations
ggccgaatcccggtcgagcgaggctccccaacctcctccggttcaaaaaaccacaagggcctcaaaataacccaagcgagcacaacacagcgcagcacttcttaattcccttcacactctanacagatttacangtgcttacacttaaatggctttgaagctcttcaatcacccaccacagccactccatcgttagtccctttgaagaaaccagtctcagttacttagagacaccgtggacgaaaggaaagcgttctaagcgtagccgcacggagcaacaactgcaacacccttcatgcaccgaggaagagtacctcgctctttgtctcatcatgctcgctcgcggcggcgccggcagtgtctccaccgccaaacccgctgtctccgacaacaattctgcgccgctatccgccgccaaactgagctacaaatgttcggtttgcaac

SEQ ID NO: 270153 - DNA, 421 bp, Glycine max
  unsure (1)..(421): unsure at all n locations
ggcattgctgaaaatgtcgcanttnttngaaggcgccaaatactatggggcggagaaactcaccaacatgcccaanccanangcgagtgtcaccgacgtggacttcaagcgcgtgagccgcgacagcgtcgagtactttttcaatgtctccgttcagaacccttattccacttccattcccatttgtgagatcaagtactccctcaaaagtgctggcagggagatagcagtaggaacaatacctgacccagggtcattgaaggcaaatgacacaacaatgttggatgtgccagtgaaggtgcctcatagcatattactgagcttggcaaaggacattggtgcagattgggacattgattaccaattggatattggacttgttattgaccttcctgtcattggcaacttcaccattcctctt

SEQ ID NO: 270154 - DNA, 387 bp, Glycine max
gacatcttcttgacgtattgaatcggagaattctctaaaagagatctttttctgctctttgaagaaagaagggtctttgcttgattttggagatgtctctgctctcagatctcatcaaccttaacctctccgataccaccgagaaggtgatcgcagagtacatatggatcggtggatcaggaatggacctgaggagcaaagcaaggactctcccaggaccagttagcgacccttcagagcttcccaagtggaactatgatggttccagcacaggtcaagctcctggtgaagacagtgaagtgattttatacccacaagccattttcagggatccattcagaaggggtaacaatatcttggttatctgtgatgcctacactcctgctg

SEQ ID NO: 270155 - DNA, 442 bp, Glycine max
  unsure (1)..(442): unsure at all n locations
gcgagaagaccacagaagggggcagtgaatacaagccaaaagaacaacatggacattgatgtttctcctcaggggcgcgggaaagtttacngtgccaatggtggctcctactacgcatggtccccctccgaccttcccatgctccaccaaggcaacattggtgccgctaagcttgctctcaacaaaaacgcctttgctcttcctcgttactctgactcttccaaagtcgcttatgttcttcaaggtagtggagtggctggaatagtgttgcctgaatcagaagagaaggttgttgcaataaagaagggtgatgccttggcactcccctttggtgttgtgacctggtggtataacaaggaagaaactgagttggttgttctgttccttggggacacttccaaggctcacaaggctggtgaattcactgacttttttctgactg

SEQ ID NO: 270156 - DNA, 332 bp, Glycine max
tttacccattatggaaattgagtggtaggggggattatttttttaaccagtcttctggtggtgggcttaaaactttttggattaaaactgactgggatactcaaattgggaaataactagacattggagccattggttatattactcattatatggttccaaaatcagggattcatgcttggaacttttgattttgcagagaacactcgtgcagcatatcctattgagtacatacccaatgctaagataccgtgtgttgctccccatgcaaagaatgtcatccttctagcttgtgatgcatttggggtgctccccccagtaagcaagctgag

SEQ ID NO: 270157 - DNA, 413 bp, Glycine max
  unsure (1)..(413): unsure at all n locations
acacctgcaaaaacacttcataaaaccgttctactntataattccgcgctcttttaacacccccgtcttcttttcttattctctntttatatttnttttttctctcacctcaaaatctcttncttccatattaacctcccttacataaacttttttttttctgcaacaaataaaaacgctgcaaaatgtacccacactttagctacacttagtcaaccaccacctagacctttgtcatgggactctcacctcttaatgctcaatttcatgcttcttaaatcgctctcccccctgaaaacgatagctacaaatattgaccaaacttctccttcaaccccttcacttccaactaaactttttctataccaaacttcaaacagagataccccttaattaccaataatgataaacta

SEQ ID NO: 270158 - DNA, 384 bp, Glycine max
accagcattttctcaaagctgccatgatatgatgagcatgtggaagggaatggtgtcatcagatggaaaatgtgagattgacatttggcctttccttcagaatttaactcgggatgtaatttctcaaacagcatttggaagcagctatgcagaaggagaaaaattttttcgaaatctgagaatgcaggggtatcttttaatggcaggaaagtacaagaacataccaatattgcggcatctacgtacaactaccaccaagaggatggaagcaattgaaagagagatacgagattcaattgagggtatcataaaaaaacgagagaaagccatggagaatggtgaaacctctaatgaagatttattaagcatacttttggaatcaaa

SEQ ID NO: 270159 - DNA, 235 bp, Glycine max
  unsure (1)..(235): unsure at all n locations
tacggctgcgagaagacgacagaanggtacggctggggagaagacnacagaagggtacggctgcnagaagaccacagaaggggtgtgctgatggagcgataggcttttatagaggctttgggatttctatattgacttatgcgccttccaatgcggtttggtggacttcttattccatggttcatagactcatttggggtgcttttggttcttacatgggaaataacaatggtgg

SEQ ID NO: 270160 - DNA, 361 bp, Glycine max
gacaaggcacaggcttccctccctcctttgaagaggcaaattataagagggtggtgtgttgtgttgaaataccaagctagcaaagatgtttggcatcttaggaggcaataaggggcacaagatcaagggtactgtggtgttgattagcaagaatgtgttggacttcaacgaaatagtgtccactactcagggtggtttggttggtgctgccaccggcatcttcggtgctgccaccggtattgttggtggagttgtcgatggtgctactgccatcttcagtcgcaacattgccatccagttgatcaatgccaccaaagactgatggacttggaaatgggaaagttggaaagcaaacctattt

SEQ ID NO: 270161 - DNA, 370 bp, Glycine max
  unsure (1)..(370): unsure at all n locations
catacttntnatnccaattatttaacacttataaaatatttttatcccggtaattttcaaaccacagaaacactattatttcacaaaactaattntcaatatttgatctttaaagtaccaattataaaataatttttctattcaaacattagctttttactttctgcccaatatcaaatcataaatctattatttaaaatattacttgtcttctttatatatatatatatataaacttgtttcttatttctaaaaatcttaaatattaccaatcattcttttttatttactaactagatatattacttatcacacaaataatctcaatttacaaaatattcatttttaatccatattaatatatattaca

SEQ ID NO: 270162 - DNA, 385 bp, Glycine max
  unsure (1)..(385): unsure at all n locations
atacaacatacttatgatgataaatatcttacaattattaaatatttttatcaggattatatttaaagcggggaaagactattattttacaaaactaattgtcaatatttgatcttgacagtaccaattataaaataatttttctattcaaagattacgaactaacgttgtgccgagtatcttgtgatgactctattatttaaaatattaattgncttgcttatatatatatatatataaacatatttgttatttgttaacatgttaaatattaataatgattctttgctattgactaaatagatatataacttattacacaaataatgtcaatgtacaaaatattgattttcatacaatattaatatatattacattatctatg

SEQ ID NO: 270163 - DNA, 444 bp, Glycine max
cccacgcgtccgacatacttgtgatgataaatatgtgacaattataaaatatttttatgagagtaatagtcagtgcaaagaaagactattatttgacaaaactaattgtcaatatttgatcttgagagtaccaattataaaataatttttctattcaaagattaggaactaacgttgtgccgagtatcttgtggtgagtctattatttaaaatattagttgtcttgtttatatatatatatatataaacttgtttgttatttgtaaagatgttaaatattaggaatgattctttgttattgactaagtagatatatgacttatgacagaaataatgtcaatgtacaaaatattgattttgatacaatattagtatatatcacattatctatgggtgtaggtggtttggaaattaacaatgactgatttcattctactttttttt

SEQ ID NO: 270164 - DNA, 257 bp, Glycine max
ggatcactcctctaggctcgtgttggaggtggcgcagcattttaatgagggcgttgtccgaaccattgccatggattccaccgaaggggtcgttagaggttgtcgcgttctcaacactggctcccctattaccgatccattttttagtgctacctttggccgtatcataaatgtcattggagatcctattgatgacatgcgataaatcaattccaatcatttttttcccattcatagaaaatcttttgctttttttt

SEQ ID NO: 270165 - DNA, 383 bp, Glycine max
ggtggtcacaactcacaagctcacagagcaggaggactgttccaatacggaatctaaggcaaagcaaaccaaacatcttgaatcatgggttcaacaggtgagactcagattaccccaacccacgtatctgatgaagaagcaaaccttttcgccatgcaactagccagtgcttctgtccttccaatgatcctcaaatcagcacttgagcttgatctgttggaaatcatagccaaggctggccctggtgttcatctttcccccactgacatttcttctcagctcccaacacagaaccctgatgcacccgttatgttggaccgtatattgcgcctattggcttgctacaatatcctctctttttctctccgcactctccctgatgg

SEQ ID NO: 270166 - DNA, 372 bp, Glycine max
gtcacgaacgccattcagtgttttctgagaaccgtagcacgatatgtatagatcggaatgaatttacttcagatactgtcttctggcaagaacaaattggtcattactggagactgatgaatattggggagacagaaatacgcaatgtgatggatatgaatgcctattgtggtggatttgctgttgcgctcaataagtttcctgtttggatattgaatgtagttcctgcaagcatgaaaaacaccttatctggaatttatgcccggggattgaatggaatttatcatgattggtgtgaaccatttttaaattactctttgacatattatttttttgttgcccactacccttttttccacttcaaaacaaaaa

SEQ ID NO: 270167 - DNA, 343 bp, Glycine max
  unsure (1)..(343): unsure at all n locations
ggggttctattttgtaattgtttgttgttgaaactggtcgttctttttttgttgtcctgtgttcgtntttgttttttctctcacctaaaaatgtcttgctccggtggtaactgtggttgcggaagctcctgcaagtgcggcaactgctgctgaggctgcaagatgtacccagacttgagctacactgagtcaaccaccaccgagaccttggtcatgggagtggcacctgttaaggctcaatttgagggtgctgaaatgggtgtgcccgcttaaaacgattgctgcaaatgtggaccaaactgctcctgcaacccctgcacttgcaagtgaagtgtttggagag

SEQ ID NO: 270168 - DNA, 355 bp, Glycine max
ggtttctgatttctcactcttcgtttctcgtggggttcatcagcgtgtgtctcacccatggcgtttccctacatggaagccgttgtcggatttatgatattaatgtacatttttgaaacttacttggatgtgcgacaacatagggccctcaaacttcctactcttccaaagactttagaaggtgttatcagccaagagaaatttgagaaatctagagcctatagtcttgataaaagccacttccattttgttcacgagtttgtgacaatagtgacagactctacaattttgtactttggggtattgcccctgttttgaagaaatcaggagattttatgacaatagcttgtttcaa

SEQ ID NO: 270169 - DNA, 412 bp, Glycine max
  unsure (1)..(412): unsure at all n locations
gtgtgtgatttggtttgttgttgtaggctcgttctttcttcttttggtggtgcgtgtgtttgtgtttgtttttttctctcaacctgaaaatgtcttgnctgcggtggtaacctgtggttgctggaagctcctgcaagtgcggcaacggctgcggagggtaagattttcgttgtaacattgtttttttcttgggaaaatagagtttttccgggaaaattttctttttggatttttaattgttattatggttacccttttggttcaattgcatgaaaaaactatgctttgtttattttcttgcatgggggggagattctgatcacccgaaccctttttttgcttttacagaacatgtcgaatttgttttcttttcatgggatggttttctggggtgttatatgcttggcttttt

SEQ ID NO: 270170 - DNA, 275 bp, Glycine max
  unsure (1)..(275): unsure at all n locations
agggccattgttgttgctattatcatccncanctgcgttgattctcaccgcagacagtgagccatggccgtctgaaagaacaagcgcatctccaaggggaagaagggtggcaagaagaatgcagctgatccctttgccaagaatgattggtatgacattaaggctccttctgtttttcaagtgaaaaatgttggcaaaaccctcgtctctcgtactcagggtaccaagattgcttctgaaagactcaagcataaaatgtttgaagtctccttggc

SEQ ID NO: 270171 - DNA, 443 bp, Glycine max
gaaccttttcttatcacatcttgatatcgggttgagaagggacccaagtaatttgcgcccaaggatcaacaaacttgattcaaccaaggacagagaacaaaagtctgccgggtcttattattaccttgatgactgagttcatactttggggctgttctttcaccaacacaaccttgcatctgtttgagcttttcatgggatctcagatttggttcagttcatgccttgaaatataagattgccatttttgccgatgaaagcatctttcccaatgaatagaggagcctgcatgcaattgcaagccctatgttggttggtgcattttgtatatttacccttatatttagtgcagttactcatcaccaggtttgctacgacttgtgtgggtgaattttaatattacatgagttttatattggtcatggttttcatttcatgtccta

SEQ ID NO: 270172 - DNA, 398 bp, Glycine max
  unsure (1)..(398): unsure at all n locations
cactaatctcatanattcgggccgttctttttctaaaaatcgccaaaccttccaatanattctctatttaaatccacatatttaacttttaattcatttctcatcaaattacgtcatataaatcacaatatttctttcatctaaccaatttttttctgatatacttaacactctcatttatatcattctttttataaaaaacactcacattttttttaatttttatctattccacttacttttctttatcctaaaaattaattatcctcttatattttcaactcttctatatattttacatttttcactatactaaaatttcattttactttttacaaattttaaaattttttacatattcttatttctctattcattttcttcttttaaaacctttt

SEQ ID NO: 270173 - DNA, 291 bp, Glycine max
gaagggcactggtaagtggactgttcagcaagctgctggattatcaattgctgctgccactattgaagcatcattggatgcaaggttcctgagtgggttgaaggaggaaagagttgaagctgcaaaggtctttaaatcaggtggtattggtgatatcgtgactgatcaacctgtagacaagaaaaaattggttgatgatgttaggaaggctctttatgcagccaaaatctgtagttatgcacagggaatgaatttgatccgtgcaaagagtatttaaaagggttgggattt

SEQ ID NO: 270174 - DNA, 331 bp, Glycine max
  unsure (1)..(331): unsure at all n locations
gaatcaaacacaacacttcactctcaatcttcgggctttttttcaaattacttcctcctatacncctccatccttttcctctccattaacttctttatccaaacaataattttcaaaaaccttccttcatcaccattttttttttctataatcttaaacctacaccaactcaatcaacctctccacctcacattccataccttatcacaaaaatatgtccctatattcttccttctattctacttcccatttttcctcttcatttcctcttctctctctgttcaataattcttcaccaataacttcattcttttttaccaaccttccttac

SEQ ID NO: 270175 - DNA, 332 bp, Glycine max
gacccaagtgaccgttgagtattacaatgacaagggtgccagggttcctattcgtgtacacaccgtgctaatctccacccaacacgacgagactgtcaccaatgacgaaattgctgctgacctcaaagagcatgtgatcaagcctgtgatcccagagaagtaccttgatgagaagaccattttccacttgaacccttcaggccgttttgtcattggtggccctcatggcgatgctggtcttaccggccgcaagatcattatcgatacttattgaggatggggtgctcatggtggtggtgctttcttctggaaggaccctaccaaggttgata

SEQ ID NO: 270176 - DNA, 287 bp, Glycine max
ttacagtaaggggtgctgtgacaacctactacggcgggtgctctatagtactactgtggtgctgtattcttcgacgttcggaaatgcttgactttgagtggtggttgcttgtcctcttgagggtgctacctcgctgtgatgaccactacattttctgccctaacgactatcccatctgcaacacttatgcttgaacttgtctcaagagcaagaacaacctattctgagtgaaggcattgatgcgtactctggcttaaccccattggacctttgtgcgtaagaacaag

SEQ ID NO: 270177 - DNA, 438 bp, Glycine max
  unsure (1)..(438): unsure at all n locations
ctgcnataaaaccacagaaggttggctcattaccactaatcttnttnattcgagtaagtcttactctaaaaatcgagaaatctttcaatatattctctattataatccacatattttatgtttaattcttttttcaacataaaaaggtagagaaatcacatattattttttctatctatcctatatattactctaacttcttatcatatgttattaatatcttactttataaatttaaacacttacaatttttttttaattttttctattccacattctttcttttattccaatttatttataatctcttatctattttatttttcttttttttttttttcattatttactatctttttatttttcttttacttttaaatatatcatttattcttattttatattttattatttttatttttttatatttttatattt

SEQ ID NO: 270178 - DNA, 303 bp, Glycine max
gataccaaaaacaaaacacaagccaagtgaaagttagaaaaaataaaaatcaaagagcataatgtcagggatcattcacaagattggggagacccttcatgtgggagggcacaagaaggatgaggagcataagggtgagcaccatgctggagaatacaaaggggagcaccatggtgaacacagtagtgagtacaaaggagagcatcatggtgaacacaaagctggaaagtaccatggtgagcacaagccagagcacaaagaggggttcctagacaaagtcaaggacaagatccatggttaggg

SEQ ID NO: 270179 - DNA, 326 bp, Glycine max
agggctgcgagggagtgctactgctactcaaatacaagagggggagaacaagctcaaactgtattcctactggataagctcctgttccttccgagtccgatttgctctcaacctcaaaggactaccttacgattacctagcagtcactttattttctgaccctgagtttcttaagctcacccccattgtatatgttcccgtgcttgtcgatcgagatatcaaaattgtacactctcttgccattattatgtatttggaagataaggatccttaccctcctgtgcttgctcgtgatattcaccaaaaaaccatcaattttcaagctg

SEQ ID NO: 270180 - DNA, 306 bp, Glycine max
gtcaaattcgaaatcaaagaccgactcatccgtctggttgttctgtccaaacaaaatgactgtgttttggatttacaagacgttttcaagagattctcgttcgacagcatttgtagattctccttcgggttggaccctatgtgtctggagctgtctctgcctatatcggagtttgctatgtcctttgacttggcgttcaaactgtcctcggagagagccatgtcgggtgtcccctctaatatggaagatcaaacggttccttaacgtgggctcctagaagaagctgagaaaagctattaaaatgat

SEQ ID NO: 270181 - DNA, 211 bp, Glycine max
acaagaggtctttcaagtatgcctgggtgctggacaaacttaatgctgagcgtgaaagaggaatcaccattgatattgctttgtagaagtttgaaacaactaagtattattgcacatttattgatgcgcctttacatatggatttcattaataatatgattactgggacatcccaagctgtctgtgcttttcttatcattgattctaccac

SEQ ID NO: 270182 - DNA, 235 bp, Glycine max
aagcttggaggcattgacaagggtgttattgagaggtttgagaaggaagctgctgagatgaacaagaggtctttcaagtatgcctgggtgctggacaaacttaaggctgatcgtgaaaaaggattaacatttgttttggcttggggaaatttggaaccaccaaatattattggacaagtattgattccccttgacattaggatttcatttagaatatgatttctgggacattcca

SEQ ID NO: 270183 - DNA, 307 bp, Glycine max
catcaatccagctgaagttgtctgatgccgcgcgcgttgtttctcgcgtgtgggcaccatcatacaatccgagatgttccagcattcattgatgcatcatgacccggtaacgtaagaagttaccaactgctgtcaatgcgttttcctcccaaacaactcgatcatttgcaccagactatacaacaagcttgcatcgccaactcatttgttatccaaaagttgtatggttgtttaccagattctattttcagtctacttgaaattactatttttatgcttaaacattgattgatctacttatatttta

SEQ ID NO: 270184 - DNA, 209 bp, Glycine max
ctagactacggtaggctcttacatgcttatgcattattgctctgactatactactaagcttattaatcctcatcatcatatatagcatgacttcattattacagttgcttatgctcatggagctatataccctattatacattatcatcctcaactgtatgaagatcttgtcttagcaagagtgtatgaccattaacaacctatcatat

SEQ ID NO: 270185 - DNA, 396 bp, Glycine max
gaatggggcagacgccgtgactagacacgcatctcactcgcgccatcttagggtttctccttttgtttcgcaacatggttgccgctaagaaaactaagaagacccatgagagcatcaacaacaggctcgctcttgtcatgaagagtggcaaattcaccctcggttacaagaccgttctcaaatctcttaggaactccaaaggaaaattgattatcattgctaacaactgcccccctttgagaaagtcagagattgaatactatgctatgttggcaaaggttggagttcatcattacaatgggaacaatgtggatttgggcactgcatgtggaaaatattacagagtgtgctgccttatcattattgatcctggtgattctgatatcatcaagacac

SEQ ID NO: 270186 - DNA, 298 bp, Glycine max
tctgaaaggggttctagtgtgtgattgtctgttgctgtaactgtatgttcttctcgcggtgttctgtgtttgagttagctttttctctcacctgaaaatgtcttgctgctgtggtatctgtggttgctgaagctcctgctagttcttctactgctgctgaggctgcaagatgtacccagactagagctacactgagtctaccaccaccgagaccttggtcatgggagtggcacctgttaaggctcaatttgagggtgctgaaatgggtgtgcccgctgataacgatggctgcaaatgt

SEQ ID NO: 270187 - DNA, 356 bp, Glycine max
aattcgagcggccgctttttcttcttagggtggtgtttttttcatgctaaacaactttaagttgaagaattaatcgatgggaacattttgccagtcaatcatgcattgaatgattaatcactactcgcgatgggaatacgcgatttaaataacgaataatccaatattttaaaatctgatctaaaatgactggaaaagtggaaacaagaccagatataatttgatcattttgagcaaatccaaaatctttatagacgaaaccaatcactagttcccaaccatgggttgaatggaatcctatacataaatcacttaatagaagaatcgaaaaagcttttattgtgtcacttaaatta

SEQ ID NO: 270188 - DNA, 247 bp, Glycine max
tatatgtcgacatgaaggtgtacattaatgcacttgccctcaggtccttggtctatgccgaaggtatgatagagaaggcattcttgtggggtaagttctctttggaaatgtctgctgtcatttacaatgattgggttttcacctatcaagcattgcctaatgatcttgtcaagagaggtgttgcttgttatgatccatcttcttcccatagaattctacttctgatcaagtactatccttattcttc

SEQ ID NO: 270189 - DNA, 427 bp, Glycine max
gtgcgcctacgcccatcgcataccttcaggtgagcccattcatgaaggccgagcctactagtgacggcatgatcaccacggaggcaggctctatcaccactggtggcctcgtggtgatcctcagcctatgcctcacaatctatgggatttcatcgttctaacgaacgacacccatccactgacccgacactgaccttgacaggccttatgaaggagcccgatcagctccaaactgctgatcagtgggccacactcaccggatgcttactctagccaggcatttcagatgctattaccgtctacttgcttctgtacatgccgaaccttacttactacatcgcctgattaacgtgctgattatctagaaagacatgtatggagaatccattgtgtatgaatggacaatgggtctaaaatgatcctcact

SEQ ID NO: 270190 - DNA, 424 bp, Glycine max
ctacataagttttttttatccatctactactctatatttaagtctattctaaaaaaaatgtgcctcattctcctaatcttccattatatcttcttatcaatttacattcaattttaaactcactcttttacctctctacaactcatttttatccacaatcttttatataattcatcacttcatttaaacctctctcccttttttaaacctatttcaattcatcttaactcttaactactacctatattaaacttattaacattaattttatacatcttcactatacaaatccaatcacaaatcactctatctattaattctaaacaattattataataatcaacctttatcatttaattacactattaatataccttcacacatttacctttatttttcaattccacctcctatttttattttt

SEQ ID NO: 270191 - DNA, 451 bp, Glycine max
gaacgcagaaaggggaaaaaggggattagggtttaggaagcagcgacaacaatggatttcagagcggagaagaaggaatcagagagcaacaccgaaaatgctcatccaacaactttagattcttcttctcaattggcatcggcacttgattccagcaacaaagaaatcgaagaacgacaagctcgtgaactcaaagccggtcttcaccccctcaagcacaagtttgtcttctggtacacgcgccgaacacctggagttcgaaatcaaacatcatacgaggacaacataaagaaaattgttgaatttagtacggttgaaggattttgggtctgctactgccatcttgctcgtcccgcttctttacctagtccaacagatttgcaccttttcaaggaaggaatccgtcctctatgggaggactctgctaactgcaatggtggtaaatggatta

SEQ ID NO: 270192 - DNA, 461 bp, Glycine max
  unsure (1)..(461): unsure at all n locations
acgctcttcttctcttgcggctagggttttagcgcagcttcttctagatttaaggaagatggagaaggaaaaggttcacatgggtattgtggtcattggccatgtcgactctgggaaatccactaccactggtcacctgatttacaagcttggaggcattgacaagcgtgttattgagaggtttgagaaggaagctgctgagatgaacaagaggtctttcaagtatgcctgggtgctggacaaacttaaggctgagcgtgaaagaggaatcaccattgatattgctttgtggaagtttgaaacaacaaagtattattgcacagttattgatgcgcctggacatagggatttcattaagaatatgattactgggacatcccaagctgactgtgctgntcttatcattgattccaccactggtggttttgaagctggtatttccaaggatggacagactcgtg

SEQ ID NO: 270193 - DNA, 389 bp, Glycine max
  unsure (1)..(389): unsure at all n locations
gaaattaattatctggggcagctgcgtcatcctaatcttgtgaaactgattggttactncgtagaggacgatcaacggcttttggtgtatgagtttttgaccaaaggaagtttggataatcatttaattaggagagcttcttactttcaaccactttcttggaacttccgtatgaaggttgctcttgatgctgctaagggtcttgcatatcttcatagcgatgaagcaaaagtgatatatcgagacttcaaagcttcaaatatcttacttgattcgaattacaatgcaaaactttctgattttggcttggcaaaggatggaccagctggtgataagagccatgtctctacaagggtaatgggcacatatggctaatctgctcctgaata

SEQ ID NO: 270194 - DNA, 419 bp, Glycine max
gggagaaggaaacggcggaaaacggcggatacgactgtgatgactatgccgcgccggagtgtgattcgccggacagtgaaattaccgattcaggatctcaggaaatgcaacccagtgtgatgaacaacaacatatgttctaatcatgaagaatgcgaaagacgttcttcacagataaagctgacaaaaggtttcacagcaaaggagtccgtgaaggggcatatggtgaatgttgtgaaaggattaaagttgtatgaggatgttttctctgaatcagaaatctgcaagctgactgattttgtgaaggagattcatgctgctgcccagaacggggagctctcaggtgaaacttttatactgttcaacatacagatgaagggaaacatgagattgctgattcagttgggtgttccgatattt

SEQ ID NO: 270195 - DNA, 361 bp, Glycine max
cacacacatcattgattctcattcatccatcctatactctctctaaatacactcactctcactcacccacacttacatacattctaacattcacagacaatcttattcataacatttataacaaactgctgatataaacaacaactctttcaatcattacctccatactacacaaacttcttactgctcatcatagaaacatcactcactcatattacttctttgaaataatatacaacaacatattattactcacacattgattcacctccacatacataattacattcattaatattattactactacatacataccttactactctgctcttatcatcatttataccaccactggttt

SEQ ID NO: 270196 - DNA, 394 bp, Glycine max
gcgtccacgcgtccgcccacgcgtccgaaggtgtcacaaacacttgtgaagtctgcgaacgtaggtctgcttgattctttccggttggggtctcttggttgcaagattgttggaacatctaagaacttccagaagaggaagaaacagtcaatgttaatgtcatcagattctgaggactcatacagcagcaacagcgtccatggccttaagaacaacttcaaagttcagagcttcacaccattcacaccaccctcaacatcagctaattacagaactgccaagagatgaaagggtataccacactcgtcctcaatggttggactaatcatagaatattacatacgttggaattttaggctattggctacaatgcccttaggtataacaataccat

SEQ ID NO: 270197 - DNA, 245 bp, Glycine max
tcgggagttcaattccaatatatgaccactctctctgtggaatggcctaccttctacgttcaagatgcatatcttcgacaatacccttaccggctagaccattacccttgaagtggacatgctctgacaccatcgacaacgtcatggccaatatccaggacaaggaatgaatccccccgatccatcaacttctcattttctcctgaaagctacttgatgtactgccgtaccctttctgactacaa

SEQ ID NO: 270198 - DNA, 432 bp, Glycine max
tggtggcgtgtgcagaagagcgtctcagttagagcggtaatcagaagaggcgcagcttcaagcgagtgacagccaccagccatgggtcgtatgcacagccgcggtaagggtatatcctcttctgctttgccctacaaaaggacacctcctagctggctcaagatctcttcgcaagatgtcgaagaaaatatctgcaagtttgcgaagaaaggtttgaccccgtctcagattggtgtcattctcagagattctcacggtattgctcaggtcaatagcgtcactggcagcaaaatccttcgcatcctcaaagctcacggacttgcgcctgaaattccagaggatctgtaccatttgattaagaaggcattttcaattatgaagcatcttgagaggaacaggaaagacaaggactccaagttcaagttgattctt

SEQ ID NO: 270199 - DNA, 452 bp, Glycine max
  unsure (1)..(452): unsure at all n locations
gcttgttggaccatatcaaacatcacagctggtaataaacagcagattcaggctgtgattgaggctaatctaattgctcctttggtcaatctgcttcaaaatgctgagtttgatatcaagaaagaagctgcttgggctatctcaaatgctacatccggtggttctcatgaacaaatcaagttcctagtaagtcaagggtgtatcaaacccttgtgtgatcttctcatctgtcctgatcctaggattgtgacagtttgtctggaaggccttgaaaacatcttgaaggtgggagaagctgataaaaatataggcaatactggtgatgtgaatctatatgcccaaatgattgatgaagctgaagggctggagaaaattgagaacctncagagtcatgacaacacagagatttatgaaaaggcggtcaagattcttgagacatactggttggagga

SEQ ID NO: 270200 - DNA, 440 bp, Glycine max
gcttgatggaccatatcaaacatcacagctggtaataaacagcagattcaggctgtgattgaggctaatctaattgctgctttggtcaatctgcttcaaaatgctgagtttgatatcaagaaagaagctgcttgggctatctcaaatgctacatccggtggttctcatgaacaaatcaagttcctagtaagtcaagggtgtatcaaacccttgtgtgatcttctcatctgtcctgatcctaggattgtgacagtttgtctggaaagccttgaaaacatcttgaaggtgggagaagctgataaaaatataggcaatactggtgatgtgaatctatatgcccaaatgattgatgaagctgatgggctggagaaaattgagaacctccagagtcatgacaacacagagatttatgaaaaggcggtcaagattcttgagacata

SEQ ID NO: 270201 - DNA, 371 bp, Glycine max
gagatcacaaccaaggccaacgtggactatgagaagattgtgcgtgacacatgcaggaacattggttttgtctctgatgatgttggtcttgatgctgacaactgcaaggtcctcgtcaacattgagcaacagagtcctgatattgctcaaggtgtgcacggccacctcacaaagaggcctgaggagattggtgctggtgaccaaggtcatatgttcggctatgccactgacgagactcccgagctcatgcccttgagccatgtccttgccacgaagctcggtgccaagctcaccgaagttcggaagaacgggacatgcccttggctgagacctgatggcaagacccaagtcacttgtgagtactacaatga

SEQ ID NO: 270202 - DNA, 290 bp, Glycine max
gagatcacaggcaatgtctacgtggactatgagaagattgtgcgtgacacatgcaggaacattgtttacgtatacgacgatgttgtgtcttgatgctgacaactgatatgttgcttttaacattgagcagacatgatcgcttatatagctcaaagtgttcactgcaacctaacagagatatctaaccagatttgtactacctaccaaagtcttatgttcggatataccactgtcgatactccagagctcatgcaatttagcaataaactttcctcgaataccggattcaa

SEQ ID NO: 270203 - DNA, 434 bp, Glycine max
gggagtttaaatccccacaaaattgcatcaaattgagccatagatcctcaaagacaattagttattagttaacaaaattttaacccaaagtttttacctgaatagctttgtgttctctgttagaagcaagacagtctgaacaaagggctccattcatacaatccgagcaatacgtgttgcattcacttttgtggaaatctgtgtggactttgcattgaacaaaaaaggcttgtttggagaaatggcctaagccatggtggccacttgttttcttcttcattctttccaaattccaattgttgaatatgctgtaaatttctagaatcatcacaatagaattttctacaagaaaatactacgctagacaatactctcagaaatagattaatctagaaagttcatgtatgaaagtcttaaaaactgagatcttgaac

SEQ ID NO: 270204 - DNA, 439 bp, Glycine max
  unsure (1)..(439): unsure at all n locations
gacacgcacctctttctgattgccttcaaatcacacactctcttcaatttctagggttttgctattgctttgcctccgttccccctttctcacaaaaacaacgccttttctcttctccttcgtatctattctttgcgtttggtttttggttgattgaaggcattcacagcgtaattcgttgctgcattttaatcgatttatctaaccaggactgaatgacctaatggagtctaaaggtgggaaaaagaagtctagtagtagtagtagtaaatcaattttttacgaagctcccctcggatacagcattgaagacgttagaccaaacggtggaatcaagaaattcagatctgctgcttactctaactgttctcgcaaaccatcctgatacacatncggattgatagttcgttgcatgcaaccatagttttattaggatttt

SEQ ID NO: 270205 - DNA, 441 bp, Glycine max
gacactaaacaagttaaaagaagagcatcactgaactaacaaagcaaccctatgtcgaaggtggtttgtgtcaccggagccagcggcgccatcggatcatgggtggtcctactcctcctccagcgtggttacaccgtccatgccaccgtccaagatatcaaggatgaaaatgagacgaaacatttggaggaaatggaaggagcaaagagtcatctccatttttttgaaatggatcttcttgacatcgactccattgccgctgccataaagggttgttccggcgtaatccaccttgcatgtcctaacatcattggtcaagtcgaagatcccgagaaacagatattggaaccggcgataaaaggaacggttaatgtgttgaaggcggcgaaggaagcatgggtggagcgcgtggtggcgacttcatcgatttcgtcgattatg

SEQ ID NO: 270206 - DNA, 395 bp, Glycine max
  unsure (1)..(395): unsure at all n locations
gataattgcattgaagaaagaggaagctgtggtctctagctattaatattagtattaatattaggcacggtttgactacaaataaaaggaaccatcgattcgtgtcagcccgtgaggcagccaagtttcagatggagacgagccagctttttaatgttcttgccatttttcttctctcggacccttttgctgttgtgaatgcaaactctgaaggtgatgctctgttcgcgttcagaagagctgtgaaagacccaaataacgttctagagagctgggatccaactttggtggatccttgtacatggttccatattacctgtgatgatgataagcgagttacccgactagnacctcgacacgcaaaactgtctggccattttgttccagagctaggg

SEQ ID NO: 270207 - DNA, 419 bp, Glycine max
gatgagttctaatatatcattcggaagtttttgaaatgttgtcaccccttcttctatttctatgcctaactcttcctttgtttttgttgtccttcttcaaataccgtaaaaccttcaagaatccaccacttccaccaggtcctagaggccttcccataatagggaatcttcatcaactagatagtccttctcttcatgagcagctatggcatctctcaaagaaatatggtcctttattttcccttcaatttggattaaggccagccatagttgtttcctctccaaaattggccaaagaggtaatgaaagacaatgaccttgagtgctgtggacgacctaaattactaggccaacagaaactaacctataatgggttagacatgggattttcctcatacgatagttattggagagaaatc

SEQ ID NO: 270208 - DNA, 244 bp, Glycine max
gacactagacacgttaaaagaagagcatcactgaactaacaaggcaaccctatgtcgaaggtggcttgtgtcaccggagccagcggcgccatcggatcatgggtggtcctactcctgctgcagcgtggctacaccgtccatgccaccgtccaagatatcaaggatgaaaatgagacgaaacatttggaggaaatggaaggagcaaaaagtcatctacatttttttgaaatggatctttttgaca

SEQ ID NO: 270209 - DNA, 392 bp, Glycine max
tacggctgcgagaagacgacagaagggtacggctgcgagaaacgacagaagggtacggctgcgagaagacgacagaagggtacggctgcgagaagacgacagaagggggggtgcgataacgagcgcggtgatagcagttgtaggagttcttctaggttggatcacaatagagatcgcatgtaaaccttgtcttgaaaagggtcgcgaagccatcgatcgaagtctcgatccagattacgatcccgacgacaccgtcattcgcgccccactcaaccccaccggcgtctccgacaccgtcaaagccgtttgagaaattgatgtgccatcttctcacgtttccgcctggtattcaattcggtgtctaaatcaaaaggctatttgttttctttttt

SEQ ID NO: 270210 - DNA, 415 bp, Glycine max
gatatctcatctccttcagcaaccacaacaaaccacttcaaaggtcctatattgctgatccttgtttctaaattcctctgcatggccaacaatggtgcaaaggatcccttgctgtcaggatcacttgatgcgactcaaaagactaaacagcagttattaaacaagagaaggctcctccgttctagaagtgctcctcacgcagagcttgttcctacagagacaaattgcaatgaatcaattcctcgtactgcatccatatttcagaatttgcatccaagttttaaaagaatggctatctaccttgcagtctatttaggtgtaagtgctttaatcttctaccttgtcagaaaccagattaaggggcagaaaacagatggaattcttgatgctttatacttcacaattgtgacaatga

SEQ ID NO: 270211 - DNA, 352 bp, Glycine max
tacggctgcgagaagacgactgaagggtacggaggcgagaaactacagacgggtacggctgcgacaagacgacagaagggtacggctgcgagaagacgacagaagggggggtgcgataactagcgcggtgatagcaattgcaagaattcttactaggctgaatcacagtctacatcgcatgttaaccttgtcttgaaaaaggtctcgaaaccatcgatcgacaacttcatccagattacgatccctacgacaccgccattcgtgccccacttaaccaaaccggcgtcttcgtcaccgtcaaagccgttcgagaaattgacgtcccatcttttcacgtttacgactggtattc

SEQ ID NO: 270212 - DNA, 426 bp, Glycine max
gaagtgccttcattcgggactttcactagccgcaggagccttatgaggagaatacggatgtctcacaggaagttcgagcacccaaggcacgggtcactgggatttcttcccaagaagcgtgctgctcgtcacaggggaaaagtgaaggcattccccaaggatgacccatccaaggcacccaagctcactgcattcttggggtacaaggctggcatgactcacattgttagagaggtcgagaagccatgatcaaagcttcacatgaaggaaacatgtgagcctgttacaattattgagacccctccaatgggtattgttggcgatgggggttatgtgaaaactccccgtggtctccgaacattgaacactgtatgggctcatcactcgagtgaggaactgaaacgtaggtgttataaaaactggtgc

SEQ ID NO: 270213 - DNA, 435 bp, Glycine max
gagaaacatggcttccttaagctccttagtgctgctccttgcagctctaattctatcccctcaagttcttgcaaactatgagaatcccccagtgtacaagcctcccactgagaaaccaccagtttataagcccccagttgagaagcttcctgtttacaaacctccagttgaaaaccccccaatttataagcctccagtagagaagccaccagtgtacaaacccccagttgagaaacccccagtgtacaagcccccagttgaaaaaccaccagtgtacaagcccccagttgagaaaccaccagtgtacaagcccccagttgaaaaacccccagtttacaagcccccagttgaaaaacccccagtgtacaagcccccagttgaaaaaccaccagtgtacaagcccccatttgagaagcccccagtttacaagccccc

SEQ ID NO: 270214 - DNA, 325 bp, Glycine max
caaagggtccgattggattaaagcggcgattaccacaacatgggatgccgacagtgctgatcctatcatagcatcaatacctgcaacatgggaatctcaacttcaccaagatggtcaagaacaaacacatgctctgaacgaattcaccatagtggtaactcatatgatttactactgcaacaaactggatcctactacaccaaagtggagttacaacaaggacaatcacacctgggatgaggcatcttcatacaggataaagatgccatctatctgtgctcacaaaatcttacaattcaccatataattttgccacaaacatcat

SEQ ID NO: 270215 - DNA, 416 bp, Glycine max
  unsure (1)..(416): unsure at all n locations
ggtgtgctgttgatggatcccaagggctcaaagcagcagcagccacaggaggtggtaccaaaattcctcagcctcccccaacaccactaccaacaacaagggaattccaacaacaacaacatgggagagaacaaaccatcagaggttaaggatttccagatagtggtagctgctgagaaggacgagagcaagaagcagcaacagttggcaccaaagaggagttccaacaaggacaggcacaccaaggttgagggcagggggaggaggataaggatgcctgctctctgtgctgccagaatcttccagttgaccagagaattgggccacaaatctgatggggaaaccatccagtggctcctncagcaggctgagccatccatcatagctgccactgggactggcacaatcccagcatc

SEQ ID NO: 270216 - DNA, 427 bp, Glycine max
ggttctagtgtgtgattgcttgttgttgtaactcgttcttcttcttttgttgttctgtgtttgtgtttgatttttctctcacctgaaaatgtcttgctgcggtggtaactgtggttgcggaagctcctgcaagtgctgcaacggctgcggaggctgcaagatgtacccagacttgagctacactgagtcaaccaccaccgagaccttggtcatgggaatggcacctgttaaggctcaatttgagggtgctgaaatgggtgtgcccgctgagaacgatggctgcaaatgtggaccaaactgctcctgcaacccctgcacttgcaagtgaggtgttgggagagcaagcttcaagcagagatagcccctaattaggaataatgatcaactattaatgtgtagctaataacttatgtattatgtctgagat

SEQ ID NO: 270217 - DNA, 326 bp, Glycine max
agctccggcaacagtgatttgttgtgcggatgacgcagctttgtgtgccaaatgtgacgttgaagttcatgttgcaaacaagcttgcaagcaagcaccaaaggcttcttcttcaatgtctatcaagcaagcttccaagatgtgacatttgccaagacaagccagcattcatattttgtgttgaagacagagcactcttctgtcacgattgtgatgaaccaattcattcaaccagaagcctttctgcgaaccatcagcgcttacttgctactggtatccgaatggcatcgagttctaattgcaccaatgacaatgaaaaaaagtaac

SEQ ID NO: 270218 - DNA, 444 bp, Glycine max
tgcgagaagacgaccgacgggagctctcggctggtagaagcctatatcacacatggattagggttatgaaaagatgaagcatgatggccctcatccagacatatctacatacaatattttgatctccagctttggcagggctgtacgagtagacattgctgttcaaaattctgaagaactagagaatagcgactgtaagcctgacattatttcctatataactctatgatcaatcgccttggaaagaatggggatgttgatgaaactcacatgagatctaaagagatgcactagataggattaattccggatgtcgtgacttatagtacacttattgagtgttttggcaagactgataaagttgagatggcctgtaagttgtttgatgaaatgcttgctgaagaatgcactcctaacttgatcacatataatatcttgcttgac

SEQ ID NO: 270219 - DNA, 412 bp, Glycine max
ctcgtataatctatcagataactatttataagtagggttatatctttataaacatcttatattactttgtggtccatttctgcaacttcatccattactcctttaaaccattcaaaagatccaggttccctagtgacccagtagaaataagcatttgtagtccttcgtgatctcttatttcctcctggagttacatttgaagatgtaaagctattggagctctcgtctgatctggttgtttgacttgtttctgtgtttgactcctgcacctgaccttatgaaaattgaaaacttaagataaaagtggaatcaactttctgaaaagggaagcagagtttggatattagtaccactagttcatccattgctctggtgttattgagaagatctctgagaatgctgatgaaaggag

SEQ ID NO: 270220 - DNA, 405 bp, Glycine max
gactcacaaaaaccacttacaaagtagtactacttggtttcaatcaaaacaaaaactcacactttggtggccacagcaacaataacaatggcagcctcactacaagctgcagctaccttcatgcaacccaccaaggtgggcatggccactcgcaacctcaaatctacacaatgcatttctaaggcttttggcttggaacccgctgcagctaaactcatttgctcccttaagcccgatctcaaagattttgctcaaaaatgtgtcgacgccaccaaaattgcaggattcgcccttgccacctcagctctcgttgtttctggagcgagtgcagaaggtgttccaaagaggctaaccttcgacgaaatccagagcaagacatacttggaagtgaagggaactggaact

SEQ ID NO: 270221 - DNA, 425 bp, Glycine max
tggtaacttatcctaacctttaatagaagtgtattggaatatatttatcattttacctctcttttcaacaatctacgtttctaaaattaacaacaggtgacaaaggtgttctcaattggaaacaacggtatgatataattttaggcacagcacgaggactagcatatctacatgaggaatttcatgtgtccattatacatagagatataaagactgctaatatcctcttagatgatgatcttcagcccaaaattgctgattttgggttggctaggcttcttccacgggatcgttcccatcttagtacaaaatttgcaggaacattgtaagtaaaaaacaatgtcattcacattaatttcttgacctttattgagcaacaagttgtagcagaagagatacattaattactaaaattaatggaacat

SEQ ID NO: 270222 - DNA, 356 bp, Glycine max
ctggggcaccgcttgagcagacttaacatcagggcaaagcgtcatactgggtgctcaagctaccatgtctatatctatctttactagtgcctccttgccacaagctaaaatggcccaagagactctcatattcacatgcgaatcaactaacgaggggcaccctgaccagctctgtgaccagatctccgattctgtactcgatgcatgcttggagcatgaccctgacaagcaacgatgtctgtgaaacctgcaccaataccaacatggcgacggaattccgagagatcacaatcgaagccaaagtgtactatgagaagaatgtacgtgacacatgcgtgcacataggcttagcctct

SEQ ID NO: 270223 - DNA, 345 bp, Glycine max
  unsure (1)..(345): unsure at all n locations
ccacacgtgtggtctanaactagcctatgctcgtgaagcttgtcgacgaattcanatcgacgcgtttagagattggtggggccgactaaattcatgtcgcgcgatagtggggtttatcgccgatagagatggcgatattggaaaaatcgatatttgaaaatatggcatattgaaaatgtcgacgatgtgactttctgtgtaactgatatcgccatttttccaaaagtgatttttgggcatacgcgatatctggcgatagcgcttatatcgtttacgggggatggcgatagacgactttggtgacttgggcgattctgtgtgtcgcaaatatcgcaggttcgatat

SEQ ID NO: 270224 - DNA, 396 bp, Glycine max
gataataaatcacattcatacctccgctatgttttacatgatctttggcagggagagagaaaaaatgcagaagcatggttttgcatcaaagcgtaacgtgttgccgtatcaaacgccgaggctaagggaccactacgttctggggaagaagctgggacaggggcaattcggtacgacgtacctgtgcacccacaaggttacagggaagctctacgcgtgcaaatcgatcccgaagaggaagcttctatgccaggaggattacgatgacgtgtggagggagattcagatcatgcaccatttgtcggagcatcccaacgttgtccagatacaaggcacgtacgaggattccgtgttccgtgcaccttgtcatggagctctgtgcagggggagagcttt

SEQ ID NO: 270225 - DNA, 407 bp, Glycine max
ggggagttttgcggggcggtttattgtcaaatggccgccagtataaacacggctgctttgacaaaatacttgggagggcgcgtcgacgctcttacccgcaacactcccttaaccctggcttccaactttatgattcgccgcttatgtgaacacgttacgggttgatgcctggacaaggatgaagtcacagatcgcgtcatttgctgcgtcaaaaacttacagaaaggtgctccttcaaagggtaaccctactgctcacttccagaatgaccttggattggagagtttaaaatcggcagagaacgtcatggctcttgacgaggagtttgtgttcgacattactgataatgacgcagacaagatcaactgcattaaacttgcagtggacttcattgcatcttatcctca

SEQ ID NO: 270226 - DNA, 380 bp, Glycine max
ccgtacgccagaaaactacacaattgttttacagcaaaactatcaaatcagatcgtcttgtttccatatatcgcggctccaacatatcatgtgttggaatcatagtgtaccgccgtctttactttggaatgtatgattctctgaaaccaatggtcttttttggtggattgcacgataacttctttgctagttttcttttgggatgggggatcacaataagtgccggcttggcctcttaccccattgatactgtgcgtaaaagaatgatgatgacatctggagaagctgtaaaatacaagagctctttcgaagcattcaagataatcgtcgcaaaacacggtactaactcactctttaaaggtgctggtgcaaacatatta

SEQ ID NO: 270227 - DNA, 212 bp, Glycine max
gatccttctgtgcggggaagggcaaaaaatggccggggtgcaacttctctaggaatcatgcccccggctgaacacatcatcacacaacaagtcaagcttctctacaaacacgcaagaacactgctttctccggctcaagaacatcttcatgactgtgctgttcacagccgtgatgcttcactgtcgctggactccacaagaaggagcttgtc

SEQ ID NO: 270228 - DNA, 263 bp, Glycine max
ggccgggagctcgggcccccacacgtgtgggctatactagcccattttcgagaagcttgtcgacgaattcaaatggggagccctgctaccatgcctgcagcgactcatggtcgctcggcagcttcttgctcctaacagtggaggccagacttaggcacagcacgatgcccaccaccaccagtgtgccgcacaaggccgtggcggtagggtatgtgtctgaaaatgagctcggggagcgggcttgcaccgctgacgcatttgga

SEQ ID NO: 270229 - DNA, 338 bp, Glycine max
cggggcaccgattgagcagacttaacaacagcacaaagcgggttactgtctgttcaagctaccatctctctgtctctttcttagtgcctacttgtcagaagttaaaatggcccaagaaactttcctattcacatctgaatcattgtactatgggcaccctgacaagctctgtgaccagatctccgatgctgggctcgatgcatgcttggagcaggaccctgacagcaaggctgactgtgaaacctgcaccaagaccaacatggtgatggctatccgagagatcacatccaaggccaacgtggactatgataagattgtgcctgacacatgcaggaaca

SEQ ID NO: 270230 - DNA, 419 bp, Glycine max
  unsure (1)..(419): unsure at all n locations
ggcaccgcttgagcagacttaacaacagcacaaagcgggttactgtctgttcaagctaccatctctctctctctttcttagtgcctccttgccagaagttaaaatggcccaagaaactttcctattcacatctgaatcagtgaacgaggggcaccctgacaagctctgtgaccagatctccgatgctgtgctcgatgcatgcttggagcaggaccctgacagcaaggttgcctgtgaaacctgcaccaagaccaacatggtgatggttttcggagagatcacaaccaaggccaacgtggactatgagaagattgtgcgtgacacatgcaggaacattggttttgtctctgatgatgttggtcttgatgctgacaactgncaggtcctcgtcaacattgagcaacagaatcctgatattg

SEQ ID NO: 270231 - DNA, 349 bp, Glycine max
gacaacatatccattttatttacaacagcggtcgcttatgttcctgaaccaaggatctcccttctaaccttattcttcttctcgttcttcaccatcattgcgcatgcaattgtttctcaacacgaatccttcaaatttgagaactcaggtgaactttgtaccctgcatcgttgagtacggtgcagattacagaatgataagcatcttcaactatccattccaagttggattctactacaccaccccatatgccttcactctagctctgcgtgtaaggcttcaacgctcggagcatctatttcattagaattgggaagccaataggaccaacccagacggagaaaatgcc

SEQ ID NO: 270232 - DNA, 437 bp, Glycine max
gattgccagggatggtgaagacggtcaaactatcgtgattccaattgatcatggctattgcttgcctgagagttttgaagactgcacttttgactggttatactggccacaagctaaggagccttactctcctgacaccattgattacataaaatctctggatgctgaagaagatataaagcttttgaagtttcatggatgggaccttcctcctaaatgtgcccagatccttcgtatatcaaccatgcttcttctgaaaggtgcatagagaggactcactcctttcgccttaggaagcatcatgtgtagagaaacactgaagaaaaaatctgtcattgagcagattgttgaggaagcagaggaagcggcatttcctggagcaagtgaagctgcatttcttgatctggtttcagtggtcatggatagtcatttggatg

SEQ ID NO: 270233 - DNA, 406 bp, Glycine max
cgattgtcagagatggtgaaaacggtcaaactatccgcattcgtattgatcatggctattgcttgcctgagagtttcgaagactgcactttttactggttatactggccacaagctaaggagccttactctcctgacaccattgattacataaaatctctgtattctgcataagatataaagctattgaagtttcatggatggtaccttcctcctaaatgtgcccatatccttcgtatatcaaccatgcttcttctgaaaggtgcatatagaggactcactcctttcatcttatgaagcatcatatgtagagaaacactgaataataaatctgtcattgagcagattgatgatgaaacatatgaaacagcttttcctgtagcaagtgaagctgcatttcttgatct

SEQ ID NO: 270234 - DNA, 441 bp, Glycine max
gacagacactaataataataaaaaatttgaaatctgtgcgcatgcttatgaaataaactgcaggcgtaacaaaagttgcgtagccatactctgattcattagtgaagaaaaatggcaaccatcatcgccggcatcccaactacatcgatcactcgcgcaggtcttgtgctcaaacgacctgttggagcctcgtcctctaccgttcttggattgccagcaatggctaaggcagggaaagtgaggtgctccatggaggaaaagccttcaagcagctcaaatatagggatgggggcatccttgttagcagctgcagttgccgcaaccatgtcaagcccagccatggctttggtggatgagagactcagcactgaaggaaccgggctttcctttgggcttaacaacaacctccttggatggatcctgtttggtgtcttcggtctt

SEQ ID NO: 270235 - DNA, 161 bp, Glycine max
gtcggcgagtcgggttgtttgggaatgcggccccggtcgtacggtaaattccgtgcaaggctaaatactggcgagagaccgatagcgaacaagtaccgcgagggaaagatgaaaaggactttgaaaataataattatttttaataataaaaaagtggttgt

SEQ ID NO: 270236 - DNA, 430 bp, Glycine max
cgacagtgtaaaacctctaattctgctagtaaatgggtgctcaaagaaactcatgattacattcttccaaattataaggaagattgtgatactcccactgtagtggatgctcaaatgtctgatcacttaccttgggctgtgcctctcggtcttgatgaattcaatagcagggcaattagttctaaaattaagtctggcacttctggttcctctggaagtgttatgcatagagtggagcctggtggtgcagaatacaattatgcttcagccttcatgggagcaaaattattaggttctaacaaagaagccaaaggcgcctctaatatcttaagcagagacaaagataagtatcttcgcaatccatgttccgccgaatacaaattcgtcatcatagaactttctgaagaaaccttgtgagatacaatataaa

SEQ ID NO: 270237 - DNA, 289 bp, Glycine max
  unsure (1)..(289): unsure at all n locations
tggactctttaactgtaagtcaaacaaatgatttaatagaatattgttatatctataagctctataacttgttatacaactcatgcttgatacataggttattatcatatatacctgactaatgagatgaagttgaattcattaaatcacgactaaaaattactttttttaatatatatattcaccttctatatactacatctatactcttttatgccctgntgtatactctttaacatttaataatcatctccaatcttggtttattgatctatcgaatactacgcta

SEQ ID NO: 270238 - DNA, 408 bp, Glycine max
  unsure (1)..(408): unsure at all n locations
gtattagatttgtttcattagattttgcgttcaaggatataaatatgcacatgtaatcatgaccaagaaataaataaataatcaatgaagttttttttctcaaaattcttatgagttaaatttcataagaaaagttaattctgaaataaatgttaatattatatntaatatataattaatatttattttataaatattaaaaattatatattattatatttgttcctatatataataaaaagaaacaaatagtagtgttttttactaatttaaaaattatatgagaccgcttacaagtatattgatttatgattttattcaatgcccctagtttaatgtgaagtctattagggagatatctatattgtttatgaaagtgaatgcatttattatcaatataactcacat

SEQ ID NO: 270239 - DNA, 418 bp, Glycine max
gaagccacttgctattgaattaaccaaaggacatggagatggagataatttgggtcctgagagtatagtggtgttgactgcaactgaaggtgttgatagtacaatctggctattggccaatgctcatgttattgtgaatgactctggttatcatcatatcatgatccattgtgtaaatactcatgccatgatggaaccatttgccatatcaaccaatacgcatctcactgtgctccaccctatttataaacttctttatcctcactaccgcgacaccatagatatcaatggacttgctaggcagtccctgattaatgcagatggcattatagagaaatcatttttgccctgaaagatctccattgagatggctttatccgtgtacaagaattggtgttctactgaccaagccttacca

SEQ ID NO: 270240 - DNA, 399 bp, Glycine max
agggcagcttgagaggtcaaagcgccaaggctgcaacaggcactcgctgccatcccttcaatccctaattccgccactcacttccgctctcagctcagggtattacgtgctacgcggagaatgggaagtactgaaaagatcccaatcagcgctgaaagttcagaaaccaccatcaggataaagatcaaaacattggattctcaaacttacaccctgagagtggataaacagatgccagtccctgctctgaaagaacagattgcttctgtaactggaatgttatctgaacgacaacgcttaatttgacaaggaaaagttctaaatgatgatcagctactgtctgcctatcatgttgaagatggtcacaccttgcatatggttgtgaggcatcctgatcta

SEQ ID NO: 270241 - DNA, 399 bp, Glycine max
  unsure (1)..(399): unsure at all n locations
ggctttttcttttcatccatcgattaaagacttgcttccaagatggttctgctagagaagctctgggatgacgttgttgctggccctcaacctgagcgtggccttggcaagctcagaaaactcaccaccctcaaaactattgatgaaggagacagtagcaagctgcagaagacgttgtcgatgccgtcgacaccgacaaccccgatgactcccacgactccaacgacaccgggatccgcgcgtaaagctgacaacgtttggaggagcgtcttccatcctgggagcaactncgtcacaaagaccatcggtgctcagatgtttgacaaaccacttgccaacactcccactgtctacgactggctgtacagtggggagaccagaagcaggcaccgctgaaag

SEQ ID NO: 270242 - DNA, 402 bp, Glycine max
  unsure (1)..(402): unsure at all n locations
tacggtttggaagcagaagtatgagaagattactgcgaagaaaggttctacttctattgactctctctctcnntactatccctcataatttgcttcatacttccattactgccggtcactgaggtttgatgataaaccagattatgcttatttgaaaagacttctacgtgaccttttcattcgtgaaggattccagtttgattatgtctttgattggaccattttgaaatatcagcaatcttcaagtgccactgcccctgcccgtgctattgtaagtgatagcatgctatcttattgtattagctgattgattgttgagatttagattatttagtggaagtgacatttgcagggtccggccgctggaccaagttcaggtgtgccaccactggttgcaaatgg

SEQ ID NO: 270243 - DNA, 304 bp, Glycine max
acgtacacgcgcagacggctgccaagacgacagattgagaggtgctagtgccaatggagctacacgcactatttgacattattatacagcacagaatgaacataatgtcttagtctgaatgatggaccatcgtgaagctatcatattccacttaacttgaactatcctaattatggcgtaccatactctagcactcaatgtccataatgatgacacgcttgattttggcacttccgcgatgcaaatgttgatacagactatatttgcccatttgatacaactcagctcatggtgaaacttacta

SEQ ID NO: 270244 - DNA, 450 bp, Glycine max
ctccaaagacgcataccaaaggtaccatgcccatcactacacaaatggaacccggtgcgatgtcacaaaccaaccacgagaaactgaggttagatttgtttgctcaaagccacccagagccatactcaattgtatcacagaactatcaacgggcaagtatgcacttacggcgcgatgcccgacactttgcaagcatatgttatttgaagaagagagaccagtgtggtacatcattaactgcaatgagcttccagatgattacaaggaaacagagaggagtgaagaatcaacagatgagattgtcatggttactgacatcaaatatccaaaaaatgaatctgaagattaatgtgaatatatctttatatgatagaagttttatcaaccaaactaaccttacacacaaagctttttcctatgtagatttttctttttcatattcaaattata

SEQ ID NO: 270245 - DNA, 331 bp, Glycine max
tgctgggtttcgctgcaagtttctgtgttggggacactgacccacttgatgttgcggcaatcaatagtttgtacgtggctcttggctcaccactccttgagggatggaaagccacaggaggagatccttgttttgatcaatgataatgtgttagttgtgtcttctccaacattactgcattacggctggtaggcatggatttaagtggaaagctgtgaactaatttggatttcccatccatcatagaaatggatcttagcaacaaccagattggatggaccattccattcactttgcccactactttgaggaacttgtcactatcatcaaa

SEQ ID NO: 270246 - DNA, 372 bp, Glycine max
gttgtgcaggtattcaccaagccaatttacctcggggctgcagatacaagtctatacttcctttaattggaataaaacccgaaaaggctttggccttgcctggtaaatgtggccttcaatcccctcctaattgttgagtgtaatgaagcacttaatgaaagtcttgttcattacaagcacttagtgttcaggtgtttcattaacactgaagatgcttttatgtcctatggaaacatttatgtccctcgaataaagatgcatggtattttaatcagtgttttatgcctaacttgcaagcagatgtcgtgagtgtattaaaatagtcgtctgatgttgtatacaagatatctctactactcaatgagacacaac

SEQ ID NO: 270247 - DNA, 382 bp, Glycine max
gttgtgcagttattcgccaagccaatttaccttggctctgcggatacaagtctattcttcctttaattggaataaaacccgaaaaggctttggccttgcctggtaaatgtggtctccaatcccctcctaattgttgagtgtagtgaagcaattaatgaaggtcttgttcattacaagcacttagtgttcaggtgtttcattaacactgaagatgcttttatgttttatggaagcatttatgtccctcgaataaagatgcagtttattttaatcagtgttttatgcctaatttgcaagcagatgtgtgtggtgtattaaaatagtgtctgatgttgtatacaagatatctctactcctcaatgagacacaacagtaataatta

SEQ ID NO: 270248 - DNA, 211 bp, Glycine max
tgcttaagggggattgctctccatatttgaggagagtttatcggaatatttttaccacttacaaggacctctctttggcacttgaaaagatgtttagttgttttacactcattcaatgtgtctcatattgggtttctagtctggaaaatttaagggaaagtagattgatggatcttcttcattgttcagaatatgttcttacctattaata

SEQ ID NO: 270249 - DNA, 404 bp, Glycine max
ggaaggcgccccatatttgaggaaagtggatctgaatagttttaccacttacaaggacctctctttggcacttgaaaagatgtttagttgttttacactcagtcaatgtggctcatatggggtttctagtcgggaaaatttaagtgaaagtagattgatggatctccttcatggttcagaatatgttcttacctatgaagacaaggatggagattgtatgctagttggtgatgttccgtgggagatgttcactgagtcttacaagaggctgatgataatgaagagttctgaagcaattgggctagcacctatagccatggaaaagttcataagtcgctactagctagtgcaatgctgtatgctttttgctctaatcctgaaagatggaagaccacatttaagca

SEQ ID NO: 270250 - DNA, 233 bp, Glycine max
ggaaaatgcgtaaccgtcgctacatctcacgccgtggaccactcatcgtgtacggaacggaaggagccaaagccgttaaggccttccgtaacgtccccggcgtggaagtcgctaacgtcgagaggcttaaccttctgaaacttgctccaggaggacacctcgggaggtttgtggtttggacaaaaagcgcttttgagaagctggattcgatttatggttcttttgataagccc

SEQ ID NO: 270251 - DNA, 195 bp, Glycine max
ggaaaatgcgtaaccgtcgctacatctcacgcggtggaccacggatcgtgtacggaacggaaggagccaaagccgttaaggccttccgtaacgttcccggcgtggaagtcgctaacgtcgagaggcttaacctttctgatacttgctccaggaggacacctttggaggtttgtggtttgaacaaaaagcgctttt

SEQ ID NO: 270252 - DNA, 319 bp, Glycine max
gacacaccaaaccaaagtaagagtgagcgacttccaagaccatagtgaaatggcttccaaggctgcacttctcttgtgtttcaatgttctcttcttcaccgtggttagctccacatatgtgccatgcaacccaccccccaaaactccaaaacacccacctgtcccaaagccaccttccccaaagcaagcaagttgccccaaagacactattaagtttggtgtgtgttctgatgtgttaggtttgatcaacttgcaacttgttaagccacctaagaccccatgctgcaacctcattgagggtcttgctgatcttgaaact

SEQ ID NO: 270253 - DNA, 413 bp, Glycine max
ggtcgccacttcgacctcaatcaccctcgcgccgtcgctcttcccttcctggtggcgacaatgtcgactcctgctaggaagaggctgatgagagacttcaagaggctgcaacaagacccgcctgcagggatcagcggtgccccccaggataacaacataatgctgtggaatgctgtcatatttggtcctgatgatactccatgggatggaggcacgttcaagttgactctccagtttactgaggattatccaaataaaccaccaactgtgcgatttgtgtctcgcatgtttcatccaaatatttatgctgatggaagtatttgtttggatatactacaaaatcagtggagtcctatatatgatgtggctgctatactcacatctatccagtcattgctttgtgatcccaaccc

SEQ ID NO: 270254 - DNA, 377 bp, Glycine max
gacctttctctctctctccacaactctttctcacccgctagtgtttccttccatcgcatcttgatttcgcaacctcgtctagcaattctccatggagggtgctgggatggaagagaataatattattaatgatgataataagtctgaggcgcatttgacttctgccgctgcttttgtggagggtggaattcaggatgcttgtgatgatgcttgcagcatatgccttgaagctttctgtgatagtgatccctccacggtgacaagttgcaagcatgagtttcatcttcagtgcattctggaatggtgtcaaagaagcttccagtgccccatgtgttggcaacctatcagtcttaaagatcccacaaggccaagaatta

SEQ ID NO: 270255 - DNA, 358 bp, Glycine max
gttcgtacagagcgagcgatagttgaatcttaaaaacaatggcggcgaatctagacaccgactccggggcttacgatctgagcgactttctcaacgcttcttcaactgcttttcacgccgtcgactaggcaaagaggcgtttgcgtaacgcggggtaccaccaactctcttagagggaattgtgggaactgcaaccgggcaacaagtacttttttaccataaatcactccaccattgtcgccttcgtcattggcaaaaagtacgttgctggaaatggattctacataattggggctcacacagatagttcttggctcaaacttaagcctgttaccaaagtttgttaaagcttggattt

SEQ ID NO: 270256 - DNA, 409 bp, Glycine max
gaaagtgagaaaaaataaaaatcaaagagcatagtgtcagggatcattcacaagattggggagacccttcatgtgggagggcacaagaaggaggaggagcataagggtgagcaccatgctggagaatacaaaggggagcaccatggtgaacacagtagtgagtacataggagagcatcatggtgaacacatagctggagagtaccatggtgagcacaagccagagcacaaagaggggttcctagacaaagtcaaggacaagatccatggtgagggcagcgccgtcgtaggcgagaagaagaagaaggagaagaacaagaaggagcatggccatgagcatggccatgacagcagcaacagcattgacagtgattaaactgatgcatcacctatatatttaaaagggttat

SEQ ID NO: 270257 - DNA, 294 bp, Glycine max
ggagcaagagtgaagagcgaagagaatggctcccaggggtttggtctttttggctgtgttatgcttctcagcactgtcactgagtcgttgtcttgcggaggataatggacttgttatgaacttctacaaggaatcatgccctcaggctgaagacatcatcaaagaacaagtcaagcttctctacaagcgccacaagaacactgctttctcctggctcagaaacatctttcatgactgtgcttgtcagagttgtgatgcttcacttgtgctggacttcacaagaaggagcttgtc

SEQ ID NO: 270258 - DNA, 379 bp, Glycine max
ggagtgcgcaagagtgaagagcgaagagaatggctcccgagggtttgagctattcggctgtgttatgcttctcaacactgtcactgagacgttgtcttgcggaggataatggacttggtatgaacttctacaaggaatcatgccctcaggctgaagacatcatcacagaacaagtcaagcttctctacaagcgccacacgaacactgctttctactggctcaaaaacatcttccatgactgtgctgttcagagttgcgaagcttcactgacgctggactccacaagacggagcttgcctgagaaggaaacatatagaagctttgggttgacaaatttcaggtacattgagaccatcaaagaagctttggaaagggaatg

SEQ ID NO: 270259 - DNA, 393 bp, Glycine max
ggtggtggagtgtgcagaagagcgtcgcagtcgcaaccctaggcagaagaagcgcagcttcaagcgagtgacagccaccagccatgggtcgtatgcacagccgcggtaagggtatatcctcttctgctttgccctacaaaaggacacctcctagctggctcaagatctcttcgcaagatgtcgaagaaaatatctgcaagtttgcgaagaaaggtttgaccccgtctcagattggtgtcattctcagagattctcacggtattgctcaggtcaatagcgtcactggcagcaaaatccttcgcatcctcaaagctcacggacttgcgcctgaaattccagaagacctgtaccatttgattaagaaggcagtttcaattaagaagcatcttgaga

SEQ ID NO: 270260 - DNA, 374 bp, Glycine max
gccgcgagcagacgactgaaggggatcgccttttcagaggaacaatggctgttacaggtttcaacgtgctgggtcttcgtgtttgctctgtctcttcttcttccttttcagatctgcgctgatgaatcatccaataaagagttcgtactcacattgtatcactctaactttcacgacactgtcaacaagcaccatttcatgcgtcaatcgagttctactctccatggcgtggccactgttagaagcttgctcccgagtatgataaagctgcttctatcttgagtagtcatgatcctacccatgttttggcttaaattgatgcctatgaggagaataacacacaccttgcatttcaatatgatcttatgggatac

SEQ ID NO: 270261 - DNA, 335 bp, Glycine max
  unsure (1)..(335): unsure at all n locations
gaacatggcctataactatgggaaaggggctctgtgtgtgctttcagccttggccggaaaaaatgatggtgtagttgctggacttgtggggtgtggcctgataaaatccattgtttcaattcatctgatttgatgcatgatttcaagactggccatctcactttcactttccctcgttcgatgcttctaagccaagcaattgggacagcaataggttgtgtagttgctcctctcacattcttcctttnttacaaggcttttgatgtggggaacccagatggtgactacagggctccgtatgccatcatatatagaaacatggcaattcttggtgt

SEQ ID NO: 270262 - DNA, 364 bp, Glycine max
ggtgctctgctcgtgcctctagggttatcatttctccatttccattttctctctcacttttcaagaatcgtaagctatgggaaagtcttacccaactgtgagtgctgattaccagaaggccgttgagaaggcgaagaagaagctcagaggcttcatcgctgagaagagatgcgctcctctaatgctccgtttggcatggcactctgctggaacctttgacaagggcacgaagaccggtggacccttcggaaccatcaagcaccctgccgaactggctcacagcgctaacaacggtcttgacatcgctgttaggcttttggagccactcaaggcggagttccctattttgagctacgccgatttc

SEQ ID NO: 270263 - DNA, 376 bp, Glycine max
ggtggcagagagcgaacccaaaactagagctaccttccctgcaaaccttccactcttctctccttttccaatcaagggaataatatttcttagagatattccgaaaccatggctcacgccaatcctatgatttttgttgttggaattctaggtaaccttgtctccttctgttgctttctagcaccagtaccaacattctatcgagtttgtaagaagaaaaccacggaaggtttccaatcacttccttacgtggctgcactcttcacttcaatgctttggatattttatgcttacataaagacgggcgaaatacttctcatcaccattaacgcattcggttggttcatagagacagttacctttgcatctatatcac

SEQ ID NO: 270264 - DNA, 426 bp, Glycine max
  unsure (1)..(426): unsure at all n locations
ggttctagtgtatgtgattgttgtgactcgttcgtcttcgtcgttatcttcttcttttgttgtttgtgtgtttgttttttctctcacctgaaaatgtcttgctgcggtggtaactgtggttgcggaagcgcctgcaagtgcggcaacggctgcggaggctgcaagatgtacccagacttgagctacaccgagtcaaccaccaccgagaccttggtcatgggagtggcaccagttaaggctcaattcgagagtgctgaaatgggtgttcccgctgagaacgatggctgcaaatgtggagctaactgcacctgcaacccctgcacttgcaagtgaggtgttggagagctaaagcttcaagcagaaatggcccttagaaataatgantaaaactatatgtagtttcaaaacttcaaaattatgtaatat

SEQ ID NO: 270265 - DNA, 325 bp, Glycine max
gatcatccaacatcacacacaactacaagaaagaacttcgttataaccaaaaccaacaacaactatggcaagttatcagaagcactacgatgatcagggtcgcaaggtcgacgagtatggcaatgttgagaggcaaactgacgaatatggcaacccggttcatgccactagtgtcacttatgtagccaccaaaagtgttggtggctacaatgatgacgctaataagcaacatgatattactggtgtctatcccgagaaagacaccggtagacatcattttggtcgtggttacgacggtgacactaacaagcaacatgatgctact

SEQ ID NO: 270266 - DNA, 375 bp, Glycine max
gaagtgtggaggtgcgtgcttttgtgggggcaaatagtagatagtagatctgtcgcagagcaaagaatcgtcggcgacggcgaggctgcactataaccgcgattaactatgattagccttcgccggagcgtaaacaagatcccggcgaaatcgaagcgattcaaatgccgattggtgaagttcgaggagctgccggagtacttaaaggacagcgagttcatattggactattaccgctctgaatggcccgtgaaggaagccttgtggagcatcttcgcgtggcacaacgaaaccctaaacatttggacgcatataggaggatttctcatattcgccgtgttggcgtcgatgagcaccacctcggaactctggaat

SEQ ID NO: 270267 - DNA, 363 bp, Glycine max
caccctaccgctccgataagacgactgacagaggacccaatgaacccctatcatatctctcatcatgtatatacctcaatatttggccatcacaccactctattattatcactatcatcccatccaaaattatctatcaccactaaatactccaactaacctaacctactatcccaactcttcactcatgtaaacacactgcgccaattaaccatagagtacaccagatactcataaacatatatttgcaggctcagaacatattttagaccgccctatgaatattaacgaacgagaccatcactatcgacccaaatatccacctgctcgatctcattatgcacatgtcattaaaacaatatt

SEQ ID NO: 270268 - DNA, 309 bp, Glycine max
gaataatataactatataagcggttcttccatttgactcttgttctgaacgacttttcaagagaatcaaaccatggcagtgaaagtatacggtccccactgtgcttccaccaagcgggtgctggtttgtctggttgagaaggaagtcgaatttgaggttgtccctgttgatgtcactaagggggagcagaaggatcctgagtacctcaaactacagccatttggagttgttcctgtcatcaaagatggagattataccttatatgaatctcgtgctataatgaggtattatgcagaaaaatacagatct

SEQ ID NO: 270269 - DNA, 282 bp, Glycine max
agagaagggtctgagtgatttggcaacccattatgtcagcgagcatggagttagtgcaatcaggaggctgaggaaaactgataataatagaattgcaaaggcttgtggtgctgttattgtgaacagaccagatgaattgcaggagtctgatgttggtactggtgctgggttatttgaggttaagaaaatcggagatgagtactttgcatatattgttgattgcaaagaacccaaggcttgtactgttctactaaggggtgctagtaaggatctattaaatga

SEQ ID NO: 270270 - DNA, 330 bp, Glycine max
acaagggtcctactctgctagatgcacttgaccagatctctgagcccaagaggccttctgacaagcccctcaggctaccccttcaggatgtgtacaagattggaggaattggaactgtgcctgtgggacgggttgagactggtgtcttgaagcctggaatggtggtgacttttgcaccaactggactgacaaccgaagttaagtctgtggaaatgcaccatgaagctctcacagaagctcttcccggtgataatgttggattcaatgttaagaatgttgctgttaaggatctcaagcgtggttatgttgcctcgaactcaaaggatgatc

SEQ ID NO: 270271 - DNA, 313 bp, Glycine max
acattgggaccttacagacatcaacatatctcatgtctctggctaagaatcgaaacagagagctcacacattggcatcagtgtatctaccaagagaacatcaattatcagtctctttcctctattgcaaaccccaaaaatgttctggttattcatccatgatatcgtcgacacctggggtactcaccttatcatgcctcactacaaaatatcaaactttgtaccattgacaatatcgttgactaagtctttaatcaatctttccctgacatatcatcaggatttgactacccacatctaacacttactggtct

SEQ ID NO: 270272 - DNA, 404 bp, Glycine max
ggtcttccagtcatcaacatatggcaaggttcttgttttggatggagtcattcagctcacagaaagggatgagtgtgcctaccaagagatgatcactcatcttcctctttgctctatttcaaaccccaaaaaggttttggttattggtggaggagatggtggagtcctgcgggaagtagctcgtcatgcctcagtagagaagatagacatttgtgaaatagacaagatggttgtcgatgtctctaaacaatttttccctgatatagcagtaggttttgaggacccacgtgtaacacttactgttggtgatggagttgcattcttgaagaatgttccagaaggaacttacgatgcagttatagtggattcatccgaccctattggccctgctcaagagctgtttg

SEQ ID NO: 270273 - DNA, 388 bp, Glycine max
ggtgctctgtgattcccagaccttattttttctgggatttgcttcaaatttcaggagattaattatggctcaacccacaacaagaataggccttgctggattggctgttatgggccaaaatctggcactcaatattgctgataaaggctttcccatttctgtttacaaccgaaccacttccaaggttgatgagacagtataacgagcaaaacacgaacgaaatcttccagtttatggctaccatgaccctgaagctttcgttcattccattcaaaagcctatggtgataataatgcttgctaaggctggcgcacctgttgaccataccattaagaccctatctgcgtacatggaaaaaggcgactgcataatcgatggtggtaacgaa

SEQ ID NO: 270274 - DNA, 376 bp, Glycine max
  unsure (1)..(376): unsure at all n locations
ggttctggtttgtcgttctttctctcgcaatcttgactacattcaccgagcatttgcattcacattgaatatggctgagactacacaatctaatgctgagttgttggagtggcctaagaaagataagcgccgcttcctgcatgttgtgtatcgtgttggtgatcttgatcgcaccattaagttttatactgaatgttttgggatgaagcttttgaggaaaagagatattccagaggagaaatatgccaatgcttttcttggatttggccctgaacaatcccattttgttgtggaattaacatacaattatggggtgacctcatatgatatnggaactggatttggacattttgctatcgcaactccagatgtttac

SEQ ID NO: 270275 - DNA, 375 bp, Glycine max
aattcgagcgaccgctttctttctttcttttgctagatgactactcttaataaatgattcggtgcaaagggatttttttttagtgaacgtgtcacagttaattactcctttttcttgtaaagacgaagaaacacttgctatttactgtactatttagctcgacgaccaagaatcaaattatcactatatttcttcctttttctacttctttttccaagtgcaggaaaaccccaaggagttgcgggtttatttctaccaattggggccctcccttcaccacccccatgcggatggtatacggggttcataactactcctgtaactacaggacgcttacttagccaacattaaaatccggtttaacctaaattttcc

SEQ ID NO: 270276 - DNA, 363 bp, Glycine max
gaactagttgagaaaccacataactaccccattataggaacaaaatgggtatttagaaataaactagatgaaaatggtatagtaattagaaataaagctagactagttgcaaaagggtacaaccaagaagaagggatagactatgaagaaacctttgcacccgtaactagattagaagccattaggatgtttttagcttatgattctattatgaactttaaactatatgaaatggatgtcaagagtgccttcctaaatggtctaatccaagaggaggtatatgtagaacaacctctcgggtttgaagactcacaaaaattagatcatgtctatagattaaagaaagcacttatgggttaaaac

SEQ ID NO: 270277 - DNA, 456 bp, Glycine max
aattcgagcggccgcttttttttttttttttttttttttttttttgcacggtacgaaaggacatccgaaccatctaatgacaaaaatattaactatttcaaaaccatctcatctaatgattcaaatttacttttgtactatctaagaaatctttcactttttgtaaaatttattttgttttactatataatcttgcatacttgaaaaatcacattcttgaagatattattttgtttaggaatattattcacatagacatgttttgttggtatttaataattgcataaaaattaaaatttatttaattaaaaaattaaaaaaagtaaaaaaaaaaatatagtagaatatagtaaaaataggtagctattgtagaaaataacttgtattctcatgagaatattatatactcatccttattcatgagtagagcttgtttgaaacatgaagatataacat

SEQ ID NO: 270278 - DNA, 177 bp, Glycine max
tgggctcgtagagcatatcttccgactcaaagcttattgcctctataggatattcctttcatacttcctctatcttgtatactaaatctatctatttgctgattatacctgatggacgctattaaatcccatatatattacccaaccttacatgacattcttaactatcacgactct

SEQ ID NO: 270279 - DNA, 433 bp, Glycine max
gacaacaccctctattaacctttctctgtcctctgtttcctctctcttggaacaaacgacaagttatggtagtatttgtcattcatttcacaaaactggttcacctttggacccatggcttctaaaaactccacgttgttccagtctcgcttcttcctcttcggcttctattgctgggactgggagtttctcaccgctcttctcctctttagttcttcttcctaatcaaataaccttctccaccatacataaacctttttttttttgtcttttgtacttaaatttctcattactacatcaacaaaagaggcatagattttttcttcttttattaaaataatagtttgtgaggtaggtggagggtagatcgggaagaaaaatgtcgcagcagcagcgttcgatgccggcgccgttttttgacgaaatcgtatct

SEQ ID NO: 270280 - DNA, 418 bp, Glycine max
cccacgcgtccggggcggaagaaaaaccttgtatacagactgatggaaagtctattagtgcttccacatttcattaatattagttagattagttagattgaatagtttttaatttagctaattcgctttcttaatcttaaaagtatatatatatataattatataatataaatataatttcttatatatataatttaaaatattttacaaaatttttttattctaaaatcgaatagaaaaaagaaaatctttcttttcactaacctctagtaaaaaaaatgaataggcaagctatcttccgattattttagtttttttagagaacgaatcgggagacattacgaaattttttcaaatagaaataagaaagagtataagtatgcaaatgaatctggcttgattcttttttttatactta

SEQ ID NO: 270281 - DNA, 364 bp, Glycine max
gacagcactgcactcttcgcaacacaacaaaaaaagacaacccagagagcgcgtcttaataaacgctcttctctgaaaacccccatttcttttcttctttcttcttctctttcgcttcttcgatcttcgatcttcgtcgctgaaaatgagagagtgcatttcaatccacatcggccaggccgggattcaggttggaaacgcctgctgggagctttactgcctcgaacacggcattcagcctgatgggcagatgccaagtgacaagaccgttggtggaagtgatgatgctttcaacaccttcttcagtgaaactggggcaggaaagcacgtgccccgtgcgatttttggagatcttgagcccact

SEQ ID NO: 270282 - DNA, 241 bp, Glycine max
gacacacgaaggcttgatgggtttccttgaaccattaatcaagccgaaatatttgaaagggttaccggcattgacctggggggcaatctgaagcttccagaagaagcactggttgcaaaatgccttggtagaaaaatttgtgatcaatgtggaggaaattttaatattggcttcattatcgtcaaaggtgagaatgggccttccggaatggtcatggcttcacttctttcttctgcacact

SEQ ID NO: 270283 - DNA, 377 bp, Glycine max
gaaaacagcacatcataatgtttggcagtataaaggcatcagcgctgccagtgtcgtcgcgttcagaggaaggaggccttcgcagacgtctttcttcgctgtctctgaagatccaagacagcccaacatggtcattttccagatccaagtccctctcatccatgggtgactatgtaaggacatgcttggcctggatcctctacaggaagctcatctttgccacagatctcgaaatgaacgaccagaaaactaaactccttggctcccccaacaggggcacttggagccatgttttctataagctgccctctgaaatcaaaaggttcatctttacttctgatcacgccacttttcccaaaacctaccacaggtcctaa

SEQ ID NO: 270284 - DNA, 424 bp, Glycine max
gaaggtgcaagagtttgttgtgagctataagctggtttatcgtgaggagaatatgaacttgtctgttttctatgatgctgcactagttttggtagcatggccatgccatggcgcaggctaccaaaggttccctctccgaatgaaaactgtctatggtgagcgttcttctgaggtaaaatgcgcaagttttaagcttgctgtgcatgcacacaccatccgagcttttaatcccattcctgaaaatgcccttgacccaccaaaggactacattaattgctaaccatttaaatcagacttttaaacacttaagccacatgctatcttatatgctaatgaacgctgagtccatcacaacgacatatttatattcggcatatataacaccgtactctctaatatcccatactatgaaaaacatggatat

SEQ ID NO: 270285 - DNA, 434 bp, Glycine max
ctcacatctaataacttcagaaacagcacaagcatctggcaacacggctgaagcagtttcctgcttagcataccttgttttcaaatttgattctccatccaaattcattgtctgaatataggcaatcccacttggatcactcgtccccaacaagaccatgtcagcaggaatcatctcatcagcagagattttaatgacatcaccagcctgtatatttttccatttcttggggcagaactgagccgattgaagaaccagacactctcgattgttttcattgcgatcggacctgtgcctgcgccaatcctcataggcatccttgatagctgtgacgcaaagcacaaacaagagggggaaaagggagacagttcgcccaaaaacagcgagcggaagaagctgattgagagcggcaatggcaaggaaataaacataag

SEQ ID NO: 270286 - DNA, 438 bp, Glycine max
aatcccgcgaattacttctgaaaattacttctgaattaatgaaattttttcaataatttaagaaaaaatatttaagaactatagcatttcgcgatttattggtaatccactttgattctctattaaccaataattttggactattaccatggttaaagtgaatagtttgaagtctagacgcagtgtagtactctttctaccactatgttaatacagaaatgaaatggtttcgataaaattattagatttttttttcgatatagaacactcatgtcgataaaatggcttgaatcctatttacttacggcaagaaattgaaaaacgggttaatttaaccctcccttttgtacaatgcgtaatcgatgacctatgtataaatgaataagaattctttggatttgaagaaaaaaaacaactttgctgacatatatttgtttg

SEQ ID NO: 270287 - DNA, 328 bp, Glycine max
  unsure (1)..(328): unsure at all n locations
gtttcagatgatggagctgccatgcttacatttgaagcactttccgagacttctgagtttgcaaggaaatgggttccattctgcaagaagttctgcattgaaccacgggctcctgaatggtattttgctcagaaggttgactacttgaaggataaagtggatgcaacatttataagagaacgtcgtgccattaagagggagtatgaagagttcaaagtgaggattaatgcattggtggctttggcacaaaaagttcctgaagatgggtggacaatgcangatggtactccatggcctgggaacaatgtcagagatcattcccggatga

SEQ ID NO: 270288 - DNA, 366 bp, Glycine max
ctggagtcacggcctaatgtggggaaaacggacccaaccactaaggcagacaacgggacacatgttcatcaccatccgcaaccacattactttgcttcaacggagtttgatgtcaatgacagtgcgctcaaattcacccacgtcctctacaatctctcccccgctgagctgtatgagcaagcgattaagcacgacacaggatcattcataacagcaacgggagcgttagctacactttctggagcaaaaacggtacgctcttcccgagacaaacgggttgtcaggtactacaccaccgagcatgacctctggaggggaaaaggctcagccaatattgaaatggactaacataccttcttaatcaac

SEQ ID NO: 270289 - DNA, 344 bp, Glycine max
gaactcgttctagtgtgtgtgatggctgtgactcgttcttcttcgtcgttatcttcttcttttgtcgtttgtgtgtttgctttttctctcacctgaaaatgtcttgctgcggtggtaactgtggttgcagaagcgcctgcaagtgcggcaacggctgcggaggctgcaagatgtacccagactcgagctacaccgagtcaaccaccatcgagaccttggtcatggcagtggcaccagttaaggctcaattcgagagtgctgaaatgggtgttcccgctgagaacgatggctgcaaatgtgcagctaactgcacctgcaacccctgcactcgcaagtgaggtgtt

SEQ ID NO: 270290 - DNA, 412 bp, Glycine max
ggcactgcaaatcacttttctactttgagtcttcgggatccttctttttctgcttgaactcaaacatggcagatgaggtggttctgctagatttctggccaagtccatttgggatgagggtcaggattgcacttgctgaaaagggtatcaaatatgagtacaaagaagaggacttgaggaacaagagtcctcttctcctccaaatgaacccggttcacaagaagattccggttctcatccacaatggcaaacccatttgtgaatccctcattgctgttcagtacattgaggaggtttggaatgacagaaatcccttgttgccttctgacccttaccagagagctcaggctagattctgggctgattatgttgataagaagatatatgatcttggaaagaagatttggacatc

SEQ ID NO: 270291 - DNA, 393 bp, Glycine max
agtctgttgatcgatatacaagaccagactttagagagggtgggccgatggcaattgattcatgtaaacacccaatcctggagagcatacacaatgacttcgttgccaataatatatttctgactgaagcctccaatatggcgattgtgatgggccccaatatgagtggaaagagtacttaccttcaacaagtgtgtctcatagttattcttgctcaagttgggtgttatgttcctgctcgtttctcaactgtgagggtagttgatcgtatgtttacaaggatgggtgcagctgataatcttgaatccaactctagcacgttcatgacggagatgaaagaaacagcttttatcatgcataatgtttcacaaaggaatctgattgttatggatg

SEQ ID NO: 270292 - DNA, 400 bp, Glycine max
accggttgttagaagacaacagaagggggccattggggcggctattatcatccgcagctgcttttattcgcaccgcaaacagtgagccatggccgtcggaaagaacaagcgcatctccaaggggaagaagggtggcaagaagaaggcagctgatccctttgccaagaaggattggtatgacattaaggctccttctgtttttcaagtgaaaaatgttggcaaaaccctcgtctctcgtactcagggtaccaagattgcttctgaaggactcaagcatatactgtttgaggtcttcttggctgatcttcaaggggatgaggatcatgcattcaagaagattaagttgagagctgaaaaagtgcaagggaagaatgttctgacatatttttggggaatggga

SEQ ID NO: 270293 - DNA, 391 bp, Glycine max
catgaccaagaacaatgcccattctaatggatgccgggacaagtttacaactttggagaagccagccatgtttgctttctgtttgaaacctaggggtctggaatcactgaacaagggattgaaacatcgatcccaaaagaagatttcagtctctgggcatgcaaacagtaatctagatcaggatggcttccacactttcagaagaagacagaatgctttaccttttggtgatgaaaagttcctataccaaggccacaattacgattcttttgatgattcatcattggctctgacctcaccaagggtattcttacctcgtgatgctggcagcttgaaatactatcctactagtaatggagcgggatatagaaatcatatcccaaaatttcac

SEQ ID NO: 270294 - DNA, 270 bp, Glycine max
gatcactcacaaaaaccacttacaaagtagtactgacttggtttcaatcaaaacaaaaactcacactttggtggccacagcaacaataacaatggcagcctcactacaagctgcagctaccttcatgcaacccaccaaggtgggcatggccactcgcaacctcaaatctacacaatgcatttctaaggcttttggcttggaacccgctgcagctaaactcatttgctcccttaagcccgatctcaaagattttgctcaaaaatgtgtcga

SEQ ID NO: 270295 - DNA, 379 bp, Glycine max
agacatggggggtcctatgggaaaatattaaatataaggatcagaaggaattttgcttttattcagtttgaatcccaagaggacgctactagagctttggaggccaccaacctgagcaagtttatggaccgtgttatcactgtggagtatgccattagagatgatgatgacagagacagaaggaatggatacagtcctgatagaagaggccatgactctcctgatgggagatatggtcgtggtagatcccctagtccttatcgtagaagtcggggtagcccagattatggtcatggatcaaatccatcttccagaccagatccaagaggaagccccaagtatgaacgagctgaaagcccaataaataatgggagatata

SEQ ID NO: 270296 - DNA, 384 bp, Glycine max
ggcagcgcttgatttgaggccaggcgagccccactcaaccaccacacctctcctcgttcacgctacccctttctgctcttcttctacctttcaagttttaaaagtataaagatggcagagacattcctatttacctcagagtcggtgaacgagggacaccctgacaagctctgcgaccaaatctccgatgctgtcctcgacgcttgcctcgagcaggacccagacagcaaagttgcctgcgaaacatgcaccaaaaccaacttggtcatggtcttcggagaaatcacgaccaaggccaacgttgactacgagaagatagtgcgtgacacctgcaggaacatcggcttcgtctcaaatgatgtgggactggatgccgacaactgc

SEQ ID NO: 270297 - DNA, 393 bp, Glycine max
gccgaccaaccattttacatttacagtaacagtggtggaatttcggaaaaaatggcgatggctttcaagatggcgacgactggaatgtgggttacagatgagtgcaagaactcgttcatggatatgaaatggaagaaggagcacagatacattgttttcaagatcgacgaaggatcaaggctcgtcaccgttgataaactcggtggccccaccgagggctatgatgatctcaccgcctccttgcccaccgatgattgccgatacgcggtttttgacttcgacttcgtcaccgttgataactgccgcaagagcaagatcttcttcattgcatggtctccaacagcatcaaggattagagctaagattctatacgcaacttcgaaggatgggctg

SEQ ID NO: 270298 - DNA, 399 bp, Glycine max
ggttctagtgtatgtgattgttgtgactcgttcttcttcggcggtatcttcttcttttgttgtttgtgtgtttgttttttctctcacctgaaaatgtcttgctgcggtggtaactgtggttgcggaagcgcctgcaagtgcggcaacggctgcggaggctgcaagatgtacccagacttgagctacaccgagtcaaccaccaccgagaccttggtcatgggagtggcaccagttaaggctcaattcgagagtgctgaaatgggtgttcccgctgagaacgatggctgcaaatgtggagctaactgcacctgcaacccctgcacttgcaagtgaggtgttggagagctaaagcttcaagcagaaatggcccttagaaataatgataaaaactatatgtag

SEQ ID NO: 270299 - DNA, 325 bp, Glycine max
  unsure (1)..(325): unsure at all n locations
gaattaatgaccctgtcattgtttcaacaggacagggtcgtgagcgtacttgtattgagaagtgnttgcaagcagggcacgggacctgccccaaaacacagcagactctcactagtactgttctcacacctaactatgtattacggagccttatatcacaatggtgtgaagccaatggcatagagccaccaaaacgacctagcgattcacaacctagtaaatcagcatcagcctactctcctgctgagcaaagtaagattgaaagtcttctccaaaagctcacatctgtgagtcctgaagaccagagatcagctgctggcgagat

SEQ ID NO: 270300 - DNA, 427 bp, Glycine max
  unsure (1)..(427): unsure at all n locations
agaacctacagaagggatcatatctaataattttcacatttatgtctaattgtcattttagtttattgtagtaaatttctaaggcatccattgcctaagaaatctcgggcagtaagtagacataaccgtaacgtgaataatcatcaataatggtgataaagtatctttcctttccgaaagaactaacatcagaatgtccacaaatatcagtatgcacaatttcaagaagctgagtgcttcttgtagctcatttctttgtgtgttttatttgttttcccttgatacaatccacacaaatatttagatccgtaaaatctagatcaggaagagtttcattctttattaatctttctatcttttctctaaaaatgtgacctanacgtttatgccacaagaaagcagatcgttcattcactaaactacgtta

SEQ ID NO: 270301 - DNA, 339 bp, Glycine max
ggttctagtgtgtgattgtttgttgttgtggctggttcttcttcttttgttgttctgtgtttgtgtttgttttttctctcacctgaaaatgtcttgctgcggtggtaactgtggttgcggaagctcctgcaagtgcggcaacggctgcggaggctgcaagatgtacccagacttgagctacactgagtcaaccaccaccgagaccttggtcatgggagtggcacctgttaaggctcaatttgagggtgctgaaatgggtgtgcccgctgagaacgatggctgcaaatgtggaccaaactgctcctgcaacccctgcacttgcaagtgaggtgttgggag

SEQ ID NO: 270302 - DNA, 357 bp, Glycine max
gaccatagaagaagcacaaagagaagcaggggcgctaggagcagcaacaactagtctcagctgaaatggcctcttcagtgatggcatctgtggccctcaaacctgcccctttcactgttgagaaggcctcagtgagaggccttccctctctctcaaggaactcttcttcattcaaagttgtcgccagtggcaagaagatcaagactgacaaaccttatggaattaatggcggcatggctttgagggatggaactgatgcatctggcatgaaaggaaagggaaagggagtttaccagtttgcagacaaataccgtgctaatgtcgatggttacagacctatctacgacaccaacgact

SEQ ID NO: 270303 - DNA, 425 bp, Glycine max
agaagactacataagggggttctagtgtatgtgattgttgtgactcgttcttcttcggccgcatcttcttcttttgttgtttgtgtgtttgttttttctctcacctgaaaatgtcttgctgcggtggtaactgtggttgcggaagcgcctgcaagtgcggcaacggctgcggaggctgcaagatgtacccagacttgagctacaccgagtcaaccaccaccgagaccttggtcatgggagtggcaccagttaaggctcaattcgagagtgctgaaatgggtgttcccgctgagaacgatggctgcaaatgtggagctaactgcaccttgcacccctgcacttgcaagtgaggtgttggagagcttaagctttaagcagaaatggcccttagaaataatggataaaactatatgtagtttcaaaac

SEQ ID NO: 270304 - DNA, 400 bp, Glycine max
aaccggacaacgctcatgataaaaaatattcccgatgggtatacttcaaagatgcttcttgttgccatagatgagcaatgtcgaggaacttatgattttctgtatttgccaattgatttcaagaacaaatgtaatgttggctatgcattcatcaatatgattgatcctggacaaattattccattccaccaggcttttcatgggaaaaaatgggagaaattcaacagtgaaaaggtagcggtactcgcctatgcccgaattcaaggaaaatctgctcttattgctcattttcagaattcaagcctaatgaatgaagataaacgttgccgccccattctcttccatacagatggcccaaatgctggtgatccggagcctttccccttgggtaacaatatta

SEQ ID NO: 270305 - DNA, 348 bp, Glycine max
gttagacacagtcactccagtagagagtagcatggtggggactacaacgacacccctttcccacacggttcgcgtgtccaacatcccccaatccgcgaccgcgaacgacctcctcgacttcctcgaatcgacgttgggttcctccacggtgttcgccctcaaaatcttctccgacaacctcaactggaagtcccgcggcttcaggcgcgtccagttcgagactctcgacgccaggtcccgagccctctcgctctcccaactcaaccagctccttttcaaccgccactttctccgcctatccaaaaccgactccgacatcattttccgcccccaacaccgacttcaaaa

SEQ ID NO: 270306 - DNA, 386 bp, Glycine max
  unsure (1)..(386): unsure at all n locations
tagatcagaaaatgatggtattctgtgtcccatgccgcagtaccctctgtactcagcctcaattgccctccatggtggctgcctggtaccttattatctagatgaagcaactggctgggggttggaaatacctgaactcaagaagcaattggaggctgccaagtctaagggcatcaatgttagggctttagttgttataaatcctggcaatccaacggngcaggttcttggtgaggcaaatcagcgagatatagtagagttttgcaagcaagaaggtttggttcttttagctgatgaggtatatcaagaaaatgtttatgttcctgagaagaaatttcactctttcaagaaggtgtctcggtccatgggatatggtgagaatgata

SEQ ID NO: 270307 - DNA, 329 bp, Glycine max
gctgggagaaaacaaccgacaggacatattctcatagtataccatttaattaccttatatgcttgatggggaaataagataattaacgaaccccctactattggcataattacaactgttgttaaccaaggaaaataattcgtgataaaaataagatatacttagactagaaaaacccgcgctcaaaataaaaaaagatcatcttttttatttcgagcgcgggtatttaccattaaaaaaacacacttgtgtgtcgttctttttgaaacgtatcaattatctagacccatgcttcgagttgattcatgccatatataaactctaacact

SEQ ID NO: 270308 - DNA, 310 bp, Glycine max
tacggtttttataatactacagattggggtctccattcgggactgtaactatcccgagcgcgaggagcaaccttatgaagaaaaaaatttctcacaagaagttcgagcacccaacgcacggttcactgggatttctttccaagaaacgtgctgctcttcacaagggaaaaaagaaagcattccccaaagatgacccattcaaggcacccaaactcactgcattttttggttacaaagccgggatgactcacattgttagagaagttgagaaaccacgatcaaaactttacaaaaaagaaacttgtgagcc

SEQ ID NO: 270309 - DNA, 323 bp, Glycine max
ggtggcagaaagcgaacccaaaactagagctaccttcccttcaaaccttccactcttctctccttttccaatcaagggaataatattccttagagatattcccaaaccatggctcacgccaatcctatgatttttgttgttggaattctaggtaaccttgtctccttctgttgctttctagcaccagtaccaacattctatcgagtttgtaagaagaaaaccacggaaggtttccaatcacttccttacgtggctgcactcttcacttcaatgctctggatattttatgcttacataaagaccggcgaaatacttctcatcac

SEQ ID NO: 270310 - DNA, 459 bp, Glycine max
  unsure (1)..(459): unsure at all n locations
gaagaaagaccgacccacgccacccgtccgttcctataatactacatacagattttctaacacctgngctactatctcccacgcccggttctttttttactcatcctcaattgcccttcattgtggctgctctctaccttattatctatatgaagcaactggctggggtttggaaatacctgtactcaataaacaattggaggctcccaaatctaatggcatcaattttattgcttaatgtgttatatatcctttctatccaacatgtcatccttttagtgattcatattttttatatatattataattttccatctaaaaaagttttgctcttttaacttcttacttattttataaataaagcttattttcctttacattaaattttaattcttttaaaaaaattttttccttcccttcttattattttaataaattattttcatctttttatttttt

SEQ ID NO: 270311 - DNA, 383 bp, Glycine max
gaaggtgcaagagtttgttgtgagctataagctagtttatcgtgaggagaatatgaagttgtttgttttctttgttgctgcagtagttttggtagcatggtcatgccatggcgcaggctaccaaaggttccctctccgaatgaaaactggctatggtgagcgttcttcggaggtaaaatgcgcaagttttaggcttgctgtggaagcacacaacatccgagcctttaaaaccattcctgaagagtgcgttgaaccaacaaaggactacattaatggcgaacaatttagatcagactctaaaacagttaaccaacaagctttcttttatgctagtgaacgcgaagtccatcacaacgacatatttatattcggcatagataaca

SEQ ID NO: 270312 - DNA, 395 bp, Glycine max
tttgactcacacgtaacttcatctgggttgcagggacgaagaataataaaatgggttccgataataccaacttggagttcttgaaggagatcggtttgggctcctccaacattggttcttacattaatggccaatggaaagccactggttcttctgtcacttctgttaatccttctaacaatcagagcatagctcaagtgactgaagcgactttgcaagattatgaggagggattgcaagcttgcagtgaagcagccaagacatggatgactattccggcaccgaagagaagtgagattgtgagacaaattggtgaagcattgagggccaagttggatccttttggtaaactggtgtcttttgaaatgggaaaaattttcccaaaagaattggga

SEQ ID NO: 270313 - DNA, 352 bp, Glycine max
gactactggttattccacattcgaagaaataaactcacccactaagcactacacaaatcacacagagttgcaagagaaagataaaagaagatggcgactcttgattccgacgtgcctatggttcccgccggcgagccctcgagcagcgccggtccttcttccaagaagcccaagcgcttcgagatcaagaagtggaacgccgtcgctctctgggcttgggacatcgttgtcgataactgtgctatctgccggaaccacatcatggatctctgcatcgagtgccaagccaaccaggctagcgccactagcgaggaatgcactgtggcttggggagtttgtaaccatgcttttc

SEQ ID NO: 270314 - DNA, 153 bp, Glycine max
agcgtttaatgaagaaacaaccacttctgactattggtcgctcactgtgaccggcttgatgcagcaaatatatgcaaccagagatctatccgattacttgtgggactccacagatgttgcgaacaatatcaatgacagattatagacgaatgc

SEQ ID NO: 270315 - DNA, 315 bp, Glycine max
ataagacaacaacagaaagcacgtctaacagccggaaactctgtcttttctgttcggtctttctccgatcgcatcactcccaacccccatcacgccttcccgaagaagaactcttttgaaggtcatcattctcggtgacaacattgtggagaagacagattcgatgaaccaggctgtcaataaacattttagttattaatgcagagcaaccattggagcggattgttctaccccagaagtgcaatttggaaataagcttttcaccttacacatttgggatacagcttgccaacaaagatttcaataccttggagt

SEQ ID NO: 270316 - DNA, 351 bp, Glycine max
ggtgtgagttcattaacatatgcaaattctctgtgttgtgttgtgtacttgtgttaattgtgttgttgttgtaggaaatttaagtgaagagagaatgatgatgaagtctgctatgtgtgcattggtgcttgtggcactggttgtggttgaagtggggcccatggctgaggctgcggtggcttgcaacccaacacagttgactccttgtcttccggcaattaattcaggttctgcaccttcgagtgcttgttgccagaagctgaaggagcaaaagccatgcttctgtggctacctcaaaaaccctagcttgaagcagtatgttaactcttctaatgccaaaaaaaaccgtag

SEQ ID NO: 270317 - DNA, 446 bp, Glycine max
  unsure (1)..(446): unsure at all n locations
cacacactctcttcaatttctagggttttgctattgctttgcctccgttccccctttctcgcaaaaacaacgccttttctcttctccttcgtatctattctttgcgtttggtttttggttgattgaaggcattcacagcgtaattcgttgctgcattttaatcgatttatctaaccaggactgaatgacctaatggagtctaaaggtgggaaaaagaagtctagtagtagtagtagtaaatcaattttttacgaagctcccctcggatacagcattgaagacgttagaccaaacggtggaatcaagaaattcagatctgctgcttactctaactgttctcgcaaaccatcctgatacacatccggattgatagttcgttgcatgcaaccatagttttattaggattttntcttctttgttttcaattangtttttttggtgctctc

SEQ ID NO: 270318 - DNA, 449 bp, Glycine max
gttctacacaaggccaaataggagtgacatccacctctcagcagaggaagaagccaccatggaggcaaagaccagagactactttgatggggttgcaccacaacgccacacaaagcctcaacgaagtgagtattcagctcaatatgtggatgctttctccaatgcccatcactcttcttcttcttcttctataccagaattcatgcaattccaacgcctcgagaatgatccccaagagaagaaattggagtacaatggaagtcaagtaccggaagaatttgtggaaacagagtattaccaagatctcaacagcgtggacaaacaccaccatacgacgggaacaggatttatcaaagtagagaaaaatggaaatgactttcacatagaaccagataatgacactggttgccatcactcttgcaagtgcaatccagcaaccaatgattggg

SEQ ID NO: 270319 - DNA, 442 bp, Glycine max
  unsure (1)..(442): unsure at all n locations
ctcgtgaggctgctatggcagttcaaggaaagatggtagattctcagcgtaagaagagcagggcaagtttgcggaagcttgagaaacaacctgaatggttgaagggtggagagctccgtgattatcaacttgagggtctgaattttcttgttaacagttggagaaatgatacaaatgtcattttagctgatgaaatgggccttggaaaaactgttcagtcagtatcgatgcttggttttctacagaatgcccagcaaatccatggtccttttcttgtagttgttccattgtccactttatcaaattgggccaaagaattcaggaagtggcttcctgatatgaatattatcatatatgtaggtactcgtgcaagtcgagaggtttgtcaacaatatgaattttataatgagaaaaaacctgngaagccaataaaaatcaatgc

SEQ ID NO: 270320 - DNA, 446 bp, Glycine max
ggaagactccagtccaagtgtaccagagtttctgtgagagcttcaagtcttcattctctccgttcatgggctctacgatcatgagcatttccatgggtttaggaccggatggtgagctacgttatccatctcacccccagctgccgagtaatggaaaaactcaaggtgctggggaattccagtgttatgaccaaaacatgctcagctttctcaagcaacatgctgaagcatctggaaatcctctgtgggggcttggtggtcctcatgatgcacctacctatgaccagcccccatacaatggcttcttcaatgatggggcttcttgggagtccacatatggggacttcttcctctcttggtattccaatcagctcatagctcatggagattgcctcctttcattggcatcttcaacttttggtgactctggggtgacaatctatgga

SEQ ID NO: 270321 - DNA, 412 bp, Glycine max
  unsure (1)..(412): unsure at all n locations
cggacgcgtgggtgagaggccaagcccaagtcctccagaggccgcctcctcgcggtgtccggacagtgtacccacttgcccttgttctctcacctactagggagctatccatgcagatacatgaagaggctaggaaattttcttaccagactggggttagggtcgttgttgcttatggtggagctccgataaaccaacagcttcgggaacttgagagaggggtggatatccttgttgcaactccgggaagactggtagatttactggagagagctagagtttcattgcaaatgattaggtatttggccttagacgaggcagatagaatgctggatatgggttttgagccacaaataaggaagattgtagaacaaatggacatgcctncaacagctgccagacagactatgct

SEQ ID NO: 270322 - DNA, 328 bp, Glycine max
  unsure (1)..(328): unsure at all n locations
ggcagataactcaattagcttattttctccatacaacaagatgggcaaattcaacctctctgatanggtggtattggctcccatgaccagatgcagagcgctcaatgggactccactggcagcacatgctgaatactacgctcagagatcaacaccgggtggatttctcatcactgaaggcaccttgatctctccaacttcttctgggtttcctcatgttcctggaatatactcagatgaacaggtagaggcatggagaaatgtagtggacgccgtgcatgccaacggcagctttatcttctgtcaactcttgcatgtttgccgtgca

SEQ ID NO: 270323 - DNA, 435 bp, Glycine max
cccacgcgtccgccgagcttgcagcagcgatttctcatttcatttttcacacttcaacaatggcgaaaaccttcaaatacatcatcctcggtggaggagtttccgctggttatgcggcgagggagtttgccaaacagggcgttaagccaggggagttggctatcatttcgaaagaagcggtagcaccttatgaacgtcctgctctgagcaaggcttacctttttccagagtcccctgctagacttcctgggttccatgtctgtgttggaagtggaggagaaaggttgcttcctgagtggtacacagagaaagggatagagttaattcttagcacagaaatagtaaaggtagaccttgctgcaaaatctctgatcagtgctggaggagaaacattcagttatcagattttgattgttgcaacttgctcaacagtta

SEQ ID NO: 270324 - DNA, 451 bp, Glycine max
acgctttccaccaccccttttcttcccttcactgcaaaaaatgcttctactagaatccctcctcccacatgattctcttacagcaagcaacgtagtaacagggatcccaggaaggttgtctgcgcctgcatcgctcctcctcaaaacttcaagagccaggactcttccgccattcatttcaatggttcgtccaaatcagagcaattgagcactgcgcgggatcatgaggatgattctgatgttcttattgagtgtagagacgtgtacaagtcttttggggaaaagaaaatcttaaatggtgtcagcttcaagatcaagcatggtgaagctgttggaataattggtccctctgggactggcaaatctacagttttgaagattattgcatgacttcttgctccggacaaaggggaagtttatattcgaggtaaaaagaagagttggtttaata

SEQ ID NO: 270325 - DNA, 455 bp, Glycine max
cccacgcgtccgctccaactcctcctcctactttgcagactgctgatacttcaaaagtacgggggcatcaaatgcctattgtcacaactttgacaaggcttttcaatgagacatcagacgcccttggaggttcacgtgcaaatccagctaggaagcgggagatagaagacaactcgaagagacttggtggattgtttgccaagttaaatagtggagacatatcaaaaaatgcttctgataagctccttcagctttgtcaggcattagacaatggtgattttggtactgccctacaaattcaggttcttcttactactaccgagtgggacgaatgccagtcctggttaggttcactcaagcggatgatcaagacaagacagagcgtgagactaagttaaaaaagttacagatatctttttgctgattttggaaatttttcatgtgattagcatctt

SEQ ID NO: 270326 - DNA, 447 bp, Glycine max
attggataccaggaattaaggaaattcggttgaaggatcttcccagcttcattagaaccagcggatccagatgagttcatgcttgatttcatacagtgggagtgtgggaggactcgaagagcttctgcaataattttgaacacctttgatgccttagagcacgacgttttggaagcgttctcgtccattttgcctccggtttattccattggtcctttgaatttactcgtgaaacatgttgatgacaaagacttaaacgcaattgggtccaatctttggaaggaggagtctgagtgcgtggagtggcttgacacaaaagagcccaacagtgtcgtttacgtgaattttggtagcatcgcggttatgacaagtgagcaattgattgagtttgcatggggtcttgctaatagcaacaaaacctttttatgggtcataagaccagatctt

SEQ ID NO: 270327 - DNA, 444 bp, Glycine max
cccacgcgtccgcaaaattttaagattgtttatgcatcatcacattataagactatatgaggttgtagaaaccccaacagacatatatgttgttatggagtatgtgaaatctggagagctctttgattacatagtagagaagggtcggctgcaagaggatgaagcccgtcatttttttcagcagataatttctggtgtggagtactgtcacaggaatatggtggttcatagagacctgaagcctgagaatttactcttggactcaaaatttaacatcaagattgctgattttgggttgagcaacatcatgcgtgatggtcactttcttaagacaagttgtggaagccctaattatgcggctccagaggttatctctggaaaattgtatgctggaccagaagtagatgtctggagctgtggtgtaattttatatgctcttctctg

SEQ ID NO: 270328 - DNA, 444 bp, Glycine max
acgtttttctcctcttctgccctccacacaacttctctctcctctctctctctctacaaatccggctttctgctattcgctggtcactgtagcgtatccatggctttcagagttggaggagcgggaggaggaaatgcctcttctggcatgggtgttgctgagcatagcgtaagcacgttcctggaattgcagaggaagaaagttcatcgctatgtgatttttaaaattgacgagaaaaagaaagaggttgttgttgaaaaaactggaggccctgctgagagctatgatgatttcactgcatccttgcctgaaaatgattgccgatatgctatctttgactttgattttgtgacatctgaaaactgccaaaagagcaaaatcttttttattgcatggtctccttcggtagccctcattcgccctaagatgctatatgcaacattc

SEQ ID NO: 270329 - DNA, 334 bp, Glycine max
aattctcggatcggccgactcgtacgcccagaatcccccttttcacctcttttaatgtctgatcctaaaaatgaacgctcccattcgcaaacttttaacagacctgggggtcattctgatgatctttcacttaaaatgagtgaaacaaatgatgctaggcatctaaaacaaccctcagttcggatgctatcatatcttaattttacaaagtggctttatgctttgttatgaagcatatgtgctgctatctttggttctttcaatcccctatttgcttatgttattggcctctttgtgacatattactatagaattagataatctcatcacttac

SEQ ID NO: 270330 - DNA, 420 bp, Glycine max
ggtgtgtatactaaagaatataagatagaagattggggttagggtttgatcggacgcaatggctggcaccggcatccacccataccaccagcaatgggctccggcggctgccgctcctcctcctcctccggcagccgcgggcggtcctcctcctcaccctggggaggaggttcgaacgatattcataactggtcttccggaagacgtgaaagagagagagctgcagaatctgctgagatggctgcccggtttcgaagcatctcaactgaatttcaaagctgagaagccaatgggttttgctctcttctccgcaccacaccaagcactcgccgccaaagacattcttcaggacatgctcttcgatccagacaccaagtccgtccttcacactgagatggcaaagaaaaatctattcgcaaa

SEQ ID NO: 270331 - DNA, 444 bp, Glycine max
gcggaggatcggcagggaacaagttccgcatgtcactgggtctgccggtggcggcgacggggaactgcgccgacaacaccggcgcgaagaatctctacatcatatcagtgaaggggatcaagggaaggctgaaccggttgccgtcagcttgcgtgggtgacatggttatggccaccgtcaagaagggaaagcctgatctccgtaaaaaggtgctccccgccgtcatcgtccgtcagcgcaagccgtggcgccgaaaggacggtgtttacatgtacttcgaagataatgctggggtcatagtgaatcccaagggtgaaatgaaaggttctgctatcactggtcctattgggaaggagtgtgctgatctgtggcccaagattgcaagtgctgcaaatgctattgtttaagctgggtttttagtttatgtaatggttctgcttcttg

SEQ ID NO: 270332 - DNA, 336 bp, Glycine max
gagtctagggtctgagtgaggtgcttgttgcgtgggtgtggagacctctattcatttcgtaatcgcagaacattcgaaccagataagagaacgattactatatggaactacgtcgtcacagctcacaaactcaccaacgtcacccactcctgcgtcggcaatttcaccagtccttgagacctctatctcatcatcgcgaaatgcacgctcatctagattcacctgctttctccccaaggcttgcaggttattttgcataccttctgagcatttattgtatcattgtttggattatgataactacaattgcatatggcatttttctgtgctagttat

SEQ ID NO: 270333 - DNA, 378 bp, Glycine max
tatctaatcagtttcttggaacaaatatagaaccagaatggatggttttatgtcttttaccagttctttctccctaattgagaccgattattcaaatcgatgggtgtaaactaatgagctctgatattaatgaactatatataagagatatttatctgaattatacttctatcgaattattaacaacaagtatatctacttccatgttaattagtaatgtgtcatgataaattggtttcatagtatccttgtatacacttctttgtttatggaatcctctgacaacctattatgtactgacattttaattgtttacaaatcattttttgatataaatttaatcaaaaaatgtaatatttctcgatactttactttttt

SEQ ID NO: 270334 - DNA, 321 bp, Glycine max
acgtacaggtgctagaagactacaaaattttagtttcagagatcgtgaaaactttcaaagggtccgcattcctattaatcgtggctattccttgccttatatttttgaacactgcactttatactgcttatactgtccacaagctaacgagccttactctcctgacaccatttattacataaaatctctggatgctgcataatatataaagctcttcaagtttcatggatggtaccttcctcctaaatgtgcccatatccttcatatatcaaccatgcttcttctgaaaagttcatatataggactcactcctttcacctt

SEQ ID NO: 270335 - DNA, 387 bp, Glycine max
tgtgcggcgacaacatgaagttggggaaatattgagaacaaaaataagttgtctcatgatgtatgtaagatgcacaaatgcatccttcaacgttggccttatttttcactactcatttagaatcacccatgaatctacaaattttaatcaaaaccaagtcatcattgattagcattaaacaaatgaattttatagtgaaccatccaccaattgagcatcttccttatctgcatgctccatcatagaaagataaggaaagacaatacaagcgtgttatagatatttttaaacaactgcagattaacattcctttttctgaagcattagagcaaatgccaacatatgctaaattcatgaaggattttcttatgaagatgaaaaaaatta

SEQ ID NO: 270336 - DNA, 389 bp, Glycine max
ccgcccaggcgttctcccacgcgtccttactgctttaagactacagaaggggtattagttatctgtaattgtaaacaactgatcccttcaaaattccctctatgcaaatccattggatagtgatattttttatgtacttgacggtagaacttatcttaatcgttaaaagatctattagtatattatactcctttctccgtatttattaatttatacatttttttgttgtatttatgaaaaacaatgttacttctacgtttaattttttatttctagaagtaaactgtttttttttatatatttactttacactttttcttcaacctaataaataaagttttttttatattttttactatcactcgctttcatatttttcaaacttacca

SEQ ID NO: 270337 - DNA, 420 bp, Glycine max
ggcacttctagatcagacttaacaacagcacaaagcgtgttagtgtctgttcaagctaccatctctctctctctttcttagtgcctccttgccagaagttaaaatggcccaagaaactttcctattcacatctgaatcagtgaacgaggggcaccctgacaagctctgtgaccagatctccgatgctgtgctcgatgcatgcttggagcatgaccctgacagctaggttgcctgtgaaaccttcaccaagaccaacatggtgattggtttcggagagatcacaacctatgccaacgtttactatgataagattgttccttacacatgcatgaacatttttttttgcctctgatgatgtatggtcttgatgctgacaacttcaaggtccttgccaacattttatcaacatattcctgatat

SEQ ID NO: 270338 - DNA, 318 bp, Glycine max
cggacgcgtgtgcggactcgtgggaagacttctagaatgtggtggtcttctacgagctgataggttacaagtcaacaacataccaaggatgccaaagctcgtgatcgatggtccttatggagctccagcacaagactacaaaaactactaagtaatccttctcgtgggactaggaattggtgccacccctttgattagtattctcaaagatgttgctaaacaacatgaaacaacagaatgacatataagaagggatggtagaaagtgtagtcaagaacaagaggaaaccttttgccaccaaccgcgcctatttctact

SEQ ID NO: 270339 - DNA, 184 bp, Glycine max
actatggattctaacaatctatcaaatgtattaaataaataccgatgctttacttaccaaacattataaaatacttattatactacacatgaccattataacattattttcataattaacataattaatgaataaatatatactaacatttaacctattattagaaatgaaataattactataa

SEQ ID NO: 270340 - DNA, 215 bp, Glycine max
ggttctagtgtatgtgattgttgtgactcgttcgtcttcttgtttatcttcttcttttgttgtttgtgtttttgttttttctctcacctgaaaatgtcttgcttctgtggtaactgttgttgcttaagctcctgctagtgcttcaactgcttctgaggctgcaagatgtaccctgacttgatctacacctagtcaaccaccatctagaccttttt

SEQ ID NO: 270341 - DNA, 328 bp, Glycine max
aatttcgatttccagagatcgtgaaaacggtcaaagtatcggtattccaattgatcatggctattcctagcctgatatttttgaatactgctctttctactgcttatactgtccacatgctaaagagccttactctcctgacaccattgattacataaaatctcttgatgcttcagaagatataaagctcttgaagtttcatggatggtaccttccttctaaatgtgcccatatccttcgtatatcaaccatgctttttctgaaaggtacatatagaggactcactcctttcatcttatgaagcatcatgtgtatagaaacactgaat

SEQ ID NO: 270342 - DNA, 324 bp, Glycine max
aaatttggttttcagagatcgtcaaaactgtcaagcgatcgggattcctattgagcatggctattccttgccttatattttctaacactgctctatttactgcttatacttgccacaagctaaagatccttactctcctgacaccatttattacataaaatctctgtattctgcataagatataaagcttttcatatttcatggatgttaccttcctcctaaatgtgcccatatccttcatatatcaaccatgcttcttctgaaaggtacatatataggactcactcctttactcttatgaagcattatcttgtatagaaacac

SEQ ID NO: 270343 - DNA, 329 bp, Glycine max
gcacttgatccaaacttcaataagctctcaatggatcacatattttcagcttacaagcttacggcaactatagcaatccttcttgactatgatggtacactaatgcctcaatcatccaccattgataatattccaagcattaaatccattgaaattcttaatagtttgtgtatagataagaacatcatagttttccttgttagtgctataaacccaaagattcttttccaatggtttttcttccttgttaaaatcttgttaatttcatcttatcatttttactttcttaataattaaactaaaattaatatattttaaacacatttttt

SEQ ID NO: 270344 - DNA, 254 bp, Glycine max
tattcattctctattgtcactttgctaccggttctttcaagattcatatcttcttcaagaccctcaccgtaaagaccattacccttgacgtggaaagctctgacaccatctacaacctcaattccaatatccatcacaattaatgaattcccctctatcatcaacctctcatctttttctaaaatcatctctattactttcgtaccctctcctactacaacatccataatgattcaacccttcaccttttcctt

SEQ ID NO: 270345 - DNA, 348 bp, Glycine max
ttcaactctgtcacttataaaggatcttttgctactgtttatcggcataaaacccttctctctgttattaatataatttcttcatatcttaaacttcacacttttgaagaagtggcaaatcacaaccataccaatgattgctgtctcatcatttctttcaatgtgtattatgtcacccctttcatgtatgatcatcccttatgtgatgaagttttgttatctgcaacatttaaatattcatccaattacttttaatattttattcacatttattctgctataaatattatttaaaaatactacattttttaatatttattccataaccctttccactaaaacgtacct

SEQ ID NO: 270346 - DNA, 317 bp, Glycine max
tgctctttaaatgttccgtaaatatgctgcacactaggtcttttagtgcatggtcgtatttctcttcctccattcaaccatcctgctcctattccaatcaagcgcgagggaggatatgaaagactaagggttggttatattagtagtgactttggtaatcatcccttgtcacatctcatgggatctgtttttggtatgcacaacaggaagaatgtttatgtgttctgctatgccttgagtgttaatgattgtactgaatggatgcaacgtattcagtcttaaacatatcactttgtatatgtatctgccatgttatt

SEQ ID NO: 270347 - DNA, 191 bp, Glycine max
atgtgtttctgatttcatgtaaatgtttgatgttggtgtaccagctatggtgagaaaggtgtttcatgaagcaaggcattgttcacctagtatagtatttattgatgagattgatgcaatttgtctagcaaggctgtttagtttttctggttcaaatgattaacgtgtatgtactttaattcaattgtttt

SEQ ID NO: 270348 - DNA, 246 bp, Glycine max
actttctctttctaccaaattgtacttgataaagtttgttattcatacccacacttcacctttcattcaaataacatgtgatcaatcatcattttaattattaatctacttttaattgataccctatttataatagtcttcttataatctaaagttttctctaaaattttccacttattttcatatctaatatttttcttttcttttttactcttgtaatcatttttttaaactttattattattt

SEQ ID NO: 270349 - DNA, 321 bp, Glycine max
ttataaggcttgcggtaaccatgacagttggtgccttcttgatcagggcctacagggttctcaactcctccaactttctgcttctctgcactctcagtggtggtggtgtagtggcatactcagaatcacaatcaggacctgaacgtcctattattgaagctaatgagcctgccaaaaagaaagtggcggttcttgtaacaggatgggctgctcccagtttccttaaggatctggatgcttcattatatgatgttcaagttgcttcaccttgtaactactttgcatttactcccttattacccattgtcacttgtggtacaa

SEQ ID NO: 270350 - DNA, 363 bp, Glycine max
  unsure (1)..(363): unsure at all n locations
ggntccggctagacgacagcaagntagaaggagttgatctctatctttaatcaatgagaagagacactaactgacaaacccttttatggggatgacacgtttggctttgttgatctttgtttgatcactttctctagttggttttatacttatgagacatatgggaacttcaaaatggaagaagagtgtcctaaactcatggcttgggtcaagagatgcatggagagagagactgtgtccaatactcttcctgatgctaagaaggtgtatggtcttattgtggaactgcagaagacacttgaatcgaaatagaagatttcaataaatcaacccattaaataatattttcatgttaaatatgtt

SEQ ID NO: 270351 - DNA, 345 bp, Glycine max
cacccgcccaccttaaattcactcttacattttttatatctaattaaaaataacttaacatacatataaacatttttatcgttatttctactcaaccaaatcttactcttattcccactatcaaagacctaattgaaaacactctctcttctcaccataacaaactcatttctctcctctccacgtatttatctcaacacaaaacatttttcaaccccataatttcattaatcaacttgacaacatccttttcgatgatcaatcaatatttgatcttaaaaatattctcttttcttaaatctttaatttcttaaactaaaccatacttttacctcctttttttac

SEQ ID NO: 270352 - DNA, 347 bp, Glycine max
ggtggcagagagcgaacccaaaactagagctgccttcccttcaaaccttccactcttctctccttttccaatcaagggaataatatttcttagagatattccgaaaccatggctcacgccaatcctatgatttttgttgttggaattctaagtaaccttgtctccttctgttgctttctagcaccagtaccaacattctatcgagtttgtaagaagaaaaccacggaaggtttccaatcacttccttacgtggctgcactcttcacttcaatgctttggatattttatgcttacataaagacgggcgaaatacttctcatcaccattaacgcattcggttgtttcat

SEQ ID NO: 270353 - DNA, 439 bp, Glycine max
acggattcggaattccgagccacgacccacgcgtacgcgcgggtgcttgcaaaaaagacgacagaagggaaccatgaagagatatttgaagttctggcagcagtggctgcatctttgggggatgtaatagatgatgtgaacactttgcaggtaacacctttaaagggggcaatgaccaatgaggtttttgaggtaaattggccaaccaaaagtgatggtcatcaaagaagggttcttgttcgattatatggtgaaggtgttgaggttttcttcaacagggtggatgaaatccaaacctttgagtgcatgtcaaagcatggacagggtccacgccttcttgggaggttcaccactggcagagttgaggagttcattcatgccaaaacactctcagctgcggaccttcgtgaccctgaaatatctgctttgatagcatcta

SEQ ID NO: 270354 - DNA, 386 bp, Glycine max
  unsure (1)..(386): unsure at all n locations
gaaataccactacttttaacgttattttactgattccgtgaatcggaagcggggcactgcccctctttttggacccaaggtcggcttcggccggtcgatccgggcggaagacattgtcaggaggggcttttcaggtcaaagaagtgcaacagagtgagatctgactcataatttggcgacactcttgaaaaaagaggttacttggattttgtgaggttgtcttgtagttggagtcatggcgggtgaggttgtgggatttgagatggttcaaggaccagtggagaatggtactgagggaggaaaacctgttttgaatgagaaggagaatggcaagcttgaaaaagatgtgngagctgctgcggatgccatcaatttggacacatgga

SEQ ID NO: 270355 - DNA, 293 bp, Glycine max
taccgctgcgaaaaaaccacagaagggtaccgctgcgagaagaccacaaaaaggtactgcttccaaaaaaccacaaaaaggtacggctgcgaaaaaacgacaaaagggtacggctgccaaaagaccacagaagggtcaaacgaagaaaagcttatggtggatacctatgcacccaaagacgaagaaaggcgtagtaagcgacgaaatgctttcgggagttgaaaataagcgtagatccggggattcccgatatatgtcaacctttcgaactgctgctgaattcacgggcaggc

SEQ ID NO: 270356 - DNA, 393 bp, Glycine max
gagaccaaacaatactcagaacctgattaaggagagcgtggcacagtttagtggcaaaactttggtgcagtggttggtagcaacactgctgattgccttgttgggtggtgcacaagctgttgtgttatgtaacatcgactcaagtcaactaaacttgtgtcgtgctgcagttactggtcaaaaccctccaccaccagatgagaaatgttgtgcagttattcgccaagccaatttaccttgcctctgcagatacaagtctattcttcctttaattggaataaaacccgaaaaggctttggccttgcctggtaaatgtggtctccaatcccctcctaattgttgagtgtagtgaagcaattaatgaaggtcttgttcattacaagcacttagtgt

SEQ ID NO: 270357 - DNA, 279 bp, Glycine max
cagctggctactttaaaaatcaagaaaaaactaacgaactgttcaaagtttatgagaaaagtatgcgctcgttttatactggtgatattgggcaattccaccctgatggatgtcttgaaatcatatataggaagaaagatattgtcaaacttcaacatggagaatatatctctctccgaaaagttgaagcatcactatcatcatgtgattatgtggacaatataatggtttatgcagacccctttcacaattactgtgtggctctaattgttgcttcac

SEQ ID NO: 270358 - DNA, 358 bp, Glycine max
aggggcactacagatggaggaccgtattggacggagatggcgtattcatctttggatggagatacacgtatggattagaccattgatatttgtctaactgcaatgattgattgatcgatgccattcatgggtctactggaattaccatctccaacaattacatgactcaccatgacaaggtcatgcttttgggccacagtgattcctacactcaagacaagagcatgcacgtcactattgctattaaccactattgtgaaggcctagctcaaagaatgccaatgcgtacgcatggatattttaatgtggtgaacaatgactatacccactgggaaatgtatgccatacagggaagtgc

SEQ ID NO: 270359 - DNA, 374 bp, Glycine max
aatgatgccaatgaaaatcatgctgtcaaaccacccatgttgcagaggggggtgctcaggaccaactgcatagactgcttggatcgcactaatgttgcacaatatgcatatgggttggctgctcttggccaccagctccatgctctgggagttattgaccacccaaaaattgatcttgatgaccctgtagcagatgatttgatggggttttatgagcggatgggtgatacactcgcacatcagtatggtggttctgctgctcacaacaagattttctctgagaggaggggccagtggagagctgcaacacagtctcaggagttttttaggactcttcaacgctattatagcaatgcatacatggatgctatgaa

SEQ ID NO: 270360 - DNA, 335 bp, Glycine max
ttagttcaacgagatggagcaaatagggcacgcaacagttgaagtgaatggcataaaaatgcatgttgcagagaaaggagagggtccagtggtgttgttcctccacggcttccctgagctctggtactcatggcgccatcagattctctctctcagctccctcggctaccgcgccgtcgctcccgatctccgtggctacggtgacaccgaaacaccaccttcaatcagcagctacaactgcttccacatattgggtgatctcgttgcgcttattgactctgtgggtgtccaacacgtgttccttgtggctcatgactggggagccatcataggtt

SEQ ID NO: 270361 - DNA, 387 bp, Glycine max
  unsure (1)..(387): unsure at all n locations
gaagaaatacaagcacataggcctacaagcaggaaagagttggactcgcctaatcttacagggtcttgtttatctacatgaacatgatcctccagtaattcatagggacctcaaatgtgataacatttttgtcaatggccatcttggacaagtgaaaattggtgacctgggtctagcagcaattctccatggttcccaaccagctcacagtgttataggcaccccagagttcatggcaccagaattatatgaagaagaatacaatgaacttgttgatgtgtactcatttggcatgtgtgttctggaaatgcttacatctgattatccatatagtgaatgtgctaaccctgcacagatatacaagaaagtgacatcggngaagctacc

SEQ ID NO: 270362 - DNA, 319 bp, Glycine max
atcactgagtttcagaccaaccttgtgccataccccaggatccacttcatgctttcttcttatgctccggttatctctgccgccaaggcctaccacgagcagttgtcggtgccagagatcacgaatgccgtgtttgagcccgcgagcatgatggccaagtgtgatcccaggcatggcaagtacatggcttgctgcttggtgtaccgtggtgatgttgttcctaaggacgtgaatgctgctgttgccaccatcaggactaagaggactgttcagtttgttgattggtgtccaactggattcaagtgtggtatcaactacc

SEQ ID NO: 270363 - DNA, 362 bp, Glycine max
gcacaagtgagtttgttgatcgagataactaggaacagggtgatgaaaatgaaagtccttgttttcttcgttgctacaattttggtagcatggcaatgccatgcgtacgatatgttccctctccgaatgaacactggctatggtgcccgtactccggaggtgaaatgcgcaagttggaggcttgctgtggaagcacacaacatctttggctttgagaccattcctgaagagtgcgttgaagcaacaaaggaatacatccatggcgaacaatatagatcagactccaaaacagttaaccaacaagcttacttttatgccagagacctcgaagtccatcccaaggacacatttgtgttcagtat

SEQ ID NO: 270364 - DNA, 381 bp, Glycine max
gggagtgaccaatctaccgtggatgacggggggtcaggggatgcagaaaataagcgagccaaaaccactgagcttgcacagttgcaggtggagcttcaacgcatgaactctgagaacaagaagctgaaagagatgctcagccatgtgaccggtaactacaccgccttgcagatgcatcttgtcacattaatgcaacagaaccagcagcgaacagaaagcacggaaaatgaggttgttcagggaaaggtagaggataaaaacgttggtgttggtggagggaaggtaccaagacagttccttgatataggtcccagtggcacagcagaagtagatgatcaagtttcggattcttcttctgatgaaagaacacgatcgagcaca

SEQ ID NO: 270365 - DNA, 356 bp, Glycine max
  unsure (1)..(356): unsure at all n locations
gagagcttaaagcttagccgatctcgtggttctttgtacccctcaaagcaacatgggggttgccaatttctctgtcttcctacttattatttctctaagtttcttccagttgctgagaatttctgaatcaaaattacccaaagaagaagttgatgctcttaaagaaattgtgagcacaatgggtgcgacatattggaagtttgatgctgattcctgcaatattgaaatggttggagtaacactagaaccaccagatgaatcagagagaagaattggttgtgattgcagttttgaagacggcactgtctgtcatgttgtgaacatgactctcaagcgccttagtctnaccggcatac

SEQ ID NO: 270366 - DNA, 387 bp, Glycine max
gatgtaatagaaggtgtcaaaacacttggacggtaggctccatctcaaaaaaatgggtggtttagctagcaatcttcctctaattgttatggtgggtctgcaaattcattatgcagcacttgctatattcacaagagccgctttgttagatggattgagtacgacggtctttgtagtgtacaggcaaggcatagccactttggctttggcgcctatgtttttctctcctaagcggagacaatcagtgaaagattctttgggattcaggagcttctttttgatgtttgtgaccgctcttgttggagtcacagcaaatcagaatgcatactttaaaggtttattttatgcatcctctactgcagctaccgctatgagtaatctgatacc

SEQ ID NO: 270367 - DNA, 388 bp, Glycine max
attttaatatatcggatttttcgatatttaaatcgcggatctccatcacttgtagtgatttatcattcaatgaatgattgactgacaaaatgattcacttatcaaattttaatttaaagttttttagctaaaaagaaaataactttgctttttcccttctttttaacccccttaaatgaaaaaaagggttcccccacttggatagggaactatgcgagtgacctacctaatcttattgtagaaattttcaggatcaatgattagaccatgcaaactagaaatgctttttcttgtataaaggaagggattactcgatccatttccatatcgatcatgatatatataataattcgagcacccatttcaaacgcatatccaatttttgcac

SEQ ID NO: 270368 - DNA, 383 bp, Glycine max
ggagtgagtagtgagaatggagtttcaagggttaccgggaggtggcattgctagtatactctctcgcactacgccggcggacgtgtgtaggttttccgtcgtatcaaagattttccgttcggccgctgaatcggacgctgtgtggaaacgttttctcccttccgattaccattccatcatttcccagtctccttcgcctctcaactatccttccaagaaggagctctatctcgctctctcggatcgccctatcatcatcgatcagggtaaaaagagctttcaattggagaaaaagagtgggaagaagtgttacatgcttgctgctagagctctcagcattatttggggtgacactgagcaatactggaactggacaaccgata

SEQ ID NO: 270369 - DNA, 347 bp, Glycine max
ggttctagtgtgtgggggcgtgttgttgtaactcgttcttcttcttttgttgttctgtgtttgtgtttgttttttctctcacctgaaaatgtcttgctgcggtggtaactgtggttgcggaagctcctgcaagtgcggcaacggctgcggaggctgcaagatgtacccagacttgagctacactgagtcaaccaccaccgagaccttggtcatgggagtggcacctgttaaggctcaatttgagggtgctgaaatgggtgtgcccgctgagaacgatggctgcaaatgtggaccaaactgctcctgcaacccctgcacttgcaagtgaggtgttgggagagcaagct

SEQ ID NO: 270370 - DNA, 387 bp, Glycine max
ataatatgaaagactttatggtatttgtttggggtgggagtctagtatatgatttcccacaggctgttgtcatcaagtataatgtaattaattttgcatggtttcaggtcaccttaggaatttcaacgcttctttcatatgtacctgtttcactgggcactgcacatcaggctggagccttgacacttctgacatttatgttacttcttaatcacacggttcgaagaccgtctttgtcccttctcaaatctctgcctcaagttggaaaagcacactaattgtttcccgatattatattgcatcaaggcttaggccttttaagttgacaaaatctgtggctattattttttccatgctaaattttgcgttgagctccttctccaattt

SEQ ID NO: 270371 - DNA, 392 bp, Glycine max
gactcaatcagacatccgagtaaaaagttatgggcgggggaatttgctcagagcttgagtaatccatttcgagcgtctcgatatattacaggactcaatcagacatccgagtaaaaattttctgtcgtttgaatttgctcagagctacaacattcaatttcaagcgttccgatatattacgggactcaatcagacatccgagtaaaaagttattgtcgcttgaatttgctcagagcttcaacattcaatttcgatcttttcgatatattacgggactcaatcagacatccgagtaaaaagctattgtcgtttgaatttgctcagagcttcagtaatccatttcgagcgtctcgatatattacaggactcaatcagacatccgagtaaaaatt

SEQ ID NO: 270372 - DNA, 314 bp, Glycine max
  unsure (1)..(314): unsure at all n locations
cccacaccttcntctgctgctataaactacataaggggcagttcaattccaatacagcccgcnttttctttttatttccctacctttctcttcaagattcanatcttcttcaagaccctcacccgcatgaccatcacccttgatgtgcaaagctttaacaccatctacatccttatatccaacatccattacttttaatgattttcccctgaccatcttccttttatttttttccttattagcaatttttatggacctctcctaattcttttctttatctacattcatttcatttatttatattttactttttt

SEQ ID NO: 270373 - DNA, 380 bp, Glycine max
gatcactcgggtggcgtgctttggcttcccttgccccgtcttttagcaaatgtttcaatattccaaggccatgttgcttaatttagttcttgtttcctttgtcctcttgagttctatcagagatgggagtgcagggatcaccagctctttcgttcggccacagtggccaggagttgacattcccgtggatcatgaagtatttgcagttccaaagggttataatgcacctcaacaagtgcacatcacgcaaggtgactatgatggaaaagcagtaatagtctcatgggtgaccccagatgaaccagggactcgccatgtgcaatatggcacatcaaaggataagtttaaaactagtgcagaaggcacagttgcaaactaca

SEQ ID NO: 270374 - DNA, 86 bp, Glycine max
ccggtgaagtgttcggattgcggcgacgtgagcggggcgctgcccgcgacgttgtgagaagtccactgaaccttatcatttagagg

SEQ ID NO: 270375 - DNA, 244 bp, Glycine max
  unsure (1)..(244): unsure at all n locations
tactgctggganagtacgatataagggggtggcatacatctaatctaaaactaaaactacctttcctttataccttacacttttctttacttttcctattattggaataatattttttatatatattttttatctataatttatctcttttcattactatttattgttttttaaattatatttataatatctttataaatttctttattttttatatttttttctttacttttaattttttttt

SEQ ID NO: 270376 - DNA, 395 bp, Glycine max
  unsure (1)..(395): unsure at all n locations
ggattaaatcaattaataaaatcacacttggttttgtgttgaaaaccttgagatttgagaaccaaacacgacgctgcgccttgtgtagttgcccaacgccgcgccaccagatagttacacttttttcttcaactcaagagaagagcttccatggagaatgcagacatccctgagaatgccaacgagcattgcccaggtcctcagtctgaatctgctggaaaatctgatgcatgtgaagggtgcccgaatcaacaaatttgtgccactgcccccaaaggacctgaccctgatctggttgccattgcagaaagaatggctactgtgaaacatangatattggtcttgtcaggaaagggaggagttggcaagagcacgttctcttgccaactggcgtt

SEQ ID NO: 270377 - DNA, 385 bp, Glycine max
  unsure (1)..(385): unsure at all n locations
nnggggggcgctaggagaagggaaagggagaagtagaattatgtgagatagtgaataataataataataataataataataataanntagtagtgtggaattggatcagacctgtttgttagagagagatgtcacgggggagatctgattcgggagggtggttgaggggctgtctggtggttttcgcagtggtctcagcgttgggcgtgtgtggccctgctctttactggcgattcaagaacgccatcactctccgcaacaacaacaacaaactctcttgcccttcctgcctctgtgactgccctccccctctctcgctcttccaacttgctcctgggctggcgaatctctctgtctcagattgtggaagtaatgacccggatct

SEQ ID NO: 270378 - DNA, 385 bp, Glycine max
caagcagattattaacacttgtatgaatgatcagaaggggaggctgtggcctatgctgcaaaagcttggggtcaccatgaaatctgaggagaaggacctaatgggcaaagcattgatgaagcgtgtcatgcaaacctggcttccagcaagtagtgcattactggaaatgatgatatttcatctaccctctccatcaacagcccagaagtatcgtgtggagaatttgtatgagggtccccttgatgatcaatatgcttcggctatcagaaactgtgatcctgagggtcctctgatgctctatgtctcaaagatgattccagcatctgacaagggcagattttttgcttttggtcgtgtattctctggcagagtttcaactggtttg

SEQ ID NO: 270379 - DNA, 386 bp, Glycine max
gggctattttcctgggtgaatttatgcaggcggagtgggatatgtttcatagcttacatccaatggctgaatatcatggtgcggcacgagctgtaggaggatgtccaatttatgtcagtgacaagcccggacaccatgactttgatcttttgaagaagcttgcactacctgatggttctatattaagggctaaacttccaggaagaccaacaaaggattgcttatttaccgatcctgccagagatggaaagagtcttctgaagatttggaacatgaatgatttttctggagttattgcggtattcaattgccaaggagctgggtggtgcaaagttgacaagaagaaccttatccacgatgagaatccgggcactgtcacaggtttc

SEQ ID NO: 270380 - DNA, 390 bp, Glycine max
ggttctagtgtatgtgattgttgtgactcgtgcttcttcgtcgttatcttcttcttttgttgtttgtgtgtttgttttttctctcacctgaaaatgtcttgctgcggtggtaactgtggttgcggaagcgcctgcaagtgcggcaacggctgcggaggctgcaagatgtacccagacttgagctacaccgagtcaaccaccaccgagaccttggtcatgggagtggcaccagttaaggctcaattcgagagtgctgaaatgggtgttcccgctgagaacgatggctgcaaatgtggagctaactgcacctgcaacccctgcacttgcaagtgaggtgttggagagctaaagcttcaagcagaaatggcccttagaaataatgataaaaac

SEQ ID NO: 270381 - DNA, 316 bp, Glycine max
  unsure (1)..(316): unsure at all n locations
gagaaataatctgtgctgtggtagtggaagcggcgcgggcatcccagcgatggcgagagtgggtaaaatgaagttgggttcacaaggcatggaggtgtctttgcagggacttgggtgcatgggcatgtctgcgttctatggtcctcccaagcctgaccccgatatgattgctctcatccaccacgctgttcaaactggtgtcacttttcttgacacttctgacgtctatggtcctcacaccaacgaactccttctatgaaaggctctgaanggaggggtgagagatgacgttgaattggctacaaagtttggaatc

SEQ ID NO: 270382 - DNA, 255 bp, Glycine max
  unsure (1)..(255): unsure at all n locations
aaaataaacttaaattcacaatgcatatgacccttcttcccttcaacttgnntacattggcatatctgcgttctatggtcctcccaaacctgacccccatatgattgctctcatccaccaccctgttcaaactggtgtcacttttctttacacttttcacgtctatggtcctcacaccaacgaactccttctataaaaacctcttaaggcacgcgtgagagatgacctttaattctctacaaaattttgaatcaa

SEQ ID NO: 270383 - DNA, 384 bp, Glycine max
ggatgctgtcaaggcaatcaagccaagcgttgggattggatcatctggagcagggaaaacatttactaaggaggtggttgaaaccatggcatccttgaatgagaaaccacttattcttgctctctccaacccaacttcacaatctgagtgcacagctgaagaagcttatacatggagcaagggtaaagcaatctttgctagtggaagcccatttgatcctgttgaatatgaaggaaaactttttgttcctggacaggctaacaatgcttacatatttcctggttttggcttgggtttgatcatctctggtgcaattcgtgtgcgtgatgagatgctcttggcagcctctgaagctttggctgcacaagtatcacaggaaaacta

SEQ ID NO: 270384 - DNA, 330 bp, Glycine max
tacggctgcgagaggacgacagaaggggactcatcgccagcaaaagaggaaaaaaaaaaaacgaaaatgctgagaatcgccgcaagcgcaaagagaattgttcaaacggcgtcgttggaggcgccaccgttggggattagggttctgccgcgtctctaccacgagagggtggtggaccactacgacaacccccgcaacgttggatccttcgacaagaacgaccccaccgtcggaacgggtcttgttggtgcacccgcgtgtggcgacgtcatgaagctccagattaaggttgacgacaaaacggggaagatcgtcgatgctcgcttcaaa

SEQ ID NO: 270385 - DNA, 377 bp, Glycine max
  unsure (1)..(377): unsure at all n locations
ggtggcagagagcgaacccaaaactagagctacgttccgcttcaaaccttccactcttctctccttttccaatcaagggaataatatttcttagagatattccgaaaccatggctcacgccaatcctatgatttttgttgttggaattctaggtaaccttgtctccttctgttgctttctagcaccagtaccaacattctatcgagtttgtaagaagaaaaccacggaaggtttccaatcacttccttacgtggctgcactcttcacttcaatgctttggatattttatgcttacataaagacgggcgaaatacttctcatcaccattaacgcattcggttgtttcatagagacaagttacctngtcatctatatca

SEQ ID NO: 270386 - DNA, 413 bp, Glycine max
acccacgcgtcacggactgctacaagaatacaaaaaaaggcttttaattatcagaccaaaaaacaacacaaacgttcccgctaaattttcaacctaccatttctttttcaattaattaaataatatttcttagaaataaaaataaaccatgaatcactcctatccaaatatttatcattttacaattctaactaacataatctccttctcttaatttctaacaccagtaccaacattttatcgaatttttaacaaaaaaaccacgtaacgtttccaatcactttcttacataacttcactctttacttcaatgctttggatattttatgcttacataaagactcgcgaaatacttctcatcaccattaacgcattttgtttttttataaaaacaatttaccttttcatctata

SEQ ID NO: 270387 - DNA, 389 bp, Glycine max
gaaaaacaagtgtttcgaatagattatcctagggctttgggaatagtgctgcaatggcttcaagtcaggaggaggtgacccttttgggagctactggaagcccatttgtgtgcagggttcatattgccctcaagttgaagggagttcaatacaaatatgtcgaagaaaatttgaggaacaagagtgaactgcttctcaaatccaacccagttcacaagaaggttccagtgtttattcacaatgagaagcccatagcagagtctcttgtgattgttgaatacattgatgagacatggaagaacaaccccatcttgccttctgatccttaccaaagagccttggctcgtttctggtccaaattcattgatgataaggtttttggtgctgca

SEQ ID NO: 270388 - DNA, 387 bp, Glycine max
gagaccaaacaatacttataacctgggtgaggggagtatggcacagtttagtggcaaaactttggtgcagtggttggtagcaacactgctgattgccttgttgggtggtgcacaagctgttgtgttatgtaacatcgactcaagtcaactaaacttgtgtcgtgctgcagttactggtcaaaacccttcaccaccagatgagaaatgttgtgcagttattcgccaagccaatttaccttgcctatgcagatacaagtctattcttcctttaattggaataaaacctgaataggctttggccttgcctggtaaatgtggtctccaatcccctgctaattgttgagtgtagtgaagcaattaatgaatgtcttgttcattacaagcact

SEQ ID NO: 270389 - DNA, 392 bp, Glycine max
  unsure (1)..(392): unsure at all n locations
tagctgagggagtgtcatctatggtcctcataaagatgcgggagattgcagaggcatatttggaaacacccgtagagaatgcagtggttactgtgcctgcttatttcaatgactctcaacgtaaagccaccatagatgctggtgctattgcaggcctcaatgttatgcggataatcaatgaacccactgctgcagctattgcatatggccttgacaagagaactgattgtgttgaggagcgaaacattttcatctttgaccttggtggtggtacttttgatgtatctctcctcacaattaaggataaggtctttcaagttaaggctactgcangaaacactcacctttgaggggaggactttgacacccgaatgtgaactactttgtacagg

SEQ ID NO: 270390 - DNA, 378 bp, Glycine max
  unsure (1)..(378): unsure at all n locations
aatgcagttttttatgccaagtcatttgctgacaaaggtggggctaaactatatgttccatctggcaagtggctcactggaagttttaaccttaccagccacctcactctctttcttgaaagaggcgcaaccatcatcgcatcacaggattatgcacactggactgcaatggatcccctaccctcctatggtcgaggtattgatgttcctgttgggagataccgcagtttgatttatggacagaacttaagtgatgtggtgattacagggttctgtttggtgggacctaatcagtactcattccttaaattatagccgaccacatattatagaactngttggttctgataatatcataatctcaaatttgacattttt

SEQ ID NO: 270391 - DNA, 404 bp, Glycine max
gcagccacacttgcaatgatcaaagccaaaagcacaacaaaacaaattattctataaataaggagccatgaaggatcaattcctttaagacaggtgttccatgcttcatcctcatatagcaatccagcttcttcctccccctgattttctccactattcgatcttgatttgttgaatccttcatatttgaatattaaaaaagatgctagagccatggaggctaaaatccatagtgcacagaagaagaacctccaattcaaccaataacttagggtagtagagtctgaagttatggttggttgccatgtatggctagaggactctgtgaagaaactcatgagttatgtgtgctagctttagaattttatgtttcttcttgatgtgtttcttgaaacactatgcac

SEQ ID NO: 270392 - DNA, 327 bp, Glycine max
gaaggtgcaagagtttgttgtgagctataagctagtttatcgtgaggggaatattaagttgtttgttttctttgttgctgcagtatttttgttagcatgtccattccatgtctcattctattaaaggtttcttttttcttatgtaattctttctctattttgctttcttttgtttgtttttttctcttgttttatttctttatgtttaatcactcaacatttttttcctttttaaacttttctcattatttttcttttgtaattttttttcttattttttattttttttttattttattttttttcttttatttttttttttttttt

SEQ ID NO: 270393 - DNA, 360 bp, Glycine max
gggagcaataaattttttcttcagggcaggttcagatttggaccagatgcaggatcattggccctgacaatttttcttattgctgctcctgttgcagttttctgtgtctatgttgccagaaaactaatagatgatttttctgatcacttggggataaccataatggccattgctgttatattcacaatttatgtgttagttcttctcttgttaacatctggccgagaccctggcataattccacgcaatgcacatcctccagaaccagaaggttttgaaggtagtctagatgttggggctggtcaaactcctcaattgcggttgcctcgaattaaagaagttgaagtcaatggaattact

SEQ ID NO: 270394 - DNA, 375 bp, Glycine max
catcctttgacacactctcactctttccgcgagaggtttgatgaaactctcactggtcacaggaacgaaattttggcccttctgtcaaggcttgaagccaagggcaagggaatcctgcaacatcaccaagtggttgcagagtttgaagaaatccctgaggagagcagaaagaaactccaagatggtgtctttggagaagttttgagatccacacaggaagccatagtgctgccaccatttgtagctcttgctgttcgaccaaggcctggtgtatggaaatatctgcgtgtgaatgtgcacatgcttgttgttgatgagcttcgtcctgctgagtatctgcgtttcaaggaagagcttgttgaaggaagttcaaac

SEQ ID NO: 270395 - DNA, 288 bp, Glycine max
ggttctagtgtgtgattgtttgttgttgtaactcgttcttcttcttttgttgttctgtgtttgtgtttgttttttctctcacctgaaaatgtcttgctgcggtggtaactgtggttgcggaagctcctgcaagtgcggcaactgctgcggaggctgcaagatgtacccagacttgagctacactgagtcaaccaccaccgagaccttggtcatgggagtggcacctgttaaagctcaatttgagggtgctgaaatgggtgtgcccgcttagaacgatggctgcaaatg

SEQ ID NO: 270396 - DNA, 322 bp, Glycine max
gacacgcaactatttctgactacgttttgcgctacgcctctgcctctctctcaaaaatcgttctcttcgattttagggttttgttttgctgctgcctccgttccccccttctcataaacaacgcgttttctcttctgcttcgtatctattctttgcttttggttttggctgattcaaggccttcacagcattcgttgcggcattttaatcgatttatccaagcaggactgaatgaacttatggagtctaacggtgggaatatgacgtctagtaatggtattcgtctatcattggtctactaagctccccttggatacggcat

SEQ ID NO: 270397 - DNA, 405 bp, Glycine max
gacgccttctcagactcagaaaagagaagaaacagaacaaagaagagcagagagagagaggaaccatcaccaaccctaatttcttagctaaaccctattcgtttagcatttcctctcttttctcccactcgtaaatcctctcccaaacttttcagatccaaataaatcatggttttctgggtttttggctacggttcactggtgtggaaccctggattcgattacaatgagaagattataggtttcattaaggactacagacgcgtgtttgatttagcgtgcattgatcaccggggaacacctgaaaacccagcaagaacttgcacgttggaggagaaggaaggtgctatttgctggggagctgcttattgtgttcgaggaggccctgaaaagggaaaactggct

SEQ ID NO: 270398 - DNA, 420 bp, Glycine max
gttgatggactagagatatggagtgctatccagacatgggttaaggactacgtctccttgtactatgccacggatgatgcagttaagaaagactcagaactccaagcttggtggaaggaagctgttgagaagggtcacggtgacttgaaagacaagccatggtggcctaagttgaacactcttcaagatctgattcacatttgctgcattattatatggactgcttcagcactccatgcagctgtgaatttcggacaatacccttatggcggtttcatcctaaatcgtccaactctaaccagaagattgctcccaaagccaggaaccaaagaatatggtgaacttaccagtaatcatcaaaggcctatttgagaacaattacaggaaagactgaggcccttgtggacctaacagtgatag

SEQ ID NO: 270399 - DNA, 422 bp, Glycine max
gaaggtgcaagagtttgttgtgagctataagctaggttatcgtgaggagaatatgaagttgtttgttttctttgttgctgcagtagttttggtagcatggccatgccatggcgcaggctaccaaaggttccctctccgaatgaaaactggctatggtgagcgttcttcggaggtaaaatgcgcaagttttaggcttgctgtggaagcacacaacatccgagcctttaaaaccattcctgaagagtgcgttgaaccaacaaaggactacattaatggcgaacaatttagatcagactctaaaacagttaaccaacaagctttcttttatgctagtgaacgcgaagttcatcacaacgacatatttatattcggcatagattacaccgtactctttaatatcccatactatgaaaaacatggat

SEQ ID NO: 270400 - DNA, 386 bp, Glycine max
ggtgaactgtatgcatcaaaaggtgcatgtacggctcttaaggaaaaagatggaatcctaatcaatcgactttatcgagaaagattactttttttaggtcaagaggttgatagtgaaatatcgaatcaactaattagtcttatggtatatcttagtatagaagaagagaataaagatttgtatctgtttataaattctccgggggggtgggtaatacccggaatagctatttatgatactatgcaatttgtacaaccagatgtacagacagtatgtatgggattagccgcttcaatgggatcctttcttttggcaagaggagaaattaccaaacgtttagcatttccttacgcttggcgccaatgattcttttatttgagaatata

SEQ ID NO: 270401 - DNA, 427 bp, Glycine max
aagaagaactagtctaagcagaaatggcctcttcagtgatggcatctgtggccctcaaacctgcccctttcactgttgagaagtcctcagttagaggccttccctccctctcaaggaactcctcttcattcagagttgtggccagtggtggcaagaagatcaagactgacaagccttatggaattaatggtggcatggctttgagggaaggagttgatgcatctggcaggaaaggaaagggaaagggcgtttaccagtttgtagacaaatacggtgctaatgtcgatggttacagtcctatctacgacaccaaggactggtcttcaaccggtgatgtctacgctggcggtacgactggcttggctatctgggctgtgactctacttggtcttcttgcttgtggtgcactttttgtctacaacacaag

SEQ ID NO: 270402 - DNA, 386 bp, Glycine max
ggtacaagatatatgatgctaataacaatggatggatgttacttgattgatagaagttttaattttcgaagggtccaaatgagatttccttgcagaagtacaaatgatggtttgggcgagaagacccaccacttcacattacttgatggtgagatggttattgatacattgccagattcacagaagcaggagagaagataccttatatatgatatgatggcaatcaaccaagtatcaataatagagcgtcccttctatgaacggtggaagatgcttgagaaagaagtgattgaacctaggaatcacgagcgacataatatatatcaaagcagaaatccttactatagatatgacctggaaccgttcatggtgaggaggaaagactt

SEQ ID NO: 270403 - DNA, 347 bp, Glycine max
agaagggccttattgagagtcagattttctgtttgcatggaggtctctcaccatctttggatacacttgataatatccgtgccttggatcgcatacaggaggttccacacgaaggaccaatgtgtgacctcttgtggtctgatccagatgatcgctgtggttggggaatatctccacgtggtgctggatatacatttggacaggatatagctgctcagttcaatcataccaatggtctatccttgatatctagagctcaccagcttgtcgtggaaggattcaattggtgccaggacaagaatgtggtgactggttttagtgcacccaattactggtaccgatgtggg

SEQ ID NO: 270404 - DNA, 420 bp, Glycine max
gggggtatccattaaccaagcaatgtgtatgttcggtttttttacaatgttataaatgcgaagtatttattgactttgtgaatcaatgactatctaaaatttattatattacctttaagggaatctttctttacaattacgtttttttcttatctacaaaacttgaatgtgagattttatcggagtccaattccacttacactaaggtaatgttgctaaggaatgctttatgttctaaatactaattattcactctctcccttgtacaatacttaaccaactaacaccactacagcaccaaacgactcctttgttgctctggcctttcccttaaagaaacagaaagccaatgcaataatgtcaggtaaaagagcacactaaattggtgctgaggactggcttataaaggttatatccctc

SEQ ID NO: 270405 - DNA, 336 bp, Glycine max
gggagggagaaaagaaaagggtggtgaatgtgaaaatagagggagcatgtggaatggttgtggtcactattatatatgttgtctcttacgctttgcatgtgactttctttctttctttatatcctttatatattaagtatatgctgcaatatatttaattaaagagagaagtaacatcaaggtgcagagagaggaattgaagcatgggaagagggaaggtggttctggagagaatacagaacaagatcaatcgccaagtaaccttctcaaagcgcataaatggtttgctcaagaaagctttcgagctatctgttctatgcgatgctgaaatcgctc

SEQ ID NO: 270406 - DNA, 339 bp, Glycine max
ctttaatctacctatttttatactatatctcagtataaatttttatttttttacttcttttattgttattaatatcttctattttattttattatattcttttatttcttatttatttattcttttttatttttaatactttttattattattctttttttatttcttttttttttttttatattttttttttttatttttttttttttttatttaattattttttttttttttttatttttttttttttttttattattctattatttattattattttttttttttatttattatttttttttaatttttatttcattatttattatattttttttt

SEQ ID NO: 270407 - DNA, 361 bp, Glycine max
ggatgaggagtacgatgtgatcgtgttgggcacgggtctcaaggagtgcattctcagcggtcttctctccgtcgatggcctcaaggttctgcacatggacaggaatgactattacggaggagaatccacttcgctcaatcttattcagctttggaagagattcaggggagatgacaagcctcctccacatttgggagctagcagggactataacatcgatatgaaccctaagtttattatggctaatggcaatttggtgcgggttctcatacatactgatgttactaagtatctctctttcaaagctgtggatgggagctttgtgtttaataaaggaaaggttcataaggtgcccgcaaat

SEQ ID NO: 270408 - DNA, 423 bp, Glycine max
ggcaagagtttgttgtgagctataagctagtttagcgtgaggagaatatgaagttgtttgttttctttgttgctgcagtagttttggtagcatggccatgccatggcgcaggctaccaaaggttccctctccgaatgaaaactggctatggtgagcgttcttcggaggtaaaatgcgcaagttttaggcttgctgtggaagcacacaacatccgagcctttaaaaccattcctgaagagtgcgttgaaccaacaaaggactacattaatggcgaacaatttagatcagactctaaaacagtttaccaacaagctttcttttatgctagtgaacgctaagttcattacaacgacctatttatattcggcatatataacaccgtactttttaatatcccatactttgtaaaacattgattttggg

SEQ ID NO: 270409 - DNA, 145 bp, Glycine max
gtttgttgtgagctataagctattttggcgatattagaatattaggttgcttgttttctttttttctgcagtatttttggtatcatgaccatgccatttctcatgctaccataagttccctcttttaattaaaactgtctatttt

SEQ ID NO: 270410 - DNA, 345 bp, Glycine max
gctccgccgccgcggttgcaagcagagcacaccagtggaaatgggcgaagcgaaggcgttggttccggaatcggtggtgaagaaggagaagaggaacgaggagtgggctttggagaagaagcaggaactcgatgccgcaaagaaaaagaggttcgaaacgcggaagctgatttttaacagagccaaacagtactcaaaggaatacgacgagcagcaaaaggagttgattaggttgaagcgtgaagccaagcttaaaggagggttttatgttgaacctgaagctaagctcttgttcatcatcaggatccgtggtatcaatgccatggatcctaaaacaaggaagat

SEQ ID NO: 270411 - DNA, 346 bp, Glycine max
ggtgtgagagagcgagcgagcgagcagtttcaaagagaggatttgggattgggaaggcgagggattgcgctgcgtctcttcctcttctctttcgattcatccctcattcataatcttccaatccaacaacctcagcctcacactcacacatacacacatctgaacgcgtatcgtccctcccatggcttcaaagcgcatcctcaaggagctcaaggacttgcagaaagacccaccaacttcttgcagcgctggtccagtagctgaggacatgttccattggcaagcaacgattatgggtcctgctgatagtccttatgctggaggtgtattcctagtcactattcac

SEQ ID NO: 270412 - DNA, 292 bp, Glycine max
gcagttctcaccagcagggcagttttgggaaggatgaagaattatactatctatgctgtgtcaatcaccattcgtatagtgtttggtttcatgtttattgcattgatttggaaatttgattttgcactcttcatgctgttgattattgccatactaaacgatggtaccatcatgacaatatccacggatcgagtgaaaccatctccaatgccagacagctggaagctgagggagatatttgccactggtgtagtgctaggagcttacatggcactaatgacagtagtatttt

SEQ ID NO: 270413 - DNA, 384 bp, Glycine max
gagtgaaggatgaggagctacagaatgtgtctcgagaccttcgggcacgtgattcaactataaaagatatagcagataaactctctgagactgctgaagctgctgaggctgcatcatctgctgcttatactatggatgagcatcggagaattgcttgtgcagaaattgagcgtttgaataaagattctgagaagcagcaagagctgtttacacagaagctgaaggagtctgaagaaaagattgggggcttaagcaaagaatgagagcaattaatcaggcatagagatgctgctattcatgaagcaaatatgtggcgttctgaactggcataagctagagagcatgatgtgatcctagaagcatctgtagttagagcagaagaaa

SEQ ID NO: 270414 - DNA, 391 bp, Glycine max
gattcacatactataatactacgatagcgtagactcttcccagttctgttgtgtgagtctgtgagtctttcttagctgatatggcggttgatcgctcccttacgaggtgctgtagcctcgtactgtggtcgtggatgttgctgaggatgatgatggcgcagggtgcagccgcgagggccaaccggaaggagtgggactcggtcataaagttaccggctgaaccggtcgatgctgactcggatcatgaagtgggaacacgatgggcggttcttgtggctggttcaaacggctatggaaactacaggcatcaagcagatgtgtgccatgcgtaccagttgctgataaaaggtgggctaaaagaagagaacataatggtggttatgtacgatga

SEQ ID NO: 270415 - DNA, 325 bp, Glycine max
aaagttacaggctaagattttatatcatgaacttctgagaggtattttgctccatccttagtttgaatgagcaaaatgtgatgaatttatttggtgagtcatgtcaatgaaagtcaagaaatttgtaatgccacatttaccatggtacttgtctgctgctctttctgcatatggatatccatggcctttttcagtgacaacatggagcagcacaggaccagttgttttagtacttttaacttcatttagaatggacacaatatcatctatattatgaccatcaacaggacctatttagtaaagtccaagctcttcaaataatgtt

SEQ ID NO: 270416 - DNA, 442 bp, Glycine max
ggcccacccccttgtgtctgcctcttctgaaacgccactatttctgctttctctctcattaataataatattattgccttacactttttccacaatggagttgggaagcatactccattttcttcaggacaagaacattttgatcactggagccactggctttcttgccaaagttttgttggagaagatattgagggtccaaccaaatgttaagaagctttaccttcttctaagagctgcagatgccaaatctgccactcatcgcttgaacaatgagatcatagggaaggatttgtttagggtactaaaggagaaattgggtgcaaattttaattcctttgtctcgaaaaagttgactctggtacccggggacatctctcgtgaagacttgggattggaggattccattctaagggaagagatttatgatcaaacagatgtc

SEQ ID NO: 270417 - DNA, 286 bp, Glycine max
tggggcctacccacttgtgtctgcctcttaggaaactccgctatttctgctttctgtgtcattaataataatattattgccttacactttttccacaatggactctttaagcatactccattttcttcatgacaagaacattttgatcactggagccactggctttcttgccaaagctttgttggagaatatattgagggtccaaccaaatgttaagaagctttaccttcttctaatagctgctgatgcacaatctgccacttcatcgcttgaacaatgatatcat

SEQ ID NO: 270418 - DNA, 411 bp, Glycine max
gaaaaccattcggcacaacatcgaaatttccccattgtccgggtccgcaacgaaataactctaccgtgccctacgataaggggtttctcagagcaggagcaatgtcttccccttatctacctgccacaactgactcacttgctctcgcaactgaggccaaagacccatctgaggccatctccattctttatcgggtgcttgatgatccttcttcttcaccagatgctctgcgtatgaaagagcaagcaatcacaaaccccactaagcttctcactgatgagaataggggagaggatctgcgcagccttcttactcagttgaggccattcttcttcttggtacctaaagcaaaaactggcaaaattgttaggggaaatattgactcggttgctaaaatttcaggggcatttg

SEQ ID NO: 270419 - DNA, 386 bp, Glycine max
  unsure (1)..(386): unsure at all n locations
acaggagacgagttgcttcttcaagaaggccatggtagaagtgtatatggtttggctttccacaatgatggatcattggctgcatcttgtggactagactccctggctcgtgtttgggacctccgaactggaagaagtatccttgcactggaaggtcatgtcaaaccggttctcggcatcagtttttcacccaatggatatcatctagccacgggtggtgaagacaacacttgtcggatttgggatttgaggaagaagaaatccttttatactattcctgctcactctaatttaatttcacaagttaaatttgagccacaagaaggttactttttggtaactgcctcgtatgatatgacggctaangtttggtcaagccgtgactt

SEQ ID NO: 270420 - DNA, 311 bp, Glycine max
acaggagacgagttgcttcttcaagaacgccatggtataaggggatatcggttggctttccacaatgatggatcattggctgcatcttgtggactagacttactggctcgtgtttggggcctcagaactggaataagtattcttacactttaaggtgatgttaaacctgttctgggaatatattttttacccaatggatattatttaaccactagtggtgaaaacaacacttgtagtatttttgatttgatgtataataaatcctattatactatacttgattactctaatattattttacatgtttaatt

SEQ ID NO: 270421 - DNA, 413 bp, Glycine max
tccggctggcaaaagacaccaaaagggtacggctgcggagaagacgacagaagggggcaccgcttgagcagacttaacaacagcacaaagcgggttactgtctgttcaagctaccatctctctctctctttcttagtgcctccttgccagaagttaaaatggcccaagaaactttcctattcacatctgaatcagtgaacgaggggcaccctgacaagctctgtgaccagatctccgatgctgtgctcgatgcatgcttggagcaggaccctgacagcaaggttgcctgtgaaacctgcaccaagaccaacatggtgatggttttcggagagatcacaaccaaggccaacgtggactatgagaagattgtgcgtgacacatgcaggaacattggttttgtctctgatgatgtt

SEQ ID NO: 270422 - DNA, 435 bp, Glycine max
cccacgcgtccggcgagaagacgacaggagggggactgtcttccccgtattctctctccgagcttcactctcttcgcctctgccaaagggagtaaaatggggttctcctcctttctgggtcgtgttctctttgcctcccttttcatcctcactgcatggcagatgtttaatgaatttgatgccaatggtggacccatctcgaaagagttgattcccaaactcactgtggtgaagaaaaatttgtcctctaaattgggggtagcactaccagatattgatgcccggcaattcattgctactatcatatttcttaagggggtaggagggattttgtttgtgtttggcagcacatttggatctttcttactgcttttgcatctggcaattactactccacttctgtacgatttctataactatagacccggcaagcct

SEQ ID NO: 270423 - DNA, 378 bp, Glycine max
cagaaaagggtgttgtgaatgttttgtaggtatgggcgtctttgctattgtatcgccaaatattggacgagatagaagctaatgattacaacaatttcactagaagggcttatgtgagcaaagccaagaagttactttctttgccagctgcatatgctagatctatggttcctccatcaaaaaagttatcttctgtaatgaagacataaatcgagcaccttatggcattctgtagaaaaatggataaggaggaccacagaaaatggaaaggcacaatttgtatatgataaaacaaggcatgatattagtcaatattggattttgatattcatatttccccgtatttttttacataaaaaaagtttggactaatatttt

SEQ ID NO: 270424 - DNA, 362 bp, Glycine max
gacaccctttatagcaatggagttggacctctgatttctctaagtctagctaggattgagaaacaagaacaatatcaacgacaacgagttgaagagagtggttttttcaacttttaataatggcggtggagtatcagtgttgtgaaactcagtttttcttacggttattgataattctgctgcttgtgttgtttgctggattgatgtcagggctcactttaggactcatgtccttgagtcttgttgatcttgaggttctcgctaagtctggcacccctcaggatcgcaaacatgctgcgaagatattacctgttgtcagaaatcaacatttgttgctttgcacccttctaatttgtaatgct

SEQ ID NO: 270425 - DNA, 395 bp, Glycine max
gtttgtaagctgttggaatgcgactttggcgaaagcaaatgtcattctcccagcagcataatgcagatgtttcaaagctcacttttctgcttgcaaccccagggtgattcgtacacgcgaagatctgcttttgattcaatgttggctggttgtatacctgttttcttccatcctggctcagcatatacacaatatacttggcatcttcccaagaattacactaagtattctgtcttcattccagaggatgatatccgcaagaggaatatcagtatagaggaaaggcttagtcagatacctcctgagcaggtgaagatcatgagagaagaggtcattagtctcattccaagactagtatatgctgatcctcgctccaaattagaaactcttaaaga

SEQ ID NO: 270426 - DNA, 405 bp, Glycine max
gtgggtacccaacatttcaacggaatcttcaaatcctaagctcaaaacctatggttcttaaatcctacttcacttaggaaaagtgccagtccttgttgtctcaacagctgaggcagctcgtgaagttttgaaaacacatgaccccgttttctccaacaaaccacatcgtaagatgtttgatatcctcttgtatggttccaaagatgtggcatctgctccatatggcaactactggaggcagacaaggagtatccttgttttgcatcttctcagtgccaaaaaggttcaatccttcgaggcagtgagagaagaggaaatctccataatgatggaaaatattaggaagtgttgtgcatcattgatgcctgtggatttaactggcttattttgtatagtggccaatga

SEQ ID NO: 270427 - DNA, 414 bp, Glycine max
  unsure (1)..(414): unsure at all n locations
gaaggtgccagaatttggtgggagctttaagcttggttatcgggaaggggatattgaagttgttggtttccttggtgctgcaatagtttttggtagcatggccatgccatggcgcangctaccaaaggttccctctccgaatgaaaactggctatggtgagcgttcttcggaggtaaaatgcgcaagttttaggcttgctgtggaagcacacaacatccgagcctttaaaaccattcctgaagagtgcgttgaaccaacaaaggactacattaatggcgaacaatttagatcagactctaaaacagttaaccaacaagctttcttttatgctagtgaacgcgaagtccatcacaacgacatatttatattcggcatagataacaccgtactctctaatatcccatactatgaaa

SEQ ID NO: 270428 - DNA, 405 bp, Glycine max
tccctctcttcgagatcgaacatcgattgcaacgattcgataaacggctcattgggatagagatagataaataatgcaccccccccctagaaacgtataagaagttttatcctcgtacggctcgagaaaataaaaaattataatgtatgtagaaaattatgatgtcaaatagatcaataaaatcatcaaatcaattaaactatgacttaagtatttttctttcgtattttctttttgaaaaaaaactcctcatatttataactccataactcaaattggataattatcaaataactaaaaagagaacaaagcctttagtagctatttcatttattgagtggtctctactcccctttcttgcccgtgtttcgtttctttataatttattttttataatttttgata

SEQ ID NO: 270429 - DNA, 382 bp, Glycine max
ggagtttgtctaaaggataagctgaaactgaaactgaaactgaaacatggaagaagaacggtgctagtgtgaggcctctgttctgtgccctcaacaacaataacaacaacactgccttgcagtacagaaccctcggcgactccgacctcaacatcagcgaaatcactcttggtactatgacctttggggagcaaaacactgagaaagaagctcacgacattcttaattatgcattcgaccgtggaattaacgctctcgacactgctgaggcctacccaattccaatgaagaaagagacacaaggaagcactgatctctatattggtagctggctcaagtctcaacctcgtgacaagattattttggctaccaaagtatgtgg

SEQ ID NO: 270430 - DNA, 389 bp, Glycine max
  unsure (1)..(389): unsure at all n locations
gcacaagtgagtttgttgatcgagataactagaaacagtgtgatgaaaatgaaagtccttggtttcttcggtgctacaattttggtagcatggcaatgccatgcgtacgatatgttccctcttcgaatgaacactggctatggtgcccgtactccggaggtgaaatgcgcaagttggaggcttgctgtggaagcacacaacatctttggctttgagaccatttctgaagagtgcgttgaagcaacataggaatacatccatggcgaacaatatagatcagactccanaacagttaaccaacaagcttacttttatgccagagacctcgaagtccatcccaaggacacattttgtgttcagtatagatgggcaccgtactcctctaatat

SEQ ID NO: 270431 - DNA, 357 bp, Glycine max
gaccacactcttattgacttcttcgtatcttccttgtcactgcccgtgtgtcgccgtcatggccaccgtcaccacccaagcctacggcgcaattttccggccatgtacctcgaaatcgaggtttttgaccggctcttgcggtaaacttaaccggtaagtgactatgcggccaatggggtgccctccttctgcctctttcaaggttgaagccaacaagggagagtggttacctggcttggcctacccaacttacctcaatggcactcttcctggtgacaatggatttgaccctctggagctagctgacgacccagagaacttgatgtggtacgttcaagccgagcttgtgaatggacg

SEQ ID NO: 270432 - DNA, 396 bp, Glycine max
  unsure (1)..(396): unsure at all n locations
gtttgtaagcttgtggaatgcgactttggcgaaagcaaatgtcattctcccagcaacataatgcagatgtttcaaagctcacttttctgcttgcaaccccagggtgattcgtacacgcgaagatctgcttttgattcaatgttggctggttgtatacctgttttcttccatcctggctcagcatatacacaatatacttggcatcttcccaagaattacactaagtattctgtcttcattccagaggatgatatccgcaagaggaatatcagtatagaggaaaggcttagtcagatacctnctgagcaggtgaagatcatgagagaagaggtcattagtctcattccaagactagtatatgctgatcctcgctccaaattagaaactcttaaagat

SEQ ID NO: 270433 - DNA, 389 bp, Glycine max
gacacaccaaacgagccatttgggagttaggttctgcacgctctgcttccagcgagtgttctttcttcgtttcaacaccttaatttgcacacgctgcttcttcagcttgagaaatggcacaagaaacctttctattcacatctgaatctgtaaacgagggtcaccccgacaagctgtgcgaccagatctctgatgcagtgctcgatgcgtgccttgaacaggaccctgacagcaaggttgcctgtgagacatgcaccaagaccaacatggtcatggtctttggagagatcacaaccaaggccaacgtagactatgagaagattgtccgtgacacatgccgcgaaattggattcatctctgatgatgttggtcttgatgctgacaaatgc

SEQ ID NO: 270434 - DNA, 434 bp, Glycine max
cgacagaagggaggattgtcatggaggtgtgtctgacaagtttgatggtactgtgaatcaggccttgaatgttatgggctctgaaaccgtggctagtgctggtgaatctaatgatatggaaattgatggatctcttgagcataaagcaactgtcaatgaaggaagttcaccaagcactagtgttcctgtgttggaggagcccctgaattttgatgcctttaattcagctgccgaacttgaggttcttggcttggaaaggttgaagtctgaactgcagtcacgtgggttaaaatgtggaggtactttgatggagcgtgctgccaggctttttctcttaaaatcaactcccctggatgaacttccaaagaagctgattgcgaagaagtaaggagatttttgagaaggcagttatttctctgtacagtatttcttaa

SEQ ID NO: 270435 - DNA, 405 bp, Glycine max
ggttctagtgtgtgattgtttgttgttgtaactcgttcttcttcttttgttgttctgtgtttgtgtttgttttttctctcacctgaaaatgtcttgctgcggtggtaactgtggttgcggaagctcctgcaagtgcggcaacggctgcggaggctgcaagatgtacccagacttgagctacactgagtcaaccaccaccgagaccttggtcatgggagtggcacctgttaaggctcaatttgagggtgctgaaatgggtgtgcccgctgagaacgatggctgcaaatgtggaccaaactgctcctgcaacccctgcacttgcaagtgaggtgttgggagagcaagcttcaagcagagatagcccttaattaggaataatgataaactattaatgtgtagctaaaa

SEQ ID NO: 270436 - DNA, 429 bp, Glycine max
  unsure (1)..(429): unsure at all n locations
attcttctcaaatttgaagttggattttgagtttcagggtttcaaatatttcagacaatggctgtccgaattttaaacagtttcattatttaaaatatcatattaatccatattaaatatacttattttttcgtgaaatttgttaacttaaatttgattaatgtgttcccatcataacttttattaaaaaaattatttattaatttttaattattatatggagaacaattattttatttttctaaatttaataggcatgcataaatttttcattgtaacctatcagaaataatgacttttaaaaattttaattacattcttttgtattttttcttactcccttaaaaaatattaaataaaagattaaaaaaatttaatgcttgaaaatataaaataaatntaatgcttatacatnnatatataaaaatg

SEQ ID NO: 270437 - DNA, 440 bp, Glycine max
ggtataatagagagctcctccaattagggtttttgggatctgcggctacgatgggtaagggaacggggagtttcggtaagaggaggaacaagacccacaccctctgtgtgaggtgtggccgccgcagcttccacctccagaagagtcgttgctctgcgtgcgcttaccccgctgcgcgcaccatgaaatataactggagcgtgaaggccattatgagaaagaccaccggaactggaaggatgaggtacttgcgtaacgtgcctcgcagattcaagagcggcttcagagagggtaccgaagctgcacccaggaagagaggagctgctgcctctgcctaagctttgaatgaatgacagcaatttttgcttggtcagtgaaatataagagttaatagttctgtgttgtgccatactctttgaacacatttctttctgtcgttt

SEQ ID NO: 270438 - DNA, 359 bp, Glycine max
actgattcatccgaagatgagactgagaaggttcagagcccgagaagagttaaaagaaacgtgtctgagatctctcttccccctcttcctccaccattcaccaccactcctgaaaccagctcctgtgaggtgaatagcggcaaaaatgcaacattgaagggtttcattgaaggtcaaccccagagtaagaagagggttttgactcaccccccatcaacaaggaggaacacttctgggaaattcagaggtgttaggcagagaaaatggggtaaatgggctgcagagattcgtgacccctttcagagtactcgtatatggctcggcactttcaacactgcagaagaggcttcccaagccta

SEQ ID NO: 270439 - DNA, 411 bp, Glycine max
  unsure (1)..(411): unsure at all n locations
gaacctcaaaagagttctttcaaaatgcanacagccttaaccttcgctgcccccaacgttgtgccattggcacccacaaagagtgtctcccatattaccatctttcctaccaaattgaaagccccgcgctcctcacctcgttactctccgattagggttgcaaccgtggagcccgacacttcaactgtcgactacaactctgcgttctcagtgtttcctgcagaagcatgcgaaactgtaggaggggaagcctgcatggcggagatgtaccctgaaacgaagctacagccagaggctaagactccacgagtcgttacagagaacgttgagagagagtatcttgaatacgatgatcctaaaacggtatttcgaggagaggcttgtgatgatcttggaggaactttctgtgag

SEQ ID NO: 270440 - DNA, 404 bp, Glycine max
cctataccaataattaaggaactgtttcgaactgatggcgaacagttcctcaagtatccaccacctaaagtgatgcaggtcgacaagtctgcatggatgactgatgaagaatttgcaagagaaacaattgctggtttgaatccaaatgtcatcaagattattgaggagttcccactaagtagcaagctagatactcaagcctatggtgatcatacctgtataataacaaaagagcatttggagcctaacttaggtggtctcactgttgagcaggctatccaaaacaagaagttgttcatcttagatcaccatgactatctcattccatatttgaggaaaataaatgcatataccacaaagacttatgctacaagaaccatatgtttcttgaaaatgatgaactt

SEQ ID NO: 270441 - DNA, 399 bp, Glycine max
gtggtaaaaaatgctgatgacacgtatcatatgcagtggaaatgtagattatggtatcaaagaagataaaattcccaacatcaaagtagcagccctagcagcacaaggaatctccgagcttatgcctcctgatgttgctaatgcattttggagttctgacaaagtctcttctaaggtctccaaaagcatgcgtgatattgtcagagttgctatgagtcaagcacagaaaagaacaagattatctggggatacaaattttagccggattatctgttcaagaggggattctgatccttttgatggactctatgttggtgcatttggtccttatggcatggaaatagtgcatttgaggcgaaaatttggacattggaatgaagtgaacaatgaaacaacact

SEQ ID NO: 270442 - DNA, 335 bp, Glycine max
acggttaatggaattgaaattccagagtatacagcgataatctgtaatacgaggttgcttgcaactgatgagcttgattctgtatctaccgccaatgttactttagctgaaacacaagtccgaaaaattcccaatgaaactgctaatcatgcatatggtgaacatcatgcagaagacaatagtaatgacctcatatgggctcatccaggttcatgctgttatgcactgcatgcacagttgaaccctgatacagttctctagcatcaatcacctttggcccttgcgaaagctttaaagaactcagtggaattgtacggcttaaagaaagcacatat

SEQ ID NO: 270443 - DNA, 416 bp, Glycine max
  unsure (1)..(416): unsure at all n locations
agagggggatccaatatcactggcattaacttaggtcaaaaccgaccttacatcctaaagcctttgaacatcgtttggcagccatggaaacaggcatagcatgctacactcgcgggcctttcctgctagtgtttcttccagcactcttcaccctncatctctctatctnttggctcgaggagtctgaaatcgagctctntatttggagaatctctaagagtggcatccaaatcaacactaaaggtttcaaagacaaagaatacttcactcgtgaccagatgttgaaatggtgacagtctggaagaattcctcacanaagcaacaccagataggggttgatcaggttgttggtgtccatgggagaagcattaagaacaatttccttcaaagtgaagacggcttcttgtggtggaaca

SEQ ID NO: 270444 - DNA, 413 bp, Glycine max
gaccaccaattagacaataaacagcgacaatgaaagcaatgacagcaacgacaacgtttgatgtctctgccgcttgcttccgtgcccctccttcttgttcaccgaatccatgccacaccagtttttcagttataaactccctgaatcctcacaagggacgacggataagcgttgctgttccacctaagtttccaagcttccggagggaagcagctctgcaggggaatttggaggctgttagagtcccaacttcggtgcctgtgcgtgtagcatacgaacttcttctagctggtcatcgatatttggatgtaaggactccagaagagttcaatgctggacacgctcctggcgcaattaacataccttatatgttcagagttggatcaaggatgacaaagaatagcaactttatt

SEQ ID NO: 270445 - DNA, 403 bp, Glycine max
tacggctgcgagaagacgacagaagggtacggctgcgagaagacgacagaagggagaagaacaaggacgagacgttgagaaaccgcagtgggccggctaaaatgccttacactttgctctatccttctagtgaggagggattgactttcagaggaattcccaacagtatctccatctaggggctctatggttgttgcagtactttccctggttttcaataaaagtgaatagaaggaatatgattccttcatctacctatgtatggttaagttatgtatttggggtgattgaatgttctcgtgtttgctgttaagtgttaatgaagaaattctgtttgtataaattgctgttaagtgttctcgcgcatgtttcaacaatgatagctggcatggcaaagtgcaaa

SEQ ID NO: 270446 - DNA, 397 bp, Glycine max
ggagcctgaggcgacggttctggcagttgccctcgtctcagcctcgcgtatgtttccttgctctttcatcttttcctctttctctatgcaaataaccgattgatcaatcgaatttttttgtgattcaatttcgctcttttttctcggcgcgagaaatcatggctttgggaacggtgactcgacggttggggaataaactcttgccggcgttatctccttctcccaggcttctacattctcacgccaccagtttcgggttcaaacaagtaaacgaagaagaaaaggctcgcatggttggtgacgtattcacgagcgttgcttcaagctacgatctcatgaatgacctaatgagtgctggtttgcatagattgtggaaggataggttagtttccaagct

SEQ ID NO: 270447 - DNA, 404 bp, Glycine max
gtctcgcttaaattgaagacatttattattgtttatatgataagatttgaaatgatatgaaatccacttcttgaaatccaatccattacccactctattctatagattattgcttgagctgtgaaaatttgatttttgtgcagaacgtttacttgaagctgcatcaatcgaggagggattcttcttcatctttggattcgcttttgatgcctcggagtcagagctgggatgaaagctgaattttggggaaaatggcaactctagttgaacctcccaacagaattaagccaaagggcaagcattattatacaatatggcaaacattgtttgagattgatacgaagtatgttccaattaaacctataggccgaagaacgtatggcgtggtgtgctcttcgatcaac

SEQ ID NO: 270448 - DNA, 350 bp, Glycine max
cattttcccaaaatcaccatctagagttttcgcttttccactgaaaatcaaattagggtttggatttcggaattgccacagaatcatggccactctgaaagagcttcttcctcctgcaaaatcctcctccaccgcctactacgaccacaccaacgatccatggttcaagcagcgtttctcctcagaagaggaggagaaatccgccgccgccgccgccgtcaagcagaagcccgttcccccctacctgaagcgcgccggcttcgttcctcggaaaatcgaggacttcggagacggcggcgccttccctgagatccacgttgcacagtatcctctcgacatgggaagagaaa

SEQ ID NO: 270449 - DNA, 429 bp, Glycine max
gtggagaatggaattgaaattcgagagtatacagctgtaagctctgatacgacattgcttgcaactgatgagcttgattctgtatctaccgccaaggttgctttagctgaaacagaggtccgaaaaattcccaatgaaactgctaagcatgcaaatggtgaacatcaagcagaagaaaatagtaatgacctcatatgggctgatccaggttcatgctgttatgcactgtatgcaaagttgaaccctgatacagttctcttgcatcaatcacctttggcccttgcgaaagctttaaagaactcggtggaattggacgggttaaagaaggcacatattcgggatggtgcagcggtcgtgcagtatcttgtctggctggataagaagatgcaagatattttgggagcttctggttactttttggagaacgat

SEQ ID NO: 270450 - DNA, 413 bp, Glycine max
tacggctgcgagaagacgacagaagggtacggctgcgagaagacgacagaaggggaatgtcaacctcttccataaacgggtggtgcctctcttccatctccccagccaaaacctctctcaggaaggccacattacgcccttccgtcttcgcaacccttaacactccttcttctccttcctcttcatcttccttcccctctctcattcaagacaggcctgtttttgctgcccctgcccccatcatcaccccaactgtgagagaggatatggcaaaggaatacgagaaagctattgaagaacttcagaaattgttgagggagaagagtgaactcaaagcgacagctgctgaaaaagtggagcagataacagcttctctagggacatcatcatctgatggcatcccatcatcagaa

SEQ ID NO: 270451 - DNA, 419 bp, Glycine max
aaaaggccaccaaaagggggcctcgttttacctcggtgaagggtccaaaagttgtcattgataggctaactggccggaccaagggatatggctttgtaaggttttcagatgagagtgagcaagtgagggctatgactgagatgcaaggggttctttgctcaacaagacccatgaggattggacccgcctctaataaaacccccaccactcagtcccagcccaaagcttcatatcagaattctcaacctcaaggttcacagaatgagaatgatccaaataatacaactatttttgttggtaatttggatcctaatgtcactgatgatcatctgaggcaagttttcagccagtatggagaattagtgcatgtgaagattccagcaggcaagcgatgtgggtttgtccaattcgcagacagg

SEQ ID NO: 270452 - DNA, 389 bp, Glycine max
gaaggtgcaggagtttgttgtgagctataagctagtttatcgtgaggagaatatgaagttgtttgttttctttgttgctgcagtagttttggtagcatggccatgccatggcgcaggctaccaaaggttccctctccgaatgaaaactggctatggtgagcgttcttcggaggtaaaatgcgcaagttttaggcttgctgtggaagcacacaacatccgagcctttaaaaccattcctgaagagtgcgttgaaccaacaaaggactacattaatggcgaacaatttagatcagactctaaaacagttaaccaacaagctttcttttatgctagtgaacgcgaagtccatcacaacgacatatttatattcggcatagataacaccgtac

SEQ ID NO: 270453 - DNA, 392 bp, Glycine max
tccacgcgtccgatgagagaagacgacagaggggtgcatatgtgggggcatggatcataatttaggaaaggaccagactcactcaaaggaacacaaccagctgcaatgttaaggttaccatgctattgctgtgctcaaggatgcaagaacaacatcaatcatccaagggccaagccattgaaggacttcagaaccctccaaacccattacaaaagaaaacatgggacaaagccattcatgtgcagaaaatgtgggaaaacatttgcagtcaaaggggattggaggactcatgagaagaactgtggcaagttgtggtattgcacttgtggctcagacttcaagcacaagagatccctataggatcatattaagtcttttgaaagggacataac

SEQ ID NO: 270454 - DNA, 414 bp, Glycine max
gcagtgctcaccagcagggcaattttccaaaggatgaagaattatactatctatgctgtgtcaatcaccattcgtatagtgtttggtttcatgtttattgcattgatttggaaatttgattttgcacccttcatggtgttgattattgccatactaaacgatggtaccatcatgacaatatccaaggatcgagtgaaaccatctccaatgccagacagctggaagctgagggagatatttgccactggtgttgtgctaggagcttacatggcactaatgacagtagtatttttctggctcatgaaggataccgacttcttctcggacaagttcggtgtgaggtctataaggaacagccccggagaaatgatggcagccctgtacctacaagtcagtattataagtcaagcacta

SEQ ID NO: 270455 - DNA, 326 bp, Glycine max
gaccgtcagttgcaggaaaaatggtttcgctgaaactgcagaagcggctcgccgcgagcgtgctcaagtgtggcagaggaaaggtttggcttgaccccaatgaagtcaacgaaatctccatggccaattctcgccaaaacataaggaagctggctaaggatgggtttatcatcaggaagcccaccaagattcactctcgctcacgtgctcgtcgaatgaaggaagccaagaggaaaggacgtcactctggatacggtaagcgtaagggtacaagggaggcaaggctttccactaaaattctatggatgaggagaatgcgtgtgctc

SEQ ID NO: 270456 - DNA, 418 bp, Glycine max
gaggtttccttagttattgttaccatttgctcccagcactgagcttaaccgagcttcacaaagatgaatcgggaaaaattgatgaagatggccggttcggttagaactgggggaaagggcaccgtgagaagaaagaagaaggctgtccacaagacaacaaccacagatgacaaaaggcttcagagcaccctgaagagaataggggtgaatgccatcccggctattgaggaggtcaatatctttaaggatgacgtagttatccagtttctaaatcccaaagttcaagcatccattgctgctaatacttgggttgtcagtggttctccacaaacaaagaagttgcaggatatactccctagcattatccaccaattaggaccagataacttggaaaacctgaagaagctggccgagcaat

SEQ ID NO: 270457 - DNA, 449 bp, Glycine max
ctgcgataagacgacacaacggagcacaagtgagtctgatgatcgagataactagaatcagtgtgatgaacatgaacgtgcttgacttcttcgttgctacaattttggtagcatgtcaatgccatgcgtacgatatgttccctctgcgaatgaacactggctatggtgcccgtactccggacgtgaaatgcgcatgttggaggcttgctgtggaagcacacaacatctttggctttgagaccattcctgaagagtgcgttgaagcatcaaaggaatacatacatggcgaacaatatagatcagactctcaaacagttaaccaacatgcttacttttatgccagagacctcgaagtccatcccaaggacacatttgtgctcaatataaatagcaccgtactctgttatattccatactacaaaaacatggatattgggtggagaaattta

SEQ ID NO: 270458 - DNA, 345 bp, Glycine max
ggaacacaagcggcatcgtcttggtttgtgagagagacagaggctcagagagaaaatggtttcagggtcaggaatctgtgcgatgagggtagtcgtggacgcgcggcaccacatgctggtgaggctggcatcgatcgtggcgaaggaacttctgaatgggcagaacgtggtagtggtgcgctgagaggagatttgcatctactgtgggctcgtcaggcagaagatgaagtacttgcgtttccttcgcatgcgcatgatcaccaagccctgtcactgtcccatccatttgcgtgcactcgtgaagatcttatggcgcaccgttcgtgggatgataccacacatgac

SEQ ID NO: 270459 - DNA, 435 bp, Glycine max
tgcaaaaggccaccgaagggggttaccttggggattgagttgtttgtacttaaaatctttgtgccaatagcatgtctggcatgggcagttctggttcctgtcaacgccacacgttccgggctagaaagtgctggtctggacaacataacttctagtgacattgataaactctcaatttcaaatgtccatagtacatctgaaaggttttgggcacacatactagttgcttatgcatttacattttggacatgctacattttactatacgagtatgaaaaagttgcctcaatgagattgcaatttcttgcatcagaaaaacgtcgccctgatcaatttacggtgctcgctagaaacattgcaccagatcctgatgagtctgtcagtgagcttgtggagcactattttctggtcaatcatccagataactatgtttct

SEQ ID NO: 270460 - DNA, 416 bp, Glycine max
gaccactacatcccatctctcaaagctttacacgcttttaacactctctagaaaagtggtgttcttttttctttctctgaggactcgttgcttttcctttttcccattctcttcttaaatccatggacacggctcagtgggcacagggtattggagtggttaaacaatcgatggaaggttcaaagcctcctcctcctcctcctcctcctatgttggagagaagggcaaggcctcaaaaggatcaagctttgaactgcccaaggtgcaattcaacaaacaccaaattctgctactacaacaactatagcctctctcagccaaggtacttttgcaagacatgtagaaggtattggactgagggtggttctctcagaaatgttcctgtgggtggtggctctagaaagaacaagagatca

SEQ ID NO: 270461 - DNA, 400 bp, Glycine max
ggttacctgaaggtttacctgggtggcctaaaatcttggtccatacattctgcatggcagtctggtcctggaacgcccagtaccggctagaaagtgctggtctggacaacataacttcgagtgacattgataaactctcaatttcaaatgtccatagtacatctgaaaggttttgggcacacatactagttgcttatgcatttacattttggacatgctacattttactaaaggagtatgaaaaagttgcctcaatgagattgcaatttcttgcagcagaaaaacgtcgccctgatcaatttacggtgctcgttagaaacattccaccagatcctgatgagtctgtcagtgagcttgtggagcacttttttctggtcaatcattcagataactatctttc

SEQ ID NO: 270462 - DNA, 403 bp, Glycine max
ggcaacccctggattggaggccagcaaagcccaactcaaccaccaaacctctcctcgttcacgctacccctttctgctcttcttctacctttcaagttttaaaagtataaagatggcagagacattcctatttacctcagagtcggtgaacgagggacaccctgacaagctctgcgaccaaatctccgatgctgtcctcgacgcttgcctcgagcaggacccatacagcaaagttgcctgcgaaacatgcaccaaaaccaacttggtcatggtcttcggagaaatcacgaccaaggccaacgttgacctacgagaagatagtgcgtgacacctgcaggaacatcggcttcgtctcaaatgatgtgggactggatgccgacaactgcaaggtcctcgtcaacat

SEQ ID NO: 270463 - DNA, 433 bp, Glycine max
tccacgcgtccgagcaagaagacgacagacgggcagtggaaaaattacgccaatccattgagatatggtgtgctacaagtgaatattttcgacaagaaatgaatcctaattttaggatgaccgacccctttaatccagtccatataatgtccttttcgggagctagaggaaatgcgtctcaagtacaccaattagtgggtatgagaggattaatgtcggatccacaaggacaaatgattgatttacctattcaaagcaatttgcgcgaagggctttctttaacagaatatataatttcttgctacggagctcgtaaaggggttgtagatactgttgtacgaacatcagatgctggatatcttacacgcagacttgttgaagtggttcaacacattgtttgacgtcgaacggattgtggtaccattcaaggaat

SEQ ID NO: 270464 - DNA, 408 bp, Glycine max
gatctcaagcaagaaaatgtgcttggatgagaagcttgaaaggaaaatagctgaaatgagaagatataaatttggacaaagcaaattgaaatcagttgatagtgtagttatgctgttccctatgttcaaggagagactgaaaacattaagaggaatgtttgaacagtatgatgaggattctaacggatctatagaacccaacgaactaaaaaagttcttagaacatcttgaacttcatcttaaagagcaagagattgagcatctttttcagtactgtgatcttgatggaagcaagggcatacagttcaatgagtttatagttcttctatgcctcatgcatctcctagcagaaccttcatcctctgatatttcatccaaagctgagttagcacaggttggagaaatttt

SEQ ID NO: 270465 - DNA, 424 bp, Glycine max
ggtcgcttgaggagaacaggaacattttggatggcaactgctcatatcatcactgctgtgataggctcaggagtcctttcactagcatgggcggttgctcagcttggttgggttgctggacctattgtcatgtttctctttgccgtcgtcaatctctacacttccaacctattaacacagtgttacaggaccggtgactccgttactggacacagaaattacacctacatggaggcagtcaactccatcttgggaggaaaaaaggtcaagttatgtggcctcatccaatatatcaatctgtttggagttgcaattggatacaccattgctgcctctgtcagtatgatggccataaaaaggtcgaattgttatcacagcaatcatggaaaagatccctgccacatgtcaagcaatgggtatatga

SEQ ID NO: 270466 - DNA, 322 bp, Glycine max
ggagtgaggaagagcgaagagtgaagagaatggctcccaagggtttaacctttctggctgtgttaatatgcgtttcagcactgtcactgagtccttctgttgcgggggaagggcaaaataatggccttgttatgaacttctacaaggaatcatgccctcaggctgaagacatcatcacagaacaagtcaagcttctctacaagcgccacaagaacactgctttctcctggctcaagaacatcttccatgactgtgctgttcagagttgtgatgcttcactgttgctggactccacaagaaagagcttgtctgagaaggaaac

SEQ ID NO: 270467 - DNA, 260 bp, Glycine max
gggccaaggattgacatttatttgagtttgcctcgttgattgcacaaccagctgggcatcaagaaaacccagccaacaaccacaaccaaacagggtggatagggatgtcgcagcagggcacaggttcagtggtggatttcgacctccccgacgagattctgtcggtgataccaacggacccataccagcagctggatctggctcgcaagataacctccatggccattgcctcccgtgtctcttctctcgaatacgatgca

SEQ ID NO: 270468 - DNA, 318 bp, Glycine max; identical to SEQ ID NO: 239438

SEQ ID NO: 270469 - DNA, 383 bp, Glycine max
gacctcacccagttgcagaaagaaaagaccatcaaagtttcacttcagccttatccggtttagggtttcggtttttgacccaacctttgacgtatcgaaaccttaagtttcggatcaggtctgagcaatctggttggtagaacctttggtcttagagagtcaagttttatgtctgaattagacgatcaaattcctactgccttcgatccttttgctgatgcaaatgctgatgactcgggtgctgggtcaaaagagtatgtgcatattcgcgtacagcagcgaaatggaaggaaaagcctgacaaccgttcaaggattgaaaaaagaattcagctataacaagatacttaaagatgttaagaaagagttctgttgcaatggaac

SEQ ID NO: 270470 - DNA, 410 bp, Glycine max
gacttctcttcacacctttgttcactcttcttctctggcggctagggttttagcgcagcttcttctagatttaaggaagatgggtaaggaaaaggttcacatcagtattgtggtcattggccatgtcgactctgggaaatccactaccactggtcacctgatttacaagcttggaggcattgacaagcgtgttattgagaggtttgagaaggaagctgctgagatgaacaagaggtctttcaagtatgcctgggtgctggacaaacttaaggctgagcgtgaaagaggaatcaccattgatattgctttgtggaagtttgaaacaacaaagtattattgcacagttattgatgcccctggacataaggatttcattaagaatatgattactgggacatcccaagctgact

SEQ ID NO: 270471 - DNA, 421 bp, Glycine max
  unsure (1)..(421): unsure at all n locations
tggacaattgagtgcaattaaagaggtcagggttgtctgtgatgaccaatcatcaaaggagtgcctcaaacaacttaatcaggagatccatttgctcagtcagctttcacatccaaacatcgttcaatactatgggagtgatttgggggaagaaacactttccgtttatttggaatatgtctctggtggttctattcataaattacttcaggaatatggggccttcaaggagcctgttattcaaaattataccangcagattgtctctggactttcctatcttcatgggagaaatacagtacatagggatatcaaaggggctaacatactagttgatcctaatggtgaaatcaagctggcagactttggaatggctaaacatataaattcttcttcctccatgctatctttcaaagggagt

SEQ ID NO: 270472 - DNA, 227 bp, Glycine max
  unsure (1)..(227): unsure at all n locations
tagaatactacatattggactaacgatttataatagcgatttataagttatagaatcttgcggtttcaatcacgagggtggtcattatnttattttctaataatgaaatgattattctgatttcatatctctattcttctgttaagacaaccatctttaacaaactctatcttttataattcttcaccacttttcccaccatctcattttatcttttatactttttt

SEQ ID NO: 270473 - DNA, 394 bp, Glycine max
tgtggatactctagtaagtctcatgccaacagacaagggctcttccattccattgacgatttttgtttggcatgttaaagatggctatcatgttgggtgccactatcccctgtaggcttgagcttgaaaggaggatcgcgttacggttggaaatggtcttactagattatctgtttatactcatcttttcatatgtgttgtcaccttattttatgttgtcaccagtttcattttttctgtatttttatccttttattgtttttaattttattatttttatttttaatttctttcactcttctgtgtaatttttatattttattattatataatttatactcttttttttatattttcttattcttattatacttttttcttttatattattttt

SEQ ID NO: 270474 - DNA, 352 bp, Glycine max
aggtttggccaagtgatttaaattaaaaaagtgtttgtcaatggttttactctctggtaatcgattaccagaggatgtaatcgattaccagtggccaaatacgttttataacagctacaaaaatttgaattcgaaattttagactgtgtaatcgattacacaattttggtaatcgattaccagcagttagtaaacgttttaattcaaattttaaaagctgtaatcgattacacaattactgtaatcgattaccagacaggattttcagaaaaataatttcaagagtcacaacttttcaaagtctttattcatgaccaccaatggtctatatatatgtgacttaaacacgaaa

SEQ ID NO: 270475 - DNA, 403 bp, Glycine max
ggaggaagctattgaattgggtcctgtacgagggttgggggaaaagcttaggtggttattgatgcctgcctttcacaatatgatgaggaggcaatcttctttgatgaagctgtgagaaatgcaaaacgaaagcaattggaatcaaaggctttggatcttgtgtaccctgcttatacaacattgttagggcatatacgctctaaagctctagatgattttaagactaagctggaacaatcactaaacaatggagaagggtttgcttcatctgttcgcacttggactcaatctattatgcttcaatttgacaaagcatctgctgatgctgctgtaagacaagctaattggggtgcttcaaaagggcgagacaaaccttaccgtgatattgattcacatacttcat

SEQ ID NO: 270476 - DNA, 373 bp, Glycine max
ggacgccataagaaagagcacgtcgaaaagttcatctctccctctctctcacacatcccagccatgagcctcttcggtataggcagaaaccagagaacattccgcccgaaaaaaagtactccttctggaagtaagggagctcaacttagaaaacatattgatgccacgttgggtagtggaaatctgagggaagcagtaaagctacctcctggggaggatttaaatgagtggctagctgtcaacactgttgatttcttcaaccaggtgaatctgctttatggtacccttacagagttctgtactcctgagaattgtcggacgatgtctgcaggacccaagtatgaatatagatgggcagatggtgtacaaatta

SEQ ID NO: 270477 - DNA, 436 bp, Glycine max
gattgtgtctcactcacatcacacacactctcatagctgtagcggcgacactaagatcggagaaagaatggcgaaaacgacgtcgttgctgctctttacactgctcctcttcggaaccctagctctcatccaggcgaagagatcgaaggaggatttgaaggaggtgacccacaaggtttactttgatgttgagattaatggaaaagaagcaggtcgtattgtaatgggtctttatgggaaggctgttccaaaaactgcagaaaacttccgagcactttgcacaggggaaaagggaactggtaaaagtggaaagcctctccattacaaaggtagctcattccatagaattattcctagctttatgcttcaaggaggtgattttacacaaggaaatggaatgggtggagaatcaatttacggagagaagtttgctgat

SEQ ID NO: 270478 - DNA, 484 bp, Glycine max
aaaaaaaaaacggacgggaaaaaaaaaaaacaaaataacatttattacaaaaactttttttttataaaaaataataaattaaataaaggggcaataaaaaaaaaaaacgggtggggaaaaaaaataaataaaaaataataaatataaaataaaataaaaaaaataataaaaataaacaataaaaataaaataaaaaaaaaaatttaaaatatttaaaataattaaataaaattaaaaattaataaaaattaaaaataaatataaaaacaaaaatattaaactattaaaaaaaaaataaaaaaaatatataattaaataatacatcatataaaaatctttaaaaaaaaaaataaacaatttgtaaaaaaattaaataaaaaaataaaaaaaacaatacaatataaaataaaattaaaaaataaataattaataaataattaaaaaactacaaatttataataaatataaaaaaaaaaatatatat

SEQ ID NO: 270479 - DNA, 439 bp, Glycine max
  unsure (1)..(439): unsure at all n locations
gagaatcaattgagtggcgaggatggcaaacacaaacagcgacaccaaagaagaaagcaaaaaaatggatgaaagagagacaatacctctcctcacctcatacaagatgggaaattttaatctatcccacaggattgtgttggcaccgttaacacgatcaaggtcttacaacttcgttcctcagccgcatgctgctctgtattattctcaaagagctactaagggtggcttcttgatcggggaagctactggtgtatctgatacggcaaaagatgggtaccctaatacacctggcatttggacaagagaacaggtggaagcttggaaaccaattgtgagcactgttcatgagaagggaggtattttcttttgtcaactntggcatgctgggaaagtctccaactatgatgaattccaaccacatggtgaagccccaata

SEQ ID NO: 270480 - DNA, 391 bp, Glycine max
  unsure (1)..(391): unsure at all n locations
gatagcagcatcatacaaagcattgaattcaaaaactaagttcatttcttgtgctttgctttattcctcaaaaccaaacatgtcgaacacatgcggcaactgtgactgcgctgacaagactaactgcaccaagggaaacagctatggtgttatagtagagactgagaagagctacatcgagactgttgacatggatgttccagcagctgagcatgatgggaagtgcaagtgtggcactaactgcacttgcacggactgcacttgtggccattaaggaatatgtatgaaaatgtaattgccatgtgtttggcaatacaaatctccaaataatgtaatcttcgtatgaataaatgtgtgctgttatcctaaaananaaaaannnannnaaaaa

SEQ ID NO: 270481 - DNA, 458 bp, Glycine max
gaagacgacagaagggggatgttttgcattggatttaccaagagaagagctaaccaagtgaagagaacctgctatgcacaatcaagccagattagacagattcgtaggaagatgagggagatcatgaccaaccaggcaacatcctgtgatttgaaggagttggtccgcaagtttattcctgagattattggaaaagagattgagaaggcgacatctagtatttaccctctgcagaatgtgtttgttcgtaaagtcaagatcctgaaagcccctaagtttgatcttgggaaactgatggaggttcatggagattactcaaaggatgttggtgccaaggtagacagacctgctgatgaaatagtggcagaggaacccactgaaattgttggagcttgatttcatgatgcattcagtttgttctagggtttctttttcttacgttatcattgaaaattaag

SEQ ID NO: 270482 - DNA, 381 bp, Glycine max
ggagacagagagaatgagtacggtgggagaagggaaggtgagtagtaatggtcatggatgttgcaaatcagggccaggctatgcttccccactggaagccatttctggtcccagagagtctctcatttatgtaacctctgtctacacagggaccggaatagagaagccagactatttggcgacagtggatgtggatccaaactctccaacttattccaaagtcatccataggcttcctgttccttatttaggtgacgaattgcatcacacaggctggaattcatgcagctcttgccatggagacccctcagcagaccgacgatttctcatcgtacctgcactcgtatcaagtcgagtatatgtggttgatgtgaaaacaaa

SEQ ID NO: 270483 - DNA, 414 bp, Glycine max
  unsure (1)..(414): unsure at all n locations
gtaggtattatttttttcttctaaaaaaatagggtggggaaattttgatggtggcggtgggtgcanatgaaattagtaaaattatccgtgaacgcattgagcaatataatacggaagtaaaaattgtaaatacgggtaccgtacttcaagtaggcgacggtattgctcgtatttatggtcttgatgaagtaatggcgggtgaattagtggaatttgaagagggtactataggcattgctttgaatttggaatccaaaaatgttggtgttgtattaatgggtgatggtttgatgatacaagatggaagtttagtaaaagcaacaggaagaattgctcagataccttgaagtgaggcttatttgggtcgtgttataaatgccctggctaaaccaattgatggtcgaggagaaattt

SEQ ID NO: 270484 - DNA, 420 bp, Glycine max
  unsure (1)..(420): unsure at all n locations
tattaagcacatgttgtcaaaaccgattttacacagtagaattggaaagtgggctttagcattaacagaatattctttaacgtacaagcctttgaaatctgttaagggtcagattgtggctgattttattgtagatcattcattgatcgagatgctgcaagattatgtcgatacagagccttggattttgtatttcgatggatcgaaacacaaacatggaactggaattggagttttaataatatcccccaataaagttccaactaagttcaaatataaaatcaaagggctttgttctaataatgaggctgagtatgaagctctaattacaggccttgaaattntaattagcctgggggcaagaaatgttaatataagaggtgattcagaattagtggtgaggcaattaacacaagaata

SEQ ID NO: 270485 - DNA, 383 bp, Glycine max
  unsure (1)..(383): unsure at all n locations
ggtgtgtccccttagccaagctcgcgtctcacttctcggtcttatattaatcactcgcgcacacagagcataattcacctttcttttccgaccaaaggttcgccagaaaatgcttctatcctcctcctgctccgccgccggctccgccgtctccggcgagatcatgctgttcggcgtgagagtcgtagtggactccatgaggaagagcgtgagtatgaacaacctctcgcagtacgagctccctcgcgacgccgccaacgccaaagacgacgtcgctgccggctacgcctncgctgacgatgccgctccgataaactccggcaagaaccgcgaccgcaagcgagggattccatggacggaggaagagcacaagctattcttgg

SEQ ID NO: 270486 - DNA, 237 bp, Glycine max
ggccgcgctgccacaccaaataaacacaaacatggacgcatcaaaactcaatcaattgaagcatttcatcgaacagtgcaagtccaacccttccctcctcgctgatccttcactctccttcttccgcgactatcttcaaagtctcggcgcgaaacttcctgagtctgcttattccgaatcgacgggcgtggagagggatgaggacatagaggatcttacggatgagcacgagaaggt

SEQ ID NO: 270487 - DNA, 354 bp, Glycine max
ggttccatttctcaacaacttctgctacttccggctggaaccgcacttctggtgggcaattatcatgggcaaggtcaagatcggaatcaacggatttggaagaattggccgtttggtagccagagtggctctgcagagagacgatgttgaactcgttgccgttaacgaccctttcatcaccaccgattacatgacatacatgtgtaaatacgacagtgttcatggacactggaagcatcacgatgtcaccgttaatgacgagaagacccttcttttctgtgacaagccagtcactatttttggacacagaaacccttaagagatcccatgggggtctactggagctgacattat

SEQ ID NO: 270488 - DNA, 417 bp, Glycine max
ggtggcagagagcgaacccaaaactagagctaccttcccttcaaaccttccactcttctctccttttccaatcaagggaataatatttcttagagatattccgaaaccatggctcacgccaatcctatgatttttgttgttggaattctaggtaaccttgtctccttctgttgctttctagcaccagtaccaacattctatcgagtttgtaagaagaaaaccacggaaggtttccaatcacttccttacgtggctgcactcttcgcttcaatgctttggatattttatgcttacataaagacgggcgaaatacttctcatcaccattaacgcattcggttgtttcatagagacagtttaccttgtcatctatatcacttattgccccaagaaagctaggttctttaccttcaagatg

SEQ ID NO: 270489 - DNA, 414 bp, Glycine max
gacttattaattgtgttaagaaatttaagtgaggagctagagaatgatgatgaagtctgctatgtgtgcagtggtggttgtagcacttcttcttctggcggaggtggggcccatggctgaggctgtgacatgcaccccaacagagttgagtccgtgtcttccagcaatcacttccggtgctaaaccttccaatgcttgttgcacgaagctgaagcagcaaaaaccatgcttatgtggctacctcaaaaacgctagcttgaagcagtatgttaactctcctaatgcccgaaaaaccgttgcttcttgtgggattccctttccaacttgttaattaattaagccttcttataattaaagtgtgggatatatatatatatatagataaacagtttaatttatacacactttgatcct

SEQ ID NO: 270490 - DNA, 400 bp, Glycine max
  unsure (1)..(400): unsure at all n locations
atagatgtttttttgtttggagttatcaaaaaggaaatgaatcattggtacttcaaacttcttatattacttttgttctcattaatttttattaacaacaaaatgaggagtttggatatcatgttgagtttgtagttttcttaagactttattaagtgctaatttatgatctaacaatatgttgactaatacaataacttgttaggttactgaaggatttgataaaataattatatgtgattttttatataaattatttttaaatttttatttatttaaaacagttgacataccggtgagagatttaaaaatatgatttataaaaaaattattggtgattatcttgntaaatttcttgatgaagacaaagtcaatgagttattaagatagttgntatgtc

SEQ ID NO: 270491 - DNA, 360 bp, Glycine max
taaacacagacttacatgcaggaaatcttctggtcagaaagcttgaagggtttggaaggtttgatcaagtggagctttttcccattgatcatggtctttgtctccctgaaactttggaagatccttattttgaatggatctattggcctcaggcatcaattcctttctcagatgatgagctcgactatatatatcacctagacccatttcgtgattcagaaatgcttagaatggagcttcccatgattcgagaagcatgcttgcgggttttggttctctgtactatcttcctcaaggaagcagcagcttttggtctttgtctagcagagattggtgacatgatgagtagggaatttcaag

SEQ ID NO: 270492 - DNA, 445 bp, Glycine max
agaagacgacagaagggggcagcgcttgatttgaggccaggcaagccccactcaaccaccacacctctcctcgttcacgctacccctttctgctcttcttctacctttcaagttttaaaagtataaagatggcagagacattcctatttacctcagagtcggtgaacgagggacaccctgacaagctctgcgaccaaatctccgatgctgtcctcgacgcttgcctcgagcaggacccagacagcaaagttgcctgcgaaacatgcaccaaaaccaacttggtcatggtcttcggagaaatcacgaccaaggccaacgttgactacgagaagatagtgcgtgacacctgcaggaacatcggcttcgtctcaaatgatgtgggactggatgccgacaactgcaagggtcctcgtcaacattgagcagcagagccctgatattgctc

SEQ ID NO: 270493 - DNA, 370 bp, Glycine max
tgttctgatcttctcatcaggacgtgccacaggcgcggcgtgcatgctatgggaggaatggcagcgcagattccaatcaaagaagatccagtggctaacgaggtagcactggaacttgtaaggaaggacaagcttagagaagtgaaggcagggcacgatggaacttgggctgcgcaccctggtctcattccagcctgcatggagattttcaacaacaacatgggcaatgcttccaaccagatagacacagtgaaacgcgaagatggggcaaacatcaccgagcaagacctcttgcagataccaagaggagcccgcaccatggaaggtctcagattggacacaagggtgggaattcagtacgtggcggcgt

SEQ ID NO: 270494 - DNA, 409 bp, Glycine max
cagccttaggttgtcatgaccaatgcccacaaattgttaaaagcctgtttagattatcattatgaaatacccctctggttatttcttcttttatctatccttctataactttcaattcattttgtaagtttatttttgcttaattggcaggttttctggggtttggacaaaaagcttgctcagaggaagcactttccttctgtaaactggcttatttcttattcaaaatactcaacggtatgtcctaaagttggttactttgtaactcatcctccagctttctacatttgtatgcatagtgttttggttccatgactttccccgaatttttaatattttctttttggtatctttaagcacttgaaaccttttatgagcaatttgatccagattttatcaacattaggac

SEQ ID NO: 270495 - DNA, 413 bp, Glycine max
cagccttaggttgtcatgaccaatgcccacaaattgttaaaagcctgtttagattatcattatgaaatacccctctggttatttcttcttttatctatccttctataactttcaattcattttgtaagtttatttttgcttaattggcaggttttctggggtttggacaaaaagcttgctcagaggaagcactttccttctgtaaactggcttatttcttattcaaaatactcaacggtatgtcctaaagttggttactttgtaactcatcctccagctttctacatttgtatgcatagtgttttggttccatgactttccccgaatttttaatattttctttttggtatctttaagcacttgaaaccttttatgagcaatttgatccagattttatcaacattaggacaaag

SEQ ID NO: 270496 - DNA, 318 bp, Glycine max
gatactaagaccattctattagcctagctaatatgatttgtgagagaaagggagaaagggtgtgagaatggagagcaaagatgaagatgtaaaggttggagcaactgagttctcagaaaggcaaccaattggtacagcaactcacggtgacaaggactacaaagaaccactgcacagcaccttatgttgatcctggtgaactaaagtcatggtccttctacagagctggaattgctaagtttgtggccactttcttgatactgtacattaccatgttaactgtcatggctgtgaacatgtcactctacaagtgtgcct

SEQ ID NO: 270497 - DNA, 372 bp, Glycine max
gacattttctacgtattgaatctcaagattctaagagagattttgctgctctttgaagaagggtgtttgcttgattttggagatgtcgctgctctcagatctcatcaaccttaacctctcagacactactgagaaggtgatcgcagagtacatatggatcggtggatcaggaatggacctgaggagcaaagcaaggactctcccaggaccagttagcgacccttcaaagcttcccaagtggaactatgatggttccagcacaggccaagctcctggagaagacagtgaagtgattatatacccacaagccattttcagggatccattcagaaggggcaacaatatcttgggtatctgtgatacttacacttc

SEQ ID NO: 270498 - DNA, 423 bp, Glycine max
gacaccacaacttgcatctcatttctcatttctcacattgttattcacatctccatctagatctctctctctctctctcccaagaaattcatcaacagacttgtgattaatttgcaattgttcaagtgatctatcaagaaattgataattcaatgggaaagtacgaaaaagagcttaatctcgaggctacagagttgagattggggttgcctggaagcgatgagcctgggaaacgttctattgttagaagcaataagagatcttcaacagaagcaagcgaggaagagtgcataagcaagggcaacatgaattctaatggttctgatatcacaagtgatgaccaagacaaccttgtgccacctgcaaaagcacaagtagtgggatggccaccggttcgatcatataggaagaatactctacaac

SEQ ID NO: 270499 - DNA, 405 bp, Glycine max
ggaacctgatctcttgctggttgccacactacaccgatatttccaccaaacccgtttgcgttgttgtttgcgaataaatggcaactaagaggagcgtgggaacgttgaaggagggtgatttgaaggggaagagggtattcgtgagggtcgatctgaacgtgcctttggatgacaaccttaacatcaccgatgacactagagtccgtgctgctgttcccaccatcaagtacttgactggttatggtgctaaagtgatcctttctagccatttgggacgtccaaaaggtgtaacacctaaatacagtttgaagcctcttgtgccaaggctgtctcaacttcttggaattgaagttacgatggccaatgactctattggggaggaagttgaaaagttggttacacaac

SEQ ID NO: 270500 - DNA, 399 bp, Glycine max
  unsure (1)..(399): unsure at all n locations
gattgtagaactgaacaagggtttctctttctctttctctgtctgcttcttcactttctctcgtttcaatcgaaaaaaatcatgggcagaaaattcttcgtcggtggcaactggaaatgcaatgggaccactgaggaggtgaagaagattgttactactttaaatgaagctaaagtccctggagaagatgttgtagaagttgttgtgagccctccttttgtgttccttccttttgtaaaaagtttgctgcgccctgatttccatgtctcggcccaaaattgttgggttcgcaaaggtggtgcttatactggagaggttagtgctgaaatgcttgttaatttgggaattccttgggttattattggtcactctgaacggaagcagctnttgaatgaatca

SEQ ID NO: 270501 - DNA, 364 bp, Glycine max
gatgccaaacaaaatggagtgaggagcaaatgcgaagtatccaaagttgactctggaaacattcaaaagagtttcttctcctttcttccatcgtgccacggcgaagatgaagatagcgtggcttctgctgctcctcctggtatcagtgtccgttcaagtttgggccctgaaatcgccgtttcacccgcgagacgtacttcctctgcttcccaaacagttgtcgtggcccatcctcaatcgcctccacagcgcggtggatctcctccccgtcttcgtcggcgccgcctcttctccggacgacaatctcaagtggaaaggtgcatgcttctacgagaacaaagcctggatggtgtttcacaacaag

SEQ ID NO: 270502 - DNA, 414 bp, Glycine max
gatcgattctcgtaacaaaccctacccttttgagtcttccaagttttcaccatcgtaatgggttccgaaggatccagcgtcgtggttcctaggaatttcagattattggaagagcttgagagaggtgagaagggaattggggatggaactgttagctatggaatggatgatgctgatgacatatacatgcaatcttggactgggactatcattggtccccctagtactgttcatgaagggcgtatctaccagttgaaattgttttgcagcagggattatccagacaatcctccatctgttagatttcaaacaaggattaacatgacatgtgtcaatcaagaaactggagtggttgagccacatttgtttcctatgcttgctaattggaaacgtgagcgtacaatggaagacatt

SEQ ID NO: 270503 - DNA, 371 bp, Glycine max
aattcgagcggccgcttttttttttttttttttttttttttttttgtataatactaatggattcgggtccacaacgatgggttcaaatgtacgagatcttgtagcacttaccaacgaggccctatcgattagtattatacaaaaaaaatccatcatagacactaatataattagatctgttcttcatagacaaacttgggatttccgatctcaggtaagatcggttcaggatcatgggatccttttctatcagataggaagggctgtttcacaaaatgtacttctaagtaattgctccatagatcctatatctatctatatgaagaagaaatcatgtgacgggggggattcttatttgtacaaatggtact

SEQ ID NO: 270504 - DNA, 374 bp, Glycine max
ggatatggcctacatagtgtatttcaccctgggcctcgggtaccttctcccatggaacgctttcatcactgccggtgattacttgtcctatctctaccccgatgccagcgttgaccgcatcttcgccgtcgtttacatgttgatcggcctcgtggggatctccctcataatcttctacagccacaagtccaacgcctatgtgaggatcaacgttggcctcgccctcttcgtcgcttctctcctcatcatcccccttctcgacgccttttatctcaagggtagggtcggcttgtatagcggcttctacgtcaccgccggcgccgttggactttccgccgtgggcgatgcgttggtgcatggctccattgtgggct

SEQ ID NO: 270505 - DNA, 400 bp, Glycine max
gatttacaaagttgtaatcgattaccatgagcatgtaatcgattaccaatgttttaaaatgttagatttcaaatttcatgagttacaactagtgataaaacattttcaaatcattttaaacttgtgtaatcgattacacaatacttgtaatcaattatcagagtttctaaacgttttgattttcaaattttaacatgaagagtcacatttgttgatgtgtaattgcttacaccttgatggtaatcgattatcagtaactgatttcaaaaaataaattatcaaaagtcacaattcttaaagtgacttatttctgaagagttttttaaaagtcataacttttaaagtaactagttttcaaaaagagtcacaacttttaaaaggtgactagttttaaagaaat

SEQ ID NO: 270506 - DNA, 390 bp, Glycine max
atactccaaaaactgcagtattttagaattagtgagaattaggaaaaatcgattttgaatcagtctttttaaaaagtaaattgttttttatttaatctaaaatattttaaatataaataaaaatacataaatattttacataattatcaattattctgttaacggttattaatctttatcttgtgaaccatataattaaattatttatacaaattttataatttttcagaccctaatcttactattttattacttaaaatattatataatattaaaatatataaaattaattcaacatgattcaacacgtattgaatcattaaagcttaaaccagtgtcttcatcaatttactcatcagttcaaatttaaacatattggattatatatta

SEQ ID NO: 270507 - DNA, 402 bp, Glycine max
ggacgcaccttgttttctctgcattgtttcgaattccatggaggagtcttcgtacaccggtcttcccactagccacttgctcggttcagttcctgctgtcataactgaagaaaataatgccacgaaacatgtggccaccggtgcaaatatgcaaacattccctcccaacaatggaggagacagaggaccaggacatcaaactcttggcagtcctactgaagcttttgaacaacagccagcaaacaactggaggggaatctttagcatgtcatcatattcagagtatttcaatgtagacacagatgttgtcttaatcagattgataagttccttgaatccagttgctgcagactttttcagcaagatagatgctaaccctgatttatatgggcttatatggat

SEQ ID NO: 270508 - DNA, 400 bp, Glycine max
gagtgcacaagtgagtttgttgatcgagataactagaaacagtgtgatgaaaatgaaggtccttgttttcttcgttgctacaattttggtagcatggcaatgccatgcgtacgatatgttccctctccgaatgaacactggctatggtgcccgtactccggaggtgaaatgcgcaagttggaggcttgctgtggaagcacacaacatctttggctttgagaccattcctgaagagtgcgttgaagcaacaaaggaatacatccatggcgaacaatatagatcagactccaaaacagttaaccaacaagcttacttttatgccagagacctcgaagtccattccaaggacacatttgtgttcagtatagatggcaccgtactctctaatattccatactac

SEQ ID NO: 270509 - DNA, 413 bp, Glycine max
attggacagaaggagggtctctgagaaacgttcccgttggaggtggctctaggaaaaacaagagggtcacctcatcaaaggttcctgacttgaatccaccaattagcctctcatcagtctcagccatttcttcccaaaaccctaaaatgcaaggagtccatgaccttaatctggcttttcctgcagctatggacaagtatcatcatggcacgtctccgtatgttgagatgccaaaacttgaaattggtggtgatcacagtactagtcatcatagtcaccaccatagccatagcccttcttctgcagttgagctactacggtctggcatggattctaggggtttgaatccttatgctcctaattccttgatgtcaggctcagatcattccctttatacacctggctatcccatg

SEQ ID NO: 270510 - DNA, 407 bp, Glycine max
gacacaccaaaccaaagtaagagtgagcaacttccaacaccatagtgaaatggcttccaaggctgcacttctcttgtgtttcaatgttctcttcttcaccgtggttagctccacatatgtgccatgcaacccaccccccaaaactccaaaacacccacctgtcccaaagccaccttccccaaagcaagcaagttgccccaaagacactattaagtttggtgtgtgtgctgatgtgttaggtttgatcaacgtgcaacttgggaagccaccaaagaccccatgctacaacctcattgagggtctcgctgatcttgaagctgcagtgtgcctctgcactgctctcaaagctaatgtgttgggcatcaacctcaatgttccagtgaacttgagcttgctactcaactact

SEQ ID NO: 270511 - DNA, 410 bp, Glycine max
  unsure (1)..(410): unsure at all n locations
gcttttggaaagccacagggtacttgtgctagagtggctattggacaggtccttctttctgtccgctgcaaggacagcaacagccatcatgcccaggaggcccttcgccgtgccaagttcaagttccctggtcgtcaaaagattattgttagcaggaaatggggcttcaccaagtttagtcgttctgattatctcaagttcaagtcagagaatagaattgtgcccgatggtgtgaatgctaagcttcttggttgccatggaccattggccaaccgtgaacccggaagggcctttttggatactgctactggttcttagtctgtttgttaatttggaaatactagactttggattactttagttttgcaagagtgaatttgagttattgtcagaacatttncaattactta

SEQ ID NO: 270512 - DNA, 393 bp, Glycine max
gatccacatcctccacaacacaactccactcttagctgccattggtttttcttcttccatttctcttcctttctaagcttttttcgattacccatttggagattctgtcctaatggctcttgctccttccaaagtttcctccttttccgggttttctcccaaacccagtgttggggatgctctgaaaaacccaacttgctctgtttctctgagctttgcgaatgtgaaacttggaagcagaaaccttagggtttgtgcctcaactgtgcctctctcaggggtgattttcgaaccctttgaggaggttaagaagggtgaacttgcttgtccaacggcttcccaagtctcgcttgctcgtcagaactactctgatgagtgtgaatctgcctttat

SEQ ID NO: 270513 - DNA, 401 bp, Glycine max
gggggccaagactgttgtcacggatgaagccacacacactgagagaaggcttcaccaaatgatgtttgctgatagggattatgaacgagttaatgatgatgatgacttcgctgagaagcaaaggcctaatgtgaatgttgtgaattggtctgataaagattattctgtggttactattcagtgtaaggataggccaaagcttctctttgacacagtttgtactttgacagacatgcagtatgtggtttttcatgcaaacattgatgctgaggggccagaagcatatcaggaatactacatcaagcatatagatgggtcccctgtgaaatcagatgcagaaagacaaagagtgatacaatgtcttgcagctgcaattgaaagaagagtttctgagggtttga

SEQ ID NO: 270514 - DNA, 392 bp, Glycine max
gttatcaagaaggcgaacctcgtcacgtacaggggacccacgatggtcgccaacacgctccacgccgccgcgatcctgcttagggagctcggggattgggactggttcatcaatctcagcgcctccgattacccacttgtcacacaggatgatctgctgcacacgttttcctacttgccgcgggatctgaatttcattgatcatacgagtgacattggatggaaagatcatcatcgtgccaggccgatcatcgttgatccggggttgtatatgaataagaagcaagatgtgttttgggttacgcagaggaggagtaggccaacggctttcaagctttttacaagctcaacttggaggccctgtcaaagcatccccgattactgatattggga

SEQ ID NO: 270515 - DNA, 361 bp, Glycine max
aatgatgaggctgcagaaacaaaggcagttgagccagaacccccagtttatgcaaataagatggaggctaaagatgcattcaaagcactcttggagtctgtaaatgttggatctgactggacttgggatcggtccatgcgtttaataattaatgataagaggtatggtgccttaaaaacacttggtgaaaggaagcaagctttcaatgagtacttaaatcagaggaaaaaacaagaagctgaagaaaagcgtatgaaacagaaaaaagcccgggaggattttaaaaaaatgttagaagaatccacggacttgacttcatccgctagatggagcaaagcagtgtccatatttgaaaatgatg

SEQ ID NO: 270516 - DNA, 436 bp, Glycine max
aagacgacagaaggggaaggtgcaagagtttgttgtgagctataagctagtttatcgtgaggagaatatgaagttgtttgttttctttgttgctgcagtagttttggtagcatggccatgccatggcgcaggctaccaaaggttccctctccgaatgaaaactggctatggtgagcgttcttcggaggtaaaatgcgcaagttttaggcttgctgtggaagcacacaacatccgagcctttaaaaccattcctgaagagtgcgttgaaccaacaaaggactacattaatggcgaacaatttagatcagactctaaaacagttaaccaacaagctttcttttatgctagtgaacgcgaagtccatcacaacgacatatttatattcggcatagattacaccgtactctctaatatcccatactatgaaaaacatgga

SEQ ID NO: 270517 - DNA, 402 bp, Glycine max
  unsure (1)..(402): unsure at all n locations
gatgagttctaatatatcattcaaaagtttttgaaatgttgtcaccccttcttctatttctatgcctaactcttcctttgtttttgttgtccttcttcaaataccgtaaaaccttcaagaatccaccacttccaccaggtcctagaggccttcccataatagggaatcttcatcaactagatagtccttctcttcatgagcagctatggtatctctcaaagaaatatggtcctttattttcccttcaatttggattaaggccagccatagttgtttcctctccaaaattggccaaagaggtaatgaaagacaatgaccttgagtgctgtggacgacctaaattactaggccaacagaaactaacctataatgggttagacatgggattttnctcatacgata

SEQ ID NO: 270518 - DNA, 382 bp, Glycine max
ggtgagtgagacaccgatagatagagagcgcggcataacctaaacctatctttcttctctctctgtgtgtgcgcttcaacggcaaccagaagcagccatggccactgcaaggactgtgaaggatgtttcacctcatgagttcgttaaggcgtactcctctcacctcaagcgatccggcaagatggagctgccagagtggactgatattgtgaaaactgcaagatttaaggagttggctccttatgatcctgactggtactatgtcagagctgcttccatggcaagaaagatctacttgagaggaggacttggtgttggtgcctttcagaggatttatggtgggagcaagaggaatggtagtcgccctcctcatttttgcaag

SEQ ID NO: 270519 - DNA, 401 bp, Glycine max
gattccactgagtgtagtaatcaatcatcttttgtttgttcttcagtactttagtgtgtgatttaattccaagattttgagaatgtctagctgtgggtgtggaagtagctgcaactgtggcagcaactgcggttgcaacaagtactcttttgacttgagctatgttgagaagacaaccacagagactcttgttttgggtgttgggtctgtgaaggcccaattggagggtgctgaaatgggtgttgcagctgagaacggtggctgcaactgtggatcaagctgcacctgcgacccatgcaactgcaagtgaggtcaagatttataaccttgaagcaaagataactgtaatatatgtatcaacaaataataagaattacgtgttgtggttaaataagtgatca

SEQ ID NO: 270520 - DNA, 244 bp, Glycine max
cgttaatacgacagaacgggatagtgctagagtttctcctgagctataaactagtctggcgagaggagaatatgaagttgtctgttttctttggtgctcctaaaggttacctaaaatggccatggcctcttgcaagctttcaaaggatatctatccttatgaaaactgttaagtcgttatcctttttactaagtcaaatccgcaagtttaagctttcagtggaaacacacatcatacaaccctt

SEQ ID NO: 270521 - DNA, 389 bp, Glycine max
gtcagatttatcttgacgggagcaagagtaataataatgtgtataatgctacagcagcgggtatggtaaaaaaaatcatacgaaaagaaaaagggggatacgaaataactatagtggatgcattggatgggcgtgaagtgattgatattatacctccaggaccagaacttcttgtttcagaaggtgaatctatcaaacttgatcagccattaacaagtaatccaaatgtgggtggatttggtcagggggatgcggaaatagtacttcaagatccgttacgtgtccaaggtctcttgttcttcttcgcatctattattttagcacaaatctttttagttcttaagaagaaacaatttgagaaagttcaattgtccgaaatgaatttctag

SEQ ID NO: 270522 - DNA, 380 bp, Glycine max
ggtggcagagagcgaacccaaaactagagctacctgcccttcaaaccttccactcttctctccttttccaatcaagggaataatatttcttagagatattccgaaaccatggctcacgccaatcctatgatttttgttgttggaattctaggtaaccttgtctccttctgttgctttctagcaccagtaccaacattctatcgagtttgtaagaagaaaaccacggaaggtttccaatcacttccttacgtggctgcactcttcacttcaatgctttggatattttatgcttacataaagacgggcgaaatacttctcatcaccattaacgcattcggttgtttcatagagacaagttaccttgtcatctatatcactta

SEQ ID NO: 270523 - DNA, 377 bp, Glycine max
atgggaaagcttgtgcagttgatggtgcaaaaaaaggcagagtacgtgagcgtgaacgtggtcgggctgttccagcccctgaagccaacgcagagatccaaacaaacttagataggtggagagttgtgacccatgcaaatgcgaaaagcaagagtgagaaattttcaccttctcatcaagatggagctgttggatacccacaagatgcatcaaataaaggacctgtttcatttggcgccccagacactttcttctctttagggatatttaattcaaaaccttctggacatgttaggaatcatgctgctgcagggcttaacagagggaggagaacttagaaagatgagtcccagatggcatcatcatggaaattcatg

SEQ ID NO: 270524 - DNA, 393 bp, Glycine max
tttacaggtggtgacaaaccatatctaatcactggttctgatgatcacactgctaaggtatgggattatcagaccaaaagttgtgtccagaccctagaaggtcacacacacaatgtatctgctgtatgctttcatcctgaacttcctataatcattactggttctgaggatggcacagtacgcatatggcactccacaacttataggcttgagaacacattaaactatggtcttgaaagagtctgggctattggatacttgaagagttctcgtcgggttgtgattggctatgatgaaggaacaattatggtcaaacttggtcgagaagtacctgtggctagcatggacaacagtgggaaaattatttggtctaagcataatgaaattcagact

SEQ ID NO: 270525 - DNA, 406 bp, Glycine max
catgtataccttacatcacattgtcttctttaagtaacgactttttttttatgtgcttattttctcccttaatgatgacctaattatatctaacttatgtttttaattttcttttaaaatctaatataagtagtgtcatgtatagtggaacgaagtacctatattgttaaacaaaatgtttatgcaaataatatttggatattgataaagtgtaaatgaattaaattatttacaaattagttgaacttgcatgcatggttcgttcattcttaattaagtccattttaattagctcaacaaatgatatcgatcttaaagttggactcaattatttaacaagttatgctttagttttatagggtttcacattaataactggttcgtacctatatatatatttgatagc

SEQ ID NO: 270526 - DNA, 390 bp, Glycine max
aattcgagcggccccttttttttttgtttttttttttttttttttttctctattcttcttttgtgttggtcaccttgatcttattttaatggttttgatttgagattgaaaattgttggagtggaattttgatttttccatgcgaagatctgattaaagcagttaagttcatttagtaattaaattaattaaactcacatttcttaagaatttggataaaattgctgaaaggcataactttgcatgcatgtctgcatttctttgtttttattgggcatggttcttctagttttaagtttattatttttctaggcttcacaaaaattgagtatcaaggagttaaagaatttaagacaaaataccaaattaaagtagatcaatttttttcat

SEQ ID NO: 270527 - DNA, 343 bp, Glycine max
aaacggacctcggccgtgaacaagagggctttaagagaagacggcggcggtggtggcggcggcggagcgatgaggtaccgcggcgtgaggcgcaggccgtgggggcgttacgcggcggagataagggaccctcaatcgaaggagcggcgatggctgggaaccttcgacacggcggaggaagccgcttgcgcctacgactgcgctgctagagccatgaggggtctcaaagctcgcaccaactttgtttacccaactgctccgcaaccttcttccgccaccaccgaacacttgttccctaacttcaacatcaacaacgactttcacaaactctcacttttaaatt

SEQ ID NO: 270528 - DNA, 405 bp, Glycine max
catcaagctgctggagtttccatttatgagtaatagcaagagtcaaacgaattttgacagtaacaagtttgattacaggtgtgaaagtctcattgtaatcatacccaagtctttgatgaaagcctttggcaacaagcctggctttatatttgctaactgtaccatctgggttttttttaacccttaaaacccatttgcaaccaatgggagactcttgagagaggtaaatcaacaagtgtccaagtctgattgttaagaagagcatcatattctgctctcattgctgcatgccagatgggacatgcaagagctgactttgttgatttggtcagcatgagtaaggagtgtaggttgaattctgggtttgacaatcccagctttagctcttgtgcacatagagtgaat

SEQ ID NO: 270529 - DNA, 380 bp, Glycine max
ggtggcagagagcgaacccaaaactagagctaccttcccttcaaaccttccactcttctctccttttccaatcaagggaataatatttcttagagatattccgaaaccatggctcacgccaatcctatgatttttgttgttggaattctaggtaaccttgtctccttctgttgctttctagcaccagtaccaacattctatcgagtttgtaagaagaaaaccacggaaggtttccaatcacttccttacgtggctgcactcttcacttcaatgctttggatattttatgcttacataaagacgggcgaaatacttctcatcaccattaacgcattcggttgtttcatagagacagtttaccttgtcatctatatcactta

SEQ ID NO: 270530 - DNA, 352 bp, Glycine max
tacggctgcgagaagacgacagaagggtacggctgcgcgaagacgacagaagggtacggctgcgagaagacgacagaagggtacggctgcgagaagacgacagaagggtacggctgcgagaagacgacagaagggtacggctgcgagaagacgacagaagggtacggctgcgagaagacgacagaagggtacggctgcgagaagacgacagaagggtacggctgcgagaagacgacagaaggggaaggtgcaagagtttgttgtgagctataagctagtttatcgtgaggagaatatgaagttgtttgttttctttggtgctgcaagagttttggtagcatgggcatgccat

SEQ ID NO: 270531 - DNA, 402 bp, Glycine max
gggcagtgtatctgagtaatatcactgtccctttccctctccctttcatcagaaacacaaacaaaacaccgattcactatattaccagatcggactcaattcctgaaccgatgaagttgaagccgcggtgaaccaaaccatcatcatcgcgttaccggaataatcgacccatcatcaattagatcgaaatgaaggatgaggacgggcttccgacgacgaccgcggttacaaagaaggaaaacttggattcgagtctgtttggaaaaggcaggtacaaattctgggcgttagcggccatcttgcttctggcgttctggtccatgttcaccggtaccgtctcgctccgctggtccggcactctcaattccctttccaacgacatcgacactcccatccacgacg

SEQ ID NO: 270532 - DNA, 403 bp, Glycine max
gatagcagcatcatacaaagcattgaattcaaaaactaagttcatttcttgtgctttgctttattcctcaaaaccaaacatgtcgaacacatgcggcaactgtgactgcgctgacaagactaactgcaccaagggaaacagctatggtgttatagtagagactgagaagagctacatcgagactgttgacatggatgttccagcagctgagcatgatgggaagtgcaagtgtggcactaactgcacttgcacggactgcacttgtggccattaaggaatatgtatgaaaatgtaattgccatgtgtttggcaatacaaatctccaaataatgtaatcttcgtatgaataaatgtgtgctgatatcctacttcagggtctgtgtagtcatgcaatctgaatcat

SEQ ID NO: 270533 - DNA, 403 bp, Glycine max
gggtgtggcactcaaacattgtttgttgtaggaagaggaatcttgagaaatggcaggggacagcaagagcaagattctgttcatcggagggactggttacatcggaaaattcatcgtggaagccagcgccaaagctggccacccaactttccttttggtgagggagtccactctctccaaccccgcaaaatcacccctcatcgacaatttcaaaggcctcggtgtcaatcttgttttaggagatctatacgatcaccaaagtttggtgagtgctataaagcaggtcgatgtggtaatttctactgtaggacacctgcagctagctgatcaagataagatcatttctgcaattaaagaagcaggaaatgttaagaagttctatccatctgagtttggaaatgat

SEQ ID NO: 270534 - DNA, 406 bp, Glycine max
aggggtaaggcatggaattgtgatgttggatcttgagatcctcacacatttccttcatcatcttgttatttaggttggtggcattgatcgcgataatcttcctgggcaacccataccagcagattatctctttcttgatgaacttgaccaccatgcttctcgtcacgctagagtatgaagcagcttcaacccacttggtgaagtagtcgatcacaaccaagatgaagtgatgttccttcgaagccttgggcttgatggctccgattacatctgttccccacatagagaagggccatggcgctgccaatacgttcaaaggcatgggcagagcattgacattgtcagcgaaagcttggcacttgtggcatttccttacacggatgcaacattcgcttttcatggtgag

SEQ ID NO: 270535 - DNA, 330 bp, Glycine max
  unsure (1)..(330): unsure at all n locations
tacggctgcgagaagacgacagaagggggagccaaagagagagaaagagaagaagaagaagaagaagaagaagctctggattccacctcttcccgtccttcgagacggttgttgtgctgcttgctcttcagacaaatctgacatggatttactaagatttgtccatgttcttgcgttctaggttgacctgggattgaatctaaagaatcttgatttacattttgagatatggagggagtttgtttctggacaaattgctaccagtatcggttntttgcattccaagaagtgcttgattggcgagttttcatccttggagattttcttcgg

SEQ ID NO: 270536 - DNA, 269 bp, Glycine max
tacggctgcgagaagacgatagaagggtacggctgcgagaagacgacagaggggggtggccttaaggatgaggacaggatatttactaacctatatgggctgcatgatccttttctcaaaggtgccatgaaacgaggggattggcatcgaacgaaagatttggtacttaagggtactgattggattgtgagtgaaatgaagaagtctggcctccgtgggcctgggcgtgcttgttttcctttcggccttaaatgggtatttattgccaa

SEQ ID NO: 270537 - DNA, 218 bp, Glycine max
gaccgttccatttctcaacaactggggctacttgctactccaaccgcacttctgctccgcaattatcatgggcaaggtcaagatcggaatcaacggatttggaagaattggccgtttggtagccagagtggctctgcagagagacgatgttgaacctcgtgccgctaacgaccctttcatcaccaccgattacatgacatacatgtttaaatacgaca

SEQ ID NO: 270538 - DNA, 358 bp, Glycine max
gactgtacaaggggaaagaacatgctgaagttgaattcattgttggacctatacccattgatgatggagatggcaaagaaatcgcaactgaaatcaaaacaaatctagcaagcaacaaaaccttctatactgattccaatggacgtgatttcattgaacgtgttcgagactatagaaaagactggcacttggaagtaaatcaacctgtagctggaaattattaccctatcaaccttgggatttacctgaaagataaaagcaaagagttttctatattggtagatagagctgtggggggctccagcatcatagatgggcaattggagctaatggttcataggaggttacttcaggatga

SEQ ID NO: 270539 - DNA, 369 bp, Glycine max
tacggctgcgagaagacgatataagggtacggctgcgagaagacgacagaagggggtggccttaatgatgaggacaggatatttactaacctatatgggctgcatgatccttttatcaaaggtgccatgaaacgaggggattggcatcgaacgaaagatttggtacttaagggtactgattggattgtgagtgaaatgaaaaagtctggcctccgtgggcgtcgcagtgctggtttcccttcgggccttaaatggtcattcatgccaagagtatacgatggccgttcttcatatcttgctagtaatgctgatgaacgtgaacctggaacttgcatagacagggaaattatgcggcatgacccacataaa

SEQ ID NO: 270540 - DNA, 147 bp, Glycine max
caacaaagaaagaaaaaaagctttctccaagaaagcgttctatcacgccagggtccggggtatgcttcttcattgagattgggttggtgttcactgagaatgcatttcccgcgtgattaattatttcgagaaaaaatcattcggttt

SEQ ID NO: 270541 - DNA, 350 bp, Glycine max
ggttctagtgtgtgattgtttgttgttgtaactcggtcttcttcttttgctgttctgtgtttgtgtttgttttttctctcacctgaaaatgtcttgctgcggtggtaactgtggttgcggaagctcctgcaagtgcggcaacggctgcggaggctgcaagatgtacccagacttgagctacactgagtcaaccaccaccgagaccttggtcatgggagtggcacctgttaaggctcaatttgagggtgctgaaatgggtgtgcccgctgagaacgatggctgcaaatgtggaccaaactgctcccgcaacccctgcacttgcaagtgaggtgtttggagagcaagcttca

SEQ ID NO: 270542 - DNA, 307 bp, Glycine max
cagataataagtttaagatcgagattatcaatgagttgcctgccgacaaaattatcacagtatacagatgtggtcccttggtggatttgtgtcgggggccccatatacctaatacatcctttgtcaaagcaattgcgtgtttaaaggcttcatcagcatattggaggggggacaaagatcgggaaagtttacaaagagtttatggcatatcttatcctgatcagaaaagtctgaaggaatacttgcatcggctggaggaggctaaaaagtatgatcacaggattttgggtgtgaaacaggagcttat

SEQ ID NO: 270543 - DNA, 401 bp, Glycine max
  unsure (1)..(401): unsure at all n locations
ggagtgatatttgagcttaaaccctaaccgcgggtctcttgattctgcactttggaaacaatcataatggcgttctgtaataaggctggaaatgtcttgaggcagggtgctgctcgcagcacacatgcccctgttgcgtccatgcttaattacatccgctgcatgtcttcaagcaagcttttcattggaggcctttcatatggagttgatgaccagtctcttaaggatgcattttctggctttggagatgtggctgatgcaaaagttataactgatagagacagtggaagatcaaggggatttggatttgtcaacttctccaatgatgagtctgcaagttcggcactctctgncatggacgggaaggatctaaatgggcgaagcattcgggtatcctatgc

SEQ ID NO: 270544 - DNA, 387 bp, Glycine max
  unsure (1)..(387): unsure at all n locations
gatggagtgacaatgggaaagcaaaacattcgtcaccgcttgcgattccttcacgtggggaggtcctataaagggcaaactcacttgaattgaatgtagaccccattctgcaccgagaatcattcttcaccaaaacttcgcaaagaaacactacacatccctggcaactgctggcggtgcaagaagntcgggttccccctctaacttccacctctgagccaccttctctctttgacggaaccaccaggttgtacatcagttatatttgtccctatgcgcagcgtgtttggatcactcggaactataagggactacaagacaagatcaaactggttcctattgacctacaaaacaggcctgcttggtataaagagaaagtctaccctg

SEQ ID NO: 270545 - DNA, 406 bp, Glycine max
ggggagagaatagagaagagagatggatccagacgcgttggcaaaggcattcgtggagcactactacagcaccttcgacaccaacaggaacggcttagcgaatctctaccaggagggttccatgctcactttcgaaaggcagaagatccaaggcgcttccaacatcgttgccaagctcacctccctcccttttcagcagtgccaccactcaatctccaccgtcgactgccagccctccggcgtcaacgccggcatgctcgtcttcgtcagcggaaaccttcagctcgccggcgaacagcacactctcaagttcagccagatgttccatttgataccaacacctcagggaagctattatgtgttgaatgacatattccgtttaaactatgcatgaagatgtcatatg

SEQ ID NO: 270546 - DNA, 322 bp, Glycine max
aaggggtgcacaggtgagtttgttgatcgagataactagaaacagtgtgatgaaaatgaaggtccttgttttcttcgttgctacaattttggtagcatggcaatgccatgcgtacgatatgttccctctccgaatgaacactggctatggtgcccgtactccggaggtgaaatgcgcaagttggaggcttgcttgggaagcacacaacatctttggctttgagaccattcctgaagagtgcgttgaagcaacaaaggaatacatccatggcgaacaatatagatcagactccaaaacagttaaccaacaagcttacttttat

SEQ ID NO: 270547 - DNA, 415 bp, Glycine max
gtacagcagcactgatattaccggaatcattgagaggtatggccaaggtcgttacagcaagtcacacactggtgattcattggaacacgattcacagagcgcataccatgaattcttgaaattaagagcgaaatatgaatctcttgagcggacacaaaggcattttcaaggagaagaccttgagccacttagctttaaagatttgcagagcctggagaagcaactagacataacgctcgcactaactcgacagcaccaaacgaagaaactcatggcacgagcggatgaattacgcgaaaaggtaagttgttaaatgctaattaacttgtttgattttactccgtgtgaagtttttctgtgaatttctctctaatgttatgttttttcttgtttacaactcggggctgcagaagtt

SEQ ID NO: 270548 - DNA, 291 bp, Glycine max
gggaggctactgaaatcattacttggactagttgtctacgattattcatagtgaggcaatagtaacagcaattcacactggtctttgcttctcgttactcatttctcacctaactttctattcttctcaggctcagatcagaaccttagccatggcagcgttccaaaagatcaaggtcgccaaccccatcgtcgagatggacggagatgaaatgactagggttatctggaagtcaatcaaggacaagctcattttgcccttcttggagttggacatcaagtattatgactt

SEQ ID NO: 270549 - DNA, 376 bp, Glycine max
ggtggtagttgtgtgacacagagattaagctagagctacatagtttttttcttttctcaccttccttctctcccttcagacaagggacgaaaaatcagagagagagagagagagagagagagaaattccaaaaccatgtcgtcccacagtcatctaagtttcgcctttggggttctaggtaacatcgcctccttcgtgtgctttctggcaccactaccgacattttatagagtttgtaagaagaaatcaaccgaagggttccaatcaattccatatgtggctgcactcttcagtgcaatgctttggatcttttatgcctatgtgaagaccggagaaatgcttcttatcaccatcaatgcattcggttgcgtgattg

SEQ ID NO: 270550 - DNA, 416 bp, Glycine max
ggctaccaactccggcttgttcagtctttcttggaactttgttactctcacacatgtctcgctccgtgcctttggtttcaaccatttttgtcttgcttctgcttctggtggccactgaaatgatggggccaacaatggtggcagaagccagaacttgtgaatctcaaaaccaccggttcaaggggcccatgttgagtgacaacaacttgggcctctgtttgccgaaccgaacgtttcactggaggacactgccgtggcttccgtcgcagatgcttctgcaccaaacattgttaattttaaaaaattaattaagagtgctttgatagaagatgatagatctatcatctttctactcgggttgttaattaaccactttgtgtttgagaataagggttacccattctactatgggtttc

SEQ ID NO: 270551 - DNA, 373 bp, Glycine max
gtacagcagcactgatattaccaaaatcattgagaggtatcgccaatgtcgttacagcaagtcacacactggtgattcattggaacacgattcacagagcgcataccatgaattcttgaaattaagagcgaaatatgaatctcttgagcggacacaaaggcattttcaaggagaagaccttgagccacttagctttaaagatttgcagagcctggagaagcaactagacataacgctcgcactaactcgacagcaccaaacgaagaaactcatggcacgagcggatgaattacgcgaaaaggtaagttgttaaatgctaattaacttgtttgattttactccgtgtgaagtttttctgggaatttctctctat

SEQ ID NO: 270552 - DNA, 349 bp, Glycine max
ggtgatttaccatttaccacaccaaaaccaatcggatcgttttgtctggggagtcagaaatccatggatccctacaagaatcggccatcaagcgccttcaattctcccttctggactactaattccggggctcccatctggaacaacaactcatcgctgactgttggatctagaggtccaattctgctggaagattaccatctggtggagaagcttgcaaactttgacagggaacggatccccgaacgtgttgtccatgctcgtggagctagcgcaaagggtttctttgaagtcacgcatgacatttctcacctcacatgtgccgatttcctccgagcccctggagttc

SEQ ID NO: 270553 - DNA, 264 bp, Glycine max
  unsure (1)..(264): unsure at all n locations
gatttataaacttgaacagagatctcatctcacttgtcagagattctcaccagtgattggtgatggctcanccgcttgtgaagaaagacgatgaccgcgacgacgaaggttgtcgagcagctgactattccccctttcttggaattgaaaaggggtctgttcttcaagaggccagggtttttaatgaccctcaactagatgctaggagatgttcacaggttattacaaaacacctatacctactgaatcagggagagacgttta

SEQ ID NO: 270554 - DNA, 423 bp, Glycine max
  unsure (1)..(423): unsure at all n locations
ttttccacaaaagtatattcaatattccccaattgttgaatcggaccaatttgatggccctattccaccacttttacgaggtttcatatttcttgatttattcaataacaaaagatgaacatctaagtataaaaaaatgaacaagaataattttattgcatttctgaaatatagattaaattgtttacaaaatattaatttctaattaatagtcaatgatgataggatgcttgaaaataatatatatattcaaggaaagatctccaatctaaatcttactattttcttatctcaaaatgtcttttaaaactacaaatcatttatgattatgttaataacgtaagattatcattttttgataagttatttgtttaaaaagtatataatgtgttgaaagagttttactattattaancttcatta

SEQ ID NO: 270555 - DNA, 334 bp, Glycine max
gggtggcagagagcgaacccaagactagagctaccttcccttcaaaccttccactcttctctccttttccaatcaagggaataatatttcttagagatattccgaaaccatggctcacgccaatcctatgatttttgttgttggaattctaggtaaccttgtctccttctgttgctttctagcaccagtaccaacattctatcgagtttgtaagaagaaaaccacggaaggtttccaatcacttccttacgtggctgcactcttcacttcaatgctttggatattttatgcttacataaagacgggcgaaatacttctcatcaccattaacgca

SEQ ID NO: 270556 - DNA, 411 bp, Glycine max
gttgcattgctctatagagctgggactagcaatgtagtagctcctgaatctggctttgtgacactggatgaaagatttaaaatgcttaggcaaattgactgggaagcattgtccaaggaccaacctgtcaaagagactgctgctcctgtctaacttagaattcactttcaaggtctatcaaataataccatggttttacacatctgtttggagccttctgttttttgtttttttttttttctgcaaatttgactagagaagtctgatttgtaatatttaccgagggatcttttatagtcatataatgagttccattttgtttaggcaagtttttatttcaatgtgactagatatatttcctatttttggaatttggaaacatggatattttggagtgatgtttttttttaa

SEQ ID NO: 270557 - DNA, 341 bp, Glycine max
gactctgcagctcgcaacttgtaccacgaaaccatggacttgagaaaattccacgaagatgtgaagagcaagccataaacaagcacaaagatgcacacccaggtttttcttttgctcatgatttgaagcagtagcacgtaagaggaaggtgatgtgtgaattggtgaagtgggttgttcctcttcttccacttttgccatggacatgacaacaaaaacaacctcggaaaactagccagtaccaattaccgaacaaaacaccaatctgggtttggtttggtttcttttcacaagtggaaaccttttcatactaattcaatggtctgggccgtttgggtcttt

SEQ ID NO: 270558 - DNA, 382 bp, Glycine max
tacggctgcgagaagacgacagaagggaacataccctctaacacaatatttctttaaatatattcttttaatcaattaaaatctattgaaaattatgacatctaataaaaaaaaatcattaaacatgacatgtgatttataaaattgttattttcaattaatttcaacaaatattgtatttttcaataataaatatttatagaaaaatgattaacttttataatcactattttaaaaattaaatttttatgatattacataaaataaatttaatttaatttacttattactactttctagttactaattaatgaattagattattcctaaccctgtttacctacacaggaaggagcaggccctgcctaactcctgatgcatg

SEQ ID NO: 270559 - DNA, 388 bp, Glycine max
  unsure (1)..(388): unsure at all n locations
ctcctaccttgaagctcttatccatggcttcctatggtggtgagtttcttcttgactcatcttcttcttgaagtgatgtctcctctcaactcttcttcttctccattccactgcaattaaaattcaagaagcaaaggactccattgatgaagaagatccaaggcctacatgctccaatggagctacatcatgtggtatcaagagcatcttcatataggtgatgttcttttgcttcctcaatctttttgttcggtcaattcactttaattccttgttattcatcttattatccatgtatatcctccattgtcttggggtttggtgttgttagagtagattaaaaaaaaaccgggtacatcttagatgtacactngntcttgcatttcta

SEQ ID NO: 270560 - DNA, 266 bp, Glycine max
  unsure (1)..(266): unsure at all n locations
ggaaaacaccgnncgttnctncgcaccgacngcaacctcttcgtcgctgccaaggccttcgccgccggcgtcattctcgccaccggattcgtgcacatgctctncgacgccaccaaggcacttcgccacccgtgcctgccagcgttcccgtggtccaagtttcccttcaccggtttcttcgccatgttggccgcgctcctcacgctcctnctagatttcgtgggaacgcaatactacgagcgcaagcaggggatgaaccgcgcccc

SEQ ID NO: 270561 - DNA, 415 bp, Glycine max
gacacgcacctctttctgattgccttgaaatcacacactctcttcaatttctagggttttgctattgctttgcctccgttccccctttctcacaaaaacaacgccttttctcttctccttcgtatctattctttgcgtttggtttttggttgattgaaggcattcacagcgtaattcgttgctgcattttaatcgatttatctaaccaggactgaatgacctaatggagtctaaaggtgggaaaaagaagtctagtagtagtagtagtaaatcaattttttacgaagctcccctcggatacagcattgaagacgttagaccaaacggtggaatcaagaaattcagatctgctgcttactctaactgttctcgcaaaccatcctgatacacatccggattgatagttcgttgcatg

SEQ ID NO: 270562 - DNA, 415 bp, Glycine max
tttcagccttagttttaataggaaatatccaagggtatctggaaaaagcatcaataaaagatacataatacttgaaaccagaatgagagggtagcctatgagactttcccatgcaacaggaagcataaaagtctgaaaaaaatttattagatgaagaaatattacactggttgaagactagcttcattacttgactattgggatggcctaacctagcatgccaaagactaacagtgctaggaggagaaataacagaactggaagctacactagaatttttattaacagtaggagctgggattgaagtagagatggaggttgacaacaactgaggagagtgatcttgaagcctaatgttatgaaatgaatagaggccatcaacaccaacaacactttgaagaaggatcttattggt

SEQ ID NO: 270563 - DNA, 424 bp, Glycine max
gtgaactggacagttccaataagatttcattcttgaacaaaaatccattttggggtttatttcatctattccatgaccggaacagtgggagatacacgttacaccacgattttgaatcagaagagatatttcaagaaatggcagatctattcactctatcaataaccgagccggatctggtgtatcataagggatttgctttttctattgattcctccggattgggtcaaaaacatttcttgaatgagttattcaactccagggatgaatcgaaaaatcactctttattggttctacctcctcttttttatgaagagaatgaatctttttatcgaaggatcataaaaaaatgggtccagacctcttgcgggaataatttggaagatccccaaacctaaatagttgtatttactagcaacaacat

SEQ ID NO: 270564 - DNA, 412 bp, Glycine max
  unsure (1)..(412): unsure at all n locations
gaccgtttgccacgttcgcaaccaaacaccttctctctctctctctctttgactctttaggggaaggccattctcgcaacgtttgagttcagcagatccagaatttttcagaaaacaagtttaggagaatgaagaatacggaacgaattgccaatttggctttagcaggtttaaccttagcgcctcttgttgtgaaagtagatccgaatttaaatgttattttgactgcttccctcactgtgtttgtgggctgttaccgctccgttaaaccaaccccaccaactgagacaatgtccaatgaacatgccatgcgttttccctttgttgggagtgcaatngtattgtcactcttcttactcttcaagnttctatccaagggacttgtgaacactgtattgacaggctacttctt

SEQ ID NO: 270565 - DNA, 407 bp, Glycine max
ggaagtaagtacgaggtgagaagaggcgacgaggcgagaacattcccatgtagcgtggagaagcaaggccatcgatgggtctataatcaggcacgatgaaagcctcgcgttcctcgcgggccccagcagctctgctttgtccaattccattgaaggttccatacctgaccaacctccccacccaagacttagacttcttattattagtggtgggactttgatgtccggcgttcatcttctggcacaggtactccttcaccgcatgcaacccctgctccaccagctgcggcggcggcgaactcagagggttcccttccacgctaatcttctgcagcttcttcaggcatccgatggagtccggcagggccctgatcttgttgtagcttacgtcgagttccacgagggac

SEQ ID NO: 270566 - DNA, 390 bp, Glycine max
gagggaagtgcggtgtccactcatcatctatctttcctcggtcccgaccacacacaataacaatgtcaactctttgttctgcacttcctccatcatcatcatcatcaccctccatagcaaagttcatctccgaccaaccatgcctcaccatgctccaaacccaatgcaccaacatgaaagacctccaaaagatccatgcccacatcatcaaaaccggccttgctcaccacaccgttgctgctagccgcgtcctcactttctgcgcctcttcatctggtgacatcaactatgcctacttgctcttcaccaccattccaagcccaaacctttattgctggaacacaatcatcagaggcttctctcggagctcaacccctcatcttgcaatat

SEQ ID NO: 270567 - DNA, 144 bp, Glycine max
gagtgcacaagtgagtttgttgatcgagataactggaaacagggtgatgaaaatgaaggtccttggtttcttcgttgctacaattttggtagcatggcaatgccatgcgtacgatatgttccctctccgaatgaacactggcta

SEQ ID NO: 270568 - DNA, 421 bp, Glycine max
gacaccagtggcttcttcattcctttattcattcgtctcactgctgaacacaagagaaacaatggaacttttgcaaaatggccacaaaaatttcgtcagcatcaaaccctccgagttacccctcacgaatggggcagcgttaactctcctcaactcgctctccaaaactcagtacttgggcaacatagatccttccagagtttttgtcaccaaagttaagcgtatcattgtaaaggttggaacagctgttgttactcgaagtgatggaagattagcattgggcagaattggagcactatgtgagcagcttaaagaactaagcagtcaagggtatgaagtcatattggtaacttcaggtgcttgtggtcttggcaggcaaaggcttagatatcgcaaattggccaatagcagcttttctgat

SEQ ID NO: 270569 - DNA, 397 bp, Glycine max
  unsure (1)..(397): unsure at all n locations
gacacctttgttcactcttcttctcttgcggctagggttttagcgcagcttcttctagatttaaggaagatgggtaaggaaaaggttcacatcagtattgtggtcattggccatgtcgactctgggaaatccactaccactggtcacttgatttacaagcttggaggcattgacaagcgtgttattgagaggtttgagaaggaagctgctgagatgaacaagaggtctttcaagtatgcctgggtgctggacaaacttaagactgagcgtgaaagaggaatcaccattgatattgctttgtggaagtttgaaacaacaaagtattattgcacagttattgatgcgcctggacatagggatttcattaagaatatgattactgggacatnccaagctg

SEQ ID NO: 270570 - DNA, 415 bp, Glycine max
  unsure (1)..(415): unsure at all n locations
gatactaaagaatttcgtttcgtttgtacaaaacgaaagctagcaccgttctgcggcggtcccctccggcatcgtctttacagagctttcccggggaccacaatcgccattcgccgccgcagacgacggcgctcatggctcagccgccgttcgatccgttctacctttaccaacatgatgagcagagcaacatcaacacgctatttgtctccggtctaccagacgacgtgaaggcgcgtgagattcacaacctnttncgccgccgccccggcttcgactcctgccaactcaagtacaccggccgcgccaaccaggtcgtagcgtttgccacgtttttcaaccaccaatcgggcatggcaagcgtgcacgccttgaatggtgtgaaattgatcctcanactggatctgtttacata

SEQ ID NO: 270571 - DNA, 357 bp, Glycine max
gaacctcatccaaatttgttaaggaggaccacaattggaaatggtctactttgtttccctacagcttgggggcttgcaattactcctacagtctatatttaaacctttcctttcttgagatgcaagtcctccggaatcagtttttgactggacacgggaaatagactcagatttgtcaaatcagaatatcaataatcaagcattctcaagaaagcattggcgtcttttacaatgtcaagatggtttgctacatttatttacatgatagagcacattcctattttgattacataaaagaaaagttattctagtgatatattctagatttctagtgtttacatgatttgatatgtagaa

SEQ ID NO: 270572 - DNA, 376 bp, Glycine max
cataaatatttctttattgtttgtccaagtaaagagtaaacattgttttcaattatcaatttcttgaacttcttagttctcatcatttatccagtggctcagatttctacatgcatgtgaataagaagatcagatgaagacaatatgaaagaaagactatgagcaaagaaaaataggctctaaacgttacctattgccacctaagacccagctcaacatagaaggcatcatgatgtcaacaaaaaaccttcctccaactcttccaggatgtggtatacgaaacttagtcaaaaactgcagagtaagggaagcaagaatgaatttgtgcatttaattatttcaatttgagtgtcatttcaccatatttttcattctc

SEQ ID NO: 270573 - DNA, 350 bp, Glycine max
tatgctgttgatggacttgaaatatgggatgctatgaagacatgggttcatgaatatgtctccttgtattacccaacagatgcagcagttcaacaagatactgaactacaagcatggtggaaggaagctgtggagaagggtcatggtgacttaaaagaaaagccttggtggcctaaaatgcagacaactgaagatctcattcaatcatgctctattatcgtttggacagcttcggctctccatgctgctgttaattttggacaatatccttatgggggcttaatcctgaaccgcccaactctagccagaaggtttatcccagctgaaggaaccccaaaatatgatgagat

SEQ ID NO: 270574 - DNA, 359 bp, Glycine max
  unsure (1)..(359): unsure at all n locations
gagggtgcttgtgttgtgttgtgggcacgccttgttcggtgaagtgagtantgagtgctgaatcgaatcgaatcgattctccgaacatggcggcgagcgatcgcacagtgttgcaattctcttcatcatcttcttcttcttcgcagatcttgtccgcgaaggtccaccctctggtcatcttcaacatctgcgattgctatgttcgacgccctgaccaagccgaccgcgtcatcggaaccctactcggctccgtccttcccgacggaaccgtcgatatccgaaattcctatgctgttcctcacaacgagtctatcgaacaagttgcattggatatagagtaccaccacaatatgttaata

SEQ ID NO: 270575 - DNA, 391 bp, Glycine max
gatactcttacacatcatgcgactagggttttagcgcagcttcttctagatttaaggaagatgggtaaagaaaaggttcacatcagtattgtggtcattggccatgtcaactctgggaaatccactaccactggtcacttgatttacaagcttggaggcattgacaagcgtgttattgagaggtttgagaaggaagctgctgagatgaacaagaggtctttcaagtatgcctgggtgctggacaaacttaagactgagcgtgaaagaggaatcaccattgatattgctttgtggaagtttgaaacaacaaagtattattgcacagttattgatgcgcctggacatagggatttcattaagaatatgattactgggacatcccaagctgact

SEQ ID NO: 270576 - DNA, 251 bp, Glycine max
agcacagaacagttgaagtgaatggcataaaaatgcatgttgcaaagaaaggagagggtccagtggtgttgttcctccacggcttccctgagctctggtactcatggcgccaccagattctctctctcagctccctcggctaccgcgccgtcgcttccgatctccgtggctacggtgacaccgaagcaccaccttcaatctgcagctacaactgcttccacatagtgggtgatctcgttgcgcttattgac

SEQ ID NO: 270577 - DNA, 354 bp, Glycine max
  unsure (1)..(354): unsure at all n locations
gattctcttacacaacagggacgagggttattctgggcctacggaaccattggcgtggtgggaaggggaaacgatcttgggtggtaaggatgcactgggcggtggaacatggttgggttcgacaagagacggtaggatagcgtttcttacaaattttagggaagttgagatgctttcgaatcccaagaccagaggggacttgccccttcgttttcttcagggcaataagagtcccgaggagtttgcggagcaagttgtgaaagaggcagatgagtataatggctttaaccttgtattagctgatatttgcacctncagcatggtttatgtctttaatagaccaaaccaagatca

SEQ ID NO: 270578 - DNA, 250 bp, Glycine max
tattaagcacatgttgtcaaaaccgattttacacagtagaattggaaagtgggctttagcattaacagaatattctttaacgtacaagcctttgaaatctgttaagggtcagattgtggctgattttattgtagatcattcattgatcgagatgctgcaagattatgtcgatacagagccttggattttgtatttcgatggatcgaaacacaaacatggaactggaattggagttttaataatatccccc

SEQ ID NO: 270579 - DNA, 220 bp, Glycine max
caacgggggaaagagaagtctagtagtagtaggggtaaatcaatgttttacgaagctcgcgtcggatacagcattcaatacgttagaccaaacggtggaatcaagaaattcatatctgctgcttactctaactgttctcgcaaaccatgctgatacacatccggattgatagttcgttgcatgcaaccatagttttattaggattttttcttctttggtt

SEQ ID NO: 270580 - DNA, 291 bp, Glycine max
ggtaacaaccaagtgatatgcaaggttgatgctgcaagtgaatcctcaattcttgacactgatttgacagttttagctagcatgcttgtggatcaaggtgtggatgagaggaagcaaattgaggaagcagttgagagagaccaacgtgtgagtgatttcttcgtctatggtgtcaacttgacatttctagacttacaagaaaccaatgtgtatgacttgcaattgaagggacacacaccaaagtttgtttactacacccttcaaggtgttggagatgaaggggttgttttg

SEQ ID NO: 270581 - DNA, 427 bp, Glycine max
  unsure (1)..(427): unsure at all n locations
cgagaagacgacagagggggtgtgattgtttgttgttgtaactcgntcttcttcttttgttgttctgggtttgtgtttgttttttctctcacctgaaaatgtcttgctgcggtggtaactgtggttgcggaagctcctgcaagtgcggcaacggctgcggaggctgcaagatgtacccagacttgagctacactgagtcaaccaccaccgagaccttggtcatgggagtggcacctgttaaagctcaatttgagggtgctgaaatgggtgtgcccgctgagaacgatggctgcaaatgtggaccaaactgcttctgcaacccctgcacttgcaagtgaagtgttgggagagcaagcttcaagcatagatagcccttaattaggaataatgataaactattaatgtgtcgctaaaaacttatgtatta

SEQ ID NO: 270582 - DNA, 374 bp, Glycine max
  unsure (1)..(374): unsure at all n locations
gctagcagccagagagaggatacctcaggtcactttaatatttttgtcggtgaccttagtcctgaggttacagatgccacattgtatgcttgcttctctgtatatcctagttgttctgatgcaagggtaatgtgggatcagaagacaggccgttccaggggatttgggtttgtttcttttcggaatcagcaggatgctcaaagtgctataaatgatttgactggaaaatggcttggaagtagacagattcgttgtaattgggcaaccaaaggggccagtgccagtgatgaaaagcanacttcagattcgagaagtgtcgtggagttgaccaatggatcatctgaagatggccaaaaaacaaccaatgatgacac

SEQ ID NO: 270583 - DNA, 423 bp, Glycine max
  unsure (1)..(423): unsure at all n locations
gtcagggatcattcacaagattggggagacccttcatgtgggagggcacaagaaggaggaggagcataagggtgagcaccatgctggagaatacaaaggggagcaccatggtgaacacagtagtgagtacaaaggagagcatcatggtgaacacaaagctggagagtaccatggtgagcacaagccagagcacaaagaggggttcctagacaaagtcaaggacaagatccatggtgagggcggcgccgccgagggcgagaagaagaagaaggagaagaagaagaaggagcatggccatgagcatggccatgacagcagcagcagcagtgacagtgattaaactgctgcatcacctatatatttaaaagggttatgggaccatagtagcgagggctgtgccntaanttctctctctctctctct

SEQ ID NO: 270584 - DNA, 420 bp, Glycine max
aggaagacgtggaaatgattctagagaatcttccagctcaaaggcagagcatgcttttctctgctaccatgcccagttgggtgaagaagttggcgagaaaatatttgaacaatccactcacaattgatttggttggtgatgaagaggaaaagcttgctgaagggataaaactttatgctatagcagccactgccacttcaaagcggacaattctttctgatcttgtaactgtttacgcaaagggtgggaagactatagtttttacacagacaaaaagagatgctgatgaagtatcattgtcattaacaaatagtataatgtctgaagcactgcatggtgatatatctcagcatcagagagagagaacactgaatggtttccgtcaaggaaaattcacagtgctttgtgccactgatgttg

SEQ ID NO: 270585 - DNA, 332 bp, Glycine max
gaagcatcaactaacgtaaaatcttctgccccaccctgcatttcagcagagtgattctgttcactacaatgccatcatcactatcctctttcctccatatggttcctattctctcccttcttgtactctcatgtgtgatttgttctagtagtgctcagggaccaccttcacctggctactaccccagttccaaaattagtcctgttagtttttatcaagggtttagaaacctatggggacctcagcatcagaggctagaccaaggctcattgacaatctggcttgactctaactcaggaagtggattcaagtcacttcactcttatcgatct

SEQ ID NO: 270586 - DNA, 395 bp, Glycine max
ggacctagtgtgtgattggatggtgttgtaactcgaccttcttcttttgttgtgctgtgcttgggtttggtttttctctcacctgaaaatgtcttgctgcggtggtaactgtacttgcggaagctcctgcaagtgcagcaacggctgcggtggctgcgcgatgtacccaaacttgagctacactgaatcaaccaccaccgcgaccttagtcatgggagtggcacctgttaaggctcaatttgagggtgctgaaatgggtgtgcccgctgcgaacgatagctgcaaatgtggaccaaactgatcctgcaacccctgcacttgcaagtgaagtgttgggagagcaaactctaatcagagatagcccttaatttggaataatgataaactattcatgt

SEQ ID NO: 270587 - DNA, 356 bp, Glycine max
tgccagataaaaaagattttggttatagttttccttgcgatggcccgggacgaggcggtacttgcgatatttcggcttgggacgcattttatttggcagttttctggatgttaaataccattgggtgggttactttttattggcattggaaacacattacactatggcagggtaatgtttcacagtttaatgaatcttctacctatttgatgggatggttaagagattatctatggttgaactcttcacaacttatcaacggatataacccttttggtatgaatagtttatcagtctgggcatggatgttcttgtttggacatcttgtttgggctactggatttatgttcttaatt

SEQ ID NO: 270588 - DNA, 400 bp, Glycine max
ggtaggcaaagagagagagagaaaagcgtgaatcatgtcggacgaagagcatcacttcgattctcaggcggatgcgggagcgtccaagacgtatcctcagcaggctggtaccattcgcaagaatggctacatcgtcatcaaatccaggccttgcaaggttgtagaggtctctacgtcaaagacaggcaagcatggacatgcaaagtgtcactttgttgcaattgatatttttaatgggaaaaagcttgaagatattgttccatcatcccacaactgtgatgttccacatgtgaatcgcactgactatcagcttattgatatctctgaagacggctttgtgagtctgttgactgataatggaaataccaaagatgatctgaagcttcctactgatggggca

SEQ ID NO: 270589 - DNA, 443 bp, Glycine max
cgaaagacgacagaaaggtgctcacttgctgggatatttgtgacttcatgtccaatattattggtgactctttccatttgtcgattgattaactcattgggaaccacagataaaagctccaagtcttgggcttccaattggatcactttgttgttcatctcttatgaaactacgcttcatgaaacaaacattaataattcttatttatgtttttatatcaaaaaaagaaggggatcttaatatacttcatcctttattcaataccccgaatgaccttgtaataacatatcttgcacttgcatgacgaaaattaaataactccttgtagttatgaggagtgtttccaatccatccattaagatgatatctaggccctcgatcaggagctaaaaattcaggccatttgtataccccacatgcacaagaatatatttacctacgat

SEQ ID NO: 270590 - DNA, 397 bp, Glycine max
ctctccttcagttcgctccacacccgaatcccattctctcaatcaaatcaaaactggggctttccaaaaaccaaaggcaataacagctcggacgcttgtaatactttctgctcttgctatgatcttaatccaaccagctattgcaccagcagcttttgctacctttcaaactgctgccaagaccggtggtcctgctgctgcagttggtagaaaactaatccatactgagctcctaagtagtgcttggactggtttcttagctggctgcttgcacaccttatcagggcctgaccacctagctgcctaggctccattgtcaatcggtcgaacacgaatggagagtgctgctgttggggccctttggggttgtggccatgatgctggtcaagttcttttt

SEQ ID NO: 270591 - DNA, 397 bp, Glycine max
  unsure (1)..(397): unsure at all n locations
caacgccgatgccgatggagctggagctaggttcaacaactatccagcgatccttcaacacgcgctacacgcgccacgcgcgcgactcgctcgacgaattgcctgacagcttcaccatcaccgacccctccatccctggccaccccatcgtcttcgccagcccgggcttcctcaagctcacgggctacgcggcccgtgaagtcctgggccgacccgccgccatctttcagggcccgcgaacttcgagaaaatccgtcattgaaattcgcgaggccgttagagaggagcgaaacgcgcaggtcgttctgctcaactaccgcaaagacggcacgnccgtttggatgctttttcgtgtttgccccgttttcagcagcgacggtggcgccgtcgtgcactt

SEQ ID NO: 270592 - DNA, 414 bp, Glycine max
ggggaagaagttgagtctgatcgactcaacctcaaccttctcctggttcctgcattgcgttgctctctctataccttctaattcccaaatttctagggtttggtacagagagaaaaaggaacataagatgtctcaaaacgggaagctgatgccaaatctagaccagcatagcaccaagcttctcaatctcactgttcttcaacgaatcgacccttttgtcgaggaaattctcatcaccgctgcgcatgtcaccttctacgagttcaacatcgacctcagccaatggagccgcaaggacgttgaaggatctctcttcgttgtcaagaggaacacgcaaccgcgatttcagtttattgtgatgaaccgtcgcaatactgaaaatttggtggagaatctcttgggcgatttcgagta

SEQ ID NO: 270593 - DNA, 342 bp, Glycine max
caacgggggggcggagaacggacccaaaactagaggctccgtcccgtcaaaccttccacgctgctctgcgtttccaatcaagggaataatatttcttaaagatattgcgaaaccatggatcacgccaatcctatgatttttgtgggcggaattcgtaggaaccgtgtctccttctgttgctttctagcaccagctccaacattctatcgcgtttgctagaagaaaaccacggaaggtgtacaagcactttcttacgtggctgcactctttacttcaatgcttagcgatatgttatgcttacatacagacgggcgaaatacttctcatcaccattaacgcatt

SEQ ID NO: 270594 - DNA, 393 bp, Glycine max
ggttctagtgtgtgattgtttgttgttgtaactcgttcttcttcttttgttgttctgtgtttgtgtttgttttttctctcacctgaaaatgtcttgctgcggcggtaactgtggttgcggaagctcctgcaagtgcggcaacggctgcggaggctgcaagatgtacccagacttgagctacactgagtcaaccaccaccgagaccttggtcatgggagtggcacctgttaaggctcaatttgagggtgctgaaatgggtgtgcccgctgagaacgatggctgcaaatgtggaccaaactgctcctgcaacccctgcacttgcaagtgacgtgttgggagagcaagcttcaagcagagatagcccttaattaggaataatgataaactattaat

SEQ ID NO: 270595 - DNA, 137 bp, Glycine max
caactttctgttgtgtgtgtgtgtgtgtgtgttcgagtctgtgtatgtgtgtgtgcgtgtgtgggtgtgtggctgtctgtgtttgtggttgtgtgtgtgtgtgtgtgcgtgtgtgtgtgggtatgtaagtgtgtgtg

SEQ ID NO: 270596 - DNA, 411 bp, Glycine max
ggttcacatccgaatccacaacacactgttaataattattctgattcacgaaaaacaggaaaaccccaaaactctctttgttcacaatgggcacagagacctcatcggtagatatttcggaacccctgctcttggatcctcacgggaacgaggaaaaggaagagtatttgcgcgaagaggttccggagtggaaggagcagataacgataagagggttggtggtgagtgctgtgttggggagcttgttctgcatcatcacccacaagctaaatctcaccgttgggatcatcccttctcttaatgttgctgctggcttggtggggttcttctttgtgaggacctggactgggttgttgaccaagatgggatttttcaccaagccctttactaggcaagagaacactgttattc

SEQ ID NO: 270597 - DNA, 351 bp, Glycine max
caccactcagggtctagatggccttggtcagcgttgtgccaagtactacgaagctggtgcacgttttgccaaatggcgtgcagtgctgaagattggtcccaacgagccatctgagctgtctatccatgagaacgcctatggcttggctagatacgctgtcatatgccaggagaatggcctggttcccattgttgagcctgagatccttgttgatggacctcatgacattcacaagtgtgccgccgtcaccgagcgtgtccttgcagcatgctacaaggctttgaatgatcaccatgtccttcttgagggtaccctattgaagccaaacatggtcacccctggatcccaatc

SEQ ID NO: 270598 - DNA, 327 bp, Glycine max
ggttctagtgtgtgattgtttgttgttgtaactcgttcttcttcttttgttgttctgtgtttgtgtttgttttttctctcacctgaaaatgtcttgctgcggtggtaactgtggttgcggaagctcctgcaagtgcggcaacggctgcggaggctgcaagatgtacccagacttgagctacactgagtcaaccaccaccgagaccttggtcatgggagtggcacctgttaaagctcaatttgagggtgctgaaatgggtgtgcccgctgagaacgatggctgcaaatgtggaccaaactgctcctgcaacccctgcacttgcaagtg

SEQ ID NO: 270599 - DNA, 386 bp, Glycine max
tatcttggttgggatgcttgacacatacttaaatgtcttggctttgtggcttctgtttcttctttttgctagttgggtggcatatgtgttttttgaggatacaatacaggggaaaacagtattcacttcctatggtactacgttgtatcagccatttcttttatttaccacatccaataatccagatgtttgggttcctgcatacaagtcgtcacgttggtattgcctgtttttcgtactctttgtgctggtgggagtttactttgttacaaacttgatccttgctgttgtttatgacagtttcaagagtgagcttgtaaaacatgtttttgagaaggatcgtttgagaagaactatgttggacaaaagctttgatctcttggata

SEQ ID NO: 270600 - DNA, 357 bp, Glycine max
  unsure (1)..(357): unsure at all n locations
gaagtaagtgaatcgatcaagtacccaaactctaaagaaagatcattatttatggtccaagaccatacatattgataaaaagaactattattgatttgatgaatagacaaatcaagcgaaaacatcataactatagttaacaataaaatactaggaaaagcccacatacggcgaagatatttggttgctgtcggaaaaagtagaagtcccactcctattaacataggaactggaaatggaataaaaagtatgatccatgaatattgatgtgtatattccatacaataaacaaaaaaattatgattctaatgaattttgtttcttattcgtcggnttttattttatcttttttggaaa

SEQ ID NO: 270601 - DNA, 389 bp, Glycine max
gataccaaaaacaaaacacaagccaagtgaaagtgagaaaaaataaaaatcaaagagcataatgtcagggatcattcacaagattggggagacccttcatgtgggagggcacaagaaggaggaggagcataagggtgagcaccatgctggagaatacaaaggggagcaccatggtgaacacagtagtgagtacaaaggagagcatcatggtgaacacaaagctggagagtaccatggtgagcacaagccagagcacaaagaggggttcctagacaaagtcaaagacgagatccatggtgagggcggcgccgccgagggcgagaagaagatgagggagagaagaagaggagcatggccatgagcatggccatgacagcagcagcagcagt

SEQ ID NO: 270602 - DNA, 393 bp, Glycine max
tgcattatgttagtttaatctatttatgtatttagtccataatggtgggtaatgtcacatgagtcaagtgcgagaatgctagaattaatgtctcatgtgagagacatgtgacttatatataaactaataaataaataaataaataaataaataaagactaaattgtaattggattaaatatgagaagtttctaaagataactgctacttaataggagtggtgattataaaggggttaatactcactaacgtgaaacaagtccccttcttgacagaaaggattctctctaatctatagtcatcacaaatgttgacaagaaagaatatttaagaaagcaaaatcttgtttctctcctcttccaaggaatcaaagtgtaccaaagagaagtctcac

SEQ ID NO: 270603 - DNA, 423 bp, Glycine max
aggcctacaaagcacccataggaatgtctccttatcgggttgtctttggaaaggtatgtcatcttccagtggagattgagcataaagcatattgggcagtgaagacctgcaacttctctatggatcaagctggtgaggaaagaaagttgcaactgagtgagttagatgagatccgcctagaagcgtatgagaatgccaagttctacaaagaaaagaccaagaagttccatgatagcatggtaattaagaaggacttcatggttgggcaaaaagtgttattgtataattctaggcttggactcatgagtggtaagttgaggtctaagtggattggtccttttgttgttactaacatttttccttatggtacagttgagataaaaagcgactccacaaataagagcttaaggtcaatggacaccg

SEQ ID NO: 270604 - DNA, 380 bp, Glycine max
ttacaaacttctgtgggctcactatcgtgacaccatgaacattaattcacttgcccgcaaatccttggtcaatgccgacggtattatagagaaaacattcttgtggggtaggtactctttggaaatgtctgctgttatttacaaggattgggttttcaccgatcaagcattgcctaatgatcttgtcaagagaggagttgctgttaaggatccatctgctccccatggagttcgacttttgatcgaggactatccttatgcttctgatgggctagagatatgggatgctatcaagtcttgggtggaagaatatgtctcattctactacaagtcagatgaggaacttcaaaaagaccccgagctccaagcttggtggaaag

SEQ ID NO: 270605 - DNA, 406 bp, Glycine max
gatccacacgctcacaataacacactgtcaccgttccgttccgttttcctctgttttttttttctttctttcaaatccccgcttcgtggaaatcccgaaccagaaaccatgcttctccgaaccgctgctgcttctgcttcgtccctctccctcttcagcccgaacgccgaacctccccgttcggttcccgctcgtggattggtggttcgcgcagcgaaaggatccacgaaccaccgcgccctgaccggagtgatttttgaaccgttcgaagaggtgaagaaggagctcgatctcgttcccaccgttccgcaagcttctctcgcgcgccaaaaatacgttgacgaatctgagtccgccgttaacgaacaaatcaatgtggagtataacgtttcgtacgtttaccatg

SEQ ID NO: 270606 - DNA, 418 bp, Glycine max
ggactctccgctggagttggagttggcaacgccttggtgttggagatcgtgatgaccttcggtctggtgtacacggtctacgcaactgccattgaccccaagaagggtaatttgggaattattgctcccatcgccattggtttcattgtcggcgctaacattttgttgggtggggccttctctggagcggccatgaaccccgctgtgacatttgggcctgctgtcgtgagctggacctggaccaaccactggatctactgggccgggcctctcatcggtggtggaatcgctggccttgtttacgaggttgtctttatcagccacacccacgagcagcttcccaccactgactactagagggggggaaatgaaaataaaaaaaaaaatgtgtattattgaaattctctggaatcttctt

SEQ ID NO: 270607 - DNA, 362 bp, Glycine max
tacggctgcgagaagactacagaagggaacgcagtcctttttctatttgtatgtttgtatgagactgagaaagatagagagatagtgtgtgcagaagatgtggctattcggcagaaaaggggcttctgggttttcatcatcatccactgcagagcaagtcactgaaggaattgatggaactggtttcactgccattgtcacaggggcatccagtggtattggcactgagactacgcgtgttcttgctttgcgtggtgtccatgtgattatgggtgtgagaaatatgcttgctgctaaagatgtcaaagaaacaatactcaaggagattccctccgcttaaagtgatgccatggagttagatc

SEQ ID NO: 270608 - DNA, 374 bp, Glycine max
acagaaccaatcttacaccagacattacttattttatctttgacacttcaacaatgtttaaaaccttcaaatacatcatactctttggtagagattccgctggttattcggcgaggcagtttgccaaacaaggcgttaaaccatggtagttggctatcatttctaaagaagcggtagcaccttatgaacaaccttctctcaacaatgcttacctttttccacagtcccctgctaaactttctcttttccatgtctgtctttcaaattgatgacaaaggtttcttcctcattcgtacacacagaaaaggatagtattaattcttatcacacaaatagttaatgtataccttcctgcaaaatctcttatcattgct

SEQ ID NO: 270609 - DNA, 409 bp, Glycine max
gaattcgtgatttttatatggagataagttttcattttgagagctctgttattccttttattgggcgtatagctccttcagatacttatcggatttggaagcgtgggtctaatcttcgtgctgatatgacccttgctggttttgatggcttacgcatccagcgatcggaccaaacatttttgttccttggagagggctatgttgcagaggaaggtaatttaactctgccacctggttctttgattgctctttctcataaggagaaggaaatcacaaatgctttggaaggagctggtacacaaccaacagagtctgaagttgcttatgaagtttccttgatgtctcagacaaatatgtatagaccaggtattgatgttactcaggctgagcttgttccccatttaaattg

SEQ ID NO: 270610 - DNA, 455 bp, Glycine max
  unsure (1)..(455): unsure at all n locations
aactcctatgtggtcctttcattttacaggagtttggtggaacaagttcctcggatggacgaagcctatanggtnntttcttatttgatgatagtgaccgatattnnngatgatagttaccgaaatagtgagcgatatcgaccccgtcgaccttgatatggagcgtnnngagcttctatactatgtatgaataccgctatactanntggatatgatgcgcacgaaatagaaccgacttttattatcanncctttcaattcgannattagcaaaagccaatgtgcttccttgcatttaatatggatgtccaaacatccanntgatctggagtgtgaatgagtcgaattacttatnccctcggtcttttagtgaactatctctccacggattgtgaaagatgttctactagaaatattcttgttattgcttcgactcatattccccaaaaagtagat

SEQ ID NO: 270611 - DNA, 416 bp, Glycine max
gattcataaatcttagttactttatcagtatcattcattatcactacgattgttctaaaagcaattattactcttgagaagaattaaaagatcatcatcacaataacaagatgagttcaggaattagagcatggagtgtggcagctagtgttggagttgtggaggccttgaaagaccaaggcatatgcaggtggaatcatgctttaagatcagctcaacaccatctcaaaaaccatgttggctcattctctcaggctaacaagctttcttcttctgctatgatctccacaacactaaaacatgagaaggcaaagcaatcagaggagtccttcagaactgtcatgtacttaagctgctggggccccaactagatatcataagtccaataagaaaatattctttctcttttaatttct

SEQ ID NO: 270612 - DNA, 406 bp, Glycine max
ggtggcagagagcgaacccaaaactagagctaccttcccttcaaaccttccactcttctctccttttccaatcaagggaataatatttcttagagatattccgaaaccatggctcacgccaatcctatgatttttgttgttagaattctaggtaaccttgtctccttctgttgctttctagcaccagtaccaacattctatcgagtttgtaagaagaaaaccacggaaggtttccaatcacttccttacgtggctgcactcttcacttcaatgctttggatattttatgcttacataaagacgggcgaaatacttctcatcaccattaacgcattcggttgtttcatagagacagtttaccttgtcatctatatcacttattgccccaagaaagctaggttcttta

SEQ ID NO: 270613 - DNA, 92 bp, Glycine max
gaatggtccggtgaagtgttcggattgcggcgacgtgagcggttcgctgcccgcgacgttgtgagaagtccactgaaccttatcatttagag

SEQ ID NO: 270614 - DNA, 346 bp, Glycine max
  unsure (1)..(346): unsure at all n locations
agctttttcccattgatcatggtctttgtctccctggaactttggaagatccttattttgaatggatctattggcctcaagcatcaattcctttctcagatgatgagctcgactatatatatcacctagacccatttcgtgattcagaaatgcttagaatggagcttcccatgattcgagaagcatgcttgcgggttttggttctctgtactatcttcctcaaagaagcagcagcttttggtctttgtctagcagagattggtgacatgatgagtagggaatttcagggtctccatgaagagccaagtgagcttgagcttatctgtattgaagcanagaaactttt

SEQ ID NO: 270615 - DNA, 310 bp, Glycine max
  unsure (1)..(310): unsure at all n locations
aagtgagtgtgttgatcnanataactagaaacagtgtgatgaaaatgaaggtccttgttttcttcgttgctacaattttggtagcatggcaatgccatgcgtacgatatgttccctctccgaatgaacactggctatggtgcccgtactccggaggtgaaatgcgcaagttggaggcttgctgtggaagcacacaacatctttggctttgagaccattcctgaagagtgcgttgaagcaacaaaggaatacatccatggcgaacaatatagatcagacttcaaaacaatttaccaacaagcttactttta

SEQ ID NO: 270616 - DNA, 407 bp, Glycine max
gatggcagaggctgcgcacagtttgaactttgaacgttgaaggaacatagaggcagaggtttttcttctctcaccgtagaatcgaatcgagttcactttgatcgtgtgtgtctccgatcttcaaatccgcaacaaccatggtgaggggattgctcaacaagctcgtctctcgctccctctccgtcgccggaaaatggcagcacaaccaactccgccgcctcaacatccacgagtaccagggcgctgaattgatgagcaaacacggagttaatgttccgagaggcgtggctgtttcctctgttgaagaggtcagaaaggccatcagggaccttttccctaatgaaaatgagttggtggttaagagtcaaattttagccggtggaagaggtttgggaactttcaaaagc

SEQ ID NO: 270617 - DNA, 349 bp, Glycine max
  unsure (1)..(349): unsure at all n locations
aggggtgtgagagagcgagcgagcgagcagtttcaaagagaggatttgggattgggaaagcgagggattgcgctgcgtctcttcctcttctctttcgattcatccctcattcataatcttncaatccaacaacctcagcctcacactcacacatacacacatctgaacgcgtatcgtccctcccatggcttcaaagcgcatcctcaaggagctcaaggacttgcagaaagacccaccaacttcttgcagcgctggtccagtagctgaggacatgttccattggcaagcaacgattatgggtcctgctgatagtccttatgctggaggtgtattcctagtcactattcac

SEQ ID NO: 270618 - DNA, 335 bp, Glycine max
  unsure (1)..(335): unsure at all n locations
ctttgacagtcgtggcaatccaaccgtcnaggtggatttgacatgctccnatcgtacttttgctagagctgctgttccaagtggtgcatccactgggatttatgaggcccttgaattgagagatggaggatctgactaccttggaaagggtgtatcaaaagctgttgacaatgtgaacaccattattgcccctgctttggttggcaaggacccaactcaacagactgctattgacaacttaatggttcaacaacttgatggaactgttaacgaatggggttggtgcaagcaaaagcttggagcaaatgccatattggcagtgtctcttgcagtct

SEQ ID NO: 270619 - DNA, 421 bp, Glycine max
ggcacaaaaaatggagttctacacaaggccaaataggagtgacatccacctctcagcagaggaagaagccaccatagaggcaaagaccagagactactttgatggggttgcaccacaacgccacacaaagcctcaacgaagtgagtattcagctcaatatgtggatgctttctccaatgcccatcactcttcttcttcttcttctataccagaattcatgcaattccaacgcctcgagaatgatccccaagagaagaaattggagtacaatggaagtcaagtaccggaagaatttgtggaaacagagtattaccaagatctcaacagcgtggacaaacaccaccatacgacgggaacaggatttatcaaagtagagaaaaatggaaatgactttcacatagaaccagataatgacactggg

SEQ ID NO: 270620 - DNA, 391 bp, Glycine max
ctccacctagagggaaatggctcccaaaccgcctagtacgggtctgtttgttggactgaacaagggtcacgtcgtcaccaagaaggaattgcctccacgcccctcagatcgtaaggggaaaacaagcaagagggtgcactttgtgaggaacctcataagagaggtagccggttttgcaccctatgaaaagcgtataactgagttgctgaaggttgggaaggataagagggcactgaaagttgcaaagagaaagctcggaacacacaaacgcgcaaagaagaagcgtgaggaaatgtccagtgttctcaggaagatgagggctggtggtgctggagacaagaagaaataagtcttatttactgttttccagattcactagatggacctgtgt

SEQ ID NO: 270621 - DNA, 351 bp, Glycine max
ctttgacagtcgtggcaatccaaccgtcgaggtggatttgacatgctccgatggtacttttgctagagctgctgttccaagtggtgcatccactgggatttatgaggcccttgaattgagagatggaggatctgactaccttggaaagggtgtatcaaaggctgttgacaatgtgaacaccattattgcccctgctttggttggcaaggacccaactcagcagactgctattgacaacttaatggttcaacaacttgatggaactgttaacgaatggggttggtgcaagcaaaagcttggagcaaatgccatattggcagtgtctcttgcagtctgcaaagctggtgctac

SEQ ID NO: 270622 - DNA, 383 bp, Glycine max
gaatgtttcatttattaggagtttttcactcttagttatatcatttgatttttctgtcacttctcttatttgattatttcatgttgctatctagtgaagttttcccgatcctggtcttgtatttgtcttcctcagaaataaatacctcatgtttaacttattttcaggggacaagctgagaaagaatttaaagtagaggtagaagcaattggtcgagtgcgacacaaaaatcttgttaggttgcttggatactgtgtcgagggagcctacaggatgcttgtgtatgagtatgtagacaatggcaatctagaacaatggctgcatggggatgttggagctgtaagccctttgacatggaacatacggatgaacattatattggg

SEQ ID NO: 270623 - DNA, 399 bp, Glycine max
gcttcgagttatattgcccaaaaagtagatgcgggtgtaatagctacgagttggtcaaatacatgcattaagatacgaaggcttattatttcacaacagcgaaaacactatgtcactatttcatatactaggggatttcacttggaaaagaaaatgttccatactaatggattcgggtccacaacgatgggttcaaatgtacgagatcttgtagcacttaccaacgaggacctatcgactagtattatacatcaaaaatccatcatagacactaatataatgagatctgttcttcatagacaaacttgggatttccgatctcaagtaagatcggttcaagatcatgggatccttttatatcaaataagaaaggctgtttcacaggatgtacttctaagt

SEQ ID NO: 270624 - DNA, 414 bp, Glycine max
gcttttcaatatcaatatcttgattttaattcatgtcatgcaagatcaccaattgattcgttcttaaattactggtattgcagcaaagccagcacctatggcatcatctagcaatgtttttccgtgatgagctactgtcttggtcttggagaagaccgcttgggatgcccattgcctctatggctgcaggtggtactatgagccctgttgacttcaaacagaaagttatcacaaatgtggaacatgttattacaagggttaagggaattgctcctcagaatttttctgaagaggtgagcaactaacaaaattgcgtgcccttatcaattttctgaaattatttatcctttgctttaatttatttggaaaatctacaatcaggtttcctttctaatagtatttgatagatgaaat

SEQ ID NO: 270625 - DNA, 394 bp, Glycine max
  unsure (1)..(394): unsure at all n locations
gaagcatagcagcatcatacaaagcattgaattcaaaaacttaagttcattccttgggttttgctttcttcctcaaaaccaaacatgtcgaacacatgccgcaactgggactgggcttacaagactagctgcaccaagggaaacagctatggtgttattgtagagactgagaagagttacatcgagactgttgtcatggatgttccagcagctgagcatgatgggaagtgcaagtgtggcactaactgcacttgcacggactggacctgtggccattaaggaatatgtatgaaaatgtaattgccatgtgtttggcaatacaaatatccaaataatgtaatcttcgtatgaataaatgtgtgtgctgttatccgaaaaaaaaaaaangtgancc

SEQ ID NO: 270626 - DNA, 361 bp, Glycine max
caaggtcattcctggtgctgctgacaagccaatgatcgtggttaactacaagggtgaagagaagcaatttgccgcagaagaaatctcttccacggtgctcatcaagatgcgtgagattgctgaggcttacctaggctccacagtgaagaatgctgttgtcaccgtccctgcttacttcaatgattctcagcgtcaagctaccaaagacgctggtgtcattgctggtctaaatgtgatgcgaattatcaatgagcctactgcagctgccattgcatatggtcttgataagaaagccacgaatgttggtgagaaagaatgtgttgatttttgaccttggtggtggacatttgatgtgctttac

SEQ ID NO: 270627 - DNA, 352 bp, Glycine max
ggtgctctgctcgtgcctctagggatatcggtcctggatttacatttgggctgggactttacaagaatcgtaagctatgggaaagtcttacccaactgtgagtgctgattaccagaaggccgttgagaaggcgaagaagaagctcagaggcttcatcgctgagaagagatgcgctcctctaatgctccgtttgtcatggcactctgctggaacctttgacaagggcacgaagaccggtggacccttcggaaccatcaagcaccctgccgaactggctcacagcgctaacatcggacttgacatcgctgctaagattttggagccaactaatgcctaattccctattttgagc

SEQ ID NO: 270628 - DNA, 328 bp, Glycine max
gatctacactcataaatcattacatggtcatagtctacacctaattagccaaacacaccacagcaccaaactagttggctcaattctctttgaatggctttggaggctttgaattcaccaacagcagccaccactcccttccgtggttaccaagaagaggaggaggaggttgaccttcacctacgcgagccttgggccaagagaaaacgctccaaacgacctcgttttgagtcggaggaagagtacttggctctttgcctcatcatgcttgcacaaagcggtaacaacaacaacacccaattaccgtcttcgtcacagtcacacaaag

SEQ ID NO: 270629 - DNA, 357 bp, Glycine max
gaagtgtggaggtgcgtgcttttgtgggggcaaagggtagatagtcgatctgtcgcagagcaaagaatcgtcggcgactgcgaagctgcactataaccgcgattaactatgattagccttcgccggagcgtaaacaagatcccggcgaaatcgaagcgattcaaatgccgattggtgaagttcgaggagctgccggagtacttaaaggacatcgagttcatattggactattaccgctctgaatggcccgtgaaggaagccttgtggagcatcttcgcgtggcacaacgaaaccctaaacatttggacgcatataggaggatttctcatattcgccgtgttggcgtcgatgagcacc

SEQ ID NO: 270630 - DNA, 384 bp, Glycine max
gacccaacgaatttgcaaaactcaaacgaatacgtgttctctttctcttcaatttcacccttattagcatagcatattcatttccctttcttgaatcgttgtaagcgcattgcgattttgcccttatctttatttcaattttttgttctgtttttgttattcatttgggttaatttcgattcgaagcttaactgcgagaggggatatcagagaagttgattggcctcccattaataacagatctgaatgatctgatggagtctaaaggtgggaagaagaagtcgtctagtagtaagtcctttttgtacgaagctcctctcgattacatcattgaagacgttcgaccacacggtggaatcaagaagttcagatctgctgcttact

SEQ ID NO: 270631 - DNA, 375 bp, Glycine max
gacccaacgaatttgcaaaactcaaacgaatacgtgttctgtttctcttcaatttcacccttattagcatagcatattcatttccctttcttgaatcgttgtaagcgcattgcgattttgcccttatctttatttcaattttttgttctgtttttgttattcatttgggttaatttcgattcgaagcttaactgcgagaggggatatcagagaagttgattggcctcccattaataacagatctgaatgatctgatggagtctaaaggtgggaagaagaagtcgtctagtagtaagtcctttttgtacgaagctcctctcgattacatcattgaagacgttcgaccacacggtggaatcaagaagttcagatctg

SEQ ID NO: 270632 - DNA, 345 bp, Glycine max
gccgctcttctatcgctactggctcgacttccggaaggtccttcacgactggttccggaagcgacgattccaacccggtatcatgtccgagttgactcggtcaattaagcttccaattgattcacacaacaacaacaaactacaaaccaataacacaaataaaaacaaatactcttcttgtgccgtagttggaaacagtggaattttgctgaatagaaactacggtagtgaaattgattcccatgaggttgtgataaggttaaacaacgctagggttgatcactttgaaaccaacgttgggaaaaaaactagcatttcattcatgaatagtaacatcatgcattt

SEQ ID NO: 270633 - DNA, 378 bp, Glycine max
ggagtttcaacattcaacaatggtacctcaagctttgtcagtgcctgcgagtgccagcttcactatcgcttctcgcaccagaagtccctcccacctcgtattttctcacagaaacccgtgctcgatagcttcttccttaccaaacccatatggccattcatcaggagttgggttatcaagtaaaagccgtggttttcctttaaaacttgatgagaaaaatatccatggtgcgagtacaagttatggtgcaattgaagccaagggaaatccaccaataacacccgcagtgatgactcctggaggacctcttgatctctcatctgttttgtttaggaatcgtataatattcataggacaaccagtcaattcacaagtggc

SEQ ID NO: 270634 - DNA, 264 bp, Glycine max
gggttctagtgtgtgattgtttcgtgctgtaactcgttcttcttcttttggtggtccggggttggggttggtttttctcttaacttgaaatggcttggttccggggtaacttggggttccggaacttcttgcagtgccggaaccgcttgcgaagcttcaagatgtacccagactttagcttcacttagtcaaccaccaccgagacctttgtcatgggagtggcacctgtttaaggttaatttgagggtgcttaaatgggtgtgc

SEQ ID NO: 270635 - DNA, 360 bp, Glycine max
gggttctagtgtgtgattgtttgttgttgtaactggttcttcttcttttgttgttctgtgtttgtgtttgttttttctctcacctgaaaatgtcttgctgcggtggtaactgtggttgcggaagctcctgcaagtgcggcaacggctgcggaggctgcaagatgtacccagacttgagctacactgagtcaaccaccaccgagaccttggtcatgggagtggcacctgttaaggctcaatttgagggtgctgaaatgggtgtgcccgctgagaacgatggctgcaaatgtggaccaaactgctcctgcaacccctgcacttgcatgtgaagtgttgggagagcaagcttcaagcagagat

SEQ ID NO: 270636 - DNA, 344 bp, Glycine max
gaacaaacacaaattttatgtgattagtcgcggtattcagaataaaaaatgaaagtagacaaataaaaaaggaaaggagatgtttgaataaaaataattccccttcaagttcttattttttgagaggacaggacaatctgaatgttctattatgctctatcaacacattaaaaagattatatgatatatctgctgtggaagtaggtcaacatttctatcgtcaaataggcagctgccaagtacatgcccaagtactcattacttcttgggttgtcattgccctattattgcattcagccatcctacttattctaaatctgcagaccttgcccgttatcggtcac

SEQ ID NO: 270637 - DNA, 411 bp, Glycine max
ggaaacgaagaagccctaactccgcacgcattcgggagaaaactcaatattcgtcgctcatggcactctcttctcgtctcttttccaaatccaaattgatctatggcagtcaaatacttctacaaaaggagcatgctattccagttcgtcactttgctaaagagtctgcccctcctgcccttaagggagacgagatgctgaagaacatttttgtggaggtgaagaacaaatttgagaccgccataggaatattaaagaaggagaaaatcaccattgacccagaagatccagctgctgtttctcattatgcaaaggtcatgaaaacaattagagagaaggcaagcttattgtcggagtcccaagacatactatccaccattgaaattgagacacaggatattccagatgctc

SEQ ID NO: 270638 - DNA, 356 bp, Glycine max
gaacccaatccactattataattttttttatctcttctcttctctttcccctcaccaacacgtcatttcatttctttcaaagtcttcccttctctcctcttcctcttcacttcttaaaccgtcgccccttaacgacgccgtttcctgttctctcatgtaagcgcggttcgagaaaaaaaaaaagaaaatccgttattggcgttgttttatttttgtttccggttcggattatttgaatggatcgggcggcgttgacggtcggaccgggcatggacatgccgataatgcacgacagcgaccgttacgatctggtccgcgacatcgggtccggaaatttcggcgtggcgaggctgatg

SEQ ID NO: 270639 - DNA, 303 bp, Glycine max
agaataatatgactatgtaaactactctgccatgggactcttgttctgaacgacttttcaagagaatcaaaccatggcagtcaaagtatacggtcctcactgtgcttccaccaagcggttgctgatttgtctggtttacaaagaagtctaatttgaagttgtccctgttgatgtcactaacggggagcagaacgatcctgagtacctcaaactacacccatttgcagttgatcctgtcatcaaatatcgagattataccttatatgaatctcgtgctataatgatgtattatgcattaaaata

SEQ ID NO: 270640 - DNA, 393 bp, Glycine max
gctcacaaagcattctactatcattattagtcattcctgtttcatatacttcattacattggtcactagtaatcacttgctgcattttctttcctactcttcacccttgagaatttgtcattccgacatggaacttagttttaagcaccattttggccttgcttgtgtcttactactttgagctgctctgtgtagctcacaggactctttcactgactcgagagcaacatattatggtagccctgattgctatgggaatccaaggggagcttgtggctttggcgaatatggaagaactgtgaatgatggaagtgtggcaagagtgtctaggctatggaggaatggaagtggctgcggtgcatgctatcaagcaaggtgcataataccacaata

SEQ ID NO: 270641 - DNA, 403 bp, Glycine max
gactctgcgaaggtgcaacctgacagcctccaaatccaatggcttcagagaagaaactttcgaacccaatgagggagataaaagtgcagaagctcgtcctcaatatctctgttggcgagagtggagatcgtctcaccagagccgccaaggtgttggaacaactgtatggccaaaccccagtgttgtccaaaggtatgatccgttaactggcatttatggaatggactgctttgatgttctggagcgttctggctatcgagtctgacgccgacgtatgtgcaagtcccgtgttggaattcagcaccgtgtcacaaacgaggatgctatgaagtgtgtccatgtgaaacatgatgcagagatccgtaacgagatccaggcgatcgttcagctagagcgagttcac

SEQ ID NO: 270642 - DNA, 375 bp, Glycine max
gaacacaagttcgtcaacgttggtgctctcaagcgccacgtcgcagaaaccggaaccggtccaaacgccgtcgtattcctgcacggcttcccggagatatggtactcgtggcggcaccagatgatagctctcgccggtgccggattcagagcggtttccttcgattacagaggttacggtctctccgacccgccacccgaacccgataagacctcttggtccgatcttctcagtgatctccttcatattcttgatgctcttgctctttctaaggtgtttcttgttgggaaagactttggagctcgtcctgcatatctattttcaattcttcaccctgaaagggtcttgggagttgtcacgttgggagttccatat

SEQ ID NO: 270643 - DNA, 394 bp, Glycine max
acaagggtcctactctgctagatggacttgaccagatctctgagcccaagaggccttctgacaagcccctcaggctaccccttcaggatgtgtacaagattggaggaattggaactgtgcctgtgggacgggttgagactggtgtcttgaagcctggaatggtggtgacttttgcaccaactggactgacaaccgaagttaagtctgtggaaatgcaccatgaagctctcacagaggctcttcccggtgataatgttggattcaatgttaagaatgttgctgttaaggatctcaagcgtggttatgttgcctcgaactcaaaggatgatcctgccaaagaggctgctaacttcactgcccaggttatcattcatgaaccatcctggtcagattg

SEQ ID NO: 270644 - DNA, 440 bp, Glycine max
gaaacccttgcagattattcagcctgaaggtccaagttttcgtgttaatgggcacttcattgaatggcagaagtggaattttcgtattggattcactcctagggagggtttggttattcattcagtagcctatattgatggaagtcggggacggagaccagtggcccatagattgagctttgttgagatggtggtcccatatggagatcctaatgatcctcactataggaaaaatgcttttgatgctggggaagatgtcttgggtaaaaattctcattctctgaagaagggctgtgattgtttaggctatatcaaatactttgatgcgcatttcacaaacttctatggaagtgttgaaacaattgaaaactgtgtttgtttgcacgaagaagatcatggtattttatggaagcatcaagattggagaacaggtttggctt

SEQ ID NO: 270645 - DNA, 417 bp, Glycine max
  unsure (1)..(417): unsure at all n locations
gcttttcaatatcaatatcttgattttaattcatgtcatgcaagatcaccaattgattcgttcttaaattactggtattgcagcaaagccagcacctatggcatcatctagcaatgtttttccgtgatgagctactgtcttggtcttggagaagaccgcttgggatgcccattgcctctatggctgcaggtggtactatgagccctgttgacttcaaacagaaagttatcacaaatgtggaacatgttattacaagggttaagggaattgctcctcagaatttttctgaagaggtgagcaactaacaaaattgcgtgcccttatcaattntctgaaattatttatcctttgctttaatttatttggaaattctacaatcaggttttcctttctaatagtatttgatagatgaaatgt

SEQ ID NO: 270646 - DNA, 392 bp, Glycine max
ggagtacaacttcacattttagaagaataccccctcttttgctgcatcagaggagttgtaaattaagagcatggctgcacaagctcttgtatcatcatcttctcttaccttctcagcggaggctgcaagacaaagtcttggaccaagatcactccaatctccatttggcttctccagaaaagcctgctttcttgttaaggcagctgctaccccccctgtcaagcaaggatcagacagacctttgtggtttgcatcaaagcaaagtctttcttacttggatggcagccttacgggtgactatggatttgaccctctgggactttcagaccctgaaggaacaggagggttcattgagccgaaatggctagcatatggtgagataatcaatggtc

SEQ ID NO: 270647 - DNA, 398 bp, Glycine max
acgaaaaaaaaagtgatcccccttttcttgtttgtcttatatccatatttatggagatagaattcatgtcataatttaaaaaatgaacatgtataattctttttcgtaatcgaaaatgatgagggagttattgataatttgaaaagagtattttatggaagaattaagttattactcaacaaatttgaatttgaattttttaaaggatgagatcaattcagaagtactttttgtattttttatttatttaaagaaatgttaaaatgtattttattttttctttattaaatgtatttattttaaaatttgtttttttagaacagacagaattcaataggtctaattcagaaccgtccgataaaatcgaatattatctaccttagagatgtatcaaggga

SEQ ID NO: 270648 - DNA, 437 bp, Glycine max
tacggctgcgagaagacgacagaagggggtgcagcagcgaaaatgtcagggaaaggacctggtttcttctctgagatcggcaagagaggcagagatatcctcacgaaggattacaattccgatcaaagattcaccatctcctcctccaccaactccggtctcgacctgaagtcaacactggtgaagagtagaggactttcctctggtgatgtggctgcagaatttaagtataagaacaaggcggttaatgtcaaagttgatactgaatcaaatgtgttgacgacattcactgtctctgatgttgtgccatccgcgaaaaccattgcttctattcgtctgcctgattacagttctggcaaggttgaggttcagtatcttcatgagcatgttgcttttactcttggtgttggtttagaccgctcccctggtattgattt

SEQ ID NO: 270649 - DNA, 369 bp, Glycine max
gacaaggcacaggcttccctccctgctttgaagaaacaaattagaagagtgtgttgcgttgtgttgaagtagcaagctagcaaagatgtttggcatcttaggaggcaataaggggcacaagatcaagggtactgaggtgttgatgagcaagaatgtgttggaacttaacgaaatagtgtccactactcagggtggtttggttggtgctgccaccggcatcttcggtgctgccaccggtattgttggtggagttgtcgatggtgctactgccatcttcaagtacaacattggcattcagttgatcagtgccaccaagactgatggacttggaaatgggaaagttggcaagcaaacctatgtggagaaaca

SEQ ID NO: 270650 - DNA, 426 bp, Glycine max
  unsure (1)..(426): unsure at all n locations
ggattcatattttccttgcgttgccctttcattttccctcactttctcgctcgccaaacgcccctctctctcctccaatggccgaccagctcaccgacgaccagatcgccgagttcaaggaggccttcagcctcttcgacaaggacggcgatggttgtattactactaaggaacttgggactgtgatgcggtcactagggcaaaacccaactgaggcagaactgcaggatatgattaatgaggttgatgctgatggcaatggaaccatcgacttcccagagttcctcaacctgatggctcgcaagatgaaagacaccgactccgaggaggagcttaaggaggctttccgtgtgttcgacaaggatcagaatggtttcatctctgcagctgagctccgncatgtcatgacaaatcttggggagaagc

SEQ ID NO: 270651 - DNA, 180 bp, Glycine max
tatagagaccgaaaggctcgctgggttccctccgacaattaatcaagcagagggtttccaaggggttactggcatttacttggtggtcaatcagaagcttcaagaagaagcactgcttgcaaaatgccttggtagaagaatttgttatcaatgtggaagaaaatttaatattgccttcat

SEQ ID NO: 270652 - DNA, 215 bp, Glycine max
tgaatgctcttgctactgttaatcgatcttcttcagggaataggtccaatccaaggataggtataatgccttgaagttctttgtaacgttctaaaattagctcaactttttaaacagcctcataatattacttaccaacaattcgaggtaagagcataattgacgtcgattctaaaggatctactaattgatagatacctattgccactaattct

SEQ ID NO: 270653 - DNA, 409 bp, Glycine max
  unsure (1)..(409): unsure at all n locations
ttgaaggggttgaatgatgattgcgaacattttgagtcttttccacctggtcacttgtattctagcaaagagagagcgttccgcagatggtacaatcctccatggttctctgaggctattccatctgccccttatgatcctcttgctttgaggcatgcctttgagaaggctgtggtaaaaaggttgatgactgatgtgccctttggtgttttgctctctggaggtttggactcttcattggttgcagccgtcacggctcgctacctggcaggcacaaaagctgcgaagcaatggggaactaaattacactctntctgtgtaggccttgaaggtgcacccgacctaaaggcttgcaaggaagtagcagagcacataagaactgtccatcatgaatttcactacactgttc

SEQ ID NO: 270654 - DNA, 418 bp, Glycine max
ggttctagtgtgtgattgtttgttgttgtaactcgttcttcttcttttgttgatctgtgtttgtgtttgttctttctctcacctgaaaatgtcttgctgcggtggtaactgcggttgcggaagctcctgcaagtgcagcatcggctgcagaggctgcaagatgtacccagacttgagctacactgagtcaaccaccaccgagaccttggtcatggtagtggcacctgttaaagctcaatttgagggtgctgaaatgggtgtgcccactgagaacgatggctgcaaatgtggaccaaactgctcctgcaacccctgcacttgcaagtgacgtgtttggagagcaagcttcaagcacagatagcccttaattacgaataatgatgaactattaatgtgtagcttaaaacttatgcattat

SEQ ID NO: 270655 - DNA, 438 bp, Glycine max
gggaggaaatcaccctgttcgtaaccttcgaagtggccatgttgaaattagtgcccagaaccacaactatgctgttgaccctgccacactgccggaaggagtggaggttactcatatcaatctaaatgatggaagttgtgctggtcttgctttccccgctcaacaacttatgtctcttcaataccaccctgaagcatcccctggacctcatgattctgactatgcttttagggagtttgtagagctaatgaagcaaggaaaaaacagaacacaagaaagtctacaccaactatcagcagcacaggctttggatgcataagtggttgaagggagctgctcttgttcgttcggcgcaaaaagaataatgcatctgctgaaaaattacgaagttatgagtccatttctatgattttgtagatgagtttattaaagttttct

SEQ ID NO: 270656 - DNA, 353 bp, Glycine max
gacccacaaactccacaagtgtcacaagtcataactcgttagagagagtttgtgtgtgtttttgtgtgtcaccttggtgcatacaacacaagatggaggaccaaaatggtagtggtaagttgagccaagggcttcgcaaggtgaagccttaccttgctatattgtcccttcagtttggctactcagggatgtatatcatcactatggtttctttcaagcatggcatgagtcattggatactctcagtgtaccgtcatgtagttgctgctattataatagtcccttttgcacttgtccttgaaagaaaaattagaccaaagatgactcttcccatcttcctgaggatagtggca

SEQ ID NO: 270657 - DNA, 262 bp, Glycine max
  unsure (1)..(262): unsure at all n locations
ggtggcagagagcgaacccaaaactagagctaccttcccttcaaaccttccactcttctctccttttccaatcaagggaataatatttcttagagatattccgaaaccatggctcacgccaatcctatgatttttgctgttggaattctaggtaaccttgtctccttctgttgctttctagcaccagtaccaacattctatcgagtttgtaagaagaaaaccacggaaggtttccaatcacttncttacgtggctgcactct

SEQ ID NO: 270658 - DNA, 436 bp, Glycine max
gtttcagatgatggagctgccatgcttacatttgaagcactttccgagacttctgagtttgcaaggaaatgggttccattctgcaagaagttctgcattgaaccacgggctcctgaatggtattttgctcagaaggttgactacttgaaggataaagtggatgcaacatttataagagaacgtcgtgccattaagagggagtatgaagagttcaaagtgaggattaatgcattggtggctttggcacaaaaggttcctgaggatggttggacaatgcaggatggtactccatggcctgggaacaatgtcagagatcatcccggaatgatacaagttttccttggtcaaaatggtgttcgtgacatcgaaagaaatgaattacctcgtctggtctatgtgtctcgtgagataagacctggatatgatcaccacaaaa

SEQ ID NO: 270659 - DNA, 390 bp, Glycine max
gggttatatccgaagacatggaaagggatgtttttatgtcagcagcagaagcccaagctcacggaattgtagatcttgtagccgttgaataaaaaataagtggcaaggattattctaaaaaaatacaggatttgaaatttcatttttgaatcttcttactttgattctaatataatatctctattagttaatctattaatatctattagttaatctattaatagaatataagtaatatagaatctaagtaattcacggataggatagatctaaaccagctcattatatatatattacaacttactatgccaactatgaaacaacttattagaaacacatgacagccaatccgaaacgtcacaaaatgcccagctcttcggggatgccctc

SEQ ID NO: 270660 - DNA, 332 bp, Glycine max
gcacacaacaaccttcttcttcttctcttaaaagttattaagagcttttgcttttctttctgcgcgcttttcccaattaagtagttcttccttttctcaaagcaaaaaaaatgttcatcgagagtttcaaggttgagagtcctaacgtgaagtacacagagactgagattcagtccgtgtacaactatgaaaccactgaacttggtcacgagaacaataatggcacttatcagagggttgtcaagcccaaaactgtcaaatatgaatttaaaaccaacacccatgtccctaaactaggggtaatgcttgcagagtggaggggaaacaatggc

SEQ ID NO: 270661 - DNA, 365 bp, Glycine max
agaacacaacatcggcatagcatagccatggacagggtattgacctcacagctgctacttatctgtgttcatcaatacccttcttcttcttcttacctcttccctttcacaatctaaccaggtttgtgacactgaaccttcatccatgctggtgatcaatggcggcccctgtgtgaatgctcaccaccaactggttgccgatgtctatgtcaacgatggtatcattgatgccatcaataccactattacggttggagatgaagtgacggacatagatgccactggcaagtttgtcatgccagggttcattgaccctcacacccacctagagcatgagtctatgcatacggcaactgacgatgact

SEQ ID NO: 270662 - DNA, 413 bp, Glycine max
gaatcaatgactattcatgattgcataattgaatcaattacatactggatccaagctaaaggaatgttatggtaaaacttcgtttgaaacgatgtggtaaaaagcaacgtgcgacttgaaagacatgattagattagctgtggattcttacatccgccattttttctagtatatagaaatgaacatgctcttgactcgacatcgtttgttctgttccactagaacttattgttttggggacgggaaagcagttgatgatgtaagttgatgatgtaaatagtacatgatggagctcgagtttattcatttatcaggggcaagtatctaaggttagtaaaaattaataagttagaaaaacttcgtaagtttatttttgatagaaaaatagaaaggatccaatttgagcaagggtc

SEQ ID NO: 270663 - DNA, 420 bp, Glycine max
atagaaatttataatttatattttatcttattatgtatatattattctatcaaatatccaatttttattttataagaaaaatgattgattgatatttcaaatttgaaattttatttcaaaaattttattttatattaatcgaactaaaatagaattaatatagaaaaatagaatattaattctagttataaaataattaatttaataaaggatataattaatttaataaaggatcccccttttttgacacgaaatggatatatccataccatatatcttggatttatttttatgaaataattaaatatggcaaaacctatatctaaaaagggttcgcgtaaaaatgtacgtattggttcgcgtaagcatactcgtaaaataccaaaaggagttatttcatgtcaagctagtttcaacaat

SEQ ID NO: 270664 - DNA, 434 bp, Glycine max
atagcaatttataattcatactctatcttattatgtatatattattctatcaaagatccaattgttattcatataagacaaatgattgatgcgatatttcaaatttgaaattttatttgaaaaatcttattctatattaatcgaactagaatagaattaatatagaaaaatacaatattaattctagttataaaataattaatttaatagaggatataatcaatttaataaaggatcccccttttttgacacgaaatggatatatccataccatatatcttggatgtatttttatgaaatagttgaatatggcaaaacctatatctaacaagggttcgcgtaaaaatgtacgtattggctcgcgtaagcatactcgtaaaataccaaagggagttattcatgttcaagctagtttcaacaatactattgtaact

SEQ ID NO: 270665 - DNA, 420 bp, Glycine max
atagaaatttataatttatattttatctgattatgtatatattattctatcaaatatccaatttttattttataagaaaaatgattgattgatatttcaaatttgaaattttatttcaaaaattttattttatattaatcgaactaaaatagaattaatatagaaaaatagaatattaattctagttataaaataattaatttaataaaggatataattaatttaataaaggatcccccttttttgacacgaaatggatatatccataccatatatcttggatttatttttatgaaataattaaatatggcaaaacctatatctaaaaagggttcgcgtaaaaatgtacgtattggttcgcgtaagcatactcgtaaaataccaaaaggagttattcatgttcaagctaggtttcaacaa

SEQ ID NO: 270666 - DNA, 356 bp, Glycine max
gaataccctgatcaacgaaatcttgaatcatctatctcaagaccaaggaccacatcttgatcacgattatgtacgatcagacagtgaagagaatagtgcgggtataaagaaaaagaagagacaagaacaagatggaggcagaacttaatctcttactaagaaattttttgattttacatttaaattggaataatttcttaggtcaaagaatatttaacaatgtcaaagtatattgactactgattagattaaaaaatttaagagaaattacaatagcctctattcaaagaggagaactaggtctagatattatgatgattcaaaatcagaagaatttaattcttctaggcttaatg

SEQ ID NO: 270667 - DNA, 434 bp, Glycine max
  unsure (1)..(434): unsure at all n locations
aaatattgattcaatggttgtctaattgaatatccattaatttgtgtgtataatgcagagtatatgtttcagatagtgacatcttgttttgggaggaaaatgatgtccatccaaaacttactatagatggtgtccgtgacatattgcgtgtattcatcaatggccagcttataggtaatgttgttggtcattggatcaaggtggtccagactcttcaatttctcccaggatacaatgatttaacactgttaactcaaacagtgggtttacagaattatggcgcttttcttgagaaggatggagcagggattagaggtaaaataaagatcactggatttgaaaatggagatatagatctttcaaaatcattatggacctatcangttgggcttcacggtgagtttttaaaattttacagtgaagagaatgaaaat

SEQ ID NO: 270668 - DNA, 395 bp, Glycine max
gattcatcttcatctcatcaatcttttcaattctctatgcacacatcaaactcgacactaccttgttcttaaactcacaacaaaaactatttgcatcaccaactactttctagcttattatatattcaaaagttgtgaagaatatgagttcaacaagccgtgcttgggcttggaccgtggcagctggtgttggagtggtggaggccatgaaggatcagggtatctgcaggtggaacagtgtgatgagatcagcacaacaacatgctaaacataatatgaggtctttgtctcaaaccaagaagctttattctcaatcatctgttatggcttcagccaaattgaaagatgagaaagctaagcagtcagaagagtctctgagaaccgtcatgtacttg

SEQ ID NO: 270669 - DNA, 429 bp, Glycine max
ggaaagcatttaggggagattgtttttctgttccgtttctacgaactcagacccttcaatcccaaccgagaaaaaaatcatgaagctgaagacatatgcgggtcttagtatcattgcaactctggctattatatatcatgcatttaacagtaggggccagttttatccggcaatggtgtatctgtcaacttccaagatcggtttggtgcttcttctcaacatgggtttggtctttatgtgtattctatggcaattaaccaagaagttgttcttgggttccctccgagaggcggaggttgagaggcttaacgagcaatcgtggagggaggtcatggaaatcctctttgcaataaccatttttaggcaggacttctcagtcacattccttgcaatggtcgcagcattgttgttgattaacgctttgcattg

SEQ ID NO: 270670 - DNA, 395 bp, Glycine max
ggttctagtgtgtgattgtttgttgttgtaactcgttcttcttcttttgttgatctgtgtttgtgtttgttttttctctcacctgaaaatgtcttgctgcggtggtaactgtggttgcggaagctcctgcaagtgccgcaaccgctgcggaggctgcaagatgtacccaaacttgagctacactgagtcaaccaccaccgagaccttggtcatgggaattgcacctgttaaggctcaatttgagggtgctgaaatgggtgtgcccgctgagaacgatggctgcaaatgtggaccaaactgctcctgcaacccctgcacttgcaagtgaggtgttgggagagcaagcttcaagcagagatagcccttaattaggaataatgataaactattaatgt

SEQ ID NO: 270671 - DNA, 363 bp, Glycine max
gccagtgatgataattatcttattgcccagcatccgacgatatcaaaactgatgggattgacaattttagaaagcattggaaaactggtgagcccattattgttaagcaagtatttgatgggtcatccatttcaagctgggatccaatggtcatatggagagggattctagagacaatagatgagaaagcgaaagatgaaaaccggatggttaaggccatagattgcttagatgggtctgagattgatattgagcttgctcagttcatgaaaggatactttgaagggcttattcttgaaaatggttggccacagttattgaaattgaaagattggccttcacctagtgcttctgaagaatttc

SEQ ID NO: 270672 - DNA, 379 bp, Glycine max
gccagtgatgataattactttattgcccatcatgggacgaggtcaaaactgatgggatcgacaattttagaaagcattggaaaactggtgagcccattattgttaagcaagtatttgatgggtcatccatttcaagctgggatccaatggttatatggagagggattctagagacaatatatgataaagcgaaagatgaaaaccggatggttaatgccatagattgcttatatgggtcttagattgatattgagcttgctcatgtcatgaaaggatactttgaagggcttattttcttaaatggctggccactgttattgtaatcgaaagatatgcccttacctagggcttttgaaaaatttgtgctgttccaaagacc

SEQ ID NO: 270673 - DNA, 423 bp, Glycine max
ggcattatatttgagtcaaacaaatcaaagccatggccacctccaacttctctattgttctctccgtctccctagccttctttttggtgctacttaccaaggcacactcgaccgataccgtttctttcaccttcaacaagttcaacccagtccaaccaaacattatgctccaaaaagatgctagtatttcatcctctggggtgttacaactcaccaaagttggcagcaacggcgtgcccacctcgggatctctcggtcgtgccctttacgctgccccaatccagatttgggacagcgaaaccggcaaggtagccagctgggctacatcctttaaattcaacattttcgcacccaacaaatcaaactcagctgacgggcttgccttcttcttggcacccgtcgggtctcagccccaatccgacg

SEQ ID NO: 270674 - DNA, 416 bp, Glycine max
ggattatttctagtcccaaagagctaacaagagattcaagaccggcatggctaatgaagaggaacagaaaaaccacctcttcggcatcaaagatctcggtcacaagactctccttcagagtgatgcactctatcagtatatacttgaaaccagtgtctatccaagagagcacgagtgcttgaaagagatacgcaagatgactgcaaaacacccactgaacatcatggcaacaccagcagacgaaggacaacttctgagcatgcttgttaagctcacgaattcaaagaacgccttggaaattggtgtattcactggttactctctgctctccactgccctggctcttccccctgatggaaagatcttggctttggatgtgaatcgcgaatactatgagttaggattgccaataattc

SEQ ID NO: 270675 - DNA, 441 bp, Glycine max
cccacgcgtccgatgggggtggaaagctttttgtggacaagcaccctaaccttagggtccgagttgttcatgggaacacgttaactgctgctgtcatactcaatgagatccctcaagatgtgaaggaggtgttcctaacaggagccacatccaagcttggaagagcaattgctctctacctttgccaaaagaaagtgaaagttctgatgttaactctctcaacagatagatttcagaggattcaaaaggaagcccctccagaaaatcaaagctatcttgtccaagtgacaaaataccaagctgcacaaaactgcaagacctggatcgttggtaagtggatcacgccaagagagcaatactgggcaccacgtggaacccattttcatcaatttggtgtcccaccaattttatcatttagaaaagattgcacttatggtgacc

SEQ ID NO: 270676 - DNA, 404 bp, Glycine max
ggtggcagttgtgtgacggagaaattaagctagagcttcatagtttcttcttcttttctcaccttccttctctcccttcagacaaagggacaaaaaatcagtgtgtgagagagagagagagaaattccaaaaccatgtcccacagtcatctaagtttcgcctttgggattctaggtaacattgcctccttcgtgtgctttctggcaccactaccaacattttatagagtttgtaagaagaaatcaaccgaagggttccaatcaattccatatgtggctgcactcttcagtgcaatgctttggatcttttatgcctatgtgaagaccggagaaacgctgtttatcaccatcaatgcattcggttgcgtgattgagacaatttaccttgccgtatttatcacttac

SEQ ID NO: 270677 - DNA, 365 bp, Glycine max
tattcaactgcctttgggttatctcgtgcattgtgtcgccttcagcagcagcagggtgctgatggtcatggatcaacaaatgaaagagaggtcagggttgggagattgcagcgtcaaaaggttcgtgtctctcgaaatcgcattttggattctgctgctaaggtgatggagttgtattctagtcaaaaggctgtacttgaagtagaatattttggtgaagttggcaccggtctgggtcccactctggagttctacacacttctcagtcatgacttacaaaaagttgtacttcaaatgtggagatcaggttcttcagagaaatatcaaatggaaattgatggagatgaaaagaaaatgaaaaatag

SEQ ID NO: 270678 - DNA, 507 bp, Glycine max
  unsure (1)..(507): unsure at all n locations
cgtccccgacgccgagaagaccgactagaaggggggaagggtgccaatgagttttngttgtgagcctataagactgagtttatgcggtgaggagaaaatatgannagttgtttggttttctttcgttggcttcgcagtagnnntttggtagcnnatggcctatgcacatggcgctaggctttaccaaaggttcctctcttaccgaatgaaaactggcttatggtnngagcgttcttcggaggtaanaatgcgcaagnttttaggctttgctgtggaagcacacaacatccgagcctttaaaaccattcctgaagagtgcgttgaaccaacaaaggactacattaatggcgaacaatttagatcagactctaaaacagttaaccaacaagctttcttttatgctagtgaacgcgaagtccatcacaacgacatatttatattcggcatagataacaccgtactctctaatatcccatactatgaaaaacatggatatggggtggagga

SEQ ID NO: 270679 - DNA, 352 bp, Glycine max
  unsure (1)..(352): unsure at all n locations
gaccgctttgccttcatacttaactcaattctagttttgtagagagaagaaaaaaaccaaccactctttttctttcatttgcaatttctgtgtcaccaatcatacacacaatgtcggcttacagagacgaggatccccgtcttcatggcatcaaaactaagattcgtgttgtccctaatttccccaaacctggtattatgttccaagacattactactctgttgcttgatcccagggtctttaacgacacgatagatttgttcgttgagcgatacaaaggcaaaaacatttctgttgttgcaggaattgaagctcggggtttcatttttggttctcccatngcactggcaat

SEQ ID NO: 270680 - DNA, 415 bp, Glycine max
  unsure (1)..(415): unsure at all n locations
ggtcctggatggtgatgagaatggccgtcgtggacccacagctatgcagacagtgaggagtctggttagggaaggtggttggatggcttgttatagaggattgggacctagatgggcttctatgtcaatgtctgcaacaacaatgatcacaacttatgagctcctcaaacggctctctgcgaagaatcaagaggttttgacatgatgaaggataggtttatgacagcaaaaagaaaaaaataaaggttaaacaaagagaagaggaggttcttctttcctcccttatttgtctgttttttctgttcttttcttcacttgtcaatgttgtttcttcacgtatggcttgctacaatgactgtttgatcaatgtaagtcattgcaggttatttttgnnnaaaaaaaannnnannaaaaa

SEQ ID NO: 270681 - DNA, 432 bp, Glycine max
  unsure (1)..(432): unsure at all n locations
ggttctagtgtgtgattgttgttgttgtaactcgggtctcttcctttggtggtccggggttggggttggtttttctctcaccctaaaatgtcttgctgcgggggtaactgtggttgccgaagctcctgccagttccgccaccggttccggggcttctagattttccccaacctgagcttcacttagtcaaccaccacccagaccttggtcattggagtggcacccgtttaagctcaatttgagggtgctctaatgggtgtgcccgctgagaaccatagctgcaaatgtggaccaaactgtttctgcgacccctgcactttcaaatgaggtgtttggagagcaaacttcaagcacagatagccctttattatgaataatgatgaactatttatgtgtngctcaaaacttatgtattatgtctgtgatgggttt

SEQ ID NO: 270682 - DNA, 419 bp, Glycine max
taagatatttttctcaagtgtgaaaacttgagagattttgcaatggatataagaactggtatctaattcgaataagtatcattcttttagggaatcttccaattgattgaccaatccaaataatatatggatatatatatatagatagatctatctatatatatctaactaatataggaatcttagaaagataattagtctattcataagaggagatgagatcatatgaaaaatataaccgattctttcctttgtttgggctactggccatccgccggaagtttcgggtttaataccgatattttagcaacaaatctaataaatcttagtgtagtgttaggtgtattggttctttttggaaagggagtgttaagtgatttattagataatcgaaaacagaaaatcttgagaactattcg

SEQ ID NO: 270683 - DNA, 432 bp, Glycine max
gcggccaaaggtatctatccagcagtagatgctttggattcaacctcaactatgctccaacctcgaatcgttggtgaagaacattatgagactgcgcaaagagttaaacaaactttacaacgttacaaagaacttcaagacattatagctatccttggcttggacgaattatccgaagaagatcgcttaaccgtagcaagagcacgaaaaattgagcgtttcttatcacaaccttttttcgtagcagaagttttaccggttcgccggggaaatatgttagtctagcagaaacaattagagggtttaaattgattctttctggagaattagatggtcttcctgaacaagccttttatttggtaggtaatatcgatgaagctactgcgaaagctacgaacttagaaatggagagcaatttgaagaaatgacttt

SEQ ID NO: 270684 - DNA, 422 bp, Glycine max
caagaaggagaagattaactcgctggacacgatgagtacatggtaaaaggaggcagggatttgtttcacttgttgcccgatgctttcaagggtatcaagcagattggtgttatcggttggggatctcagggacctgctcaggctcagaatctacgggactctcttgctgaagcaaagtctgatattgtggtcaagattggactcaggaaaggttctcgttcctttgccgaagctcgagcagctgggttttctgaggagaatgggactctaggtgacatatgggaaactgtctcgggcagtgatcttgtgatgctgttaatttctgattccgcgcaggctgataactatgagaagatattgtctcacatgaagccaaacagcatacttgggctttcccatggttttcttcttgggcatttaca

SEQ ID NO: 270685 - DNA, 417 bp, Glycine max
ggttctgtgtatgtgattgttgtgactcgttcttcttcgtcgttatcttcttcttttgttgtttgtgtgtttgttttttctctcacctgaaaatgtcttgctgcggtggtaactgtggttgcggaagcgcctgcaagtgcggcaacggctgcggaggctgcaagatgtacccagacttgagctacaccgagtcaaccaccaccgagaccttggtcatgggagtggcaccagttaaggctcaattcgagagtgctgaaatgggtgttcccgctgagaacgatggctgcaaatgtggagctaactgcacctgcaacccctgcacttgcaagtgaggtgttggagagctaaagcttcaagcagaaatggcccttagaaataatgataaaaactatatgtagtttcaaaacttcaaaatta

SEQ ID NO: 270686 - DNA, 395 bp, Glycine max
gatcccaaattaaccaataattttttagttaaacaatgtccatggccatcattaacacttttggaaacgttggtgtctactatattgtattattattatcatggtttctcgtatctggtgtgtgtgtttggggacgacccgccacttttctgcaagactttgaaatcacgtggtcagagactcatatcaggcaaattgatcaaggcagagccatccaactcattctagaccaaaactctggttgtggctttgcctccaagagtaagtacatgtttggccgtgttagcatgaagatcaagctcattccgggagactctgctggcactgtcactgcattttatatgaattctgacaccgacactgtacgtgatgagctggattttgagttcttgggg

SEQ ID NO: 270687 - DNA, 414 bp, Glycine max
gggaacagagtagaacatgaaacagaagatagttgtggtgtagctttgaagaagctatgagaacaaatggctggagtgacaaaggaggaagagaggggtagtcctagttggggtgcttcattttttacgcagacaacagaggatgtggctagagctgttgccactgctatgaattctcagaggccatctgtggtatattcattgaaaaatgatcatggtggcagccaacttcaaaggctgcagtatcaagttacgaaaatgataaaaggattttctagccctccagaagttaaatatacaaattacaatccggaaatcttgacaactcagaagcgtcaatgggctgcaaactttcagttgcagtacacggaccataagtcttggaaggagccaacaaagctgtttgaaagcatg

SEQ ID NO: 270688 - DNA, 382 bp, Glycine max
acgaagacgaccgaatgggggagagctctacaagtgtcgggctgctaggacaaccaacagatactgctgcaccataactggcgagagtccaggactctaaagcatcactagcttacgctctgaccatagttgaatgtggcacgcataatcccgtcgtgaatcacaaaggactacattgcaaggataaatactaccatgtgacctatcgcgaagtagtaccagaagataaggctgaaaaaaacataaatcgaagagtgaaacacaacataaagctgtcatctcccaagcagtactatgaggctcattactcttacctcgttcctgttgaataacaatcctgcgactaatatgcatctgtttgcctaatggaaacacaccacat

SEQ ID NO: 270689 - DNA, 392 bp, Glycine max
gagggaagaaaaacaatgtaacagagccttttagagctagtacatacaagttctcatttgcaagctcatattttcttttcaataaccctttctcttaaaattagaagcaaaaatggatagggtaagagagttggcatcaaagaaggcagcagttatattcaccaagagttcatgttacatgtgccacagcatcacgcaactgttctatgagcttggagcaagcccagcagtgcatgagctagacaaggatgcatatgggagggaaatggagtgggctttgaggagcatggggtgcaacccttcagtgccagcagtgttcattggtggaaaatttgtaggctcttcaaaagatgtcatatccctccatgttgatggctctctcaaacaaatgc

SEQ ID NO: 270690 - DNA, 439 bp, Glycine max
  unsure (1)..(439): unsure at all n locations
actatttaaatacaataataacaccaagtgttatttttacccaaggctttgctacttcggggcttttaacgaaaatgcatgaatcgttaatattagtacctgctttacagtcccattggttaatgatgcacgtaagtatgatgatattgggttatgcaactcttttatgcggatcattattatcagtggctattttagtcattacatttcaagaactcatacaaattattggtaaaagcaagaatttctattttttaaatgaatcattttcttttgctgaaatcaaatacatgaatatgactgataaaaataatgttttacaaaaaacttcttttttgtcttatagaaattattatagatctcaatttcttcaacaattggatcgttggggttaccgtactattagtctangttttatctttttaacgataggtattat

SEQ ID NO: 270691 - DNA, 427 bp, Glycine max
  unsure (1)..(427): unsure at all n locations
gccaacaagcaagatcttctaatgcaatgaatgctgcagaaataactgacaagcttggacttcattcactccgtcaacgccactggtatatccagagcacttgtgcaacttctggagagggtctctatgagggtttggactggctttctaacaacattgccagcaaagcatgagacatttgaaaaattttggtcttgtctggtgatttcatgcgagtctggcggttcttggagaaagatgcttatcttttctagcgaatgttgtaatagcagaatgcttgctagaagcattctcttttgcgtaactcgggtttgtatgattgctcaaattagctaatacttttagctataattggaactcttgcaccctcttgtgcgtgcgtgcagngttgcttacatcttgattgtttgatttttgattgaatata

SEQ ID NO: 270692 - DNA, 370 bp, Glycine max
gatagttagaagtttaaacattcaacctcaatttgcagagttctaatattacattgcagagaaaatgtctttgattccaagtttctttggtggcagaaggagcaatgttttggatcctttctccctcgatgtgtgggacccttttaaggattttccttttcccacttctctttctgctgaaaattcagcgtttgtgagcacacgagtggattggaaggagacaccagaagcacacgtgttcaaggctgatattccagggctgaagaaggaggaagtgaagctggagattcaagatgacagaattcttcagataagtggagagaggaacgttgagaaggaagacaagaacgacacgtggcaccgcgtggag

SEQ ID NO: 270693 - DNA, 423 bp, Glycine max
gtactggccaatttcgataccgatcttggaattcctttcggttctgtgctcaatgatgctgttcgtataagctatgctgcgcacctgatgcttgtatttccagttgtcttctttccgttgcgtcttaacatagatggtctcctcttctcaaaatcaaggcctctggttctggataacgtcagatttgcatcactcactgttgcccttattggtgttatcttcctgggagcaaatttcatacctagcatttgggatgccttccagtttactggagcaactgccgcagtctgtataggattcatttttccagctgccatcactcttaaggaccgctacaacattgctactaaatcagacaagattttgtctgtcattatgatagtccttgcagtcttctcaaacgttgtggctatatacagtgat

SEQ ID NO: 270694 - DNA, 432 bp, Glycine max; identical to SEQ ID NO: 256934

SEQ ID NO: 270695 - DNA, 419 bp, Glycine max
cggaccatggaagccaatggaatcactcatgacagtagcctaggagcggggagaagggataagagagaggtgggagacaaaacgatggaagatttaagtaaatacgtacacagccctgctcacttggcagttgccaggcgtgaccatgctgccctaaggcacattgtttctgccttgcctaggcttgctaaggctggtgaggtcaccacagaagtagaatctattgcttctgaacttcaagctgatgaggtctctactgttattgattgccgtgacgttcctggtagggagactcctcttcaccttgctgtgcgtctccgggatccagtctctgctgagattttgatggctgctggtgcggattggagtctgcagaatgaacatggttggagtgctctccaagaagcagtgtgcaccaa

SEQ ID NO: 270696 - DNA, 418 bp, Glycine max
  unsure (1)..(418): unsure at all n locations
gatgcatagcaattcccaattcctaattgtttaaacctaattctcatttcttcatcgttcgattcttctcctcctaaagatgcagatcttcgtgaaaactttgaccggtaagaccatcacccttgaggtggagtcctccgacaccatcgataacgtgaaagctaagattcaagacaaggaagggatcccacctgaccagcagagacttatctttgcgggtaaacagcttgaggatggtcgaacccttgccgactacaacatccaaaaggaatccactctccacctcgtgcttcgcctcangggtggcatgcaaatctttgtcaagactttgactggcaagaccatcaccctcgaggtcgaatcctcggacaccattgataatgtcaaggccaagatccaggacaaggagggtatccct

SEQ ID NO: 270697 - DNA, 312 bp, Glycine max
tcgacccacgcgtacgcacgggaaaagacgacagaaaggggcacatgtgactttcatgatcgatataactcgaaacggtgtggtgaaaatgaaggtgcttgtaaactaccatgctacaattttggtagcatggcaatctcatgcgtacaatatgttatctattcaaatcaacactacctatcttatccttacttcgcaagtgaaatgctcaactaactatcttactgtcttaacacacaacatttttaacttttagaccattcctcactacaacaagcaagctacaatggaatacatccactttttacaata

SEQ ID NO: 270698 - DNA, 255 bp, Glycine max
gaccacacaccacacacatagtagctattatactctctagagtaattgcggaatctgctagaattttctaataatggcgaaagacgttgagcaggtcacagagcaaggtgaatactccgcgaaggactaccatgaccctcctccggcaccgttgatcgacccagatgagctcacaaagtggtccttgtacagagccgtcatagctgagttcatagcaacactcctgtttctttacatcaccgtgttgaccattat

SEQ ID NO: 270699 - DNA, 433 bp, Glycine max
  unsure (1)..(433): unsure at all n locations
tcttgatgaaatgattaaagatgagaagaaccatggaagctatgacttcatctttgttgatgcggacaaggacaactacctcaactaccacaagaggttgatagagcttgtaaaagttgggggcgtgatcgggtacgacaacaccctatggaacggatctgtggtggcaccccctgatgctcctcttaggaagtatgttaggtactacagggacttcgtgctggagctcaacaaagccctcgctgtggaccccaggatcgagatttgcatgctcccggttggtgatggaatcactatctgccgtcggatcaagtgatttctgatcatcataatcgtggaccaccgttgcttcttctgcacaccctatagtgatgactggtcatcattgagtggcacctgctaatgcatntaaaagcaatcaatacttttcttt

SEQ ID NO: 270700 - DNA, 428 bp, Glycine max
gtaaaagatgatgttttcatgcattttataagttgtggcccgagaagttccaaaacaaaacaaatggtgtgacaccaaggagatggatcaggttctgcaatccagatctgagtaaaataataaccgagtggataggtactgaggattgggtcctaaatactggaaaattggccgagctacggaagtttgtagacaatgaggatctacaagtgcagtggagggaagcaaagaggagtaacaaagttaaagttgcagcattcatcagagaaaaaacagggtattctgtcagtcctgatgcaatgtttgacatccaggtcaagagaatccatgaatataagcgacaattaatgaacatatttggaattgtttaccgatacaagaagatgaaagaaatgagtgcggcagaaagggaaagcaaatttgctcct

SEQ ID NO: 270701 - DNA, 227 bp, Glycine max
gtactctatggaaatgtccgctgtcatttacaaggactgggttttcactgatcaagcattacctaatgatcttgtaaagagaggagttgctgctaaggacccatctgctccccatggagttcgtcttttgattgaggactatacttatgcttctgatgggctagagatatgggatgccatcaagttctgggtgcaagaatatgtctcattctactacaagtcagatg

SEQ ID NO: 270702 - DNA, 408 bp, Glycine max
gatatcttactatgatatgcgagctgctcgcactgccatgcgtgctttacaaaacaagcccttgagacgaagaaaacttgatattcatttttcaattcctaaggataacccctcggaaaaagatattaatcaaggaacccttggcgtgttcaatttagatccatcagtatccaatgatgaccttcgtcaaatatttggggcttatggggaggccaaagagatcagggaaacaccgcacaagagacaccataaatttattggattgtatgacgatagagcatcagatgcagctcttaaagcattaaatcgaagtgatattgctgggaaacgcataaaacttgaacccactcgccctggtggagctcgtagaaacttgatgcaacaactgagccaagaactggaacaaga

SEQ ID NO: 270703 - DNA, 362 bp, Glycine max
tatggctgcgagaagacgacagaagggtacggctgcgagaagacgacagaaggatacggctgcgagaagacgacagaagggaaggagaaaacctttttccttggccgagcctcctgaggatttgaagccagatgagcctgtttaccaaattcgatttacaaaagaaatctttcaagattatcatgattatttgaagcgattgaatctataccgccagagggtttggatgtgtaaagtcactggaaaaactggcttgacatatgaagaagctttggtgtctgaacaacttgctaccgagaaagttcaacagtttcctaaagaattaatgactattgctttaaagattattcaatacagtatgc

SEQ ID NO: 270704 - DNA, 435 bp, Glycine max
aaggaaaaggttcacatcatattgtggtcattggccatgtcgactctgggaaatccactaccactggtcacctgatttacaagcttggaggcattgacaagcgtgttattgagaggtttgagaaggaagctgctgagatgaacaagaggtctttcaagtatgcctgggtgctggacaaacttaaggctgagcgtgaaagatgaatcaccattgatattgctttgtggaagtttgaaacaacaaagtattattgcacagttattgatgcgcctggacatagggatttcattaagaatatgattactgggacatgccaagctgactgtgctgttcttatcattgattcgaccactggtggttttgaaactggtatttccaaggatggacagactcgtgaacatgctctgctttcattcaccctttgtgtgaaacaat

SEQ ID NO: 270705 - DNA, 428 bp, Glycine max
cagaggagcactgccaatattcttgtaccagattcttcgtgggcttaagtatatacattctgcaaacgtaatccatagagatttaaaaccaagcaacctgctgctaaactcaaactgtgatttaaagattattgattttggtcttgcgagaccgactttggaaagtgacttcatgacagaatatgtagtcacaagatggtatagagctcccgaattgttgttgaactcctctgattacacctctgctatagatgtgtggtctgttggttgcatctttatggagcttatgaataaaaagcctctgtttccgggcaaagaccatgtgcatcatatgcccctattgacagatctttttggcaccccaactgaggctgaccctgggttagtgaaaaatgaagatgcaagaagatatatcagacaaccttctt

SEQ ID NO: 270706 - DNA, 413 bp, Glycine max
gatgtttttgtcgtgtattctattcctattgcattcagctcactgatttcaattacaaagtcaattttgtaaatcagaggcagagagagttgtaaagagcctctgaattttgatcacaccacacccttcttctcatctccaccagaaatggctaccggagctgctgtgccaactacgttttctaccctcaagacatgggattccagtttggggtttgcaaaaaacatagattttgtgagagtttccgatatgaagagcatgaaatcttctgcgaggaaaagggtgtcaattatcaggaactcaaatcctggccaagatattgctgaacttcaacctgcatccccaggaagccctcttttggttcctaggcaaaagtattgtgaatcattgcacaaacccatcaggagaaaaac

SEQ ID NO: 270707 - DNA, 429 bp, Glycine max
ggagggtgttgttacttcttctctggttgattcggatctagagtcttcagtttctcctcgttgttcttcgctttcctgttttcaatttcgattctttcgttaatttaataagatgtttgggagggcaccgaagaagagcgataatacgaggtactacgaaatcctcggcgtctccaagaacgcttcgcaggatgatctgaagaaggcttacaagaaagccgccattaagaatcaccccgacaagggcggtgatcccgagaagtttaaagagctggcgcaagcttatgaggttctgagtgaccctgagaagcgtgagatatatgatcagtatggtgaagatgcgcttaacgaaggaatgggtggtggcggcggccatgatccatttgatatcttttcatctttctttggcggggggagtccctttggatc

SEQ ID NO: 270708 - DNA, 408 bp, Glycine max
  unsure (1)..(408): unsure at all n locations
gaacccaggttgtctgttacggattagcatcaaagcaagttaacaaaatttgggtgcgtcctggattgacccttttgccccctctccctcaccctccactaactcctcctttttggtttttataaagcacattcccaatagaggagggtccctacacaacacaacccttcaatgacgtccatggccactttcttcgcccaaacctccttcccctcccactctctctccaaaaccttcgatacccatttcgcccctgccccgaaagtcaacgtctttgtgaacttcanggcgaggaggcacgttggggtgcgagtttcgaacgcgctgatcgaaccagatggagggaagctcgtggagcttgtggtgacggattttgagaaggatttgaggaagggtgaagctctttcg

SEQ ID NO: 270709 - DNA, 395 bp, Glycine max
gatacaacaccacacacagatcaattgcaacggttgaattttgactgaagacaaagttagaaaaaaaaaacatgtcttgctccgtcgcggtttccaattcgccggtgttctctccttcttcttccctcttctgctcgaagccctccatcatctcttcttcgccggaatccctctccctctctctgtcgcatctcaaaccttcgaactcttctacgtcgtcgtcttgttcttcgccttctgctgctgctgcttcttcttctccttcttctccgattcgacttcgccttcccaagcctcccaccgcgttctccgcgtcttctgctgcttctgcttcgtctacctctccgaactgcaccgttttgaagaagaagcgacccgctaggttggacataccc

SEQ ID NO: 270710 - DNA, 432 bp, Glycine max
tacctacattatggagcctaaatacaaggcccaaaaataatgaaatcctgatctaatatgtacaaagataaatgggttcatacttagcccatgggtccaaaatctatcctgaggctcatgagaaccctagggtcttctcttgccactatggcctaatcttcttggagtcttctatccaatgcccttaggggggtaggattgcatcattccctcccccttgaaagggatttgaccttaaatccagaggttcttgaaactcagggattctttcctcaacacctgtaaaaagaataaaaacatatgtattagtggtgttaggtatgttagagtaaggtaaggactgaaagcccttttccttgccatttcccatgagagaacatggttcttcaccaactcaatgagtggtgctacaagtatagaaaaatatgggat

SEQ ID NO: 270711 - DNA, 432 bp, Glycine max
tacggctgcgagaagacgaagaagggtacggctgcgagaagacgacagaagggaataatgtctatgtgaaaaacttatcagagtcaaccacggatgaagagttgatgaaattttttggaaaatatggtaccattactagtgctgtaataatgagggacgcagacggtaaatcaaggtgttttggctttgtcaattttgaaaacccagatgatgctgccaaagctgttgaaggacttaatgggaagaaagtgatgataaggagtggtatgttggaaaagcccagaaaaaatctgagcgtgaacaagaactgaaaggacggtttgagcagagtataaaggaatctgctgacaaatatcaaggtgtgaacctgtatctcaagaacttggatgatactatcagtgatgaaaaacttaaggaaatgtttgctgaata

SEQ ID NO: 270712 - DNA, 294 bp, Glycine max
ggttctagtgtatgtgattgttgtgactcgttcttcttcgtcgttatcttcttcttttgttgtttgtgtgtttgttttttctctcacctgaaaatgtcttgctgcggtggtaactgtggttgcggaagcgcctgcaagtgcggcaacggctgcggaggctgcaagatgtacccagacttgagctacaccgagtcaaccaccaccgagaccttggtcatgggagtggcaccagttaaggctcaattcgagagtgctgaaatgggtgttcccgctgagaacgatggcttgcaatgt

SEQ ID NO: 270713 - DNA, 405 bp, Glycine max
tacggctgcgagaagacgacagaagggtacggctgcgagaagacgacagaaggggacacaaaattgcttcgaactaaaaccgaactcataatattcatcactagaagtgttggatgcatttctatttctaactaattattgtgcttattattattgttgagaaagaaaagaatggcaaagttaataaaattctttgagttgaacacaggggccaagattccttctgttgggttaggcacttggcaagctgagcctggtgttgtagccaaagctgtcaccacagccattctggttggatacaggcatattgagtgtgctcaagcgtataacaatcaagcagagattggttctgctcttaagaagctttttgatgatggtgtggtgaaacgtatggacttaatggat

SEQ ID NO: 270714 - DNA, 239 bp, Glycine max
cttttattttgataaacaaatcaaagccatgggcacctccaacttctctattgttctctccatctccctaaccttctttttggtgctacttaccaaagcacactccaccgatacccgttattttaccctcaacaattttaacccattccaaccaaacattattcttcaaaaaaaatactagtatttcatcctctggggggtttcaactcaccaaaatttgcatcaaccgcttgcccacc

SEQ ID NO: 270715 - DNA, 436 bp, Glycine max
gtagctgctgctgctcaaattataaagctacactgaatgtaacaactggattgtctgctccttataacaaccttgccattatctataagcagcagggaaattatgttgatgccatatcatgctacaatgaggtcctccgcattgatcccttggcagctgatgggctagttaatagaggcaatacgtataaggagattggtagagttagtgatgctatccaggattacatacgggcaattgctgtcagacccaccatggctgaagcccatgctaatttggcttcggcttataaagatagtggacatgtagaggctgctgtgaagagctataaacaagcattgattcttcgtccagacttccctgaagcaacttgcaatctccttcatacataccagtgtgtatgctgttgggaggatcgtgataaaatgttcaagga

SEQ ID NO: 270716 - DNA, 381 bp, Glycine max
ataacatatgaacagtaaaaactagtattttaattgagactggaactcatagggaagaaaatagatttatgaatggaataaaatatgcagtatttacagacaaaagtattcggttattggggaaaaatcaatatacttttaatgtcgaatcgggattaactaggacagaaatcaagcattgggtcgaactcttctttgatgtcaaagtgatagctatgaatagtcatcgactcccggtaaagggtagaagaggacgacctattatgggacatacaatgcattacagacgtatgattattacgctttaaccatgttattgtattttgattcttagaaagaaaaaaacttaaatcaaaatacttaatagcatggcgatacatt

SEQ ID NO: 270717 - DNA, 284 bp, Glycine max
cggcataacatatcaacagcaaaaactagtctgttaagggacactagaactcatagggaagataattgatttatgaatggaataaaatatgcagtatttacagacaaaagtattccgttattggggaacaatcaatatactcttaatgtcgaatctggattaactaggacagaaatcaagcattgggtcgaactctcctatgatgtcaaagtaatagctatgaatagtcatcgactcccagctaagggtataaatatacgacctattatgggacaatcaatgca

SEQ ID NO: 270718 - DNA, 223 bp, Glycine max
catcgattcctagggctaatattttccgactttcatctagtcgattttacactgggtcccgataaaaaagatctctcatctacctagtcccagacaattttctgatgcgcatggtcatttctattctaaatgcatcatgagcgatctcttcattcatgccttcacatgtgttgccttcacgtctttctgcacctcaagcgccgatgtatgtaacagtacacct

SEQ ID NO: 270719 - DNA, 405 bp, Glycine max
gatccccaatcagagagaaaagttagggttcacaacttttccttttccttttgcttgcgaatctgaatcaaataatcaatcatccattcattattcatcatgtcgtcggcgaagaaaatcacgctgaagagttcggacggcgaggctttcgaggtggaggaggcggtggcgctggagtcgcagacgataaagcacatgatcgaggacgactgcgccgacagcggcatccctctgccgaacgtgacgagcaagatcctggcgaaggttatcgagtactgcaagaagcacgtcgaggccgcgaatcccgaatacaaacccttcgatgacgatctcaaggcctgtgacgctgaattcgtcaaggtcgaccaggccacgctcttcgatctcatcctggttgttactact

SEQ ID NO: 270720 - DNA, 418 bp, Glycine max
gaccaagcccctttcggctctctgtatcgcttctagctgtagagattactatttttccaaccctctctctttctctcatcatcccccttttccttctttttcttcttcttcttcttcctcctccttgcaccactccttatattatctcataaaaatcactctgaggagaaacactataatcaatcatggaggggtctcacatggggttgttgctcttcttttcttccatgctttttgctgccttcccttctgcctcctccagaaacttgcccgtcataccctttgatgaaggctacgcgcccttgtttggggacagcaacttggtcatccatagggatggcaaatcggtccatctttcactcgatgagagaacaggttcaggatttgtgtcgcatgatctttaccttcacgggtattt

SEQ ID NO: 270721 - DNA, 426 bp, Glycine max
gaccctgcccacatcaaggttcctctcattcttggtatctggggaggcaaaggtcaaggaaaatccttccaatgcgagcttgtctttgccaagatgggaatcaaccctatcatgatgagtgctggagagttggaaagtggaaatgcaggagagccagcaaaactgatcagacagagataccgtgaagccgcagacatgatcaagaagggaaagatgtgtgctctcttcatcaacgatcttgatgcaggagctggtcgtcttggtggaactacacaatacactgtcaacaaccagatggtgaatgccaccctcatgaacattgctgataaccccaccaatgtgcagcttcctggtatgtacaacaaggaagagaacccccgtgtgcccatcatcgtcaccggtaacgatttctcaacactgtatgct

SEQ ID NO: 270722 - DNA, 239 bp, Glycine max
ggcgaagagtgaagagaatggcttataatggtttaaccttgatggatgtgataatatgcgtctcaatactgtcactgagtccttcagatgcagtggaagggcaaaataatggccttgttatgaacttctacaaggaattatgccctcaggctgaagacatcatcacagaacaagtcaagcttctctacaagcgccacaagaacactgctttctgctggatcatgaacatctttcatgac

SEQ ID NO: 270723 - DNA, 346 bp, Glycine max
gagcaaccataattatttttttttgacaagcagctcaagagaaatctgcaaagaataaaacaagaggaggaaatgcaacttacttgttgatataaacttcagacagagcgagttgttgtaaagctagccttgttgcagccatggccacccacgcggctctagcttctacaaggatccccactaacaccaagttcccatccaaggcttcacactctttcccaacccaatgcgcctcaaagagacttgaggtgacagaattctctgggctaagatccacttcatgtgtgacatatgctaacgatgctagagaatccttcctttttgatcttgtagctttccaactcac

SEQ ID NO: 270724 - DNA, 202 bp, Glycine max
ttaaaaaaacaccaaaagggattgttttaaaatttaacactcaaccccgatttgcgaagttctaatatttcatttcacacaaaatgtctttgattccaaatttcttttgtggcacaaagaacaatttttttgatccttttcttcctcgatatgtgggaaccttttaaagattttacttttcccacttttctttcttcttaaa

SEQ ID NO: 270725 - DNA, 418 bp, Glycine max
tccacgcgtccgcccacgcgtgcgtggccgataagacgaataagggggcgagagaagttatgagggtttttgagtgcggcggtccaaacactcttctctgcagcttttgcctacaactcccttcaccatggctgaacaaaccgagaaagcttttctgaagcaaccaaaagtgtttctcagcacaaataagactgggaagggaaagagacctggaaaaggtgggaaccgctttcggaagaccattgggcttggatttaagactcccagggaagccatctaaggaacctatattgacaagaagtgccccttcactggcaatgtttccatccgtggccgcatcttggctggaacatgtcacagtgctaagatgaacaggactattattgttagaaggaattatctccattttatcaagaag

SEQ ID NO: 270726 - DNA, 306 bp, Glycine max
ggttctagtgtgtgattgtttgttgttgtaactcgttcttcttcttttgttgttctgtgtttgtgtttgttttttctctcacctgaaaatgtcttgctgcggtggtaactgtggttgcggaagctcctgcaagtgcggcaacggctgctgaggctgcaagatgtacccagacttgagctacactgagtcaaccaccaccgagaccttggtcatgggagtggcacctgttaaggctcaatttgagggtgctgaaatgggtgtgcccgctgagaacaattgctgcagatgtggaccaaactgatcctg

SEQ ID NO: 270727 - DNA, 263 bp, Glycine max
tacggctgcgagaagacgacagaagggtacggctgcgagaagacgacagaagggggacgttcacattcaggaatcgttttcttcagaaatttgccatcgttgagagaagcgtgagagccttagtcgttcaagatgagagctaagtggaagaagaagcgcatgaggaggctgaagaggaagcgccgaaagatgagacaaagatctaagtaggtgcttgagcaggagttgagatgagctttccatctgctaccagcctcatgaca

SEQ ID NO: 270728 - DNA, 334 bp, Glycine max
gattacctataatttcagagctagctagttcacagcttcagttcgtttttgttgatcctgtgaacttatggctgacggggtggttctgttggatacatgggccagcatgtttgggatgagggttaggattgcattagctgaaaagggtgttgagtatgaatacaaggaagaaaatctcaggaacaagagtcctttgcttttgcaaatgaacccaattcacaagaaaattccagttctgatccataatggcaaaccaatttgtgaatctgcaattatagtgcagtacattggatgaggtctggaatgataaagttccattttggccttttgacct

SEQ ID NO: 270729 - DNA, 206 bp, Glycine max
gaggaccccaagtgagtcagatgatcgagataacttcgagcagtgtggtgacaatgaaaggactaggaatgttcgtggctacaatgttggtaccatggcaataccatgcgtacgatatgcgtactatacgaatgatcactggctgtacagtccgtactgcggacgtgatatgcacgagaaatacgcttgctggaggatcactcaac

SEQ ID NO: 270730 - DNA, 361 bp, Glycine max
ggtgaaaccgtcatcataaattcatatatcatcagcctcagccatgtcttcttcgctcttgcacctcctcttccttccacaactacgatcttcgatagtgctttctcagattcttccttcgtggtaaccggtcgaatcatggagcccatggacattgttggcaagtcaaaggaagacgcttcgcttcctaaagcaacaatgacaaaaattattaaagagatgttacccccagatgtacgtgttgcaagagatgcccaagatctattgattgagtgttgtgtagagtttataaaccttgtctcgtcagaatccaatgaaggtttgaacagagaggataaacggacaattgcacctgagcatg

SEQ ID NO: 270731 - DNA, 287 bp, Glycine max
  unsure (1)..(287): unsure at all n locations
ggaagccagcgaagctgtctttcgattccttcgtgcgtgcgattctcctgatatccaaggtgaagcaccgacaccggacctatctccggcgaatccccagtccccactttcttccttcgaaatgaatcccgagtatgattatctgttcaagctccttcttattggagactctggtgttggtaaatcatgccttcttctgagattttctgatgattcgtacatcgaaagctacataagcaccattggagttgattntaaaatacgtaccgttgagcaagatggaaaga

SEQ ID NO: 270732 - DNA, 422 bp, Glycine max
ggtttcggtcttctttctcacacaatctgggaacagcacacacaaaccattcccttttctcgctccggcaatgaccacccaagcttccaccttcgccgtcgccgttccctccgtcacaacccccttccgcagccaccggaatcccttcgttgttcgagcccaagcggaaccttcagataaatccgttgaaattatgaggaaattctcagagcaatatgctcgtaaatcaggaacatacttttgtgttgacaaaggagtcacttctgttgttatcaaggggttggctgaccataaagatacgttgggtgcaccactgtgcccttgccggcattatgatgataaagctgctgaggttgcacaaggattttggaattgcccttgtgttcccatgagagagaggaaggaatgccactgcatgctat

SEQ ID NO: 270733 - DNA, 302 bp, Glycine max
gatttgtgagtgtgtgagagagagagcgagcagtttcagacacagagagaggggtttgggattggagggattgacgctgcgtctcttcctcttctctttcgatccatccctcattcctaatcctccaatccaaccacctcagcctcacactcacatatacacatatctgaacgcgtatcgtccctcctatggcttcaaagcgcatcctcaaggagctcaaggacttgcagaaagacccaccaacttcttgcagcgctggtccagtagctgaggacatgttccattggcaagcaacaataatg

SEQ ID NO: 270734 - DNA, 279 bp, Glycine max
tcttttcttgatagcgggtcacatgtataggactaactggggtataggtcacagtataaaagacattttagaggcacataaaggtccatttacgggccagggtcataaaggtctatatgagatcctaacaacgtcatggcatgctcaattatctattaacctagctatgttaggttctttgaccattgttgtagctcaccatatgtattctatgcccccttatccatacctagctactgactatggtacacaactgtcattgtttacacatcatatgtg

SEQ ID NO: 270735 - DNA, 345 bp, Glycine max
  unsure (1)..(345): unsure at all n locations
ctattcctccggttagcttggaagaagtattcattcgtcccattttcaacggcggcgcgtgggataatcaatgttcaaaaataaaatttagaaaagaatattcactggaatggaaattaatacctcaagccaaagaacatttggttgagtgtgtgccttgatgaaataatcggttccccacttgatggcctccagagcgtgagcgtactcgccggcagcagcgatttgttcgccgtattctatagcaccccatgagaggaagtgttatggtgaaagccattggcaacccanatttcacattgtcccctgcatcattataccctccaccaagtccactaactgcct

SEQ ID NO: 270736 - DNA, 315 bp, Glycine max
cagtcccgctgcatcggcgagctctccttccgctccgaagttaaaggcgtccgtttccgccgggccggattgtggtcgtcctcgcccacaagatcttcgtctacaacttctccgatctcaaggtgctgcaccaaattgagacgattgtaaaccctaagggcctttggcgacctttccattgtttccgccacgatggtgttggtgtgccccgggttgcagaaggggcagggtagggttgagcactacgcttccaagaggaccaagttcatcatggctcatgattcccgaatcgcgtgttttgcactcacgcacgat

SEQ ID NO: 270737 - DNA, 379 bp, Glycine max
gggtcttgggggggaatggttggtggtggaacttcgtcttcttcttttggtggtctgtggttgggtttgttttttctctcacctgaaaatgtcttgctgggggggtaactggggttgcggaagcttctgccagtgcggcaacggcttggggggcttgcagaatgtcccagacttgagctacactgagtcaaccaccaccgagaccttggtcatgggagtggcacctgttaaggctcaatttgagggtgctgaaatgggtgtgcccgctgagaacgatggctgcaaatgtggaccaaactgctcctgcaacccctgcacttgcaagtgaggtgttgggagagcaagcttcaagcagagatagcccttaattaggaataat

SEQ ID NO: 270738 - DNA, 335 bp, Glycine max
  unsure (1)..(335): unsure at all n locations
tcggccaagccttccgaccggttgcaagaggccaacagagggggaatgaaatcttattggaactgtccagttcacccttgggaaccatatcacatccgggtttgatgaaatgggtgaatgaaacgtttttgtaggacatattatcttggataattcactatntctttattttccgatcgcctggaaagaacaagatgtttcttttgttctttcttcaacaatttctgatctctagtagacctctcagtaggattcgaactcagatgaagttctgaccatctgtcagagaaaaaagaacgagtagctctgtatcaatggaatctcatcatccatac

SEQ ID NO: 270739 - DNA, 329 bp, Glycine max
  unsure (1)..(329): unsure at all n locations
aggaccacaaagacgacagactggcggnccgggtggatccgcgagctctccttccgctccgagaaaaaagaaaacagaaacaacgcgaccgctttggaggtctactcgtccacaagatcttcgtgtacaacttatcctatcttaaggtgccccaaaaaatagtgacgagtgccaaccctaaaggcctttggcgacctttcacatgtttccgccacgatggtgttggcgtgccccacattgcacattgggcaccttgcggttgagcactacgcttccaagaggaccaagttcatcatggctcatgattcccgaatcgcgtgttttgcact

SEQ ID NO: 270740 - DNA, 224 bp, Glycine max
gacgacagaagggagtgacaagacagaaaccagttcttcagtagaattgaactctggcaactttgatgaattggtgatcaaaagcaaagaactctggattgtggaatttttcgcaccttggtgtggacattgtgagaaattagctcctgagtggaagaaagcatccaatagtttgagagggaaggttgaactgggccatgttgactgtgatgctcaaaagagtc

SEQ ID NO: 270741 - DNA, 267 bp, Glycine max
accgctcgtacgagctgttgaaaggggttttctgagggggaaatcttatttgtgactggcggggtaatcctcaggaaccatctatcatacatggtttttataaatatgatgaattgacaccggcttttgctagcacctacttatttttgatgaattaactttttctttatttatcgaacgcccggatagaacaaacaagttttttttgttctttcttcaacaaaatctgatctgatagtatacccctcagtcggataataacttata

SEQ ID NO: 270742 - DNA, 368 bp, Glycine max
gggtggaaaaacactcaatcaacacacatgattgaagtgcaagcaaatgccatggagcagagttggtgggccaatatgcctcacgagcttctcagagaggtcctcctccgaattgaatcgtcggagtccacgtggccgctgcggaggagcgtcgtggcttgtggcggagtgtgccgcacctggaggaggctcatcgtcaaggagattgtcaagccacctcaattctcttccaacataaccttccccatctctctcaaacagcctggcccgagggaacatctacttcagtgcttcattaggcgcaacagtgcctcacagacatattatctgtttctcagtttatctagtgccctagtagctgatgatgg

SEQ ID NO: 270743 - DNA, 247 bp, Glycine max
gggcggcaaaacactcaatcaacacacatgattgaagtgcaagcgagtgccatggaacaaagttggtgggccaatatgcctcacgagcttctcagagaggtcctcctccgaattgaatcgtcggagttcacgtggccgctgcggaagagcgttctggcttgtggcggagtgtgccgcacctggaggaggctcatcgtcaaggagattgtcaagccacctcaattctttttcaacataacccttccca

SEQ ID NO: 270744 - DNA, 390 bp, Glycine max
  unsure (1)..(390): unsure at all n locations
gtcctacaattttgtttaagagtctactttgtgatcatttagtatataccaatacatgtgtaaaaataatcatgtcattaaactttataagaatcaaaattgacttgtttgtatgatataaatatatttttcaatatttaatatgatattcataataatttatttaacacatattttgcaatagaaattctaaataagacataaatttatctgagttaaacttaattataagctntagcctgattctatatatatatatatagatcaacattaacatatacgcttaacatttaaaaagataaatataagattatattattaatattaataataataacttttggttattatttttaaataaaatggagtggttaggcctaaagaattttt

SEQ ID NO: 270745 - DNA, 307 bp, Glycine max
caatcctcagctaactcgtgcgctggacattatcttcatcctgcatgcagaacatgaaatgaattgttctacatctgctgttcgacaccttgcatcaagtggcgttgatgtatacactgctattgccggggctgttggagctctttatggaccacttcatggtggagctaatgaggctgtcctcaaaatgctgagtgaaattggaactgttcagaacattccagagttcattgaaagtgtcaaagccaggaaacgaaagctctctggttttggacaccgagtgtacaaaaactatgatcccaggggc

SEQ ID NO: 270746 - DNA, 361 bp, Glycine max
agccttcctaccggttgcaaaaggacaacagagggggactggaatccttttttttttttccctctcgctctttcttcaattccaggctttattctcatgtctttcaaaagcctcaaccggcccaatgccccatcaagcatgggtgttgctgatcacagcaagaacaccttcatggaattgaagcagaagaaggttcaccgttatctgatctttaaagttgatgagaagaaaagggaagttgtggttgagaagactggtgacccggctgagagctatgaggatttcgctgcatctttgcctgagaatgattgcagatatgctgtctttgactatgatttcgtcacttttgagaactgtcaaa

SEQ ID NO: 270747 - DNA, 321 bp, Glycine max
tgtctcaaagatgattccagcatctgacaagggcagattttttgcttttggtcgtgtattctctggcagagtttcaactggtttgaaggtgaggattatgggaccaaattatgtccctggggagaagaaggatttgtatgttaaaagtgttcaaagaactgtcgtttggatgggaaaaagacaggaaactgtggaagatgtcccctgtggtagcactgttgctatggttggtttggatcagttcataacaaagaatgctactttgactaatgaaaaggaagttgatgcccatcccattcgagctatgaagttttctgtctc

SEQ ID NO: 270748 - DNA, 305 bp, Glycine max
ggggtttcaaagtggacagaagagagcgtcctagtcgcaaccctaataagaagaaccacagcttcaagcgagtgacatccaccagccatgggtcgtatgcacagccgcggtaagggtatatcctcttctgctttgccctacaaaaggacaccccctagctggctcaagatctcttcgcaagatgtggaagaaaatatctgcaagtttgcgaagaagggtttgaccccgtctcagattggtgtcattcttcgagattctcacggtattgctcaggtcaacagcgtcactggcagcaaaatccttcg

SEQ ID NO: 270749 - DNA, 265 bp, Glycine max
gagggaaagaaacgcactttttggttttggttttggatttcgatctcactgcattgccttctgctactgctagttgcatgatggttgtgcagaactttgtagttgatttgaataaggcccttgttttccaggttgggcatcttggagaagcttatgaagagtgggttcaccagcccattgtcagcaaggaaggcccccgtttctttgaaaatgagattctggagttcttgacgcgcacagtctggtgggcaataccagtcatttg

SEQ ID NO: 270750 - DNA, 412 bp, Glycine max
ctaccggttgcaaaaaccgccaaaggggggttggaaccagccaaaggtgaacctcagcctcaggatggagaagcaaaccctccaacccttcccaacacgggggaatgattcccgctgcttttggtcttgggttgcaagcttttgaaataatggcaatagccgcagtggggaacaatctgataacctacgtgacgagtgagatgcacttccctttgtccaaggctgccaacctagtcactaactttgttgggaccatctttctcctcgccctcctcggcggctatctttccgactcttacctcggcagcttctggaccatgctcatctttggtttcgttgaactttccggtttcatattgctttctgtccaagctcatgttcctcagttgaagccacccccatgcaatatcaa

SEQ ID NO: 270751 - DNA, 414 bp, Glycine max
  unsure (1)..(414): unsure at all n locations
gaagagagagagagcgatgggtgtgaactccaacagagtggaacactttgctagccatgatagcgccatcgaggagacaatgcaaatccatgcagtgcagttgccaccacaccagaccacactccacaaactcaggcacagagtctccgaaatcttcttcccagatgaccctctccaccgtttcaagaaccaaactcgctttaaaaagttcctcctcgcacttcagtatctcttccccattttcgactgggccccaaactacaatcttacccttctccgctctgacctcatctctggcctcaccattgccagcctcgccattcctcaggttcacaacatttagccacccaaattgctttttttcttatatagctngcttgatttgcatgtttaaatgtaattttcatgtttttt

SEQ ID NO: 270752 - DNA, 381 bp, Glycine max
  unsure (1)..(381): unsure at all n locations
tcggccacgcgttcggccacgcgttcggccaagccttcctaccggttgcaaaaaaacaccaaaagggaaggaggtcaacctacatatattctttggatgggttaagaaaactttcccaagcatttgcaccggttaatgcttgttattggggaacatatattttgaataaaccttaatgccaaggaaaatttgattaagaaaggaaagtttgtggtgttacatctgaaagggaaacttgcaaatggaaaaaagttgtttgtgatccatcatatttgcctggcaaggtgaagaaagttggtagggttgcaagggcgatagccatcatgagccacccaatccccagcactgatgattcccattcagtgcanattattttaccac

SEQ ID NO: 270753 - DNA, 369 bp, Glycine max
cgaccggtggcaaaagaacaacagaagggggaacctttgcattctattcattcaagattcagcaagtgcgttttggaagcagagaccgaaatacttcgagatggcccgtacaaagcaaactgctcgtaagtcaactggaggaaaagctcccaggaagcagcttgcaaccaaggctgcacgtaagtctgcaccaacaactggtggtgtgaagaagcctcatcgttatcgccctggaactgttgctcttcgtgagattaggaaataccagaagagcactgagctcctaatcaggaagcttcctttccagaggttggttcgtgaaattgcccaggatttcaagactgatctgcgtttccagagccatgctgt

SEQ ID NO: 270754 - DNA, 409 bp, Glycine max
gattcaactcatgcattgacacatcacaccttatcacgatatcgatcaccttcatcacaaatggagcttctttccttcctcttcctctcccttctcttcttcctctatctctacatccagttcctcgctagaaaaaaaccccgcaacaacaaagccttcaaagactaccctctcatcggaaccctaccggagttcctcaaaaaccgccaccgtttcctcgagtggaccacccaagtcctccgcgactcccccaccaacaccggcgtcttctctcgcccctacaaactccacggcatcttaacggccaaccctgacaacgtggaacacgtgctcaaaaccaaattcgacaactaccccaagggagaacgcttcatccacctcctccaagattttttgggtaacggaattt

SEQ ID NO: 270755 - DNA, 372 bp, Glycine max
aatgcttcaaatccatgcactgattatgtcactcagttacgctagaattgaaatcaagactgcacagtctctagaatcttggagtggtggtgttcttgtgatggtttctggatctgtgcaagttaaggactacagccggaggaggaaatttatgcagacattcttccttgctccccaagagaaaggcttttttgtgctcaatgatatttttcactttgttgaagaggatccagttcaccaacaacaaccagtcttgttacctcagagcaatcttgattcaaaattgaatgcttcaagtgcaaccaataaacctgtgtccaactacctgctgggtggagatatccaagctagggactacgttgctacaaatga

SEQ ID NO: 270756 - DNA, 437 bp, Glycine max
gcgagaagaccaccgaaggggggacctagtggtggctcaatggaattgcttcattaataggatcacgattcgactttgatcggtatggactaataccgggatcgagtcctcggcaagcagacctaattttaacttggggcacagtcactatgaaaatggctccttctttagttcgaatatatgaacaaatgcccgaacctaaatatgttattgctatgggagcatgtacaattacaggggggatgtttagtaccgattcttatagtactgttcggggcgtggataaactaatcccagtggatgtctatttgccgggctgtccacctaaaccggaggctattatagatgctataacaaaacttcgtaagaaaatatctcgagaaatatatgaaaatcaaatgagttctcaacgagagaatagatgttttacaaccaac

SEQ ID NO: 270757 - DNA, 320 bp, Glycine max
ggccatcacaaaccctacccttcgggtatctaatccaaatccaagacgatgtcgtattgacctttcgccaacgccaggaccgaaggtcgtcggaaccgctaccaaggcgccggggaccccgattaaaggcgccctcccccagaggataccatggtggagatcccaaagaaccctaaggaagagagtttgcaaaaaaaaagacgcgagggtctccaatcgcagcagattccttcgtcacttcactctactgtaatagaagaagaaagtggaacaccttccagccatgggtacaggtgttttcaccgatgacaataacatgc

SEQ ID NO: 270758 - DNA, 183 bp, Glycine max
gctgcgcaggtaagacagagagaaagaactgacctcagcggcggcggcggcggcaacagaagaacaaccaccaccacacacaatgggtcgcgtgagaacaaaaacggtgaagaaatcctcccgccaggtgattgagcgttactactcgcgcatgaccctcgacttccacacaaacaaaaagct

SEQ ID NO: 270759 - DNA, 294 bp, Glycine max
  unsure (1)..(294): unsure at all n locations
tcccggctgcgaagaacgaaacagaagggggttctanngtgtgtgattggtttgttggttgtaacctcgttgctgtcttcttttggttgttctgtggtttgtgtttgttttttctctcancctgaaaaatgtcttgctgcggtggtaacctgttggttgcggaaagctccttgcaagtgcggcaaccggctgcggaggctgcaagatgtacccagacttgagctacactgagtcaaccaccaccgagaccttggtcatgggagtggcacctgttaaagctcaatttgagggtgc

SEQ ID NO: 270760 - DNA, 406 bp, Glycine max
acccttccgaccggttgcaagaggacgacagaggggggagaaccaaggttctattttttctgcatccaattcatcacactttcaatttccgttacctttttttgatttggttttttttttttttttgcatttgttttcgttgaccaccgattcattggggttacattaggtaatcactgcaggggtactatcagcgatcagcgatgttgtgtctcagaaacttaccgggatacagaaaattcaactcaaacgacttcttttcaaagtgatttttggagccgcttatcttggaccctttggacacttttttcatttaatactggataaaattttcaaaggaaagagagattcaaaaactgtggctaagaaggttctgattgaacagttaacatccaatccttggaac

SEQ ID NO: 270761 - DNA, 369 bp, Glycine max
aaggatggggttgccaatggcgcacaccaacctcatgttaaaggtctctcctcttcttttaagctgctacttgttgttgggttgctactatgttccattgcttttgctgtggctgcaatattcaaggcccggtcactgaagaaggccagtggggctcgtgcatggaagttgactgcgttccaacgtttggacttcactgtcgatgatgttttgcattgcttgaaggaggataatattatagggaaaggaggtgctggcattgtctacaaaggggctatgcctaatggggatcatgttgctgtgaaaaggcttccggctatgagtagaggctcttcacatgatcatggcttcaatgcttagattcaaaca

SEQ ID NO: 270762 - DNA, 322 bp, Glycine max
gggaaggacaagtggctataacactacttgcatgcagttagactttgatagtttgattagctctaataaggttaaggaccagagagagaaagagaaataagaagaaaaacacaagatgggttattggaagtctaaggttcttcccaagatcaagaaggttttcgagaagaatagcaccaagaaagctgctgctgctgaagccaccaagtcctttgatgagtcaaaggaggaatacaacaaagcctttgaagaaaagaagactgaacttcaaaccaaagttgttgaaatatatgaagcttcatcaactgaaatcaaaagtttg

SEQ ID NO: 270763 - DNA, 365 bp, Glycine max
gacgccgtgtttcgctatctctcccattctctcgcatctcaatacccttttgatttgtgaaaggaaagcaaacatgcttgatcaggtccaacaccctacaatcatggacaaggttgctggccagctccatctccgttctggtgtttctggtattaggagttatgaaggagcctactgccaccccacaatgtaccaaagaccctcttttgggaattactcgaatgctgcattgcagtatcctgtgatgccctcatgcaaagctactatggatttgtctgctgctgcaacaactgcctcccccgtctttgttgctgctccagcagagaaaggccattttcttatagactttctcatgggaggtgttt

SEQ ID NO: 270764 - DNA, 392 bp, Glycine max
  unsure (1)..(392): unsure at all n locations
ttacttgaaaagaatcttttctatgatcagactcgattatattctacatgaacaggctccgtaagatccagtaaaataagtaatgtagtatagtctgaattatatcatatgtatttcagtaaacttaatagtatgacaacgcattcatttcctatgcattgattcgatttctgatactatcggagtgaaaaaagtagatctaaagaaaaacgcgggttggattatattagtaacaagtaaattctttgtacgtaaaaagttccaagattttgttggacagaataacaattgctaaagttgagatcacccagaaagcattatcaattttaaaagcctactcgggtatngagcggttattataagtttcttaattagaacctaatttttttttt

SEQ ID NO: 270765 - DNA, 321 bp, Glycine max
ggctcctattatcaccgtagacggcggaggtggcggtggtggtgtagacacggcgtgacggcgatctcttgagataaatgttggttgaaagaggaagaagaagaagagttgtattgtagaatgagccaaccaacggtgatacttgccactgcgagctatgatcacactattcgtttttgggaggccaagagtggccgttgctaccgcaccatccaatatcctgattcgcaagtaaaccggctggagataaccccggataaacgcttcctggctgcagctggcaatccacacatacgactgtttgatgttaactcaaatagt

SEQ ID NO: 270766 - DNA, 369 bp, Glycine max
ggagaaaccacaatccccgaaaccttcttctataaagaagaccttcatccaggcaaaacaatgaaagtacaattcagcaagcctccctttcaacgaccatggggtgttggtacatggttaaaggaaattaaagacactactaaagaaggatatagttttgaagagctatgcatcaagaaagaagccattgagggagaagagaagttttgtgcaaaatccttgggaacagtaattggttttgccatttcaaagctgggaaagaacattcaagtactttcaagttcctttgtcaataagcaagaccaatacactgtggaaggagtgcagaatcttggagacaaagcagtgatgtgtcataggctaaatttc

SEQ ID NO: 270767 - DNA, 289 bp, Glycine max
gcgagaagacgacagagggggacacaccgtttgttctatacttaactcaacttctgctaccgactcacttcttccaagtacaaccacgcttttcactacagtgatgggcaacgtcaagatcggaatcaacggatttagaacaattggccgtttggttgccagagtcgctctgcaaagagacgatgtggagctcgttgccgacaacgaccctttcattaccaccgattacatgacatacatgtttaaatacgacagtgttcactgacactggaagcatcacgatgtcacc

SEQ ID NO: 270768 - DNA, 372 bp, Glycine max
gtctgcatggatgactgatgaagaatttgcaagagaaacaattgctggtttgaatccaaatgtcatcaagattattgaggagttcccactaagtagcaagctagatactcaagcctatggtgatcatacctgtataataacaaaagagcatttggagcctaacttaggtggtctcactgttgagcaggctatccaaaacaagaagttgttcatcttaaatcaccatgactatctcattccatatttgaggaaaataaatgcaaataccacaaagacttatgctacaagaaccatatttttcttgaaaaatgatggaactttgaccccattggccattgagttaagtaagccacattctcagggtggagcata

SEQ ID NO: 270769 - DNA, 437 bp, Glycine max
ggcacatcaaattctttatttataacatggagtgcgtctgtggaaactttggaaagagatcttaagaacacgaggaaatactacgggagtggaaaaacaaaggaagcaccatggagagaatcacagcttaaagggttgcacaattttctcgtggaaaaagaggaagaaattgtgacggccctcaagcatgatttggggaagcattacgtggaggcttttagagacgagcttggaacattaatgaagaccttaaacttggcaaccaagtctttgaaaaattggatggcggggaaaggggcaaagctgccacgaatagcactgctctcaagtgcagaaatagttcctgagccacttggtcttgttctcataatctcatcatggaactttccctttggactttccttggagccactgatcggagcagtagctgctgggaa

SEQ ID NO: 270770 - DNA, 408 bp, Glycine max
  unsure (1)..(408): unsure at all n locations
ggaagagtgaagagaatggctcccaagggtttaacctttctggctgtgttaatatgcgtttcagcactgtcactgagtccttctgttgcgggggaagggcaaaataatggccttgttatgaacttctacaaggaatcatgccctcaggctgaagacatcatcacagaacaagtcaagcttctctacaagcgccacaagaacactgctttctcctggctcaggaacatcttccatgactgtgctgttcagagttgtgatgcttcactgttgctggactccacaagaaggagcttgtctgagaaggaaacagatagaagctttgggttgagaaatttcaggtacattgagaccatcaaagaagctttggaaagagaatgccctggagttgnttcatgtgctgatatcctc

SEQ ID NO: 270771 - DNA, 427 bp, Glycine max
ggaccggagtagaatgccactataacaggacccgggtccaaagattattcttaacgggtcaaaaacccgaaaccatgttatcgggtaccatctcacccactatctcaaaactcaaactcctcgatggactctacctcataaacctcatcaacatttcgggtcccttcccaaatattcttttccaacttccaaatctccaatttatctatctagaaaacaacaatctctcgggtcgaatacccgataacatcagtaaccttacccgattagatgtactcattataactggtgaccggttcattagacccttacacgagttcaataaccaaggttactcatctcactcaggtcaaactcggtgacaatgttctcaccggaacatttgcccaaggaattgccaagctcgttaatctaacctatttgagtc

SEQ ID NO: 270772 - DNA, 428 bp, Glycine max
  unsure (1)..(428): unsure at all n locations
ggcacatcaaattctttatttataacatggagtactctgtggaaactttggaaagagatcttaagaacacgaggaaatactacgggagtggaaaaacaaaggaagcaccatggagagaatcacagcttaaagggttgcacaattttctcgtggaaaaagaggaagaaattgtgacggccctcaagcatgatttggggaagcattacgtggaggcttttagagacgagcttggaacattaatgaagaccttaaacttggcaaccaagtctttgaaaaattggatggcggggaaaggggcaaagctgccacgaatagcactgctctcaagtgcagaaatagttcctgagccacttggtcttgntctcataatctcatcatggaactttccctttggactttccttggagccactgatcggagcagtagct

SEQ ID NO: 270773 - DNA, 342 bp, Glycine max
ggatatggcctacatagtgtatgtcaccctgggcctcggttaccttctcccatggaacgctttcatcactgccgttgattacttctcctatctctaccccgatgccagcgttgaccgcatcttcgccgtcgtttacatgttgatcggcctcgtggggatcttcctcataatcttctacagccacaagtccaacgcctatgtgaggatcaacgttggcctcgccctcttcgtcggttctctcctcatcatccccctcctcgacgccttttatctcaagggtagggtcggcttgtatagcggcttctacgtaaccgccgccgccgttggactttccgccgtggc

SEQ ID NO: 270774 - DNA, 383 bp, Glycine max
ggcagcgcttgatttgaggccaggcaagccccacgcaaccagcacacctctcctcggtcacgctacccctttctgctcttcttctacctttcaagttttaaaagtataaagatggcagagacattcctatttacctcagagtcggtgaacgagggacaccctgacaagctctgcgaccaaatctccgatgctgtcctcgacgcttgcctcgagcaggacccatacagcaaagttgcctgcgaaacatgcaccaaaaccaacttggtcatggtcttcggagaaatcacgaccaaggccaacgttgactactagaagatagtgcgtgacacctgcaggaacatcggcttcgtcttaaatgatgtgggacttgaatccgacaactg

SEQ ID NO: 270775 - DNA, 418 bp, Glycine max
aaccaatgctggaaattggttgattgggggtgacctagaggtcattgaaccaattcagtacaatgatggacttgatcattttcgtctatctccgacacaactccgtgcagagttcacaaggcgcaatgcggatgctgtgtttgccttccagctccggaatcctgttcacaatggccatgctttgctaatgactgacacccgaaagcgccttcttgagatgggctataagaatcctgtcctcttgcttcatccacttggaggctacaccaaagctgatgatgtcccacttgattggcgaatgaagcaacatgagaaggtacttgaggatggtgttcttgatccagagacaactgtggtatccatattcccatctcccatgcactatgctggacccacggaggtgcaatggcatgcaaag

SEQ ID NO: 270776 - DNA, 429 bp, Glycine max
ggaccggagtagaatgccactataacagcacccgggtccaaagattattcttaacgggtcaaaaacccgaaaccatcttatcgggtaccatctcacccaccctctcaaaactcaaactcctcgatggactctacctcataaacctcatcaacatttcgggtcccttcccaaattttcttttccaacttccaaatctccaatttatctatctagaaaacaacaatctctcgggtcgaatacccgataacatcggtaaccttacccgattagatgtactcagtttaactggtaaccggttcatcggacccgtaccgagttcaataaccaagttgactcagctcactcagctcaaactccgtaacaattttctcaccggaacagttccccaaggaattgccaagctcggtaatttaacctatttgagtctcg

SEQ ID NO: 270777 - DNA, 462 bp, Glycine max
gaagacgacagaagggggtgtgagttcattaacatatacaaattctctgtgttgtgttgtgtacttgtgttaattgtgttgttgttgtaggaaatttaagtgaagagagaatgatgatgaagtctgctatgtgtgcattggtgcttgtggcactggttgtggttgaagtggggcccatggctgaggctgcggtgacttgcaacccaacacagttgactccttgtcttccggcaattaattcaggttctgcaccttcgagtgcttgttgccagaagctgaaggagcaaaagccatgcttctgtggctacctcaaaaaccctagcttgaagcagtatgttaactctcctaatgccaaaaaaaccgttagttcttgtggtattgcctatccaacttgttaagcacctcttatatatatatataaaatgtgtgaacaatatatatatattgattaaaaaatatagt

SEQ ID NO: 270778 - DNA, 225 bp, Glycine max
cacctttgtcagctgaattttacaccgggtggcttacacactgaggagagaaaggtgctcagactgatgctgattttacagcagctgctcttgaaaaaattttgcaaaaaaatggttctgcagttctatatatggcccatggtgggacaaactttggattttataatggagcaaatactggtgtagatgaggctgactacaaacctgaatctacttcatacgatt

SEQ ID NO: 270779 - DNA, 324 bp, Glycine max
ggcattggacagagagtgttagcaccaaaaatagcgaagttaatcttcgtggtgccttgcactaattcctcttctctgcacctacctctcgccagaaaaaccctcagatcagcgcatcctcattttgctcgatgacttcgccatcaaatcctctcactctctcttcttcaactccctcaaatctctcggcttctatctccaattccacctcaacgaccaccccaaaattgcgcttcagagatactgtcagtacctctacgactccctaaatctctttttccccaccattgaacgttttgaaggatccattgacgcgtctgcaat

SEQ ID NO: 270780 - DNA, 407 bp, Glycine max
  unsure (1)..(407): unsure at all n locations
ggacttattacaaataaattacattctcctctctagaagaatggaatggaaacccatagaagaattttgagtttgaaggacagttctggcaggagtgttgaacttacattgcaagagatggtgaatgctagattttttttccttttttttttgtttcccacatgtttccttctttgaaggcaagacaattacactaacagtatgtttggatagagaattttaactgaggaaagtaatttatcaaagaatttaaatttctgtaatctagaattcattgtttggatgttttttttttgaataatttaaaattttttgaattttaaaacagaattttaaacaactaanaatctagaatttcaatttctttctaaaatgtgagaaaatgaagttctcttcttacagttttt

SEQ ID NO: 270781 - DNA, 438 bp, Glycine max
gaggattcatcattttccaaataagtatcttcgtagttgcataagtcaagagaagaagtgaagtggctgcaatggcttcaagtcaggaagaggtgacccttttgggagttgtgggaagcccatttctacacagggttcagattgctctcaagttgaagggagttgaatacaaatatttggaagacgatttgaacaacaagagtgatttgctcctcaagtataacccagtttacaaaatgattccagtgcttgttcacaatgagaagcccatttcagagtcccttgtgattgttgagtacattgatgacacatggaaaaacaatcccatcttgccttctgatccctaccaaagagccttggctcgtttctgggctaagttcattgatgacaagtgtgtggttccagcatggaaatctgcttttatgactgatgagaaag

SEQ ID NO: 270782 - DNA, 426 bp, Glycine max
gacaccaacacatccattcattgtcttaatgttagcaatgtcttcctctttctccatccatttcttcctcctcctctcaatagcccttttctcagtttgttgcttagcagcatctcaagctcccaccaccaaatcacacccctatatccttcccattaagaaagaccccgcaacaaatttgtactacacttcagttggcattggaactcctaggcacaactttgatttagtcattgatctttctggtgaaaacttatggtacgattgtgacactcattacaactcatcatcctacagacctatagcttgtggctcaaagcaatgccccgaaattggatgtgttggttgcaatggccccttcaaaccaggttgcacaaacaatacacgccctgctaatgtaatcaaccaattagccaaattcattta

SEQ ID NO: 270783 - DNA, 436 bp, Glycine max
ggccattgttgctgtcatcatccgcagctgctgttattcgcaccgcaaacaaacagtgagccatggccgtcggaaagaacaagcgcatctccaaagggaaaaagggtggcaagaagaaggcagctgatccctttgccaagaaggattggtatgacattaaggccccttctctttttcaagtgaaaaatgttggcaaaaccctcgtctctcgtacgcagggtaccaagattgcttctgaaggacttaaacatagagtgtttgaggtctccttggctgatcttcaaggggatgaggatcatgcattcaagaagattaggttgagagctgaagatgtgcaagggaagaatgtcctgacaaatttctggggaatggatttcacaactgacaagctgaggtcattggtgcgaaaatgggcaactctaatttgagcccatgt

SEQ ID NO: 270784 - DNA, 439 bp, Glycine max
gggcagagagcgaacccaaaactagagctaccttcccggcaaaccttccactcttgtctccttttccaatcaagggaataatatttcttagagatattccgaaaccatggctcacgccaatcctatgatttttgttgttggaattctaggtaaccttgtctccttctgttgctttctagcaccagtaccaacattctatcgagtttgtaagaagaaaaccacggaaggtttccaatcacttccttacgtggctgcactcttcacttcaatgctttggatattttatgcttacataaagacgggcgaaatacttctcatcaccattaacgcattcggttgtttcatagagacagtttaccttgtcatctatatcacttattgccccaagaaagctaggttctttaccttcaagatgattttcttgttcaacgttggagtg

SEQ ID NO: 270785 - DNA, 400 bp, Glycine max
cacaaaactgagacgacaagagcttactctgtgcctttggagggtgctaatggggttagggttaaagcggtagcagtgtgccacactcacacgtcggaatggaaccctaaacatttggcctttcaagtgctcaaagttaagccaggaaccgttcctgtctgccacttcctacctgaggatcatgttgtttgggttcccgagtagatttgctttaatttcaagtccttctttcctgttcttgaataacttagcttcagtagcactacagaactctatatatatgcatgtatttgcactgtgtagttctctagatattaataattttttgctggttatttagatgctatgcgtggcttcttatgtataaactatgatgcattatatgacttattgtgtgttc

SEQ ID NO: 270786 - DNA, 436 bp, Glycine max
gagagtcaattcatcaattaggagttgggtgagagaatggaagcctcagagcagaacaattcaaaggtagtgttgattgattctttgcagtcatgggagttccacgtcaaccaagcctataatcagaatactcctgttgttgttcacttcactgcttcatggtgcatgccatcggtggctatgactcctgtttttgaagaactggcttcaagctatccggaagttctgtttctcactgttgatgttgatgaagtcaaggaggtagccaccaaaatggatgtaaaggcaatgccaacatttttgctgctgaaggacggtgctgcggtggacaaggtggttggtgccaatccagaagagataaagaaaaggatagatggggttgctgagtccactcgtgtctcactggcatagttaagcatctgtatgatattctact

SEQ ID NO: 270787 - DNA, 420 bp, Glycine max
  unsure (1)..(420): unsure at all n locations
gattcttcgctcaatcgaggtcggctcgatttccttctctataacacaacgctctcttctcttgcaaccaaagtacttgttccagtgtctactctactcaaaaaggatttgggacatcatgtgcagtgattcgaaaagtaaactttcttccccaaccctcgtcgtcatggagaatagtaacattcagaagcagaatctggatggtctctacaactcggttttgcttgaattgtctgcatctgatgattatgaagctttcaaaagagaggtggaggaaaaaggcttagatgtgaacgaggcaggcttttggtacggtagaagaattgggtcaaagaagatgggatctgaaacgaggacccctctgatgattgcttctttgtttggaagcgccaaggtgctcaattatnatcttcttcagaa

SEQ ID NO: 270788 - DNA, 343 bp, Glycine max
cattacaacaaagatcgagtcattgaaatcagtgcccggatggaccctcattctgtggtggacctgactgaggataaagatgtagatgttgagttcgtgtacactgcaaaatggaaggaaacagagactccttttgagaagagaatggataaatactcccagtcttcttctttgccacatcacttggagattcactggttctcaatcataaattcctgtgtaacagttcttcttttgactgtgtttctggcaaccattctcatgcgtgtattgaagaatgactttatgaagtatgctcaagatgaggaagcttgtgatgatcaagaggagacaggatggaagt

SEQ ID NO: 270789 - DNA, 423 bp, Glycine max
atggggttatgtttcaaatgatgatcggcccagggaattcttcttgagtcttctaaagtgtttgcaacccggggaatatagtgatatgtccgagagaagggagagcgacgaagaactgaagatgaaggtgcgagaatgcttgaataaaagcggaaagtacttggtggtggtggacgatgtttgggaaacccaagtgtgggatgagattaaaagcgcttttccagatgccaacaacggaagcagaatattgataacaagtcgttcgacaaaggtggcttcttatgctggaacaaccccttcctactcgcttcccttccttaacaaacaaaaaagttgggagctacttttcaagaagttgtttagggacgaagaaagtgtcccccagaattagtggaactgggaaaatccatagccgaaagatgt

SEQ ID NO: 270790 - DNA, 380 bp, Glycine max
ggtggcagagagcgaacccaaagctagagctaccttccctgtaaaccttccactcttctctccttttccaatcaagggaataatatttcttagagatattccgaaaccatggctcacgccaatcctatgatttttgttgttggaattctaggtaaccttgtctccttctgttgctttctagcaccagtaccaacattctatcgagtttgtaagaagaaaaccacggaaggtttccaatcacttccttacgtggctgcactcttcacttcaatgctttggatattttatgcttacataaagacgggcgaaatacttctcatcaccattaacgcattcggttggttcatagagacagtttaccttgtcatctatatcactta

SEQ ID NO: 270791 - DNA, 436 bp, Glycine max
aattcgagcggccgcttttttttttttttttttttttttttttttgcaaataacaatccatggtcactgcgtaaactccaaaatatgaaccttaagaaacaaggttgtcattaagagataacgaaacaaactcaacctgaaatctgtatcaaagccagtgcagaaaataacaatccatcatcactaagtaaactccaaaatataaaccttaagaaacaaggttgtcattaagagataaggaagccagctgatcagcagtaccgccagcctgctgctgagcaacattccttaggacgtccattgcctcagccacctttgctttcagggcttctggcgactcaagcaaatgcagaacttcagtctggtccatctcaagaagcatgcctgtcactttggcagcattatcaggctctaactgttccacaagggggtagag

SEQ ID NO: 270792 - DNA, 418 bp, Glycine max
ggacatcacagcaagggagtgatttggagtttggagcgactgaactaatcattaatttgcactcgctgtttcagcttcatcacccttcttttgcatcatttatatctcttgagaaatggcacaagaaacctttctattcacatctgaatctgtaaacgagggtcaccccgacaagctgtgcgaccagatctctgatgcagtacttgatgcgtgccttgaacagaaccctgacagcaaggttgcctgtgagacatgcaccaagaccaacatggtcatggtcttcggagagatcacaaccaaggccaacgtagactatgaaaagattgtccgcgacacatgccgcgaaattggattcatctctgatgatgttggtcttgatgctgacaaatgcaaggtgttggtcaacattgagcaacag

SEQ ID NO: 270793 - DNA, 441 bp, Glycine max
  unsure (1)..(441): unsure at all n locations
gatccagcgacagatcggagcagaccctgtatggagtggcgaatggcgctgtggtctcaaattttatgcatagtcactctgctgttatgcagcgattgtgcagcatcttttgccaaggagcagcaaaaggaccgggttggtaggctcccaggtcaaggcttcaacatcagcttcgcacactatgctgggtacatcaccgtcaatgagaaagctgggagaacactcttctactggttcattgaggcacttgaaggtcctcattctaagccccttgttttgtggctcaatggagggcctggatgttcgtccattgctttcggacagtcagaagaagttgggccttttcatataaattcagatagcaggaccctccatttcaatccctattcttggaaccgagttgccaacattctttttcttgacactcctgtnggggtggga

SEQ ID NO: 270794 - DNA, 431 bp, Glycine max
gcaaggtattgaccggattacctgtcctcctcatgctgactattcatactctgttcaagctggtgtcagtgctggaattgatatgattatggttcccttcaactacactgagttcattgatgaactaacccggctagtaaagaataatattatacgaatcagcaggattgatgatgccgtggcaagaatcttaagagtaaaatttgtcatgggcctatttgaaaatccatatgctgatccaagcctcgcagaccaactgggtagcaaggaacatagagaaatagcaagggaagctgcacggaaatccctagcgttgctaaagaataggcaatcttacaagaaaccactgctttctctttccaaaaagtccacataaatactggtagcaggaagtcatgctaacaatatgggttatcaatgtggacgatgga

SEQ ID NO: 270795 - DNA, 425 bp, Glycine max
tatgcggatcattattatcagtggctattttagtgattacatttcaagaactcatacaaattattggtaaaagcaagaatttctattttttaaatgaatcattttcttttgctgaaatcaaatacatgaatatgactgataaaaataatgttttacaaaaaacttcttttttgtcttatagaaattattatagatctcaatttcttcaacaattggatcgttggggttaccgtactattagtctaggttttatctttttaacgataggtattatttcaggagcagtatgggctaatgaggcatggggatcatattggaattgggatccaaaggaaacttgggcttttattacttggactatattcgcgatttatttacatactagaaaaaataaaaaattggaagatctaaattcttcaatagtc

SEQ ID NO: 270796 - DNA, 370 bp, Glycine max
ggagaaagagtctaacgagaattttttttctctcggtcataacctagtgagactctgtgtcagagtttgtgaagtgaatcccataatcatgaagaaaggaaacttgggacttggtctcaaactctcagttcctgtgtctgatcaatctaattttgccaggttcctgactgaaagtgggacttttaaggatggggatctgcttgtcaacagggatggagttcgaattgtctctcagaatgatgtcgaagctccaccttcaatcaagcctacagacaaccagttaactttggcagacatagatgtaatcaaagttgttggaaagggaaatggatgggtagttcaattggtgcatcacatatggactaatcag

SEQ ID NO: 270797 - DNA, 458 bp, Glycine max
gcatcgtccgaaccgttcgtcgaatacgacagaacgacattatggggctcaaatgaatttggtgatcgagagtgcttggaacagtttgatgaaaaggaaagtactagctctcttcgttgcttcaattttggtagcatgtcaatgccatgcctacgatatgttccctctacgaatgaacactggctatggtgcccgtactcacgacgtgaaatgcgcaagtcggatgcttgctgtggaagcacactacatctttggctttgagaccattcctgaagaatgccttgaatcaacaaaggaatacatccatggcaaacaatatagatcagactacaaaacagttaaccaactaacttacttttatgccacaaaccttgagatccataccaaggacacatttttgctcagtatacatggcaccgtactctctaatatatcatactacctaaaacatggatatg

SEQ ID NO: 270798 - DNA, 388 bp, Glycine max
ggttgcacatatgacagtggacaacatagttcccatgtgtgatcacatgcctgtaggattcagattccgtcccacagatgaagagctcgtcgactattacctcaaacacaagcttctggctgatgatttgcctgtccacatcatccctgaaatcgacctttgcaaggtggaaccttgggacgtaccaggaagatcagtgatcaaatccgatgacccagaatggtttttcttcagtcctgtggattacaagtacttgaagagtcaaaggtttaacaggacaaccaagcgtggcttctggaaagccactgggaatgaccggacaataacgataccgagcaccagcaatgtcattgggactaagaagactcttgatttgcaccaaagccgt

SEQ ID NO: 270799 - DNA, 272 bp, Glycine max
ggatatggcctacatagtgtatgtcaccctgggcctcggttaccttctcccatggaacgctttcatcactgccgttgattacttctcctatctctaccccgatgccagcgttgaccgcatcttcgccgtcgtttacatgttgatcggcctcgtggggatctccctcataatcttctacagccacaagtccaacgcctatgtgaggatcaacgttggcctcgccctcttcgtcgtttctctcctcatcatcccccttctcgacgccttttatc

SEQ ID NO: 270800 - DNA, 431 bp, Glycine max
ggcacaagtgagtttgttgatcgagataactagaaacagtgtgatgaaaatgaaggtccttgttttcttcgttgctacaattttggtagcatggcaatgccatgcgtacgatatgttccctctccgaatgaacactggctatggtgcccgtactccggaggtgaaatgcgcaagtcggaggcttgctgtggaagcacacaacatctttggctttgagaccattcctgaagagtgcgttgaagcaacaaaggaatacatccatggcgaacaatatagatcagactccaaaacagttaaccaacaaacttacttttatgccagagacctcgaagtccatcccaaggacacatttgtgttcagtatagatggcaccgtactctctaatattccatactacaaaaaacatggatatggggtgggagaaattaact

SEQ ID NO: 270801 - DNA, 432 bp, Glycine max
  unsure (1)..(432): unsure at all n locations
gggttggaaagaaggtgagggtctgggtggatccaggaagggtattgcggatcctatcatggccggtaatgttaagaagaataacctgggggttggggctcaggaacctggagaggtgagtgctgaggatgacatatatgagcagtacaaaaagcggatgatgcttggctaccgttacagacccaatcccctgaacaatcctcgcaaggcttattactgaacttgacattgggtgctttgtgcaactcttcaggaaaagttaacttttacaaagtgggatgaactggtgtgttgatagtagggtttttattgtgtgctgcagtgcttgtagtcttttgaaactaagatttgngggagaaaagatggggaaagggtaatggtcacttcaattgcatttttattcgccaagaataatgggtttttgggtatttt

SEQ ID NO: 270802 - DNA, 438 bp, Glycine max
  unsure (1)..(438): unsure at all n locations
ggcagcgcttgatttgaggccaggcaagccccactcagaccaccacacctctcctcgttcacgctacccctttctgctcttcttctacctttcaagttttaaaagtataaagatggcagagacattcctatttacctcagagtcggtgaacgagggacaccctgacaagctctgcgaccaaatctccgatgctgtcctcgacgcttgcctcgagcaggacccagacagcaaagttgcctgcgaaacatgcaccaaaaccaacttggtcatggtcttcggagaaatcacgaccaaggccaacgttgactacgagaagatagtgcgtgacacctgcaggaacatcggcttcgtctcaaatgatgtgggactggatgccgacaactgcaaggtcctcgtcaacattgagcagcagagccctgatattgctcanggtgtaca

SEQ ID NO: 270803 - DNA, 408 bp, Glycine max
gaagagtgaagagcgaagagaatggctcccaagggtttaatcggtttggctgtgttatgcttctcagcactgtcactgagtcgttgtcttgcggaggataatggacttgttatgaacttctacaaggaatcatgccctcaggctgaagacatcatcaaagaacaagtcaagcttctctacaagcgccacaagaacactgctttctcctggctcagaaacatcttccatgactgtgctgttcagagttgtgatgcttcactgttgctggactccacaagaaggagcttgtctgagaaggaaacagatagaagctttgggttgagaaatttcaggtacattgagaccatcaaagaagctttggaaagggaatgcccaggagttgtttcctgtgctgatatcctcgttctc

SEQ ID NO: 270804 - DNA, 435 bp, Glycine max
gcacccaaaggtgcaaaaatattaagatgataaacattggagcacttgttgtactctttgcatttctcttcctcagttgtgcctatgcacaagacacaacaacccttgtgcctgcaatcataacttttggtgactcagccgtggatgtagggaataatgactatcttcccacccttttcaaggctgattaccctccttatgggagggactttgctaaccaccaacctactgggaggttttgcaatggcaaattagctactgattttactgctgacactttgggttttaagacctatgctccagcatatcttagcccacaggcatcagggaaaaacctccttattggagcaaactttgcttctgctgcatctggttatgatgaaaatgctgctactttgaatcatgcgattccgttgtcccaacagttaagttatt

SEQ ID NO: 270805 - DNA, 433 bp, Glycine max
ggttctagtgtatgtgattgttgtgactggttcttcgtcgtcgttatcttcttcttttgttgtttgtgtgtttgttttttctctcacctgaaaatgtcttgctgcggtggtaactgtggttgcggaagcgcctgcaagtgcggcaacggctgcggaggctgcaagatgtacccagacttgagctacaccgagtcaaccaccaccgagaccttggtcatgggagtggcaccagttaaggctcaattcgagagtgctgaaatgggtgttcccgctgagaacgatggctgcaaatgtggagctaactgcacctgcaacccctgcacttgcaagtgaggtgttggagagctaaagcttcaagcagaaatggcccttagaaataatgataaaaactatatgtagtttcaaaacttcaaaattatgtagtatgtattat

SEQ ID NO: 270806 - DNA, 409 bp, Glycine max
gaagagtgaagagcgaagagaatggctcccaagggtttaatcggtgtggctgtgttatgctgctgagcactgtcactgagtcgttgtcttgcggaggataatggacttgttaatgaacttctacaaggaatcatgccctcaggctgaagacatcatcaaagaacaagtcaagcttctctacaagcgccacaagaacactgctttctactggctcataaacatcttccatgactgtgctgttcagagttgtgatgcttcactgttgctggactccacaagaaggagcttgtctgagaaggaaacagatagaagctttgggttgagaaatttcaagtacattgagaccatcaaagaagctttggaaagggaatgcccaggagttgtttcctgtgctgatatcctcgttctc

SEQ ID NO: 270807 - DNA, 467 bp, Glycine max
cccacgcgtccgcggacgcttcaagcccagcaattctcatcgtgggtcgtgtatttgttggcattggtgtcggtatggcttcaatggcatcacccctctacatttcagaggcttctccaacaagagtaagaggggcccttgtgagccttaacagttttctcatcactggaggacagttcctttcctacctcatcaacttggccttcaccaaggcaccagggacatggaggtggatgttaggggtagcagcagtgccagctttgttacaaattgtactaatgttgacactcccagaatcgcctcgttggctttaccgcaagggtaaggaagaggaagcaaaatcgactctgaaaaagatttatccaccacatgaagttgaaggcgaaattcaggccttgaaagaatcagttgacatggaaattaaagaagcagaatcatcagagaagatcaacatagtccaactttta

SEQ ID NO: 270808 - DNA, 474 bp, Glycine max
gcgcccacgcgtccgcggacgcttcaagcccagcaattctcatcgcgggtcgtgtattgggtggcattggtgtcggtatggcttcaatggcatcacccctctacatttcagaggcttctccaacaagagtaagaggggcccttgtgagccttaacagttttctcatcactggaggacagttcctttcctacctcatcaacttggccttcaccaaggcaccagggacatggaggtggatgttaggggtagcagcagtgccagctttgatacaaattgtactaatgttgacactcccagaatcgcctcgttggctttaccgcaagggtaaggaagaggaagcaaaatcgactctgaaaaagatttatccaccacatgaagttgaaggcgaaattcaggccttgaaagaatcagttgacatggaaattaaggaagcagaatcatcagagaagatcaacatagtcaaacttttaagaa

SEQ ID NO: 270809 - DNA, 416 bp, Glycine max
caattatttaaggcctgatttaaaaagaggaacattcgcacaagaagaagaaaaccttatcattgaacttcatgcagtattagggaacaggtaattgtaattgtaattttaattcagtctctctcatgattgaattaatgaattctctccctttttcttttctactgtggttaacatttatttttctttttcatttgcttgacatgcatattattatcctgtgctgtctcaggtggtctcaaattgcggcacagttgccggggagaacagacaatgaaataaagaatctgtggaactcttgcttgaagaagaaactgaggcataagggaatagaccctgtcacacataaaccactgtctgatgttgagaatggagagaaagcagcagaagtgtctaatgaactgaacctcctgaaa

SEQ ID NO: 270810 - DNA, 433 bp, Glycine max
ggatttgtagagtgagcttttgagttcatcatcaacaatgggtacattgacatcaaagaagattatccctaccaaggtgttgatgttatatgtgatcataaagtcaattttaacttgattatttgataaattaacaaatgttggtaataatttcgttgtaatgcttatataatttttttttcttctttatataaaaatgctcgaattattacaattgatgattatgatagtcttcatgcctatgatgagttagtcttgtaaaaggcactatcaaatcagttaatgagtgcttgcattgacgcaaactttaagacatatactttaataaatttttaaatcaatttgactttaaaagtaaagttagcatttagcaatgcattagatctaaactaaatctaatgagctgcaagatacattgagaattttgatcaat

SEQ ID NO: 270811 - DNA, 418 bp, Glycine max
cggtggcagagagcgaacccaaaactagagctaccttccggttaaaccttccactcttctctccttttccaatcaagggaataatatttcttagagatattccgaaaccatggctcacgccaatcctatgatttttgttgttggaattctaggtaaccttgtctccttctgttgctttctagcaccagtaccaacattctatcgagtttgtaagaagaaaaccacggaaggtttccaatcacttccttacgtggctgcactcttcacttcaatgctttggatattttatgcttacataaagacgggcgaaatacttctcatcaccattaacgcattcggttgtttcatagagacagtttaccttgtcatctatatcacttattgccccaagaaagctaggttctttaccttcaagatg

SEQ ID NO: 270812 - DNA, 428 bp, Glycine max
cctgcataccgctgcgacaagagacaagaagcgacggcagagagcgaacccaaaactagagctaccttccggttaaacggtccactcttgtctgcttttccaatcaagggaataatatttcttagagatattccgaaaccatggctcacgccaatcctatgatttttgttgttcgaattctaggtaaccttgtctccttctgatgctttctagcaccagtaccaacattctatcgagtttgtaacaagaaaaccactgaaggtttccaatcacttccttacgtggctgcactcttcacttcaatgctttggatattttatgcttacataaagacgggcgaaatacttctcatcaccattaacgcattcggttgtttcatagaaacagtttaccttgtcatctatatcacttattgccccaagaaagct

SEQ ID NO: 270813 - DNA, 414 bp, Glycine max
ggaaggagaacgcgatggcttttttgtcttttgttgttccccttcccaatcttcaactttagggttcctttaatctcgttattcctcttcactcccaagctccgttcactccaacaacactccgatttacaaatggatggaccagctggccgaggtggtgctggcctggacatgtttctaccaaattataaattgggaaaaacactcgggattggatcttttggcaaggtgaaaattgcagaacatgtgttgactggccataaggttgcgatcaagatccttaaccgacgcaagataaagaacatggaaatggaagaaaaagtgagaagagaaatcaaaattttaagattggtcatgcatcctcacattattccactttatgaagtcattgaaacttcaactgacatatatgct

SEQ ID NO: 270814 - DNA, 426 bp, Glycine max
gagaggttgacgcaattcagaataacactggatgctgggtgaggatccagaggttcttggccacactggccataactgtctccatactcttgggaaatggaaaccccgttcagtgcttcgactgcggtagccaccaaaaacagcaacacagtttgtgtgaagagctcattatcccctacggttacccctgctccgagcatactattcaaacgaaggatggcttcttgttatgtcttcaacgtgtctcttcttcttcttctcttcggcttcggaacgatggagaacgaggccctccggatctgcttctgcatggcttattcatggcaggtgatgcatggattctaaatactccggaccaatcacttggcttcatacttgcagatcatggatttgatgtatgggtaggaaatgtgcgtagaacacggt

SEQ ID NO: 270815 - DNA, 318 bp, Glycine max
ttgttctagtgtgtgattgtttgttgttgtagcgtcgtgcgtcttctttagtggtggtgtggttgtgtttgttttttctctcacctgaaaatgtcttgctgcggttgtaactgtggttgctgaagctcctgcaagtgctgcaactgctgctgaggctgcaatatgtacccagacttgagctacactgagtcaaccaccaccgagaccttggtcatgggagtcgcacctgttaatgctcaatttgaagatgctgaaattactgtgcccgctgataacgattgctgcacatgtggaccaaactgctcctgcaacccctgc

SEQ ID NO: 270816 - DNA, 441 bp, Glycine max
  unsure (1)..(441): unsure at all n locations
tagggaaggtgcaagagtttgttgtgagctgtaanctagtttatcgtgaggagaatatgaagttgtttgttttctttgttgctgcagtagttttggtagcatggccatgccatggcgcaggctaccaaaggttccctctccgaatgaaaactggctatggtgagcgttcttcggaggtaaaatgcgcaagttttaggcttgctgtggaagcacacaacattcgagcctttaaaaccattcctgaagagtgcgttgaaccaacaaaggactacattaatggcgaacaatttagatcagactctaaaacagttaaccaacaagctttcttttatgctagtgaacgcgaagtccatcacaacgacatatttatattcggcatagataacaccgtactctctaatatcccatactatgaaaaacatggatatggggtggaggaat

SEQ ID NO: 270817 - DNA, 321 bp, Glycine max
ggtagttgtatgacacagaaattaagctagagctacagagtttttgtcttttctcaccttccttgtctcccttcagacaagggacgaaaaatcagagagagagagagagagagagagagaaattccaaaaccatgtcgtcccacagtcatctaagtttcgcctttggggttctaggtaacatcgcctccttcgtgtgctatctggcaacactaccgacattttatagagtttgtaagaagaaatcaaccgaaaggttccaatcaattccatatgtggctgcactcttcagtgcaatgctttggatcttttatgcctatgtg

SEQ ID NO: 270818 - DNA, 436 bp, Glycine max
gtatccactttctgccatgcccaacacgagacatgctcgggtaggcggccggaagatgagtgggagtgcttttaacaagctgcttaatcgacttgcagcagaaagtcatgatctgtcaaaccctgttgacctcaaggaccattgggcaaaacatggaacgaaccgatacatctcagtaaaatagagggcgagacattgtttctggggcagcattacacgaatagaaactgcttttagtgatcaattatggattctcaagtcgaatgagaaaaataatgttaagtgtaaaggccatccgggaaagctaatgatttatagtatgcccttgcttatatgcaggatgcataagcctggtggaagctggctaaatttaagggttgaagaagtgactatatagtcattctctgcatttgtcgcacttaattgtcttaaatag

SEQ ID NO: 270819 - DNA, 466 bp, Glycine max
agaagacgacagaaggggtactactcaatctagaagaacttaatatcattttgatagtatagtatattttttttgattcttatgatcgatgattattatgttgttttaattctattaagaaattgtgacaggatatttgaaagatttattttaatttatctggacatttatattatgataactactagtataaaatatttatgattgctttggttttaataaaatcatctttggaattcatatataatgattgttttcataaattaaaaataatagaaataagcttttaaagtaattaaacatttattttaaccaatgacttcgttctttaatatttttaactatattaaccttaatttaattatttaagaaatgaatttttcataaatatttttaaaatatctatttaaataagtttgggtctctgggatgacctatttctaacacttctactgacaactgaaat

SEQ ID NO: 270820 - DNA, 452 bp, Glycine max
gaagggagatgttgtcacaaacctagatttcatccgtgagatgttgatatctagtgacttcaacatgatgatggatcagaaaatatacacatgtgagcatccccaatgcccttatagcgaagttcgccttggtttccatgataggtctgctagggacaatcatcaattgaattgtgcatacagaaacagttctgcatattatggttgttgtcccaatttccatgctatttatgataatccactcatattcccatatacaaatttttattctaacactacatcacattttttatgaactgttgcattttaatactattttatcttttcttatatatttttgtactttttcaaatatttcttatattttttattacaatatttttttattatttttttatgtttcattatcttatcttttttatatttttttttttctttttaatattattttt

SEQ ID NO: 270821 - DNA, 447 bp, Glycine max
atatgattttagtatatttatattgttcatagttctgatagttctggtattctccttttcatttatcttacccaactttttctaaaggattttctttcccaaattattctctaaagattttatccaaagaaatttatttgttttacgtgtgtgtataaatatatccatgcaaaatgaatgtctaattctacgcaacaattatctatttattttacctggtaaatttacatatttcatacattgatatttatttgtaaatcaatttattaatataaatttatatataatatattaacaaatttaaaggagtttctttaaaatttggagttaatcaaagtcaaactgatgtactcttttgcaatttctctaaagttgttaaatttttaaaatttatttgtcagattttgtagaatgtaacagaacaaatgatcctacagtattatatgt

SEQ ID NO: 270822 - DNA, 428 bp, Glycine max
gacttcactcaattaactcttccgttccttgtttctttggcatcaccagtgttccatatttcagagaaaatggctttatcatctccctctctagtgttcaccgtacagaggtgtcaaccggagctggtggctcctgctaaacccactcctcgcgaagttaaacccctctccgacatagatgaccaacagggcttgcgtttccaaattccattcatactattctatggtaatgaaccatcaatggcagggaaagaccctgctaaggtcattagagaggcacttgcgcaaactcttgttttttactacccttttgcgggtaggattagggagggacctggtagaaaattggtggtggattgtactggaaaaggtgtcatgttcattgaggctgatgcagatgcaacacttgatcaattgggtgacacact

SEQ ID NO: 270823 - DNA, 445 bp, Glycine max
gatccaacgataaaacaagatactcaatggtctagtggaagagcttcaaacgaagattcagaacgagaaaaaggggaaatgggttgtgcttatatcaacatgccaggcttcatgagggcaatgtttgttgcgttatgtgcgctgatgatattgccggagctaacacatgcaaagcatgcatgagtcactaggctctacatgtttaatatctggatgcaaaacttcacaaggctttgccaaacaaataacattgtaactgtcaatggacgatttactggtcctagaatcatagcatgataaggcgacagaattatggataaagtggttaaccacgttcaatacaatgttacccttcattggcatggaattcgccaactgaaaagtgcatgggcagatggacctgcctatatcacacagtggccaattcagacaggccaaagttttg

SEQ ID NO: 270824 - DNA, 428 bp, Glycine max
gacagcggaagaatacaccgtcacgcgctgcatgccctttaccttgtgcttcctgcgttcctgtgagaacccacgttctctaacgcgcttctccttcaaagttcaaattcctatacatttgcgtaatcgcttctcaaatctcaacaaaagtattcccaaaaaaccctaattattattattaaacatgaggccgattctgatgaaaggccacgagaggccactgacgttcctcaagtacaacagggacggcgatctccttttctcctgcgccaaggaccacaaccccaccgtctggttcgccgacaacggcgaacgcctcggcacctaccgcggccacaacggcgccgtttggtgctgcgacgtctcaagagattcgggtcggctcgtaacgggaagtgcggatcagaccggcaagctattgaacgtgc

SEQ ID NO: 270825 - DNA, 354 bp, Glycine max
ctacatatttgacatggttacatgcaacaaaagatgcatcgatcaggtggaactctgatgaagggtgcagagatctacgcactgcacttagcactgccaaatggcagttagaggaatttgcacgggcggtgaggtcaagttatggcaaaagctcaagtgaggaagcgagaaataggcaccgagattttatcactgcaattgaggataatataatgaaagttgagcattcgttgagtgaatcagttgttcctggaggcaaggcgtctctgccttggttgcgtttagatgaatgagaacaggatgaaccttgctttgttctttcaggaatgccagcagctaacaacaaggacattg

SEQ ID NO: 270826 - DNA, 419 bp, Glycine max
atggtgaaggtgcatatgcgtcccatgggttttaagaacaaaccttactggatcattaagaattcatggggcgagagctggggagagaatggatattacaagatctgcagaggtcgaaatgtgtgtcggagtagattccatggtctcaactgtagctgctatatatgcatccagccattaaatacaaagatatgcctgattgtggttgtgatgtgatactggactaaggggagtttgtctaaatatttatggtgtgaactttatcatttggtactggtaaaattatctccgtatacgatcaggaaactgctaacaccatgttgtttatgtagtatgtaatttctgtatgtatgcttgacatatacaagtgggaaatccgaggaaatgtgtggtcctaaaaatggtgcaagataagcaac

SEQ ID NO: 270827 - DNA, 449 bp, Glycine max
gatgttacggttgggccatcttgtccatctatcccacggctaatggttgattttccttgtttatttatcttcttcctcccttgtttgtttgtttctttgtttctttggcttgacaagaagaagatgatgatgatggacaagggggtgttggatgatgtgataagaaggcttctggaagggaaaggagggaaacaggtgcagctctctgagtccgagatccgtcaactctgcgtcaacgccagacaaatcttcctctctcagccaattcttctcgaccttcgtgctcccatccgcgtctgcggtgatatacatggtcagtaccaggacttgctgaggctttttgaatatggtggctaccctcctgcggcaaactacttgtttctgggggattatgtggatagagggaagcaaagtttggagactatatgtttgcttttggcctacaaaat

SEQ ID NO: 270828 - DNA, 453 bp, Glycine max
tgcccttttcccctcagttcttggcgggacttgtgccattcgtggtgcttttggttgtggtaaaacagtcattagtcaggctctttctaagtattccaattctgatgctgttgtatatgtcggctgtggggaacgtggaaacgaaatggcagaggttctaatggactttccccaacttacaatgacattacctgatggtcgtgaagaatctgtcatgaagcgcacaacactagtggctaacacttcaaacatgccagtggctgctcgtgaagcttcaatttatacaggaatcacattagctgagtattttagagatatgggttataatgtcagtatgatggcagattctacatctagatgggcagaagcattgcgtgaaatctctggacggctggcagaaatgcctgcagatagtggatatcctgcataccttgctgcacgtttagcctcttt

SEQ ID NO: 270829 - DNA, 381 bp, Glycine max
tacaagaatacgaccgaatggtactctactaccctcagttcttaacggtactagaggcattagtgaagcttttcaccgtggcagaccagtcattattgcatgcatctttctaagtattgcaattttcgcatctatcctatatgcactctgaagtgaacacagaaacgcaccgatccatgatctaactgactctccataaattacaatgacattagacacatattcgccagataacattgtcatgaatctcatatcaatgtttggtaacactataaacatgccaatgcctgctactacaaacttaaatggatacactattcacattctctgtatattttagagatatgcatgataatgccagtttgatgacatataatacat

SEQ ID NO: 270830 - DNA, 427 bp, Glycine max
gttgcagagctcggatggtgtaaaatgagtgtatgatgtgaagctatgggctggaaaatgtggatgtaggagatttcgggacgaaaggcctcaaaacgcttcgtcgtttgtggttactgagtcctgagtgatcttgtcatccgacctttgccatgacaggtgcgcttgcttggcaggtcaaaatatgttaataaaaaaagttttattggtttagggagagatcgcacgggagttgcccggtgtctctctctcgtgtggcgtgtggtgtttgctgtgctctccttttcgatatgccttttattattacctatctgtcgattcactccgtattacgactctggatcagagggatacatcagaggattcgctccaacttctatcgaataaggtattatctgtcaatttacattgcaaagggttaggatat

SEQ ID NO: 270831 - DNA, 419 bp, Glycine max
gaaggtgtaagagtttgttgtgagcgataagctagtttatcgtgaggagaatatgaagttgtttgttttctttgttgctgcagtagttttggtagcatggccatgccatggcgcaggctaccaaaggttccctctccgaatgaaaactggctatggtgagcgttcttcggaggtaaaatgcgcaagttttaggcttgctgtggaagcacacaacatccgagcctttaaaaccattcctgaagagtgcgttgaaccaacaaaggactacattaatggcgaacaatttagatcagactctaaaacagttaaccaacaagctttcttttatgctagtgaacgcgaagtccatcacaacgacatatttatattcggcatagataacaccgtactctctaatatcccatactatgaaaaacatg

SEQ ID NO: 270832 - DNA, 331 bp, Glycine max
taaggtgtaagagtttgttgtgagcgataaggtagtttatcgtgaggagaatgtgaagttgttagttttctttgttgctgcagtagttatggtagcatggccatgccatggcgcatgctaccaaaggttccctctccgaatgaaaactggctatagtgagcgttcttcggaggtaaaatgctcacgttttaggcttgctgtggaagcacacatcatccgaacctttaaaaccattcctgaatagtgcgtttaaccaacaaaggactacattaatgtcgaacaatttagatcagactctaaaacatttaaccaacaagcttttctattatgc

SEQ ID NO: 270833 - DNA, 397 bp, Glycine max
acgcgacaacactacatcaggttaccgatgccagaacacgacagcaggtggagtgatcatcattcacgatcagcgagaatgtctcccaagggttggatctttttacctgtgttatgcttctcatcactgtcacttagtctttgccttccttaggataatggacttgctatgaacttctacaaggaatcatgccctcaggctgcagacatcatcaatgaacaagtcaagcttctctacaagcgccacaagaacactgctttctactggctcatacacatcttccatgactgtgctgctcaaagtcgtgatgcttcactgatgctagactccacacgaaagagcttcactgagaaagaaacacatagaatcttctggttgacaaatatcacgttcattg

SEQ ID NO: 270834 - DNA, 443 bp, Glycine max
  unsure (1)..(443): unsure at all n locations
ttatnggaaccatgctaaactcattcactattgaggtaattgtgatagtacatacatgacagctaatcttactgttttattaatgtcttcagttaatataatgctgatgcttagactaacaagaaatttattggtaatgaattgaatcactgtatatatcttaattactactacaacataacacaatgtgatagaggttagatttttaggtctctatatatatatgaatttttttaatgagtttaatcctttaaataaatagaatacacattctgactaattatgtgtttgagtgttataattgttttttctagaccttttttaattccattagaaaactgataagaagtaattttttttaaaataaactaaatcaaatatgaactagacatattttatagaaaaaggatgaaaggactaaaaatcaaattctggttgtcaat

SEQ ID NO: 270835 - DNA, 440 bp, Glycine max
  unsure (1)..(440): unsure at all n locations
gagggtgttgttacttcttctctggttgattcggatgtagagtctgcagtttctcctcgttgttcttcgctttcctgttttcaatttcgattctttcgttaatttaataagatgtttgggagggcaccgaagaagagcgataatacgaggtactacgaaatcctcggcgtctccaagaacgcttcgcaggatgatctgaagaaggcttacaagaaagccgccattaagaatcaccccgacaagggcggtgatcccgagaagtttaaagagctggcgcaagcttatgaggttctgagtgaccctgagaagcgtgagatatatgatcagtatggtgaagatgcgcttaaggaggaatgggtggtggcggtggccatgatccatttgatatcttttcatctttctttggcggtgggagtccctttggatcangtggaagtagt

SEQ ID NO: 270836 - DNA, 380 bp, Glycine max
tacttttggaactatgctaaactcattcactattagagtaattgtgatagtacatacatgacatctaatcttactgttttattaatgtcttcagttaatataatgctgatgcttagactatcatgaaatttattggtaatgaattgaatcactgtatatatcttaattactactacaacataacacaatgtgatagaggttatatttttaagtctctatatatatatgaattttattaatgagtttaatcctttatataaatagaatacacattctgactaattatctacactagcgttataattgtttattctagacctttcttaattacatttcaaaactgattataagtaatttattttataatttactacatctac

SEQ ID NO: 270837 - DNA, 413 bp, Glycine max
catggaagtcgtcacgggagatgtggtgtttgtgggccagttttcatcaacaagctgcatgaggatattgtgcttcgtggactgtaggatcagatctctggtactgcttgatcacatatatgttggacataagtctgctggctaatgtatcatatacatgccaagatcgattggaaaaattatgtgccactggtatggctatgacacttctaatgatgtatcctatttgatgcaccaacatattgcaaagtgagaggtcatacaactacttttgatgggccaaatgatgacatctgacacaaattgctaggtactaaatgtccagaaagttgctaatgctgaggagacttacctggtcatcatgatcaatcacgtttaaagcgacaatctgatcatcaaagtaaacatgagtg

SEQ ID NO: 270838 - DNA, 330 bp, Glycine max
aaattcatcaaatccttcttcatttggtttactgccaataattcatggactaggtctcaaatttgaaatgggtcttatatatcaaaacaacacttactatagaatatattaccctccattatatccttcccactaacttttttcatatctttacatatttgtctataaatatcttcttgtaacaatttctactttttacatgattcaacatccatatttcttcattactctttctaattctcatcaaatgattcaacacttgaatctttacctacacatttctttttatatatcaaatttaattaattcaatgatatagtaaaatcattt

SEQ ID NO: 270839 - DNA, 275 bp, Glycine max
catgcatagtgtgtcagacatatgagatcttttaatgtgcccgttctattgctcgggggaggtggctatacaataagaaatgtggcacgttgttggtgttacgagactagcgttgctcttgggattgaactagatgataagatgcctcaacatgagtattacgaatattttggtcctgactatactcttcatgttgctccaagtaacatggaaaacatgaactcccgacatttattggatgaaataagagcaaaacttcttgataatttatctag

SEQ ID NO: 270840 - DNA, 458 bp, Glycine max
acagaagggaggttttgatgttgtcatgataaaccctggtacagcattgggccctctgctgcctccaagaatcaattcaagcatggctgtgcttgttagtgttctcaaagggggcaaagagacctacgaggacttctttatgggaacggctcacttcaaagacatagcattggcacatattttggcacttgagaacaagaaagcagcatgaaggcacttgtgtgtggaatctattcgtcactttagtgatcttgtggacaaggttgctgagttataccctgaatacgatgtggctaagttgccaaaggatacccaaccagggttgttgagagcaagtggaaaggatgcatcaaagaagctgattgatttaggtctagaattcactcctgttgagcaaatcatcaaggatgcagtggagagtttgaagagcaagggctatgtctaatatctctgctact

SEQ ID NO: 270841 - DNA, 449 bp, Glycine max
aaccggacaacgctcatgataaaaaatattcccaatgagtatacttcaaagatgcttcttgttgccatagatgagcaatgtcgaggaacttatgattttctgtatttgccaattgatttcaagaacaaatgtaatgttggctatgcattcatcaatatgattgatcctggacaaattattccattccaccaggcttttcatgggaaaaaatgggagaaattcaacagtgaaaaggtagcggtactcgcctatgcccgaattcaaggaaaatctgctcttattgctcattttcagaattcaagcctaatgaatgaagataaacgttgccgccccattctcttccatacagatggcccaaatgctggtgatccggagcctttccccttgggtaacaatattagagtgaggcctggaaaaattcgcatgaatggtaatgaggagaatggcag

SEQ ID NO: 270842 - DNA, 448 bp, Glycine max
aggaagaggacatgggttgctgatgctgaggaatgcaagagaagaggttctattgagactgcccgagctatatatgctcatgccttgactgtcttcttaactaagaagagcatatggatcaaagcagcccagctggaaaagagtcatggtaccagggaatctcttgatgcattacttcgtaaagcagttacctacagaccacaggctgaagttctttggcttatgggtgccaaagagaagtggcttgctggagatgtgcctgcagctcgtgctatcctccaagaagcttatgctgccattcccaattctgaggaaatatggcttgctgctttcaagctagaatttgaaaaccatgaacctgagagagctaggatgctgttggctaaagccagagagagaggaagtacagaaagagtctggatgaaatcagcaattgtggagagagaac

SEQ ID NO: 270843 - DNA, 443 bp, Glycine max
ggtgaagtaaaagctgctaacccaaattcttgtcagtggtaaccatgacagttgggtccttcttcatcaggacctccagggttctcaactcctccaactttctgcttctctgcactctcagtggtggtggtgtagtggcatactcagaatcacaatcaggagctgaacgtcctagtattgaagctaatgagcctgccaaaaagaaagtggtggttcttggaacaggatgggctgctaccagtttccttaaggatctggatgcttcattatatgatgttcaagttgtttcacctcgtaactactttgcatttactcccttattacccagtgtcacttgtgggacagttgaagcacggagcattgtaaagccggtccgaaacatcattaaaaagagaaaaggagaagtgaatttttgggaggcagaatgtgtcaagattgattat

SEQ ID NO: 270844 - DNA, 352 bp, Glycine max
tggggtggcagatagcgaacccaaaactggaactaccgggcctgcaaaccttccactattctctccttttccaatcaatggaataatatttcttagagatattccgaaaccatggctcacgccaatcctatgattattggtgttggaattctaggtaaccttatctacttctgatgctttctatcaccagtaccaacattctatccagtttgtaataagaaaaccactgatagtttccaatcacttacttacgtagcttcacttttcacttcaatgctttgtatattttatgcttacataaatactggccaaatacttctcatcaccattaacgcaattctttgtttcatat

SEQ ID NO: 270845 - DNA, 422 bp, Glycine max
acagaacagtttctagggccaacgaatatgcataaatacaacgagaaatgcgaatactgattccagtgagtataccgtaatatagcataatatccatcctggatatttacattatatctatatatctatctatatatagatagatatatagatagatatatacatatattgctaatatatatctaacggacttatttaaaattctttaatataatgtttactaaacaaatattccatttgaactaatcctctgaatctccaccatcgactaaaaattagctatcatgattactagataagccgctatcgtgaaattactacacacgctgctcttaggaagcagtgcatgagcatcttgggtcgagacctagtagcggcatgacatcttatcttctaaaaaataagtcctataatgaacctca

SEQ ID NO: 270846 - DNA, 402 bp, Glycine max
gcccacgaatttgcaaatctcaaacgaagccctgttctcgctctcttgaatttcacccttttagcatttgtacattcctttcccttccttgaatcgttcttaattgcgagaggggatatcggagaagttgattggcctcccattaattgcaggtctgaatgatctgatggagtctaaagttgggaagaagaagtcgtctagtagtaagtcccttttgtacgaagctcctctcgattacaccattgaagacgttcgaccacacggtggaattaagaagttcagatctgctgcttactccaactgcatccgcaagccatcctgagattccctaggttgtgtgacgacatagcccccgtagtcttgcatctgctatattattctagtctcttcttttcccttttc

SEQ ID NO: 270847 - DNA, 420 bp, Glycine max
gccgctgagctccctttctcctcggtccacagagacaaaatggaagacaggtgccaacagttcatcacgaaagaaaggactagctgagccgagatcactaactaaaacgaatttaatactaatcgaaaatactaatagaatagaaatagaactgtcttttcatatagatatcccttcaacacaacataggtcatcgaaaggatctcgaagacccaccaacgcacgaaagccgggatctttcagaaaatggattcctattcgaagggtgcataaccgcatggataagctcacactaacccgtcaatttgggatccaattcggttccttaggaggtatcgggaaggaattttggaatgtaataatatcgattcatacagatacagaagaaagggttctctattgattcaaacgctctaccta

SEQ ID NO: 270848 - DNA, 280 bp, Glycine max
ctttgactcaccggcgagtccatctatcgccagcggcgacggcgctccggccaccggtccggccaccgcctatggttccctcactttctcgtccttcttcttctcagaaatatgccttctcagaaagttgaaacaggtcatcaagacaccgaccatgatgttgcaatggattactatggtaagaggctggccacggcttcatcatatcacacaattaagatcattggggtcaataatactgtctattaccatcttgcaacatttactgctcaccaaggac

SEQ ID NO: 270849 - DNA, 208 bp, Glycine max
ccactcctacaaccacacatacggaccctgctaaactaccactcttctgcatccacagtgacacaccagtatactggttccaaccgggcgggacgaaagaaacgactagctgatcctagatcactaactaaaactactttaatactaattcaatatactaatagaatagagataacactgtcattatatatagatatcccttcaacac

SEQ ID NO: 270850 - DNA, 399 bp, Glycine max
gaccacaccgagtcgcagaaaaagaaaaaagcgatcatagtttcacttcggccttatcgagtttagggtttcggttctctaccctatctttcacgtatcgaaaccttaaatttacgatcaggtctgagcaatctggttggtagaacctttggtcttagtgagtcaagttttatgtctgaattagacgatcaaattcctactgccttcgatccttttgctgatgcaaatgctgatgactcgggtgctgggtcaaaggagtatgtgcatattcgtgtacagcatcgaaatggtaggaaaagcctgacaaccgttcatggattgaaaaatgaattcagctttaacaagatacttaaagacgtcaagaaagagttctgttgcaatggaacaatttttcaagac

SEQ ID NO: 270851 - DNA, 339 bp, Glycine max
acacaacttattttaatcacattactccatttccatctattcacattacttaccattacttctctactctttctatacctttattactcttacattcttgtatataactctatcatacttttactatctttctaaatgtatacattacatatatctctattcatttgattcacattaacaccaactcttctttcattcacccataatttaaaaatacctctatacctcttacctatataacataacattatatatttaaatcttttatcatattaaattttctacattcattattacacttaaaccttatttatacttcttctcttccattatatattt

SEQ ID NO: 270852 - DNA, 423 bp, Glycine max
ggcagcgcttgatttgaggccaggcaagccccactcaaccaccgcacctctcctcgttcacgctacccctttctgctcttcttctacctttcaagttttaaaagtataaagatggcagagacattcctatttacctcagagtcggtgaacgagggacaccctgacaagctctgcgaccaaatctccgatgctgtcctcgacgcttgcctcgagcaggacccagacagcaaagttgcctgcgaaacatgcaccaaaaccaacttggccatggtcttcggagaaatcacgaccaaggccaacgttgactacgagaagatagtgcgtgacacctgcaagaacatcggcttcgtctcaaatgatgtgggactggatgccgacaactgcaaggtcctcgtcaacattgagcagcagagccctgatatt

SEQ ID NO: 270853 - DNA, 407 bp, Glycine max
attccgcaatgtttaaagatgttctcctgtatcaaggcagggttggccacttaatggagaaaaggagcatattgattaattttagttttaaaaactccaaatctccaatgttaaacacgagtaatacttgatactaatcaagtacctataacgtgtttggtttaggatataatttgaggggaaaagttgtattatattgaatcaataattacatgattaatgaatcgttaattcatgtgatattgaatttaatttttaaaataagatctttaagttttaattttataaataaaaaatgtgaataaaaagaaaatatattatcaaatatcatcggtggaaattttttaataaaaattaatcaataataaaatcgggttgtactctgaattaataatatatatatttat

SEQ ID NO: 270854 - DNA, 166 bp, Glycine max
ccaaattgcttaactctacaacttcaccgattcataggtaatttaggcactgcttctctactctctttctatctctcaatatttctatcttacactatctttctctcattcttattcttcttaacttctttaaactatttacacattaacatattatcacaccaaa

SEQ ID NO: 270855 - DNA, 148 bp, Glycine max
tgtgtctaacattatgacaaggcatcatatggggcttcaggtgcacatagcatggtagaatgtccaatcactaatttaaactgatccatccacactttcggttacaatttccaaaacatccttccctaaaatacttgacacataaatc

SEQ ID NO: 270856 - DNA, 205 bp, Glycine max
aatccctaattccaggcaggagtcacgccacccttccgttccgataccacaacacaacattaaggttaatgtgtaacagtttgttgttagctgtaagctagcatatcgtgaggagaatatgaaattgactctttactttgctgctgcagttataatactagcattgccatgccatatctcaagctaccaaatgttccctctccaa

SEQ ID NO: 270857 - DNA, 423 bp, Glycine max
ggcagcgcttgatttgaggccaggcaagccccactcaacgcaccagagctctcctcgttcacgctacccctttctgctcttcttctacctttcaagttttaaaagtataaagatggcagatacattcctatttacctcagagtcggtgaacgagggacaccctgacaagctctgcgaccaaatctccgatgctgtcctcgacgcttgcctcgagcaggacccagacagcaaagttgcctgcgaaacatgcaccaaaaccaacttggtcatggtcttcggagaaatcacgaccaaggccaacgttgactactagaagatagtgcgtgacacctgcaagaacatcggcttcgtctcaaatgatgtggtactggatgccgacaactgcaaggtcctcgtcaacattgatcagcacagtcctgatat

SEQ ID NO: 270858 - DNA, 213 bp, Glycine max
gctatctatatatatatctaactaatataggaatctgggaaagatgattagtctaggcataagaggagatgagatcatatgaaatatttaaccgattctttcctttgtttgggctactggccattcgccggaagttacgggtttaataccgatattttagcaacaaatctaataaatcttagtgttgtgtgaagagtattggttttttttgga

SEQ ID NO: 270859 - DNA, 356 bp, Glycine max
tacgggtgctataagacgacagatgggaggagcatgttgattatatagaaagtaaagggcaacaatcatttttgtttaccatgggtaaggacaccatcgctgacataataacctatataagaaatgctgacatgaataaaaaaggaatggttcaaataccatttactaacataacataaaacattgtaaaaatacttttacgcgagggttttgttgaaaacgttcagataacatagagaaaactactaatattttttagttttaactctactgtatggaagaaatagaaaaggatcatataaaagttttttaaatttataactgatcagtacacccggtctactaatatattctaa

SEQ ID NO: 270860 - DNA, 443 bp, Glycine max
ggtttgcgtttgtgtttggtcttagacgccgcacgcggccaccgtcactgtttcagatcctcgaactgtgtcttcttcgctttctggtctttttattaggttttgttcatcgatccatcgccaaacatgccttccagtcacttgcttctcgaggaacctattaggatggtctccatccttgagccatccaagcctagttttttctctgcaatgacaaagattgttggtaccctgggacctaaatctagatccgtcgaaaccatttctggttgcctcaaggctggcatgtctgtggctcgttttgacttttcatggcatgaccctgagtaccaccaggagactttggagaatttgaaggctgctatcaagagtactaagaagctctgtgctgttatgctggacacagtgggcgctgaaatgcaagttgttaacaaaagtgagag

SEQ ID NO: 270861 - DNA, 395 bp, Glycine max
ggaaaacaccgccggttcctcggcaccgacggcaacctcttcgtcgctgccaaggccttcgccgccggcgtcattctcgccaccggattcgtgcacatgctctccgacgccaccaaggcacttcgccacccgtgcctgccagcgttcccgtggtccaagtttcccttcaccggtttcttcgccatgttggccgcgctcctcacgctcctcctagatttcgtgggaacgcaatactacgagcgcaagcaggggatgaaccgcgccccctccgaagaaccagtacgggtcggctcatccgaacccggtgggaatgggaaggtgtttggggaagaagaaagcggcggaatgcacatcgtggggatgcatgcacatgctgcacatcatagacataacca

SEQ ID NO: 270862 - DNA, 423 bp, Glycine max
tactgctgctataagactacagaatggctcattttcatgggggattatctctagtccggaatgcaaagtttatactataagagagaggcattactccaactattgataggattgcaaaataccttaacatgtctcaaaagaaagtcagaaatgctactgatgcaatcagcaaaattatctcgcttgatatataagcatttccctctctgaatggtctacaaggagaaactcatcataattatattgcagataatcttatggagaacatcccatggaatggagtagactagtggacactaaatgatgaagtgaacagactcattaatgttacccttttggaacgagagaaataaatttatcgaccttattattgactggaaaaagaatgtcttacctgggaagacataatcaaactgataagtt

SEQ ID NO: 270863 - DNA, 415 bp, Glycine max
ggggaagttgtaggggtttcaggtcacgcattctatcgctgggtgtgtcgagtcaacaaaacgccaccgtttcattgatctacttcctccaaggccaggtctccaagaattggtaccaattcaagctgcaaatatacttgaacttcaacttatcccacattctccactctcaatggcttcaactctcaaatctggcggaattcatacaggggcaatcaatgatgatttatacaaggaattgtggcatgcatgtgctggtccccttgtcactctccctcgtgaaggggaacgagtctattactttccacaaggtcacatggaacagcttgaggcatctatgtatgatggattatagcatcagatgccttccttcaacctgccttctaaaatattatgtaaagtggtcaatgttcat

SEQ ID NO: 270864 - DNA, 327 bp, Glycine max
tacggttgctagaagactacagaaggttacaggatatgcattttatttacaacagcgatggcttctgtgcctcaaccaaaaatctcccttctaaccttattcttcttctcgtccttcaccatcattgcgcatgcaattgttcctcaaaacgaaaccttcaaatttgagaactcatgtgaacttggaccctacatcgttgagtacggtgcagattacataatgataagcatcttcaactctccattccaagttggtttctacaacaccaccccaaatgccttcactctagctttgcgtgtatggcttcaacgctcggatctactattt

SEQ ID NO: 270865 - DNA, 355 bp, Glycine max
cagttgagtcctatttatgatgtggctgctatactcgcatggatccagtcatggcgttggtgatcccaacccaaattctcctgcaaactctgaagcagctctaatgtttattgagaacaagcgtgagtacaatcgaagagttagggaaattgttgatcatagttttacagcatattaagttcatccttatatgcatatgatgctttcaaggcatgaatttggtttcattgatggcaactataacaatgattgtgcaaactcatcacatttatattctctgcttatatgaatgatagcatcatcttatctttaacttattatagcttctgcattgcatatttcatctaatgtaaaa

SEQ ID NO: 270866 - DNA, 424 bp, Glycine max
ggaatcacagtggtgccttatcgctgtggttttcatcggcttccttctcttatatttcttttttttttttgtcttcgccgcacgccgaaacaatggccggaaaaggagagggtcctgctatcggaatcgatctcggaaccacctactcttgtgtcggtgtgtggcaacatgaccgagttgaaatcatcgccaacgaccaagggaacagaacgacgccgtcttacgtcggcttcactgataccgagcgtctcatcggtgatgcggctaagaaccaagtcgccatgaaccccatcaacaccgtcttcgatgccaagaggttgattggtcgtagattcagtgactcctctgttcagagtgatatcaaattgtggccttttaaggtcattgctggtgctgctgacaagccaatgatcgtggttaacta

SEQ ID NO: 270867 - DNA, 442 bp, Glycine max
ggtggcagttgtgtgacacagaaattaagctagagcgggatagttgcttcttctggtctcaccttccttctctcccttcagacaaagggacaaaaaatcagtgtgtgagagagagagagagaaattccgaaaccatgtcccacagtcatctaagtttcgcctttgggattctaggtaacattgcctccttcgtgtgctttctggcaccactaccaacattttatagagtttgtaagaagaaatcaaccgcagggttccaatcaattccatatgtggctgcactcttcagtgcaatgctttggatcttttatgcctatgtgaagaccggagaaacgctctttatcaccatcaatgcattcgggtgcgtgattgagacaatataccttgccgtatttatcacttactgcccgaagaaagctaggatgacgacattgaggatgat

SEQ ID NO: 270868 - DNA, 428 bp, Glycine max
gacactaaacacgttaaacgaagagcatcactgaactgacaaagcaaccctatgtcgaaggcggtttgtgtcaccggagccagcggcgccatcggatcatgggtggtcctactcctcctacagcgtggttacaccgtccatgccaccgtccaagatatcacggatgaaaatgagacgaaacatttgtaggaaatggatggagcaaagagtcatctccatttttttgaaatggatcttcttgacatagactccattgccgctgccataaagggttggtccggcgtaatccaccttgcatgtcctaacatcattggtcaagtcgaagatcccgagaaacatatattggaaccggcgataaaaggaacggctaatgtgcttaatgcggctgacgaagcaagggtggcgcgcgtggaggcgacttcatcgat

SEQ ID NO: 270869 - DNA, 431 bp, Glycine max
ggatggcaagcatatgtagcatacatgaatataggatgctactaccttatcgggctcccctcggaattatcatgggctgggtcttcaaaagtggtgtaactgtaagtataatccgctacttaattatcacatctaaacactgattttgggtttgaataattcttaagtggtgtgctgacatgggaatgatatgcatggcagggaatcttgggcgggcatgatcttcggtggcacagcaatccaaacgctgatactgattatagtaacgatacgatgtgattgggaaaaagaggtatagttttactgttacataaataatccggagcttattccaaatccttatcagcatcacttggcatattgacaaacttgaaattaagatctccacataataagttattcatatcaatagcgtaaatatgcatgttcta

SEQ ID NO: 270870 - DNA, 340 bp, Glycine max
gacaccaacaccaaaacaaacccactaagagggcttcctttgtatccttcctagtgctgcttcttgcagcccttatgctcatgcctcaagggcttgctacttactacaaaccaattaagaagccaccagtgtacaagccttcaatgtacaagccaccagtgtacaaaccaccggtttataagccaaaaccaccggtttacaagccgaaaccaccggtttacaagccaccatataacaagcccccatacacgaaaccaccttatggaaagtacccttcagtagaggacaacacccatgcctaaagcgagcaatgaggtctattatctacttacataataag

SEQ ID NO: 270871 - DNA, 214 bp, Glycine max
aaatggcaatcagcaaggaccacctttcatggctaagtactcttggataaccgggggtgaattattaccgtcagggaaaggttaaaacaacccctatctgttagtgaaatataacatgaaacctttagctcccaatcaatgtgaggagtctcaaaactattaccgcgtgccctttgaataaataacctacgactcataggcaatggcttggtta

SEQ ID NO: 270872 - DNA, 458 bp, Glycine max
tacggctgcgagaagacgacagaagggggcacaagtgagtttgttgatcgagataactagaaacagtgtgatgaaaatgaaggtccttgttttcttcgttgctacaattttggtagcatggcaatgccatgcgtacgatatgttccctcttcgaatgaacactggctatggtgcccgtactccggaggtgaaatgcgcaagttggaggcttgctgtggaagcacacaacatctttggctttgagaccattcctgaagagtgcgttgaagcaacaaaggaatacatccatggcgaacaatatagatcagactccaaaacagttaaccaacaagcttacttttatgccagagacctcgaagtccatcccaaggacacatttgtgttcagtatagatggcaccgcactctctaatattccatactacaaaaaacatggatatggggtggagaaatttaact

SEQ ID NO: 270873 - DNA, 334 bp, Glycine max
ggctgcttttgcttttcactccttggacaacacaacggcagtccttccccctgaggtttgtatctgacaaaccgctgctgacactttcatgaaaaccataggatcccgagagataacaggtgccaatgatgtcaaaaatgatcgaggagtgacacgccctgattggcgatttccacttaaagtttgacgtatttacaacttcatggctgttcgtagagtttgacagatcttcaaggagatgccggactatttctgactcaactgtgtcatacccagggaaaaagcaagtccttggaagattaaaaagagcagccaaacttcttttttaaggaac

SEQ ID NO: 270874 - DNA, 379 bp, Glycine max
gacagcggaagaatacaccgccacacgctgcaggccctttaccttgtgcttcctgcgttcctgtgagaacccacgttctctaacgcgcttctccttcaaagttcaaattcctatacatttgcgtaatcgcttctcaaatctcaacaaaagtattcccaaaaaaccctaattattattattaaacatgaggccgattctgatgaaaggccacgagaggccactgacgttcctcaagtacaacagggacggcgatctccttttctcctgcgccaaggaccacaaccccaccgtctggttcgccgacaacggcgaacgcctcggcacctaccgcggccacaacggcgccgtttggtgctgcgacgtctcaagagattcgggt

SEQ ID NO: 270875 - DNA, 458 bp, Glycine max
gacgacagacgggggctggcataaagtgccctttgttgtgcaaagagttcatcatagatgcatggcaactctactatgctcgaactaaaggtgcagatgcagaccttttaattgctgctgttttgcctgatcttgacatcaaatacatgatcaagatatgcaaattactgggattgactgcacttgttgaggttcatgatgagagggaatttgatcgtgttcttgcaattgaagggattgaacttattggcattaacaaccggaatatcgaaacatttgagctggatatcagcatcacaaagaagcttcttgaaggagagcgaggcaaaataatccgcgagagaggcataactatggttggagaatctggtctgctcacccctgatgatattgcctatgttaaggaagctggtgttaaagctatattggttggagagtctattgtaaaacaaaatgat

SEQ ID NO: 270876 - DNA, 435 bp, Glycine max
ttgggacatataagacaaaattctaaactagaggagtctatgagatgagaggtagaaactgaggacttatctagtagttagagatgcctgagttttgcgtgacaggtggtactgggttcatcgcatcttacctggtcaaggccttactagagaagggtcacacagtgaggaccaccgtgagaaacccaagggatgtggagaaggttggttttctgactgaactaagtggagccaaagagagactgaatattttgaaagcagatctattattggaaagaaactttcatgaggcagtgaaaggagtttattgtgtctttcataatgcgttccctgtgcttatttcttatgatgagaaccgttcaagtattttgccctttataccccacttgtagaatttttgtctttatctcaatgggctttcttacaaaaaaaata

SEQ ID NO: 270877 - DNA, 458 bp, Glycine max
atcatcataaaaaaaatattttattatgaaacttattcaaacactataaatccttttcatcattaacttgttctgaaaatcaggtccaaaaaggaggggaaacgatcctaaatactgctgcagaaaagaacaatggtggcatggtcacagaaagtatgaaccacaggagtgatgccacaaagaataatgcaacgaacgataacctcaaacgtgtgagaaagctgacaaatatgacagaaaggttaaccaaatctttgcttgatggtgttggaataatgagtggatcagtgatgactcctgtgctgaaatcccaaccaggacaggcattcctaaatatgctccctggagaggtgctgttggcttcccttgatgccgtcagtaagtaacaaccaaagtctaaaatattactactatacggctagcatatatggtcttcatattatgaaaatatcaagaca

SEQ ID NO: 270878 - DNA, 428 bp, Glycine max
gcccgcagttaaaattaggcctgcttgcccaggactgggtcgtgtgcctactccatatcgatcaaagttgaatcgtgatcctattaatggagcacattcaatgaaacaccaactagcaccatagagaagcggacataaactgtataatcttgaccaattcaaaagatcatttaaggcagttgaaataactgaattatcgggtgttagatcaactatgggaaactaaatggaattcataatcgtctccatatttttagatagcggtctaatctaaatgccttaatatgccaggaattcagaccattctaatgccctatattgccatgcataaactgcactaacatgtaggataagcacgcatgttaaagctgttataaacacggtgaccgctaattcatccaaactcattgcccaagaattattaaaat

SEQ ID NO: 270879 - DNA, 392 bp, Glycine max
gtggtgcatacaggaagacatgtcaatgaggccatctatgaccagagttgtccaaatgttggagggtatttgtattgttcctaacccaccaaccagttcttcgttgggttctcgcctttatgccactgtgttcaaatcctccagtgaaggggccacctcttctggtccctcagactgtaccagtgatgcttatctctccgcggttcgcctttcagggcctagataacaatacctgtctcttttgtttattttctgtgtgttgtattgttgagtaaattagtttgtgtaatacagcagagctactctggattgtgtgggctttgcatgcttccagctcttgtacattttgttcaagttcctcaaattttgtaatataaatagctattcataat

SEQ ID NO: 270880 - DNA, 459 bp, Glycine max
  unsure (1)..(459): unsure at all n locations
gaagggtttcaagttattgtgagcaaagagagatagtgagtgaagtaactgaagagaagaaaaaatgccgtgcctcaacctcagcaccaacgtgtccctcgaaggcgtcgacacctcttccatcctcgccgaagccacctcctccgtcgccagcataatcggcaaacccgaagcctatgtgatgattgtactgaaaggatcagtacccatagcttttggtgggaatgagcagccagcagcttatggagaattggtttccattggtggtcttaaccctagtgtaaacaaggaacttagtgctgcaattgcttcaattctggaaaccaaattgtcagtgccaaagtcgcggttcttcttgaaattctatgacaccaagggttccaacttcggatggaatggatctacattctgaaatccgaattccatgttacattggntgtggtaccttgaatgttggat

SEQ ID NO: 270881 - DNA, 365 bp, Glycine max
ggatgcaatcaagaatacaatggcgtggcatagagtgagaagttatataataataatgtcaatctacatacttattgaactaatatttataaatagacagtgattagtgcctgttttcaactatctagattaaatgattacacccgctactgatgacgttataatgattaatgaaaactcgtctaatcacactgtctttcttgcggttgatgctgctaaaagagcctttttccataacaaaagcaaagattggtcttcagctcctggctctgttcgagctcgctatctattagccattcattccaagataacagataaaaaagatgaactattaaagcttgaaacaatttattgttgaaaatcac

SEQ ID NO: 270882 - DNA, 337 bp, Glycine max
cctcgtacaggtccactccccatatctctctatctgcggtgtccccgcccactccggaactcggtaccctattccgttctctcttatccatcatgaatgggggagagtactggaccgagtctatagatccgctctcaacttgcgtgtaataagaagggcaccgtcatcctgactaggatacccgccagcatggtgatggcatctatagaatctctcatgcctaagaggccttctagggctttattcgcattcatcggggcatacatgaaagtgcttaacatggaacatcccgtcgccacaccatcgtatgctggggacacagctgatgtagcaaaat

SEQ ID NO: 270883 - DNA, 364 bp, Glycine max
gagcgcaacgggatacacgcattgaattcaaactctaagtacattccgtgtgttgcgctttcttactaaaaaccacacatgtagaacacatgcggaatctgacactgctctcacaagactatctgcaccaagggacacatctatggtgttattgtagacactgagaagagacacatcgacactgttgacatggatgttccaacctctgcacattatgaaaagcgcaagtgtggctctaactgctcttgcacagactgcacctgtggccattaaagaatatgtgagaaaatgaaattgccatgtgtttggctatacatatatccaaattgtgttctcttcgtgtgaataaatgtgtgctctgata

SEQ ID NO: 270884 - DNA, 413 bp, Glycine max
taagcagaaatatgcacgttacctacttagatcttatattgaagacaataagaagtccaagtggtgtcctgctccaggttgtgaatatgcagttacttttgatgctggtagtactggaaattatgatgtctcttgcctctgttcatatggcttttgttggaattgcactgaggaggctcatcgcccagtggactgtggcactgtggcaaagtggattttgaagaacagtgcagagtctgaaaacatgaactggatacttgctaactcaaagccatgtcccaagtgtaagcgaccaattgaaaaaaatcatgggtgcatgcacatgacatgcactccaccctgtaaatttgaattttgctggctatgcgttggtgcatggtcagaccatggtgaaagaactggtggtttttatg

SEQ ID NO: 270885 - DNA, 450 bp, Glycine max
ggtggcagagagcgaacccaaaactagagctaccttcccttcaaaccttccactcttctctccttttccaatcaagggaataatatttcttagagatattccgaaaccatggctcacgccaatcctatgatttttgttgttggaattctaggtaaccttgtctccttctgttgctttctagcaccagtaccaacattctatcgagtttgtaagaagaaaaccacggaaggtttccaatcacttccttacgtggctgcactcttcgcttcaatgctttggatattttatgcttacataaagacgggcgaaatacttctcatcaccattaacgcattcggttgtttcatagagacagtttaccttgtcatctatatcacttattgccccaagaaagctaggttctttaccttcaagatgattttcttgttcaacgttggagtgattttcttg

SEQ ID NO: 270886 - DNA, 410 bp, Glycine max
ggtggcagagagcgttcccaaaactagagctaccttcgcttcaaacgttacactgtggtctccttttccaatcaaaggaataatatttcttagagatattccgaaaccatggctcacgccaatcctatgatttttgttgttggaattctaggtaaccttgtctccttctgttgctttctagcaccagtaccaacattctatcgagtttgtaagaagaaaaccacagaaggtttccaatcacttccttacgtggctgcactcttcgcttcaatgctttggatattttatgcttacataaagacgggcgaaatacttctcatcaccattaacgcattcggttgtttcataaagacagcttaccttgtcatctatatcacttattgccccaagaaagctaagttctttacctt

SEQ ID NO: 270887 - DNA, 386 bp, Glycine max
gggggagtttcttcttggatcttacggtcttgtttgctaatattctcattcttctgtctctgcttcttctccttctgaactaagagatggggttgtctttcaccaagctttttagccggctctttgctaagaaagagatgcgtattctcatggtaggtcttgatgctgctggtaagactaccatcttgtacaagctcaagctgggagaaattgtcacaaccattcccacaattggattcaatgtggagactgtggaatataagaatattagctttactgtatgggatgtgggtggccaagataagatccgtcctttatggagacactacttccaaaacactcaggggcttatctttgttgtggatagcaatgatcgtgaccgtgta

SEQ ID NO: 270888 - DNA, 387 bp, Glycine max
gggaaggaggatgagcaggaggtgagaaagaatgtgctgcagaagcttgatgcctgctttggtgggtctgtgtcgaaagaggctaattatgcgagattggacagggtttcggatttgctcatgttttacttatcctcaatgtgttatatatttggttttgattcgccatgtggccctggcagttcgttcaagtctggtaaattgatttgggcttacgatgctgctggttgtttaaaccaattagaatctagatcgtttatggggaaattggctggtcttcaaactgttgtgattgttcctcttaagtccggggtgagggagcttggttcgctcgaaatggtgcctgaagagcacggagatgtggagatggtcaggacagcatttggg

SEQ ID NO: 270889 - DNA, 433 bp, Glycine max
gatatccatgagttacaagaagctgcctgtccacttgaagcctggaaacaccatattgtgctctgatgggacgattactctcactgtcttatcttgtgatcctgatgctggtactgttagatgtcgttgtgaaaacactgctacgttgggtgagagaaaaaatgttaaccttcctggtgttgttgttgatctccccacacttactgagaaggataaggaagatattcttcaatggggtgtacccaacaagattgacatgattgctctttcatttgttcgcaaaggctcagatcttgttaatgtccgcaaggttctggggccacatgcaaagactattcagttgatgtctaacgtatttttttgttgaacttccttaataactagaggttttattattcatgccggttctcagttgctctggcaatggctgtgt

SEQ ID NO: 270890 - DNA, 365 bp, Glycine max
cacacagcaagggacggtgcgagtgagtgagtatggcgtctccattgtcagctcaattgggtcaatgtcagaactcacttccacctcttcagggtaattttagccaagatgtgtctaaggttcaaaggtcgcgtgtggtatgttacggtaccagatcaccgcttggttattatgaggaagcattgacatcaagatcacataacgccctgaggttttctgtcacgcgacaatctgaaacacggtccattggatataggagaatgacatgtgtcaatgctgcagacaatgttgtagagcttcaagccaaggtgacaaccaagcgcttctttgatgtagaagttggtggtgaacctgtgggcaggatt

SEQ ID NO: 270891 - DNA, 466 bp, Glycine max
gactgaaccagacatccgagtaaaaagatactgtagttggaagttgctcggagcttcaacattcaatatcgagcgtttcgatatattacggaactgaatcggacatcagagtaaaaagttgatgtcgtttgaattatctcagagcttcggtattccatttcgagcgtctccatatattacgggactcagtcagacatccgagtaaaaagttactgtcgtttgaattttctcagagcttcgataatcaatttcgagtgtcttattatattacgcgattcagtcagacaaccgagtaaaaagttattgtcgtttgaattatctcagagcttcggtattccatttcgagcgtctcgatatactacgggactcaatcagacatccgaataaaaagttactgttgtttgaatttgctcagagcttcgataatcaatttcgagtgtctcaatatattacgcgactccgtcag

SEQ ID NO: 270892 - DNA, 339 bp, Glycine max
gatagcagcatcatacaaagcattgaattcaaaaactgaagttcattccttgtgttttgctttcttcctcaaaaccaaacatgtcgaacacatgcggcaactgcgactgcgctgacaagactagctgcaccaagggaaacagctatggtgttattgtagagactgagaagagttacatcgagactgttgtcatggatgttccagcagctgagcatgatgggaagtgcaagtgtggcactaactgcacttgcacggactgcacctgtggccattaaagaatatgtatgaaaatgtaattgccatgtgtttggcaatacaaatattcaaataatgtaatct

SEQ ID NO: 270893 - DNA, 438 bp, Glycine max
  unsure (1)..(438): unsure at all n locations
gcacttcaattgcaatcaaattagttcattctctttgcgcagttccctacctctcctttcaagatgcanatcttcgtcaagaccctcaccggaaagaccatcacccttgaggtggaaagctctgacaccatcgacaacgtcaaggccaagatccaggacaaggaaggaattcccccggatcagcaacgtctcatcttcgccggaaagcagctcgaggacggccgtaccctcgccgactacaacatccagaaggagtcaacccttcaccttgtccttcgtctccgtggtggcatgcagatcttcgtcaagactctcactggcaaaaccataaccctagaggtcgaaagctctgacaccattgacaacgtcaaggccaagatccaggacaaggagggaatccctccagaccagcaacgtctcatcttcgccggaaagcaa

SEQ ID NO: 270894 - DNA, 367 bp, Glycine max
gggattcataggtcagcaaccttcttgtcttgagtgatggcgaaggacatcaacctcagctctcgaacccctctgctcttgctgttatgtttcaccactctcaccgaggctgtatggttaaccatccccagcaagggaaccaagtgcatgtccgaggaaatccagacacgcgttgtcgttttagcagattactatgttgtagccgatgatgtccagggtcaccaacttcaaactatttccgccaaggtgacatccccttatggaaataatcttcaccagaatgaaaatgttacccacggtcagtttgcatttacaactaccgagtctgggaactacgtggcatgcttttgggtgaataacaaacatc

SEQ ID NO: 270895 - DNA, 318 bp, Glycine max
ggtggtgaactaatttttggaggtatggatcctaaacactttaaaggagatcatatttatgtcccacttactaaaaagggctactggcagattgaaatggagagatttttttattggaggtctctcaacaagtgtttgtgaaggaggctgcgctgctattggggattcaggaacatttttgcttgctaggccaactactgtggcaactgaaatcaatcatgctcttggagctgaaagagttctacgtgtacaatgtaaggaagttgtatctgaatatagagaatagttatgggatctcttggtatcacgggtacgacc

SEQ ID NO: 270896 - DNA, 397 bp, Glycine max
  unsure (1)..(397): unsure at all n locations
ggaggatttggatctgttcacagagggcttctgccagatggacaagtcattgctgtcaagcaacataaattggctagttctcagggtgatctagaattctgctcagaggtagaagtcctgagctgtgctcagcaccgaaatgttgttatgttgattgggttctgtatagaggataaaagaaagctattggtatatgagtacatatgtaatggatcattggattctcatttatatgggagacagccagaaccattagaatggtctgcccggcaaaaaatntgctgtggagctgctcgagggttgcgatatcttcatgaagagtgcagagtgggttgcattatccatcgtgacatgcggcctaacaacattcttatcactcatgattttgaaccactgg

SEQ ID NO: 270897 - DNA, 457 bp, Glycine max
ctatagaggagactcgcaagaagatatggcttgtggactcaaagggtttgattgttggttcaagaaaggcttcacttcaacacttcaagcagccttgggctcatgagcatgagcctgtaggcagtctcttagaagctgttaaggtaatcaagcctacagttttgattgggtcatcaggagtgggaaaaacatttacaaaggaagtaattgaggctgtgacttctataaatgaaaaacctcttgtcctggctctctccaatccaacttcacagtctgagtgtacagctgaagaggcttatcaatggagtgagggtcgtgcaatttttgctagtggaagtccatttgatcctgtagaatacaagggcaaagtgtactattctggccaggccaacaatgcttacattttccccggctttggtctggggttggtaatctcaggagcaatcagagtgcatga

SEQ ID NO: 270898 - DNA, 449 bp, Glycine max
gatcacagaagcaattaacatattctcctctcatgctcactcaaaacacaaaatcctaactaaggtgaaaatgaaggcatcacgcattgctttgttcactttggtggtgcttctttttgtggctgaagttcaagtgtcaaaggcagtgacctgcagcccagtgcagctgagtgcatgtgtgagtgcaataacctcttcaacccctccatcaaacctatgctgctccaagatcaaggaacagaaaccatgcctttgccaatatctcaagaaccccaatctcaagaagtttgttgactctcctaatgcaaggagagttgctaacacttgtggaactcccttcccaaggtgctaaggtgttactaaatttgaagtggttttaatttctctgcctgattatgcatcttgatatctatccatgtgttctggccagagaccagagagtgaaagaa

SEQ ID NO: 270899 - DNA, 390 bp, Glycine max
gtgctcaagcctatttctttttttggaatgaatctacaacataacaaataaatgttgatttcaatcccaaatatactccaaatataacttgatcatcaaaattaaataaaattaaaaagtatagttagagttttgtcacaattacttgctcaaacacactccaatttctttcacatcctgaagcactgcaagtcaaactcaaaatcttaatagccagcttctgcaaatttggagtttgtgacccaaacattcgccaccaatatgctgcaataccaattaccaaccaagagcataacttagaattctgaattctaacactaatacataaaaaaaatagtatgataaaagtttcttactaagagaatgggttttcctttgagccattgcaaa

SEQ ID NO: 270900 - DNA, 408 bp, Glycine max
agaagggggggggatcaatggagaagagaagagaagagaagaggtggatagggttagccacttgttcttgttcccttatctcttatggtgaaatccctgttcctgatttctcgaatcccaatgtcttccaccaccatccaccacaacggctcccacatacccaaaaaacccaaactctcttccttggaaatcgaatcagaattcggccaccacgactcctccgtcgcccgcatcaacaacggcagcttcgggtgctgcccggcctccatcctctccgctcaacgccgctggcagctccagtacctccgccagcccgaccacttctacttcaacgacctcaaatccgccgtcctccaatcccgaaccttaatcaaggacctcgtcaacgccgaccacgtcgacgagatc

SEQ ID NO: 270901 - DNA, 456 bp, Glycine max
  unsure (1)..(456): unsure at all n locations
ggggatcaaagtgttgttatagcggagcggcaagagatggaggaggcggtcaatgctacaganaatcatgtggaaggaagaccagagataggtgacaatatggttctgcgaaagctgcttcggggtccgaggtattttgatccaccagataatagttggggagcatgttttaattgcggtgaggaaggtcatgctgctgtgaactgttcagcggtgaagcggaagaaaccgtgctatgtttgtggttgtttgggacacaatgcaagacaatgcagtaaggtgcaagattgctttatctgcaagaaaggtggtcaccgggctaaagactgtccggagaagcacacaagtacttctaaaagcattgctatttgcttaaagtggggaaaattcgggcatgatatcttttcctgcacgaatgattattcacaggatgatctcaaggttattctttttctt

SEQ ID NO: 270902 - DNA, 429 bp, Glycine max
ggttctagtgtatgtgattgttgtggctcgttcttcttcgtcgttatcttcttcttttgttgtttgtgtgtttgttttttctctcacctgaaaatgtcttgctgcggtggtaactgtggttgcggaagcgcctgcaagtgctgcaacggctgcggaggctgcaagatgtacccagacttgagctacaccgagtcaaccaccaccgagaccttggtcatgggagtggcaccagttaaggctcaattcgagagtgctgaaatgggtgttcccgctgagaacgatggctgcaaatgtggagctaactgcacctgcaacccctgcacttgcaagttaggtgttgtagagctaaagcttcaagcagaaatggcccttagaaataatgattaaaactatatgtatgttcaaaacttcaaaattatgtagtatgta

SEQ ID NO: 270903 - DNA, 298 bp, Glycine max
  unsure (1)..(298): unsure at all n locations
gactccgagatctggtcatcgttgggatctccatacgccggatctgctaaaatacgcttgatccatatgggcctnctcgaccacttgtgggacgacaccgtcgccggcccaaggccggaaaacggtctcggcaagctccgaaaacaccacaccttcactttccgacctagctccggcaagggtacgccctgcctcgttaatcatactcatataattcaccaacgattttcgttaactacaagtccacaactacaatcggtaactcaactcttaatataattatcaatcctttaatatc

SEQ ID NO: 270904 - DNA, 380 bp, Glycine max
ggattccagtcatctctataagtaatcgatcagtggacgccgtctcaatctccttttctggctacacactttcttcaacggtaaatccctctctgcacttcgtctctgttagggattaatcattattttccgcgcaccaaacagccaaagtcaattttcttctctcttctaagacacaccaatgccagagaagaagaacaagaaagtttctttcaccgaagaagatgctgttacgctcatgcagaggtacgacgcaactacggtgttcactttacttcaggaagtggcgcattaccctcaccccaagattgattggtgcgagttggtgaagaaaagcgcgactggaaattctaacgccagagaatattaaatgctatggc

SEQ ID NO: 270905 - DNA, 415 bp, Glycine max
gagttttcatgacattaatctggtttgcaaaattaatactttgttgtaggaaaaggagaggtggttacctgctcagggaaccgaaatgctgaccttttttatggcgttcttggagggcttggtcaatttggcatcattacaagggctagaatttctcttgaaccagcacctatgatggtgagtgtacattcaaaactctaatattaagacaaaaaaaaacagttcctaataatatttattgattatgacatgatatgtgcctttttgacaggttaaatggattagggtgctctactcagaattttctacatttactatggatcaagagtatttgatatcacttaacaacacatttgattatattgaagggtttgtgatcataaacagaactggcattcttaacaactggagatca

SEQ ID NO: 270906 - DNA, 439 bp, Glycine max
  unsure (1)..(439): unsure at all n locations
gtgttctttgatgaactctatgcatgttttgtagggattggattttgtaattgcagaagcaggaaaaaatggggtacgactgatactaagtctagtaaataactggaatgattatggtggaaagagtcagtatgttcaatgggcaagagaacgtggtcaatatgtaaacaacgacgatgacttcttctcacaccccattgttaaggaatactacaaaaatcacgtcaaggtaaaaattaattatatgagttgagaatatttaattataactattagattaaaattaattatttacattacgtatttaattataaaatttacatgttttttccttaaagattacatgagatctgtaattaaatacgtaatatcaattgttaattaatataataattgtgattgaatgtttntatttacataataaccaaaaactctgaac

SEQ ID NO: 270907 - DNA, 424 bp, Glycine max
ggagctgcaggcattcgatccactaaaatgctgcacgcacacgaggactgtacacgaaccattatgactcctgtcgacatcgtctcgtcccttagcttcgatcacatcatatgactctctgtgctttgaacacaatccagcattcaaaggggatcgatacatgacatttgatagcatatagtgcgacggaaaaaacgacgctaacggaatccgagcggcttaagagaggtggggagtggactttcagatgacaaatatgctgtggtgaacttaaactcggactggatttaaagctgtgagtccagatctggtcagacgaaaagttggcctacatagtgcataatccctacatttgtttgatggtcttgaatcggacagtgctgaatgacatatcaatgcttcaggtaactggcttaatgcaaat

SEQ ID NO: 270908 - DNA, 430 bp, Glycine max
ggttgcggattgctcccaaattcttcaccacggtgcctcttcggaccatttcacccttcgcatgtcgcttctcagtccgttccatcgctgactcttctcctttcaacaaaatccgcattcaaagggatgatactgcatttgatgcatatgtcgttggaaaaaacgacgctcctggaatcgttgtgcttcaggagtggtggggtgtggactttgaaattaaaaatcatgctgtgatgatttctcaacttggtcgtggatttaaagctcttattccagatctgtacagaggaaaggttggtctagatgttgcagaagcccaacatttgtttgatggtcttgattggcaaggtgctgtaaaagatatcaatgcttcagttaactggcttaaggcaaatggttcaaaaaaggctggtgttactggattttgtat

SEQ ID NO: 270909 - DNA, 430 bp, Glycine max
cccagatgtgactccaccaacaccaaattctgctactacaataattacagcctctcccaaccaaggtatttctgcaagtcctgcaggagatattggaccaaaggaggtacacttaggaatgtccctgtgggaggagggtgcaggaagaacaaaaggtcatcatcatcatcatcttcaacatcaaagagagttcaagaccaagcattcacaccaaatcctaactctctcattggccttccttcattgtcctatgactcaagtgacctcactcttgcattggcaaggcttcaaaagcagtcatgtgggcaattggggtatgatgagcatgatctttcaatgttggggaaccaccacccaagcaccccatgtgataatatccttggcatgcatcatcactcatcatcatccacaaacccagggttcttggatg

SEQ ID NO: 270910 - DNA, 384 bp, Glycine max
tctgctggttgttcagcttcaacaagtgttaaaaggggtggagattcactgcggaaattcgatggtgctatcactttcacaaggtttgctgagaagcatcgccgactgtcaaatgctttcattaggcagaatccaggtttgttggagaaatcactttccatgatgctcaaggcaccaaggctgatagacttcgataacaagagagcctatttccgctcaagaataaggcaacaacatgaccaacacttgtctgggccattgcgtataagtgtaaggcgggcttacattttggaggactcttataatcagctaaggatgcgttctactcaggatctgaaggggccattaaatgtgcaaattcaaagtgaagagggtattgatgct

SEQ ID NO: 270911 - DNA, 366 bp, Glycine max
ttccttacatcatgtaggagcttttgaaacaaggaagatagaataggttcaggtatccttctatgcatttgctagtgatcctccatccatgtactccaaagctctgctcatctgtccatttagaagcagacattaccaataagtcctataacaaagtgtctagtattgccaaattaaatcttcaaaaacaaaacagataaatagtgtattaccctgcataaaaaaaataccacatttagacagccggataacatgtctcttgtactattattcatgctcagccatgatgatgatgatgatgatgatgatgatgatgatgatgatgatgatgatgatgatgatgatgatgatgatgatgatgatgca

SEQ ID NO: 270912 - DNA, 434 bp, Glycine max
  unsure (1)..(434): unsure at all n locations
ggttcatatctctctgttctctgctacctctcaagttttggaagtatagagatggcagagacattcctatttacctcagagtcagtgaacgagggacaccctgacaagctctgtgaccaaatctctgatgctgtcctcgacgcttgcctcgaacaggacccagacagcaaggttgcctgcgaaacatgcaccaaaaccaacttggtcatggtcttcggagaaatcacgaccaaggccaatgttgactacgagaagatagtgcgtgacacctgcaggaacatcggctttgtctcaaacgatgtgggactggatgccgacaactgcaaggtcctcgtcaacattgagcagcagagccctgatattgctcaaggtgtacacggncacctnaccaaaaaacctgaagaaattggggcttgtgaccagngtcacatgtt

SEQ ID NO: 270913 - DNA, 302 bp, Glycine max
ggttcatatctctctgttctctgctacgtttcaagtttaggaagtgtagagatcgcatagacattcctatttacctcatagtcagtgaactagggacaccctgacaagctctgtgaccaaatctctgatgctgtcctctacgcttgcctctaacaggacccatacagcaaggttgcctgctaaacatgcaccaaaaccaacttggtcattgtcttttgagaaattacgaccaaagccaatgttgactactataagatagttcgtgacaccttcatgaacattttcttttgtctcaaaccatg

SEQ ID NO: 270914 - DNA, 325 bp, Glycine max
cggttcatatctgtctgtactctgctagctatcaattctgtggagtgtagacatcgcatagacatttctatttacctaatagtcagtgaactagctacaccctgacaagctctgtgaccaaatctctgatgctgttctctacacttgactataacatgacccagacagcaactgtgcctgcgaaacatgcaccaaaaccaacttcgtcatggtcttctgacaaattaccaccaaagtcaatgttcgactacgagaagatagtgcgtgacacctgcaataacatcggcattgtctcaaactatatttgactgtattccaacaactg

SEQ ID NO: 270915 - DNA, 429 bp, Glycine max
gaaccgaaagaggggaaaatataattaataccgagttcgcaaccaattcttctcttgcgttgaattgggacaacgagaaattttggatctcagattttggcaggaaaaaaaattgcatttgagtcaaaataacagagtgtattgtagggtcttagttcttgatactgtgctaaatttgatggatggcggagaaatcatgcatcaagcgccttcagaaggaatatagagccctttgtaaagagccagtttctcatgttgtggctcgtgcttcaccgagtgatattcttgagtggcattatgtgttggagggaagtgaaggaacaccttttgcaggtggatattactatggaaaaatcaagtttcctcctgaatatccatataaacctactggaatcagcatgactacacctaatggacggttcatgacac

SEQ ID NO: 270916 - DNA, 438 bp, Glycine max
tactgttgcgataagacgacagaagggacagcaacggcaatgtcaccaatataagcatatcgtcgattactagctcctaggattcgaatacacatcagttcgcgtgctccgctattatcagctacattcaaatgagtttgaggttgaatcatatcatttttttattctttcagtcaaaaaatggaagtaaaaatattttgtgttcaaaaaaaggaacctacatttgcattttttgttttcatcttaaagacctctttcctttggttctaatttattaccctgaaataatgaattgagttcgtataggcattttggatgatgctattgaaatagcctttcttgctatattttctggtaccccacccatttcataaagtattttcccaggtttaacgacagctacccaatattcgggagaacctttttctgaacccatac

SEQ ID NO: 270917 - DNA, 400 bp, Glycine max
cacctccgatagggattataattggcatgtcttgtgttggagcaatggacggtgttgtattcgatcacactggtcaattggttaaatgtaatggcatctcattcgctataggtgactatggatattactttgcacgacattccgtgttcccaaatatttaccagtctatggctgacaggacacaatttaccacaacactactaatatgtaatggcttgtgtgtcaagatatatgcaggcactgcaataatgggatatctacatgtttggtgatggcactctgacatagataacattgtatatgccaccagactcatttgcttccaaagctgcattgaggacaacaactattaacccgccgtctaaatctgctcagttgatgaacaaactgtcatctagtt

SEQ ID NO: 270918 - DNA, 423 bp, Glycine max
ttaaggaggaagagtgaagagaatggctccgaagggtttaacctttctggctgtgttaatatgcgtttcagcactgtcactgagtccttctgttgcgggggaagggcaaaataatggccttgttatgaacttctacaaggaatcatgccctcaggctgaagacatcatcacagaacaagtcaagcttctctacaagcgccacaagaacactgctttctcctggctcaggaacatcttccatgactgtgctgttcagagttgtgatgcttcactgttgctggactccacaagaaggagcttgtctgagaaggaaacagatagaagctttgggttgagaaatttcaggtacattgagaccatcaaagaagctttggaaagagaatgccctggagttgtttcatgtgctgatatcctcggtctctc

SEQ ID NO: 270919 - DNA, 417 bp, Glycine max
ctacagaaggacgacagggaagagggactgctatgaatctctcttatcttactcgggggcccgagcgtaacgatgctcctctttatgccacacttcccactacagctactactattggaaataggcctgagaattttgcgattgcagggcgtcatttgaaatactgattcacgacgaggcatacacaggacgtaccggctcttacggattgctccattcgcattaattgcacacagtttcggatgctacttggacccaatgggagtagaaaatctaccctcttgaatataatggctaggtctcttgacttcaacttcaggaacagtgtacgcgaatacacctaacagtctcgtattacacaatgcagatcatcaggtggtaatgcctactgtacatcctgatgttgcataaggactt

SEQ ID NO: 270920 - DNA, 366 bp, Glycine max
gacggacgagggtttggtttcgggtatgactttgttcacagtcactttctgcgcttcactcactcccttcgtgcgtgcttctttctttgtctaactcttgcgaaaatgcgtgagattctttacatacagggagggcaattctgaaaccagatctgagcgaatttcttggacgtggtgtgcgctgagcacgggatcgattccactgtgaggtaccagggggacaacgagttgcaactcgagcgagtcaacgtctattacaatgaatcgagtttgctgaaggttcgtgccgaaggcggtgctcatggatctagagccagggaccatggacagcgtcagatcttgtccctactgtcagattttcctacc

SEQ ID NO: 270921 - DNA, 405 bp, Glycine max
ggtgtgagagagcgagcgagcgagcggtttcaaagagaggatttgggattgggaaggcgagggattgcgctgcgtctcttcctcttctctttcgattcatccctcattcataatcttccaatccaacaacctcagcctcacactcacacatacacacatctgaacgcgtatcgtccctcccatggcttcaaagcgcatcctcaaggagctcaaggacttgcataaagacccaccaacttcttgcagcgctggtccagtagctgatgacatgttccattggcaagcaacgattattggtcctgctgatagtccttatgctggaagtgtattcctagtcactattcactttccttcggattattctttcaaaccttccaaggttgcctttaagacttaagtgtttca

SEQ ID NO: 270922 - DNA, 404 bp, Glycine max
aaccattctcatacgcctgataaaaacaatatttgtatacgccccatacatgtgttggtagaactttaatgtgagaggagtggttcatttctataaattatgtttttctcgagggatttttccttcattattatattatttaatttaatacaaaaatataattaatgtataaattttaatgatttactaagtgacgtgttttaattaattaaattcacattaaatgtttcttgataaaataaataaataaataaagtatggataataattataattagaaattgaatatagcaaatgagttcgattcatatcattcataagcttgcattgtgttggagtgtacatccaccttttaagtatttgacgaatagaaatattgtcaaatagaaacatacttatacaaa

SEQ ID NO: 270923 - DNA, 419 bp, Glycine max
agaaggggatccccaatcagagagaaaagttagggttcacaacttttccttttccttttgcttgcgaatctgaatcaaataatcaatcatccattcattattcatcatgtcgtcggcgaagaaaatcacgctgaagagttcggacggcgaggctttcgaggtggaggaggcggtggcgctggagtcgcagacgataaagcacatgatcgaggacgactgcgccgacagcggcatccctctgccgaacgtgacgagcaagatcctggcgaaggttatcgagtactgcaagaagcacgtcgaggccgcgaattccgaagacaaacccttcgaggacgatctcaaggcctgggacgctgaattcgtcaaggtcgaccaggccacgctctttgaactcattctggctgctaactacttgaaca

SEQ ID NO: 270924 - DNA, 400 bp, Glycine max
acaatatgaaaaagaggaaaaagattctaacgaaatataactaatgttctttagaataatcaaaaagaatattatactcaaataaattttagatagaaaaaagacttaaaatggaggatctgaaatgcgagatctaaaaacatatctttacgttgcaccagtagtacgtactctatggttcggggctatggcgggtctcttgatagagatcaatcgttattttccagatgcatcagatataccctttattttcattctagttattgacacagaaaggggtcaagactattatagatccagtttagtatttactctatcgagttaatatgtcatgaatcttctgatctttattttgtcagatatctcttcttggttttacaattctaatagcatctgtttt

SEQ ID NO: 270925 - DNA, 263 bp, Glycine max
acactatgaacaacagctaaacggttctaaccaaatatcactaatatctctttataataatcaacaataatattaaattcaaatcacttttatatagaataatgacttaaccaacacaattcgaaatgctacatctaaaaacatatcttttcgcgttaccacgagtaactactctatggaccgaagccttgtctgcactcttgatagagatcaatcatttctttccaaattcattcatattcccatttttttcattctattta

SEQ ID NO: 270926 - DNA, 315 bp, Glycine max
gttatggtttataggtttcatgaggatgagcatggggaggttgttgctgagactaagaggcctgatttggagccttacattggattgcattatcccgctactgatattcctcaggcttctaggtttttgtttaagcagaatatggttaggatgattgtggattgtcatgcttctgctgctagggtggtgcatgatgaggctcttgtgcaatctctgtgtttggttgggtccacgctcagggcgccttacggttgccatgctcagtatatggctaacatgggctctactgcgtcgttggtgatggctgttattatc

SEQ ID NO: 270927 - DNA, 435 bp, Glycine max
tccacgcgtccgaattcgaccggccgctttaccttttgtcattcttttctactttttcatgggcatcacctcaactgtcggatgagtaaaattcttacatgaactctgcatgctttcaaaaaataataccatggtatgcaatcaatcagtcctatgtaattaatgtccaaacaaacctacgggggaggaatattaccaatgaagaaattggaaaatagctaaaccttccacaccaagaaaattccacttaatagacaatgataataatatccacataactttgtttctcgcatttgcatatcatcttatgttttccaaacaacatcatccaagcttgttgaaagtttcttgcacaacttatggaactccaatgtatctccttttgccttccgtacctctaccatgtgaagagaaagtgccacttgaaatatctct

SEQ ID NO: 270928 - DNA, 385 bp, Glycine max
ggttgcggattgctcccaaattcttcaccacggggcctcttcggaccatttgacccttcgcatgtcgcttctcagtccgttccatcgctgactcttctcctttcaacaaaatccgcattcaaagggatgatactgcatttgatgcatatgtcgttggaaaaaacgacgctcctggaatcgttgtgcttcaggagtggtggggtgtggactttgaaattaaaaatcatgctgtgatgatttctcaacttggtcgtggatttaaagctcttattccagatctgtacagaggaaaggttggtctagatgttgcagaagcccaacatttgtttgatggtcttgattggcaaggtgctgtaaaagatatcaatgcttcaagtaactggct

SEQ ID NO: 270929 - DNA, 449 bp, Glycine max
tacagatacgacgacgacgacggagctggagaccgctcccaaatcctttaccaccggtcctggtcagaccatctcacccttcgcatgtcgcttctcagtccgttccatcgctgactcttctcctttcaacaaaatccgcattcacagggatgatactgcatttgatgcataatgtcgctcgaaaaaacaacgctcctggaatcgttgtgcttcaagagtgctggggtgtcgacttcgaaactaaaaatcatgctgtgatgatttctcaacttggtcgtggatttaaagctctcattccagatctgtacacaggaaaggttggtctatatgttgcccaagcccaacatttgttcgatggtcttgattgtccaggtgctcgtaaagatatcaatgcttcacttaactggcttaatgcaaatgtgttataaaaagctggtgttactggattt

SEQ ID NO: 270930 - DNA, 274 bp, Glycine max
attgcttatgattttggtcatggggttaatgtggcgctgccattggtgttctggtggtggtgttcaccggcttatcattgattgtggaatgcacatacttctctgctgtactcttcaaagttgatcaatgttgatgggctccccttgcaattgctggagcatttcttctcattatgtatgtctggcattacatcacggtgaaacgctacgagttttaaatgcatagtaaggtctcaatggcatggattctcagacttggacccagtttatgact

SEQ ID NO: 270931 - DNA, 392 bp, Glycine max
ggttctagtgtgtgattgtttggtgttgtaactcgttcttcttcttttgttgttctgagtttgcgtttgttttttctctcacctgaaaatgtcttgctgccgtggtaactgtggttgcggaagctcctgcatgttcggcatcggctgcagaggctgcaagatgtacccagacttgagctacactgagtcaaccaccaccgagaccttggtcatgggagtggcacctgttaaggctcaatttgagggtgctgaaatgggtgtgcccgctgagaacgattgctgcaaatgtggaccaaactgctcctgcaacctctgcacttgcaagtgaagtgttgggagagcatgcttcaagcagagatagcccttattaggaatcatgataaactattaat

SEQ ID NO: 270932 - DNA, 328 bp, Glycine max
tggggttctagtgtgtgattgtttggggatgtaactcgttcttcttctgatgctgttctgtgtttgaactagttctttctctcaccctaaaatgtcttactgcagtggtaactgtggttgcataagctcctgcaagtgctcaaacactctgacagatgctgcactatgtacccacacttgatctacactgattcaaccaccaccgataccttgctcatggtagtgtcacctgttaatgctcaatttgacggtactgaaatgagtgttctctataagaactatcgctacaaatgtggaccaaactgctcctgcaacttttgcactttca

SEQ ID NO: 270933 - DNA, 261 bp, Glycine max
attcccggatcggccgactcgtacatactgctgctataagactacataaggggaatcacgcactatcagtacaacaactcactcacgaagctggacaatttcatgaagcctgccatggcttcctcgtgtgctttctcttccattgcagcttttgccatctacacaccaatttcccataagaatggatcactcttgtgaagcacaaaagcttcttttcttagtgggaggaaactgaatgtgaacaattttaccttaccaatt

SEQ ID NO: 270934 - DNA, 371 bp, Glycine max
gaatcacgcactatcagtacaacaactcactcacgaagctaaacaatttcatgaagcctgccatggcttcctcgtgtgcttcctctgccattgcagctgttgccatctccacaccaagttcccagaagaatggatcactcttgggaagcacaaaagcttcttttcttagtgggaggaaactgaaggtgaacagttttacagcaccagttggagcacgatccagcactacagtgtgtgcagttgctgagcctgataagcctctgtggttccaggcagcaccccttctccatggctagatggcagtttgccaggagattttggctttgatcccctaggtcttggatctgatcctgagagcctgagatggaatg

SEQ ID NO: 270935 - DNA, 376 bp, Glycine max
cccaacagtgagaagccgagcgattttggttaccggccaagatatgaagcatttgggcacttgaagtcatcagattttctcgcttatggaatcaaatctgtatcccaagatgtctcgcctgacttgactgatgcattcgatggaaatattctgagccttgagtatgataatttagctgaagtgcacagactctatgaagggggagttacactacctacaaactttcttagcaagatcgcccctataccaatgatcacggaaatttttcgaactgatcgctaacagttcctacagtatccaccatgtaaagtgatacaggtggataagtctgcatggatgactgatgaagaatttgcaagagaaacaattgctggtt

SEQ ID NO: 270936 - DNA, 412 bp, Glycine max
aattcaagcggccgctctatggggtgtgttagatcatttacctttgcaaagggacggggaagggatttattacatgatcgaaaacagaaaatgttgagaactattcaaaactcataagaattaccggaaggggccattgaacagcttgaaaaagtgccaagcccggttaatgaaagtcgaaaccgaatcagttcggtttcaggtgaatggctattctgagatccaactacataaatttaatttaattaattcaatttataccactttggatcaatgtgaaaattacctaaacgaagccattcatttttaacaataataactgattaatcaagatcggcaacaggttttacaacatgccttacagggagctttaggaactctttggagttgctggaacaacgagttacattta

SEQ ID NO: 270937 - DNA, 456 bp, Glycine max
aattcgagcggccgctttttttattgtatattaaatatatttattggatcgctataattacggatattgttataatatgagaaggataaaataaaagctgatataataaattagcactagaaaaatactaaatatatactaactttttctttcatatcattttttatctctatttttatttttcatcgtattatttgttacatttataatttttatcttctttatctagtttttctttttgttcatacgtcccaaaaatagaattgtgtatatcattactcttaatactttataaaactgtgaaggatttttttttcagacatacttttaataaaaataattcatttatttaaaatacatatgtacgaatctataattctacataatagctaaactcgtcttacatataataacttaaaattatgcaaattcataacttaatcttatatacctact

SEQ ID NO: 270938 - DNA, 246 bp, Glycine max
actcgctagaacacttcagatttgatattaaatagatatacttcactatcatggttactgataaatctttaatattcaaattatcttataatttcttttttaatttaaaaactctattcatatacatatatttttactaactttttcacttctattatttattatatttattttcatatatcattttattatatgtttcatatttaataattttcattcttaaataccttttatttatattttata

SEQ ID NO: 270939 - DNA, 350 bp, Glycine max
gaccttcacagaagcaattaatcatatggctctctggttctcactataaacacaaaacccttcccatcctaattaaggtgaaaatgaaggcatcacccattgcttggttcactttggtggttgtgtttcttgtggctgaagttcaagtttcaatggcagtgacatgcagcccagtgcagctgattgcatgtgtaagtgcaataacctcttcaacccctccatcaaacctatgctgctccaagatcaaagaacataaaccatgcctttgccaatacctcaagaaccccaatctcaagaagtttgttgactctcctaatgcaaggagagttgctagcacttgtggaactccc

SEQ ID NO: 270940 - DNA, 379 bp, Glycine max
tctgctggttgttcagcttcaacaagtgttaaaaggggtggagattcactgcggaaattcgatggtgctatcactttcacaaggtttgctgagaagcatcgccgactgtcaaatgctttcattaggcagaatccaggtttgttggagaaatcactttccatgatgctcaaggcaccaaggctgatagacttcgataacaagagagcctatttccgctcaagaataaggcaacaacatgaccaacacttgtctgggccattgcgtataagtgtaaggcgggcttacattttggaggactcttataatcagctaaggatgcgttctactcatgatctgaatgggcgattaaatgtgcaatttcaaagtgaaaagggtattg

SEQ ID NO: 270941 - DNA, 431 bp, Glycine max
gaaatcaatcaaaactcttattagaagtaggtattttacaattttgtaagactaattgcagtgcatgatgattgggatgaccaagtctatcatgccaaagagaggtgatcctattacatggatttacaatgggcttgtcaggcttattacatggattaacagagggtttttcagaactagaaatacaaggaaaactagaagaagcagaaactggatgttggagaagctgtagagaccatcaggaccaacattacctttaagttagacttcattggtaacctgcgattttacagcacaataattagagtgaaattcaaagaaaacacctttgtcccttgcaaattgattaacattaataagatttttagtaatgttaggaacatgtaagagatgtttaagagacaaagagattttggtattgaaaggagaaa

SEQ ID NO: 270942 - DNA, 420 bp, Glycine max
gatgcacatcacatgccggagacctgaggctacctctctctttcacattccctcagcgcttaatttctgtattcaaaacttttggcattaattgttttccaataccctttgagactacaatattaaatttgtggtttttacatatatatatatatataatggatagggtgacacagatggcatcagagagaccagtggtgatattcagccggagttcctgctgcatgtgccacaccatcaaaaccctcttcagtgactttggagtgcatccaaatgttcatgaacttgatgagataccaagagggaatgacattgagcaagctctttcaaggctagggtgcagcccctctgtgcctgttgtgttcattggcggtgagcttgttggtggagccaatgaagtcatgagccttcaccttaacc

SEQ ID NO: 270943 - DNA, 368 bp, Glycine max
aggctcatgtaaaaagtttgctgcgccctgatttccgggtgctggcacaaaactggtgggttcgcaaaggtggtgcttataccggtgaggttagtgcttaaatgcttgttaatttgggaattccttgggttattattggtcactcttaacggatgcagcttttaaattaatcaaacgagtttgtgggatataaagttgcctatgcacttcaacaaggtctaaaagttattgcatgcattggggagactctcgaacagcgtgaagctagtacaacaacggctgttgattctgatcaaacaaaagcaattgcagctgaaatatcaaattgggacactgttgatttggtctactagccactttgtgccatt

SEQ ID NO: 270944 - DNA, 423 bp, Glycine max
ggtctgcgcctgatttctgagttctctcacacactcattcggtgctccgaatctcacattctacggttagggttcccaatttctccaccgatcagaaaatgagttcaactggtggttctaccaatggcggaaggggcaagcccaaagcctccaaattcggttcaagatcgcagaaagctggtctccaattccccgttggaagaatcgctcgattccttaaagctgggaaatacgccgagcgtgttggtgctggtgctactgtgtacctctctgcagtgctcgaatatctcgctgctgaggttttggaattggctgagaatgctgctagggataacaagaagaatcgcattgttcctacgcacattcagcttgctgtgaggaacgatgaggaactgaacaagcttttggtgtctggtaccattg

SEQ ID NO: 270945 - DNA, 235 bp, Glycine max
aagacatcatattagacatttctatttacctaatattcattgatctaactacaccctgacaagctctgttaccaaatctctgatgctgttctctacacttgcctaaacattacccatacagtaacttttcctgcgaaacatgcaccaaaaccaacttcgtcatgctcttctgataaatcaccaccaaagttcatgttcactacgacaatatatatcgtgacacctgcaataacat

SEQ ID NO: 270946 - DNA, 395 bp, Glycine max
  unsure (1)..(395): unsure at all n locations
ttaaagatgaaattgtcccagttgccactaagattgtggacccaaaaactggtgaggagaaatctgtcaccatttctgttgatgatggaattcgacctggcacaacagtgtctgatctaggaaggctcaaacctgtgttcaagaaagacggaagcactactgctggtaattctagtcaggtgagtgatggtgctgcagctgttctgctgatgaaaagaagtgttgcgttgcaaaaggggctacccattcttggtgtattcaggactttcgcagcagttggtgttgatcctgccataatgggtgttggtcctgctgctgcaattcctgttgctgttaaggctgcangtctagagcttgatgatattgatctttttgaaataaatgaggcatttgct

SEQ ID NO: 270947 - DNA, 357 bp, Glycine max
ttaaagatgaaattgccccaggggcgcactaagattgtggacgctaaaactggtgaggagaaatctgtcaccatttctgttgatgatggaattcgacctggcacaacagtgtctgatctaggaaggctcaaacctgtgttcaagaaagacggaagcactactgctggtaattctagtcaggtgagtgatggagctgcagctgttctgctgatgaaaagaagtgttgcgttgcaaaaggggctacccattcttggtgtattcaggactttcgcaacagttggtgttgatcctgccataatgggtgtaggtcctgctgctgcaattcctggtgctgttaatgctgcatgtctagagctt

SEQ ID NO: 270948 - DNA, 301 bp, Glycine max
tcgcccacgcgtccggaagactacagatggggatggtgcaagagtttgttgttagctgtgggctattttatcgtgaggagaatatgacgttgtttgttttctttgatgctgcagtttttttgatagcttgggcatgccatggttcatgctatcaaaggtatccctcttttcatgaaaactggctatttcgagcatgcttaggaggataaatgctcaagtcttatgcttgctctgtaatcacacaatcatcccatcctttaaaaccattccttaagagtgcgttgaaccaacaaaggactac

SEQ ID NO: 270949 - DNA, 448 bp, Glycine max
gaaagacgtaacaatgggtggatgtaagggacctatcaccacatttattgtggaacccttcatgccgcaccaggaaaaatgctatttcaatattggcttaaaaagacttgggtgcgcaattaacttcttcgaagtgtggaggaatggaaatcgaagagaatggggataaggttaaaaccatatttatccccacacgagtgtccctcacttcagaaacatgcgccgagctggtggcaacccttcctttggagatcaaaggagaaatcgcggcgtttatcaaggcaggtgataccctattccaagatctggactttactttcttggaaatgaatccttttgcgcttgttgatgggaaaccctatcctttggatatgacgggtgaactagatgatactgctgctgtcaagaacttcaagaagtggggaagtattgaatttccaatgccatt

SEQ ID NO: 270950 - DNA, 366 bp, Glycine max
  unsure (1)..(366): unsure at all n locations
aaaaagaggtaacaatgggtggatgtaagggacctatcaccacatttattgtgaancccttcggtccgttcaaaaaagaggactatctcaatattgtctcacaaagacttctgtgcagtattaacttctccgagtgtggacgaattgaaatcgaagagaattgggataatgttaaaaccatatttatccccacacgagtgtccctcacttcagaaacatgctccgagctggtggcaacccttcctttgtagatcaaaagagaaatccacgagtttatcaaggcaatttataccctattccaagatctcgactgtactttcttggaaatgaatccttttgcgcttgttgatgaaaaaccctatcctt

SEQ ID NO: 270951 - DNA, 376 bp, Glycine max
aacgcttataactcttggagttacattccgtactctacaggttcactcaatgatcttagccaatctaattaaattagatcatatatcagtttactttattgactcgcttcactttaaacccaaacataattagttacaactagatcaatgttaactaatttgcttactaaatcaacatctatttatctttaaacatttaaattcatatattttagacttagaatctaaacatttcctctattggatcttttgatcatttattttgacttttattcactgcctttagtgatattcacttgaaattaaaccaatcttaattggattaattcgatttaaaattaattattaatgatataaaaatcaaagcaaacctatt

SEQ ID NO: 270952 - DNA, 411 bp, Glycine max
ggcagcgcttgatttgaggccaggcatgcggcactcaaccaccacacggtgtgctcgttcacgctacccctttctgctcttcttctaccttgcaagttttaaaagtataaagatggcagagacattcctatttacctcagagtcggtgaacgagggacaccctgacaagctctgcgaccaaatctccgatgctgtcctcgacgcttgcctcgatcaggacccagacagcaaagttgcctgcgaaacatgcaccaaaaccaacttggtcatggtcttcccagaaatcacgaccaatgccaacgatgactacgagaagatagtgcgtgacacctgcatgaacatcggattcgtctcaaatgatgtgggactggatgcctacaactgcaaggtcctcgtcaacattgatcagca

SEQ ID NO: 270953 - DNA, 449 bp, Glycine max
aactgaacagccttttgggtctgccgaaaacccattcttgttttttaaatccgacttaatagagttaagagagttcataaaaaaaaaaaaaacaacaattaaaaaaatggagaacgaagtattttcgaatatttttacgtttaagaaaaaaggtttttagaaaaattaatattgcaaaagaaaaatgggtcatcaaacccattttatttataaaaaaaagaataagagaattctggcaaagaaacccaattctattattgcaattgaaagaaatatacaagttgactgaagctaaaaaagaaaacaattcaataataagtaatggaatgatccaaagctcgtctgggtctatagattcgataattttgtcattgagagaacgaaagatgaaagagttgactgatagaataaacaccatgctaaaaataattgaaaaaatgaaaaaagac

SEQ ID NO: 270954 - DNA, 401 bp, Glycine max
ggcgtagtatataatcacagtagccgcgagctcgtgaaacacactctgttgttttccaaaaccctaatttatcgaaaggtagggttttgcagagcctcctcctccgttaccagtttcttcttctttatcctctctcctttcttcttccattcctctaacctaagatgggcaagtcaagcaagaaatcagctatcaaggttgacgctgctccagctgtggttccgccatccaagtctgccaagaagggaggcaagcgacaagctcaagatgaaattgagaagcaagtgagtgccaaaaaacagaagatagaggagtgtgctcagaagcataagaaggaggccaaggtgcaatagaaggaggccaaggtgcataagatgaaggaatgtagttcagatgattct

SEQ ID NO: 270955 - DNA, 414 bp, Glycine max
gaaggcagagaagagaaggagagaggcttgcacctggagagaaaagaggagacaataatacatggggaagctgggtctaaacacggtggagcaacaatctgtggcaccgacagcatccaagtttccgttgagcttttgggaagccacagtggctataacggtggcgctggtttctgcggaggatcttctcggctgtgtacctcaccatgcccgattccgattacagattccttaaactccctcgtaccctcgaagaccttcaactcctacgagatgaccttgagagctatacaagtgactacactgcacaagtcttggtggggtactgcgtggtttatattttcatgcagactgtcatgattccagggactgtgttcatgtcattgcttgctggagcactctttggagtcttta

SEQ ID NO: 270956 - DNA, 411 bp, Glycine max
gaatcacattaagtagcgccattctgttgctactattgttcccacaaaaccaaaagccatcttcttcttccatgtcgagggcgcgaagctttgttctgtggcttcacggcctgggtgactctggtcccgccaacgaacccatcaaaaccttattcacttcttcccaattcagagacaccaaatggtccttcccttctgccccttccgcccctgtcacttgcaactatggttctgtaatgccttcatggtttgacattcttgagattcccgtggcagttgattctccaaatgacgagagtagtttacttaaagctgttcgaaatgtgcatgctactatagacaaggaaatagctgctggcataaaccctaacaacatatttatctgtggattcagtcaaggaggtgccttga

SEQ ID NO: 270957 - DNA, 399 bp, Glycine max
  unsure (1)..(399): unsure at all n locations
ggcaccgcttgagcagacttaacaacagcacaaagcgggttactgtctgttcaagctaccatctctctctctctttcttagtgcctccttgccagaagttaaaatggcccaagaaactttcctattcacatctgaatcagtgaacgaggggcaccctgacaagctctgtgaccagatctccgatgctgtgctcgatgcatgcttggagcaggaccctgacagcaaggttgcctgtgaaacctgcaccaagaccaacatggtgatggttttcggagagatcacaaccaaggccaacgtggactatgagaagattgtgcgtgacacatgcaggaacattggttttgtctctgatgatgttggtcttgatgctgacaanctgcaggtcctcgtcaacattga

SEQ ID NO: 270958 - DNA, 394 bp, Glycine max
gggagaagaagtagaaaaaggaagaaatatagtgataatttgattcttcgtcgtcgtactaaatagtagagaaaatagaaattgtttcttcgtctttacaagaaaaaggagtaattaactgtgacacgttcactaaaaaaaaatccttttgtagcgaatcatttattaagaaaaataaataaacttaacacaaaagcggaaaaagatataataataacttggtccagagcatctaccattatacctacaatgattggccataccattgctatccacaacggaaaagagcatttacctatttatataacagatcgtatggtaggccataaattaagagaattttcacctactctaaatttccgaggacatgcgaaaaatgataatagatctcgtc

SEQ ID NO: 270959 - DNA, 278 bp, Glycine max
gggataatttatagaaaaaggaagaaatatagcggtaatgcgattctacggggacgtactaaatagcatagaaaatagaaattgtttcttccacattacaagaataacgagtaatttactgttacacgaacactaaataaaaatccttttgttgcaaaacattcattaagaataatacataaacgtaacacatattcggactaagatataaccataacttggtccaaaacttctaccattatacctacacataatcgcccataccatgtctatccaca

SEQ ID NO: 270960 - DNA, 392 bp, Glycine max
ctgtcacaatatgtgaagccacttactgacttccttgaaaaacttccggaaggcaaaaaggttatcttggttgggcatgattttggaggggcatgtatatcatatgcaatggagatgtttcctcttaagatttccaaggctgtctttgttgctgcagcaatgttgactagtggtcaaagtactcttgatattatttctcaacaggcaggttcaaatgatcttatgcaacaagctcagacttttatatatgctaatgggaatgatcaccctcccacttcttttgatatggacaagtcattattgagggatttgttattcaaccaaagtcccaccaaagatattgcactagcatctgtctcaatgaggtctgtaccatttgcaccagttttaga

SEQ ID NO: 270961 - DNA, 408 bp, Glycine max
caatcctgcagttctcgtttctccctccgagcatcatcactcatgggaaagagcattctggggactggtggagctggatacatcggcagccacaccgttcttcaacttcttctcggagggtacaacgccgttatcgtcgataacttggataactcctctgagatcgctattcgcacagtcagagatctcgctggagatttagggaagaatctcacatttcacaagcttgatttgagggataaaccggctcttgagaaggtttttgcttcgacgaaattcgatgctgtcatccactttgctggacttaaagcagttggcgagagtgtccaaacaccactgctctactacgacaacaacttaattgggacaattgttctgtttgaagacatggcttcccatggatgcaaa

SEQ ID NO: 270962 - DNA, 324 bp, Glycine max
  unsure (1)..(324): unsure at all n locations
gngatggcgattgacagaggctatatttctcctcagtttgtcacaaaccctgaaaagttaattgctgaattggagaatgcacgcgtgttgattacagatcagaaaatttcagctataaaggatataatccctatattggaaaaaaccacacaattgagagctcctttgcttatcattgcagaggatgttactggtgaggctttggctactcttgtcgtaaacaagttgcggngtattctaaatgttgctgccattaaagctccaagctttggggaaaggaggaaggccatgctacaagacattgccattttgacaggtgctgag

SEQ ID NO: 270963 - DNA, 364 bp, Glycine max
ataaaatagtggtgtcaactttacacactaaactcatcacccgaatctcttcaacaatgtccaattccttccctctctaccaaaaattggccatcaaaaaacccatacaaagatctgttgaacttctcattttgattctcgccatttcccttcttctttaccgtctcctttacctccaatcccatgccctcctttcgcttctcgccttcttctccgaactctgtttcaccttcgactggtttctctaccttcttttaaattggaatcccgtcgactacaaaacataccctcaacacttcaaacaagttcatgaggttcctgcggtggacgtgttggtgacgactgcggattggaagcttgagcc

SEQ ID NO: 270964 - DNA, 403 bp, Glycine max
gacccagagaggaggaagctttgagagagagagagggaggagggagagtgttgacgctccatcaagatgggtatttctagggattccatgcacaataggcgtgccactggtggcaagaagaaggcatggagaaagaagagaaagtatgagcttgggcgtcaggccgcaaacaccaagttatcaagcaacaaaactatccggaggattcgtgttcgaggtggcaatgttaaatggagggcattgaagttggataccggcaattactcatggggtagtgaagcagttactcgcaagactcgtattctagatgttgtttacaatgcctcaaacaatgagcttgtgcgaactcagaccctggtcaagaatgctattgttcaagttgatgctgctcctttcaagcaat

SEQ ID NO: 270965 - DNA, 389 bp, Glycine max
ggcttctaacgtgagatctcagattgcaattgcctcttctcttctcccagaatcggtcactaatccgatatcatgaagctcgatacgactagtctcgaatcgtttcccacactgattgcacctcaaaacgacgtcgccggagaactctccgccgctccgttctttgaccttccgaattccaatgacttcgatgggttcttgaaagacgctattcagatggtgaagcccgcgaagggtactacaactcttgcttttatatttaaagagggtgttatggtagctgctgattctcgagctagcatgggaggatatatatcgtcgcagtctgtgaagaaaattatcgaaatcaatccgtatatgcttgggacaatggctggtggtgctgctga

SEQ ID NO: 270966 - DNA, 412 bp, Glycine max
ggtatcctaagagtgcatctattagcttagttgggtattccgattcaaattatgcaggttgtaaagttcataggaagagttctagtggtacttgtcatttgcttgggagtgctttggtttcttggcactcttagaaacaaccaaccaaccaactagctggcatcatttcattagagatcaagtgcttaaaggagatcgtgtattagagtttctagatataaccaaccaactagctgacatctttacaaaacccttgcatagggatagattctacaccattagaaatgaagtagacattttagatgaagattatctagtataacatgcacatgcatttgtgttgtcataccctaatttcgtccggagattattacttgatgacatgcaacctttggttagccgctttgagata

SEQ ID NO: 270967 - DNA, 383 bp, Glycine max
ggatagcactaagttaaacattacacacaaacttcgtcgtgttactgttagctaacactttctgcaataatggcacgtactagcatccaaacaagctcttcatcacgggcaaaaaaatttgatgtgttttcatcgttgtcttctcaaaggactatgcatcatccacatggtgcatgaaagagctgacaaagatcgttgattgggttcaagaaacaggtccaagtgtgctccctgttttctatgatgtcactccttcggaggttcgaaaacagagtggacagtttggagaggcttttactgaacacgaagaaaggtacacaaatggagggaagctctgaaagcaatcaccaatcgttgtgggtgagatgtactgaataagcctc

SEQ ID NO: 270968 - DNA, 451 bp, Glycine max
aacttgcacactgttctggatgtcgcatcgattggcttcaaagagacggaattcttcttcgtggagctagatagattgcttagacctggtggttatttcgcttattcatctcctgaagcttatgcacaggatgaggaggatctgagaatttggagagaaatgagtgaccttgtgggtcgtatgtgttggcgaattgctgccaagagaaaccagactgttatttggcaaaaacccctaacaaatgattgttatctgcaaagagaacctggtacccgccctccactttgccgatctgatgatgatcccgatgctgtttggggtgtgcagatggaagcttgtatctctccttactctgaccgtgatcataaagccaaaggcagtggattagctccttggccagctcggttgacttcacctcctccacgacttcaagattttggctattcaaatg

SEQ ID NO: 270969 - DNA, 417 bp, Glycine max
ggcaccgcttgggcagacttaacatcagcacagagcgggttactgtctgttcaagctaccatctgtctctctctttcttagtgcctccttgccagatgttaaaacggcccaagaaactttcctattcacatctgaatcagtgaacgaggggcaccctgacaagctctgtgaccagatctccgatgctgagctcgacgcatgcttggagcaggaccctgacagcaaggttgcctgtgaaacctgtaccaagaccaacatggtgatggttttctgagagatcacaaccgaagccgacgtggactatgagaagattgtgcgcgacacatgcaagaacattggctatgactctgatgatgatggtcatgatgctgacaactgcgaggtcactggcaacattgagcatcagagacctgatat

SEQ ID NO: 270970 - DNA, 416 bp, Glycine max
gggtggagagaggggcactgactcacacccacaatagtcgggggcagcttcaaagtacctccacattgtctcctactcttactgttctcttctcttctcatcatttttattttttccaatcaaaccaaacaaaacataagcaccgctcttttctctccgaaatccccatctcccttcacttctgagctctggacgagatcccagatctcaccatctttcacgcactcttccatcagattcaccctttcgtttaacgcaaactcataacttgaaggttaatggctgctccaccggcaagggctcgtgccgattacgattatctcataaagcttctcttgatcggtgacagcggtgttgggaaaagttgcctccttctgcgtttctccgatggttctttcaccactagtttcatcaca

SEQ ID NO: 270971 - DNA, 410 bp, Glycine max
gctacaaccgatgtggttgaggcatgcactggggtcaatattgcagtgatggttggtggattccctagaaaagaaggtatggagaggaaggatgtgatgactaagaacgtctccatttacaagtcccaggcttctgcccttgaaaagcatgctgctgccaactgcaaggttcttgttgttgctaacccagcaaacaccaatgcattgatcttgaaagaatttgctccatctattcccgagaaaaacatttcttgtttgactagattggaccacaatagggcactgggccaaatttctgagagactgaacattcaggtttctgatgtaaagaatgtcattatctggggcaatcactcatcaacccaatatcctgatgttaaccatgcaactgttggggagaagcccgtccg

SEQ ID NO: 270972 - DNA, 217 bp, Glycine max
gcttcaacctatgtggttgaggcatgcacggggggcaatattgcagggatggatggtcgattccctacaaaagaacgtatggacaggaacgctgtgatgacttacaacgtctacatttacaaggcctaatctcatgcccttgaaaagcatactgcttgcaactgaaaaggccctgctgtttctaacctaacaaacaccaatgcatttatcttgaaag

SEQ ID NO: 270973 - DNA, 347 bp, Glycine max
cggacgcgtgggtgctccgaaacccttttcgattaattcgcggcaggaacgtacgaactttgactatttcgtggaatcatgggcaggtctccaccgccgttttcagatattggcaaaaaggccagagacctcttaaccaaagactacaactttgatcacaagtttaccctgttgctgccgaactccgatggaatgggactaactgcaaccggtttgaagcgggatcaaatttttattggtgatatcaagaccctgtacaagagtgggaagacaaccggcgatgtgaaaattgatacggattcaaacgtttctacaaaaatgaccgtgactgatattttaccaactac

SEQ ID NO: 270974 - DNA, 442 bp, Glycine max
cctatcgtaaatcaactgcaggagttgctgaagagctgtatacatggaggacaagaccagcggatgatatgaggaggtaggtagcagatagtatactattaacctgcacaaacgcctccatggctgcacgtgtaataagaaggctctcaatgccattaatgagatcacgaagtttgctgagaacgccatgagcacaaatgatgcgagagttgatgtgaaactgaacaagcatatatggagcatgggaatcatgagtgtgcccagaagaatcaaagtacgcattgctggcctgagagacgctgatgaagatgccaaggaagagttgtactctgtcgtgacagttgcagaaatcccagcttaaggactgaacggacttgggactaaagtcattgtggaagaggatagatttgtcatctgttctcgagaagaggtggtacgatga

SEQ ID NO: 270975 - DNA, 285 bp, Glycine max
tattgtttattaattattttattttttaattaaaatataattaataacgcaatattttattttttaaaaaaatatatgaataattaaaaaaaattatattaacatcggtttttcaagcaaccgatgttaatgcatacacgttaacattggttttcaaaaaccaatgttaacgtgtatgctttaacatcgatttctttggacaatagatgttaacatattatacgttaacatcgtgattttaaaaatcgatgttaactaatgatgttaacagtaaggttttgaaaa

SEQ ID NO: 270976 - DNA, 394 bp, Glycine max
ggacgcacttagcaatcggtcaacacttccaattacaatatacacatcttcaattaagccatgactctctctaagcttatagttgcttcccttcttgcctcgcttctccttcttcatcttgttgatgctgatcaatcggcacatgtacaaacgcaggggtctcttctgcagaagatagattgtaatggagcatgtgctgcgaggtgtcgtttatcatctcggccacgtctctgcaaaagagcctgtggaacttgttgtagacgctgcgactgcgtgccacctggcactgctggaaaccaagaagtgtgtccctgctatgctagtttgactactcatggtggcaaacgcaagtgcccttagacttaaaagttgtgtttggattgctagctgctga

SEQ ID NO: 270977 - DNA, 450 bp, Glycine max
  unsure (1)..(450): unsure at all n locations
acggactcttgtaacatcacctttgctggtgttgttagggattgctggtaaaaatagcaaggctcgatttcaagctacagttggaaccactaaatatcctanagagattccacctttgccttggtaccgtgggacgattccacagatggcaatggcaggatttctgcctttcagtgccatatatattgagttatactacatatttgccagtgtgtggggccacaagatttacaccatatacagcatcttgtttattgtgttcatcattctccttatagttacggcattcattactgtggcattaacatacttccaacttgctgccgaggaccatgaatggtggtggagatcttttctttgtggtggttcaactggcttatttatctacgcttactgtttgtactactactacgctcgctcagatatgtctgggtttatgcaaacatcatt

SEQ ID NO: 270978 - DNA, 382 bp, Glycine max
acgcgaacagggagagttctggaaacaacctgatggattggggtataaaccgtgcttagatttcggcgaagaatataaaaaatgaaccactggaatcgttagtgagaggactaagtatttgatggtggtggtttctggtgggatgaatcaacagagaaatcagatcgttgatgctgttgtgattgctagaattcttggggctgctttggttgttccaatcttgcaagtgaacgttatctggggggatgaaagtgagttttctgatatatttgatttggagcatttcaagaatgttctggcggatgacgttcatatagtgtcatctttgccatctacacatctgatgactcggccagtggaggaaaaatcgcctcccatcacg

SEQ ID NO: 270979 - DNA, 372 bp, Glycine max
  unsure (1)..(372): unsure at all n locations
agctgatcagggctcangtggtggttttagaactctgattcaattgcttcctgtgctgttaagtgttgcttttgaacttctgtgcatcctcagaacctatatatgctctttcccgttcctacccttatgaattccagtttaccactcaaaagggtgtcaatttttttgtgaaatcaacaaattttgaggaaaagtatccacctggtagcccggatcgtatagcaattgatcgtcacatagagagggattattttaacattcttgctcagaattgtcgtgttgagatgcaacgtcagcaatggggatttataagagaaactccatattgtgatatgttacagaagtttcagacagctgcttcgtgaatgaact

SEQ ID NO: 270980 - DNA, 412 bp, Glycine max
ggaggaagcgcagcagcagcagctataccacgttgctggaagaaactgataaaaagcgctgccgttgtgtctttcagtcttcgttggatcatcttcacaatcacatcatcagaacacaaagaagagaagagacccttcatcttgttattccactcgggctaggccaattttccctctaacagtcaattttcattcagattcgtaaatttctcgattagatcacgaggtgttggtgtgattgtttgtaccttctggtggtggagcttgttggaaattggagatgagtcagaggggtttaatatatagctttgttgccaaaggaactgttgttttagcagagcacacgcaatatacggtgaatttcagtaccattgctgttcagtgcctgcagaaactgccttcaaatagcagc

SEQ ID NO: 270981 - DNA, 412 bp, Glycine max
gattcttcacttgtgctgagtcttaccgattttgccgatcaaagttcctcactttctctctcttgatcgacacccaccacgcgttagagagagaaaaccacgagagatcggaaaatgggtacgcttcagtcttggagaagagcctacggtgccatcaaggacaccaccaaagtgggtctggcccatgtcaatagcgattacgcggatttggacgttgccattgccaaagccacgaaccacgtcgagtgtccccccaaagagaggcacctcagaaagattctgtttgccacgtctgctgtgaggcctagggctgatgttgcttactgtatccatgcactttcgcggcggttggcgaagacgcggaattggacggtggcattgaaaacactgatagtcatccataggttattga

SEQ ID NO: 270982 - DNA, 392 bp, Glycine max
  unsure (1)..(392): unsure at all n locations
gaggagatagacagggtaaatcttgagattcaacaggctgagcgagagtatgatcttaatcgtgctgctgaattgaagtatggtagtctaaactccttgcaacgccaacttgaaagtgcagagaaagaattgcatgaatatatgaactctggtaaatctatgttaagagaggaagttactggaaatgacattgctgaaattgtaagcaagtggactggtatccccatttctaaacttcaacaatcagatagagagaagttgttgtatctagaggaagagctccataaacgtgttgtcggtcaagatcctgctgtcaaggcagtagctgaggctatccaacgttcaagagcaagtctttcagatccccatcngccaatcgctagcttcatgtt

SEQ ID NO: 270983 - DNA, 396 bp, Glycine max
aaacggacctcggccgtgaacaagagggggttaagagaagacggcggcggtggtggcggcggctgagcgatgaggtaccgcggcgtgaggcgcatgccgtgggggcgttacgcggcggagataagggaccctcaatcgaaggagcggcgatggctgggaaccttcgacacggcggaggaagccgcttgcgcctacgactgcgctgctagagccatgaggggtctcaaagctcgcaccaacttcgtttacccaacttctccgcaaccttcttccgtcaccaccgaacacttgttccctaacttcaacaacaacaacaacttttacaaacactcactcttcaatcaccaccgtaaccgccacataaccggttccaacacttgttttgaccacccttac

SEQ ID NO: 270984 - DNA, 397 bp, Glycine max
catcatttgagcaagcagggggttatggggcggcaaaatcttacactgcccttgccctaaaaactatctcaaagcaattcaggtgcctgaaagatgcaatctctgcacaaatcaaagccacgagcaagacattgggtgaagatgattgcttaggagttaaagtagaagggtcaaggcttacgtatgttgaccaccatcttcggcaacaaagggcacttcagcaactaggaatgattcagcccaatgcatggaggccccagagaggcttgcctgaacgagctgtttccattcttcgggcttggctttttgagcatttccttcacccatatccaaaggactccgattaagttatgcttgctaaacaaactggactttctaagaaccaggtgtaaaactg

SEQ ID NO: 270985 - DNA, 314 bp, Glycine max
cgataggttaaagatgaaattgtcccaagtggcacttaaattgtggggccaaaaactggtgaggagaaatctgtcaccatttctgttgatgatggaattcgacctggcacaacagtgtctgatctatgaaagctcaaacctgtgttcaataaatactgaagcactactgctggtaattctagtcaagtgaatgattgtgctgcatctgttctgctgatgaaaagaagtgtttcgttgcaaaaggggcttcccattcttggggtattcaagactttcgcaacaatttgtgttgatcctgccataatgggtgttgg

SEQ ID NO: 270986 - DNA, 200 bp, Glycine max
cttcgggtgttagaagacgacagaaggggaggagatagacaggggaaatcttgagatttaggaggcttatcgagagtgtgatcttaatcgtgctgctgaattgaagtatggtagtctaaactccttgcaacgccaacttgaaaagtgccagaaagaaatgcatgaatatattaactctggtaaaatctatgtttagagag

SEQ ID NO: 270987 - DNA, 448 bp, Glycine max
acggaaatccattgaagttttaatttggaaggatggtgagagttagtgttttgaacgatgctcttgagagcatgtacaatgcagagaagaggggaaaacgacaggtcatgatcaggccgtcttctaaagtcatcatcaagtttcttctggttatgcagaagcacggttatattggtgaatttgagtttgtcgatgatcatagatctggaaaaattgttgttgaactcaacggcaggctgaacaaatgtggggttattagtcctcgttttgatgtgggtgttaaggaaattgaaggttggactgctaggttgctcccttccacacagtttggattcattgtgctgacaacatctgctggaattatggatcacgaagaagcaagaaggaagaatgttggaggcaaagttcttggtttcttctactgaacatggttttgagcatccattat

SEQ ID NO: 270988 - DNA, 370 bp, Glycine max
ttaattctaaagaattttcattttaaagttctctaattattactagccatgccgatccgtaggattgcaattggaaggcccgaagaggctactcatccagatgctttgaaggctggattggctgagtttatctccaccttgatttttgtttttgctggccaaggttccggcatagcctttaataagctcaccaatgacggcgctgccactccagctggtctcatctccgcctccatcgcccatgcctttgctcttttcgttgccgtctccgttggcgctaacatctccggtggccatgttaaccccgctgttacctttggtgccttcgttggcgggaacatcacccttctacggggtatcatctactgga

SEQ ID NO: 270989 - DNA, 450 bp, Glycine max
  unsure (1)..(450): unsure at all n locations
ccatttttctcaccatcgattcttagcggtgaaaatggtgaagtgtttctctctcatcgtcgttctctctctcctcgcagcatcggcgatcggcagcgaggtcatttccggagaatcggatggagatttcataatccgtcaggttgtggatgacggaggagtcaacgaaggaagtaacggcgacgatctcctactcggagccgaccatcacttttcggtctttaagcaaaagtttgggaagtcgtatgcttccaaggaggagcatgatcaccgattcagggtattcaaagccaatctgaagcgagctcaacgccaccaggctcttgatccctctgctactcatggcgtcactcagttctctgatttgactccttcggagttccgaagatcgtttctagggcttanaagtcgtcgtcttggactccctgcagatgctaataaggcccctat

SEQ ID NO: 270990 - DNA, 299 bp, Glycine max
cggacgcgtgggcttcttgttcattcttcatttctctcttcccctctttacgcgttcttctggtctgtttcataatcgagctatcacaacttttatcttgataaatcccaccggcattgccatttacttctcccattccttcaaaatggcaaatcccatttcccccattgctctctttatcctacttctagccccctctgccctacccggccatgattactgacaagctctcaccaagagccttctcttcttcgaagctcacagatccggctacctcccccacaaccagcgcgtcaatt

SEQ ID NO: 270991 - DNA, 363 bp, Glycine max
ggtggtttgacatagggacttgagggaaatcgtggaggctattaaggagaatttcgatgacgcggcttccgctggggatcaggtttctgagatgcttgagatcagtagggcgcagcttgatcggagcttcaagcaattgaggaaaactgtgtatcactcgagtagcatattgagcaacttaagctcgagttggacctcgaaaccgccgctggcggttaagtaccggctcgacaccggttcgctggatgaaccgggcggtccaaagagtctctgctccactttggaacgcctcttggcgtgggagaagaagctctacgaggaggttaaagctagaaaacgtgtgaagattgaacattaaaagaa

SEQ ID NO: 270992 - DNA, 337 bp, Glycine max
ggatcttgtaatgaatagtgatggcacttgccaaggagtgattgccttgaatatggaggatggaacactacatcgtttcaaagctgcttcaacaattttggccacagggggttatggtagagcatacttctctgcaacctcagcacatacttgcactggagatggcaatgccatggttgcacgtgctgggatccctcttgaggatttggagtttgtacaatttcacccaacaggtatatatggagcaggttgccttatcacagaaggatctcgtggtgaaggtggaattcttaggaatagtgagggtgagcgatttatggaacgatatgcccctact

SEQ ID NO: 270993 - DNA, 334 bp, Glycine max
ccggccgacccacgcgttcgggctggcagaagacgactgaaagaagtggatatacatagatgctcgaaggaaatcttgggtgctcttactgagaatttcgatgacgccgcttccgctggagatcaggtaactcagagtctaggatcagctatggcgcagcttgatcgaagcttcaagcgattcaagaaaaccgtgtatcactcgagtggcctattgcccagctcaaacggtagcatgaccgcaattccgtcgcttgcggtagcaactccttttgcaactcaacagcttattgatctgatgaattttttgaatttatagaaattagttagatgac

SEQ ID NO: 270994 - DNA, 180 bp, Glycine max
tgtcttgcaaatcgttcgtctgactcgggtgtgggggctgaaagactaatctaacgcgtctagtatctggttacctccgaagcttccctcaagatatctggagcccgtgggcgaattgtatagcatactgcctatgatcactaggcatatacggcccctcgacatggacctattatgaaa

SEQ ID NO: 270995 - DNA, 388 bp, Glycine max
ttttgttggaatacatcttggatctgtcgagggggttatgtccaaagtcctactcatggtcactcggtggaattaggagaagctgtaggtgttattgcgggccagtccattggagaaccgggcactcaacttacattaagaacttttcatactggtggagtcttcactggaggtactgcagaacaggtgctagcaccttataatggaaaaattcaattcattgaagatttgattcatcctacacttacacgtaatgggcatactgcgtttctatggtatatagatctgtatgctactattgacagaggtgatattatacataatgtgactattccaccaaagagttttctattagttcaaaacactcaatatgtaaaatcacaacaag

SEQ ID NO: 270996 - DNA, 356 bp, Glycine max
ctagtagggccgccaggcccatcagtcaacgcggactatacatattgacattccattttcaaagcagcttaatgattaattattgaggcacatattgatggaatcagtattattttctcacttgcttaaactatatagatactatttctatttatataaatcatattttatttattatctataatattatataatattattatggaaatatatcattaataactttttaaatattatcgattatatttaatcatgtttaatgttttttaaaacagaattaaatctttattaaatattatttatactttttattttatttcgaaaattttaatctcttcttttcttgtaaatttttt

SEQ ID NO: 270997 - DNA, 351 bp, Glycine max
gaccattcaccacacacatagtagctattatactctgtagagtaattgcggaatctgctagaattttctaataatggcgaaagacgttgagcaggtcacagagcaaggtgaatactccgcgaaggactaccatgaccctcctccggcaccgttgatcgacccagatgagctcacaaagtggtccttgtacagagccgccatagctgagttcatagcaacactcctttttctttacatcaccgtgttgaccattattggctacaagagacagagtgacaccaaaatccccggtaacaccgaatgtgacggcgttggcattttgggcatcgcttgggccttcggtggcatgat

SEQ ID NO: 270998 - DNA, 247 bp, Glycine max
ggcttcgcttgagcagacttaacaacagcacagagcgggttactgtctgttcaagctaccatctctctctctctttcttagtgcctccttgccagaagttaaaatggcccaagaaactttcctattcacatctgaatcagtgaacgaggggcaccctgacaagctctgtgaccagatctccgatgctgtgctcgatgcatgcttggagcaagaccctgacagcaaggttgcctgtgaaacctgcacc

SEQ ID NO: 270999 - DNA, 244 bp, Glycine max
gactgagtgtagtaatcaatcatcttttgtttgttcttcagtactttagtgtgtgatttaattccaagattttgagaatgtctagctgtgggtgtggaagtagctgcaactgtggcagcaactgcggttgcaacaagcactcttttgacttgagctatgttgagaagacaaccacagagactcttgttttgggtgttgggtctgtgaaagcccaattggagggtgctgaaatgggtgttgcaac

SEQ ID NO: 271000 - DNA, 237 bp, Glycine max
cggacgcgtggggctgctagagacacagtgggaggatccctgagttgtgaattcaacgatggttgttgttggaagggagcccaaggtggaagggcttactcggcttgtcttgatgactatagaaaaggttgtacatgttcacctgggttcagaggtgatggagtccagtcatgttaagatatctatgagtgcaactagaaaacattctgtcaattcccatgttgcaaatgcaaaaac

SEQ ID NO: 271001 - DNA, 375 bp, Glycine max
atttatatttctatcaagttactatctatgggaattaaattcctcgtggaatattgaagaagccatgtctacagctgggcaggtcatcaagtgcagagctgcggtggcatgggaagcagggaagccactgtcaatagaaaccatagaagtggcaccaccccagaaaggtgaagtgcgtttgaggatcctcttcaactccctttgccgtagtgatgtttattggtgggatgctaaggaccagactcctctagttcctcgtatcttacgccacgaagcttcatggattgtggagagcgtgggcgagggtgtgacacatctgaaaccaggtgaccatgcacttccaatattcactggggagtgtggtgaatgcactta

SEQ ID NO: 271002 - DNA, 310 bp, Glycine max
  unsure (1)..(310): unsure at all n locations
aaaaccggccggcccacgccgtccgncaggcagacgaaaagtgaatggctactttatatcttaaatgacctcaaatttatgcggggcggctaaagcatagacagtgtaaggacaaaaaagagggctctattcttccaaaccacgacataagcagcacgacaatgccactccaaccagatgtacactctcctaatgaacactgcctattgtgcccgtactcccgcagggaaacgcgcaaggtgcacgctatctgagaaagcacacaacatcatatggctatgagaccattcgctgagagtagcgtggaaca

SEQ ID NO: 271003 - DNA, 307 bp, Glycine max
cttcttcatgtggatgatgctgatcaatcggcacatgcacaaacgcaggggtctcttcttcagcagatagattgcaacggagcatgtgctgcgaggtgccgtttatcatctcgtccacgcctctgccaaagagcttgtggaacttgttgtagacgctgtaactgcgtgccacctggcactgctggaaaccaagaagtgtgtccctgctatgcaagtttgactactcatggtggcaaacgcaagtgcccttagacttaattggaccactattctaatgcatgccttgatttatattataaaataaaaa

SEQ ID NO: 271004 - DNA, 171 bp, Glycine max
gagtgcacaagtgagtttgttgatcgagataactagaaacagtgtgatgaaaatgaaggtccttgttttcttcgttgctacaattttggtagcatggcaatgccatgcgtacgatatgttctctctccgaatgaacactgcctattgtgcccgtactccggaggtgaaatg

SEQ ID NO: 271005 - DNA, 159 bp, Glycine max
  unsure (1)..(159): unsure at all n locations
cgggccgacccacgcgaccgcccattcctcccnacggtttcgataagactttataaggggagtgcacaagtgagttagttgatcgatttatctagaaacagggtgattaaaatgaatgtccttgttttcttctttgcttcaattttggtagcatggcaa

SEQ ID NO: 271006 - DNA, 359 bp, Glycine max
gatgatcagcagggagaattaggtttttagggtttacaccgagcagccacacctcccgcagcagccatggttctcaaaactgaactatgccgattcagtggtgccaagatctacccaggaaagggcatcagatttgttcgtggtgattctcaggttttcctgtttgcaaactcaaaatgtaagaggtatttccacaatcgcctgaagccttcaaagctcacctggactgcaatgtacagaaagcaacacaaaaaggacattgctcaagaagctgtgaggaagaggagacgtgctgccaaaaagccttactctaggtccattgttggtgcgaccttggaagtaacccaaaaaaagagagc

SEQ ID NO: 271007 - DNA, 364 bp, Glycine max
agagaacaccacagaggggctggcactttgtcactgcaaagggaccccgaggtcggggaggaatggatggccacaaggaacctatgttactgactatgccaggtgcgaacacgactgaacgtgcaccaaccacaccatcacgaagaatctgtacatgatatgccacaaggacatcaagctagctctgaaccccctgaatgcagctaggctcagcaacatactaatcatctacggctaaagcacaaagtctgatctgcccaaaagagcgctaccaaatataatcaaactctagctcctgcctatgacctgaaaggaccaagtgtacatgtacttcagagatactactggggatatacttaatccc

SEQ ID NO: 271008 - DNA, 361 bp, Glycine max
gattttgaaatggaaggagagaaagaaaatccgggtggttacgccgctttggtgaactccttctgcgaaatcacttcctcttccaaggaagaagctcttttctttttggagagccacaatttcgacctagacgctgccgtttcgactttcctcgacaacgccaacaaccccctcatccctctcaacgacgaccttgccattcccaaccccaacgccgtttcccctccctcagattctcactctccggacttcaacccttctcgctcgccgtctccgtctactttgcccacccgcaccccctacgagctccgatcccgtaggtctctcggcaagaaacccttcaccagtcgccaaggcaaaa

SEQ ID NO: 271009 - DNA, 255 bp, Glycine max
ggggggtttttacagcttactgaacatatcaaacagcggaccatttaggatgaacttgcgccgatataattaagatagcaaagcgaaactagaggggcatgctgaaacataacaaatccaggggccgtgagccacaatgagattctcgagatgtacacggattacatagatccaagctacaagtgtactaactacaatcttgaagagcaagccaaggcaataattgctccacgcatcaacaatgagatggattca

SEQ ID NO: 271010 - DNA, 412 bp, Glycine max
tttctgacggcgaaagagcgtattagaggctgagttgccaacactcctcaattctcggtaatcatatgacaactaagacccattttattttgcataaatcatatttctgcatttcaaaatttagtcatataaacaatgaaatgataaaatccaaagaataagccatctgcggacgcttgggcaaaaaagcttaagagctcttcttttttggatcaacattctaatacctcttttgattgatcatcctgattgaccactgcgatgccaatcttgttgatcacgtcggattatcagttttcaggatactcctgcaagttacaaggcctaaaacagtaatgttggggaacatacctgcgacaaccacatattgaaatattcatcattatcatgaagctacaagaatacctggttt

SEQ ID NO: 271011 - DNA, 411 bp, Glycine max
tgttgtttgatcgcggaatttctttgtttctgggtttccggaatatgagtagtgcggcttgttttaatggatcctattgaaagtacagaacataaaatggatctgtcatcttgatagagatggttttatcccgtcagatatttattctagtatctggagcacggaatatagaaaatggattctaaaaatattagaactatgattcatactaaatatttagacctcgcaaccggacttaaaaaacttttcaaagagttttaaaaataaattgaataattttcattcttttaagtttccggagcttatctttattttgatcaaaggacaaacgtttcctttaatttttttcattatatctattcattgaataagggatgatccaacagttcttactcagggaaatttttggac

SEQ ID NO: 271012 - DNA, 326 bp, Glycine max
gagttccacctagtagcaacaatgtcgaagcgaggtcgcggaggatcggcagggaacaagttccgcatgtcactgggtctgccggtggcggcgacggtgaactgcgccgacaacaccggcgcgaagaatctctacatcatatcagtgaaggggatcaagggaaggctgaaccggttgccgtcagcttgcgtgggtgacatggttatggccaccgtcaagaagggaaagcctgatctccgtaaaaaggtgctccccgccatcatcgtccgtcagcgcaagccgtggcgccgaaaggacggtgtttacatgtacttcgaagataatgc

SEQ ID NO: 271013 - DNA, 417 bp, Glycine max
gagagttcattccatacacagaaagaagaacaacgctaagaaagcagaatagggaaaaatacatcgatagaggaaaattaattgaagggtgctactactacgaccttctatatcattaatgattgaaattcgtgttggaattgtcttgtaggtgtagtagtgataataagagaggatcatatatatattagtagtgctagaaattaattgaagtgtgtaatagaatagagtgtgatagagagagatatggggagaggaagggtgcagttgaagaggatcgagaacaagatcaataggcaagtgacgttttcaaagagaaggtctggtttgctcaagaaagcacatgagatctttgtgctttgtgatgctgaaatggcccttatagtctttttcaccaaaggcaaactttttgagtac

SEQ ID NO: 271014 - DNA, 119 bp, Glycine max
gatttaaatgagaatactagaaaatgtcgaatggactgcagaatttgcagatatactggttaagtccaaagaggccattgatattcctagtgaggagcagcaaagttctgaacaagctt

SEQ ID NO: 271015 - DNA, 188 bp, Glycine max
atgtagctgtcgtaacaggtgggagaaacatgcggcgtgttggagtgatcaaaaactctgtacatcattcaggtaactgtaacacagttcacgctcaagattccactggacatgaatttgcttctcacatgggcaatgtgttcactattggcaaaggcacaaagccatggatattacttgcccaaggg

SEQ ID NO: 271016 - DNA, 360 bp, Glycine max
  unsure (1)..(360): unsure at all n locations
tactgctgcgagaagacgacagaaggggaagcatagcagcatcatacaaagcattgaattcaaaaacttaagttcattccttgtgttttgctttcttcctcaaaaccaaacatgtcgaacacatgcggcaactgcgactgcgctgacaagactagctgcaccaagggaaacagctatggtgttattgtagagactgagaagagttacatcgagactgttgtcatggatgttccagcagctgagcatgatgggaagtgcaagtgtggcactaactgcacttgcacggactgcacctgtggccattaaggaatatgtatgaaaatgtaattgccatgntgttggcaatacaaatattcaaat

SEQ ID NO: 271017 - DNA, 331 bp, Glycine max
tgtcaccaacaccaaaacaaacccactaagatggcttcctttgtatccttcctagtgctgcttcttgcagcccttatcctcatgcctcaagggcttgctacttactacaaaccaattaagaagccaccagtgtacaagcctccagtgtacaagccaccagtgtacaaaccaccggtttataagccaaaaccaccggtttacaagccgaaaccaccggtttacaagccaccatataagaagccaccatacaagaaaccaccttatggaaagtaccctccaatagaagacaacacccatgcctaaagcaagcaatgaggtctattatctactt

SEQ ID NO: 271018 - DNA, 212 bp, Glycine max
tacggtggcaaaagcaccacaaagggtttctctagaggatggtagcacgtgggcgcggctaaagcttgaggattagttggtcaaccgggggaagcagttgatctatactctgacagaggatgctgcaactagtaccggagctccttgctggtctggaccaaacagattccctcgtccactacaattctaagactcagatctggagcatctaa

SEQ ID NO: 271019 - DNA, 320 bp, Glycine max
tttgttctagtgtgtgattgtttgttgttgtaactcgttcttcttcttttgttgttctgtgtttgtgtttgttttttctctcacctgaaaatgtcttgctgcggtggtaactgtggttgcggaagctcctgcaagtgcggcaacggctgcggaggctgcaagatgtacccagacttgagctacactgagtcaaccaccaccgagaccttggtcatgggagtggcacctgttaaggctcaatttgagggtgctgaaatgggtgtgcccgctgagaacgatggctgcaaatgtggaccaaactgctcctgcaacccctgcac

SEQ ID NO: 271020 - DNA, 270 bp, Glycine max
gaaaatcaaatgagttctgaacgagagaatagatgttttacaaccaaccacaagtttcatattggatacagtactcatactggcaattatggtcaagaattattctatcaactgccatctacttcagagataccatctgacacatttttttaaagtacaataagaaatagcaattcctttttttttaatttcatcataatgtaaataggaaagactaataccaaattcattaaaaaattcaagagaagcaaaaaaatgcaagggccgttg

SEQ ID NO: 271021 - DNA, 326 bp, Glycine max
gccaaattgtttttgccacacagaagcatgtcagagttgaaaaaacgtcatgctgaggatttcttagcttcagacaaaacaaaagcgccgagatcttattctgctcaatcacctgcccaatctgggatgggtgcatatccaaatgcacagaaccagtggtctaattatggagttcaacctcaaacttggcctccagttacacaagcacaagggcaacaatggactgctggctacacccaacaagcttcctacggggcttatgctggatatgggggcaactatgcgaattctcaattgcctacatcagttccacaaagtactgcata

SEQ ID NO: 271022 - DNA, 382 bp, Glycine max
  unsure (1)..(382): unsure at all n locations
gaatggtccggtgaagtgttcggattgcggcgacgtgagcggttcgctgcccgcgacgttgtgagaagtccactgaaccttatcatttagaggaaggagaagatggagagaaaaggaagaagaagaagaaggaaaagaaagggctgaaagagaagatcgaggagaaaatagagggtgatcatcatcatcacaaggatgaggacacaagtgtccctgttgagaaagttgaggttgttgaaacagcacatgctgaggaaaagaaggggttcctcgacaagattaaggagaagctaccagggcacaagaagacagaggaggccacagntactactccttcttcaccaccacctggtgcatcattggagcatggtgaaggtgctca

SEQ ID NO: 271023 - DNA, 276 bp, Glycine max
  unsure (1)..(276): unsure at all n locations
gttgntgttgtaggaaatttaagtgaagagagaatgatgatgaagtctgctatgtgtgcattggtgcttgtggcactggttgtggttgaagtggggcccatggctgaggctgcggtgacttgcaacccaacacagttgactccttgtcttccggcaattaattcaggttctgcaccttcgagtgcttgttgccagaagctgaaggagcaaaagccatgcttctgtggctacctcaaaaaccctagcttgaagcagtatgttaactctcctaatgcc

SEQ ID NO: 271024 - DNA, 349 bp, Glycine max
tccggtcgacccacccttccgccggttgcaaaagacaacagaggggttgtgttttcattaacttatacaaattctcggcgttgggtcgcgtccttgtgttaatcgtgttgacgttgaaggaaatttaagtgaagagagaatgatgatgaagtctgctatgtgtgcattggtgcttgtggcactggttgtggttgtagtgctgtccatggctgatgctgcggtgacttgcatcccatcacagttgactccttgtcttgcgcgcgttaattcaggttctgcaccttccagtgcttgttgcctgaagctgaaagagcaaaagccatgcttccgtggctacctcaaaaaccct

SEQ ID NO: 271025 - DNA, 289 bp, Glycine max
gcgagaaaacaccacattgggtcttacttacaaacaaactaccagctgtacttgctcattttgaaagatacaagtgcttcaatacaaacaaaggctgttactcaggaagatgtgaacactttcgggcattgtaggaagcccatttgtgtgcacggtccagatcgcccttaagttgaagggagttgagtacaaatttttggaagaaaactggggccacaagagagattcgctgcttaaatacaaccctggccacaagatagttccagtgtttggtcacaatgagcaaacc

SEQ ID NO: 271026 - DNA, 404 bp, Glycine max
tcgagaagacgacagcagggtttttctcttcaagctcttatccatggcttcctatggtggtgagcttcttctagattcatcttctacttgaagtggcatctccattcatctttctccttctccattccactgcaatcagacctcaagaagcaaaggaatccattgatgaagaagatccaaggtgatgcaatcctaccccgcaagggcattggatagaaaactccaagtagattgtgccagagatgcaagagaaggccctagggttcttatgagccttacggtagatttcgagcccatgggctaagtatgagcccacttatctttgtaaatattagattaaggtttcattatttttgggccttgtatttagggctccataatgtatgtagggtaccctagaaata

SEQ ID NO: 271027 - DNA, 397 bp, Glycine max
tttgctgcgagaagacgacagaaggggaggtttttagggtttacaccgagcagccacacctcccgcagcagccatggttctcaaaactgaactatgccgattcagtggtgccaagatctacccaggaaagggcatcagatttgttcgtggtgattctcaggttttcctgtttgcaaactcaaaatgtaagaggtatttccacaatcgcctgaagccttcaaagctcacctggactgcaatgtacagaaagcaacacaaaaaggacattgctcaagaagctgtgaggaagaggagacgtgctgccaaaaagccttactctatgtccattgttggtgcgaccttggaagtaatccagaaaaagagagctgagaagccagaagttcgagatgcagctagg

SEQ ID NO: 271028 - DNA, 310 bp, Glycine max
  unsure (1)..(310): unsure at all n locations
ggtttccttctccggcttgttcagtctttcttggaactttgttactctcacacatgtctcgctccgtgcctttggtttcaaccatttttgtcttgcttctgcttctggtggccactgagatgatggggccaacaatggtggcagaagcaagaacttgtgagtctcagggccaccgtttcaaggggccatgtttgagtgacaccaactgtggctctgtttgccgaaccgaacgtttcactggaggacactgccgtggcttccgtcgcaaatgcttctgcaccaaacattgntaattttaaaaaattaatta

SEQ ID NO: 271029 - DNA, 371 bp, Glycine max
tacggctgcgagaagacgacagaagggtacggctgcgagaagacgacagaagggggtgagagagcgagcgagcgagcagtttcaaagagaggatttgggattgggaaggcgagggattgcgctgcgtctcttcctcttctctttcgattcatccctcattcataatcttccaatccaacaacctcagcctcacactcacacatacacacatctgaacgcgtatcgtccctcccatggcttcaaagcgcatcctcaaggagctcaaggacttgcagaaagacccaccaacttcttgcagcgctggtccagtagctgaggacatgttccattggcaagcaacgattatgggtcctgctgatagtccttatgct

SEQ ID NO: 271030 - DNA, 344 bp, Glycine max
  unsure (1)..(344): unsure at all n locations
ggaggccaaaaatgcattggaaaattatgcctataacatgaggaacacaatcaaggatgacaagattgcttccaaactgtcttctgatgataagaagaaaattgaagatgcgattgagcaggctatccaacggctagatggaaaccaacttgctgaggctgacgaatttgaggataagatgaaggagttggagagcatttgtaatcccatcatagcaaagatgtaccanggtgctggtggtgatgcgggtggagccatggatgaggatggtcctgcagctggcagtggaagcggtgctggacccaaaattgaggaagtcgattaagcagaagattctcatgggt

SEQ ID NO: 271031 - DNA, 306 bp, Glycine max
ttttgcttcgagaagacgacagaaggggacgcattttctgttctgttttgttctcattctgtgactctgtgcttagttaacgttaacagtgacttaagatggcggattctgcagatgtcacccacgatgttgtgtccctcctctcttctcctcaaagggactttcttcttcgaaacaacggcgatcaggttaaaattgacagcttgaagggtaagaaacttgttttgtatttttcggcatcctggtgtggtccatgtcaaacatttatcgccactttgtgggatgtgtacaatgaggttgcaaaaa

SEQ ID NO: 271032 - DNA, 367 bp, Glycine max
gacagcagtaaagtgagttaaaagaaccgataatagttgttccttcactctccgctctctctgccactgagccaagaagatggcctcacaggtttgcaaatctgcttccagagccgcgaggtcccttctatcctctcgttttcactctcaaggacgtgcgcttggggctgctgcggctgtttcattgagcagcaaagtgcctcttttttacggaaagaacggttctggaaatggatccgcttcttcatcatcatcatcatcatggatttcaggagctcttgctcttcctgccgcagcttacatgttccaagatcaggaggtgcaggcagctgagatttctgagattatatctcgttttgagcggaaa

SEQ ID NO: 271033 - DNA, 363 bp, Glycine max
tatgggggtggcaggggagtgacacagaaattaagctagagcgtcataggttcttcttcttttctcaccttccttctctcgcttcagacaaagggacaaaaaatcagtgcgtgagagagagagagagaaattccacatccatgtcccacagacatccaaggttcgcctgtgggattctagggaacattgcctccttcgtgtgctttctggcaccactaccaacattttatagagtgtggaagaagaaatcaaccggacggatacaatcaattccatatgtggctgcactcttcagagcaacgcttcggatcttttaagcctatgtgaagaccggagaaacgcttcttatcaccatcaatgcat

SEQ ID NO: 271034 - DNA, 370 bp, Glycine max
atattgagaaaatttatctatgacttacattagaacaaactaatgaaataaaatatataacaaattacgttgcaggcaagatgtaaatgctttaaactttaaaaaggaataattaaaataaaaaattaaaataatttaaagacggggtactcttatttaataaagaattaatgaatctcacaagaatatttttaatgaattaaaaataaaattaattttataaattataatatttaatgctttaaaaaacatttacttaatatttaattttttaattattgatttttaacaaataccatttatactgaaataacatttatataatagcttttaagatttatttattttaaagctagtgagtttttttaat

SEQ ID NO: 271035 - DNA, 393 bp, Glycine max
ttgtgactgacaaacaaacaatttaccagctatacttgttccttttgaaggttagaagtgctacaatacaaacaatggcagctactcaggaagatgtgaagcttttgggtattgtgggaagcccatttgtgtgcagggtccagattgcccttaagttgaagggagttgagtacaaatttttggaagaaaatttgggcaacaagagtgatttgcttctcaaatacaaccctgttcacaagaaggttccagtgtttgttcacaatgagcagcccatagcagagtctcttgtgattgttgaatacattgatgagacatggaagaacaaccccatcttaccttctgatccttaccaaagagccttggctcgtttctggtccaaattcattgatgata

SEQ ID NO: 271036 - DNA, 338 bp, Glycine max
accacagaggggcaaagtttccatacaaacacactaacgaggatccattcttgggcctgtctgatgccagaagccctactaatcacacgctgcctggcgcttatgtaaatgggtgccgtttaaaagctggtagttgcaccttggggtgcgtcgatcggaccgccttcagtgtgcaccgagcggatcacacattctggcaacaatacgctcctgtcacttaactggccgcttctagcctccggcgctgtcactttgaagaaattagagtgctcaacgctagcctacgctctgcatacattagcatgggatgacaccacatgatattgacactattgagc

SEQ ID NO: 271037 - DNA, 337 bp, Glycine max
ttctaccttcaagctcttatccatggcttcctatggtggtgagcttcttctagattcatcttctacttgaagtggcatctccattcatctttctccttctccattccactgcaatcagacctcacgaagcaaaggaatccattgatgaagaagatccaaggtgatgcaatcctaccccgcaagggcattggatagaaaactccaagtagattgggccagagatgcaagagaaggccctagggttcttatgaagccttaggtagatttcgagcccatgggctaagtatgagcccacttatcttctgtaatattaaattaaggtttcattatttttggg

SEQ ID NO: 271038 - DNA, 334 bp, Glycine max
ggttggcgcgggtgaggtagaacccttccacggtggtgactgcgcgatgggtgcctacaagtatgtttcagagctatggcgcaagaagcagtctgatgtcatgcgcttcttgcagcgggtgaggtgctgggagtataggcagcaaccttccattgttcgcttgacaaggtcgacccgccctgacaaggctcgtcgcttgggcttcaaggctaagcagggctatgtgatataccgtgttcgtgttaggaggggtggccgaaagaggccagttcccaaaggtattgtttatgggaagcccacaaaccagggtgttacccaactgaaatttcagcgt

SEQ ID NO: 271039 - DNA, 281 bp, Glycine max
  unsure (1)..(281): unsure at all n locations
gttattgttgtgactcgttcttcttcctcgntatcttcttcttttgtcgtctgcgtgtgtggtttttctctcacctgaaaatgtctcgctgcggtggtaactgtggttgctgacacgccttcaagtaccgcctcggctggcgacgctgcatgatgtacccacactttatctacaccgtgtcaaccaccaccgagaccttggtcatgggagtggcaccaggtaaggctcccttctagagcgctgaaatgggtgttcccgctgagaacgacggctgcaaatgt

SEQ ID NO: 271040 - DNA, 375 bp, Glycine max
tgtggttttagtagtatttatcaggcaagtgggggttggtttgtgtttttttgttatatttgtatgttgttctgtgctgggtccttaatttgtggctgagaattaattattattatcaattatgggtctctcaaatttcccaagtgcatctgaaggggtgctacctgtgcttgtgataaacacggttctctcagtggcagtgttgaagaacatgtttagatccatgctccaagtagtacttggtggcagtgctgctgctaatggttcaaacattgaacatgatgaaagttcatcatcatcatgggaaaggagggtgtcaataactcaatacaagtcattgtgccacaaccacgacttatgaggaacaagtatggc

SEQ ID NO: 271041 - DNA, 351 bp, Glycine max
tggatcattatatattatatttttattttctggatgtaattttttaatattagaggcaatccatacttatcagtattgctttatctgtaatacatcaacttcgaagttgataaggtgattaatcggcatttaatttcacgtacaatgatacatgataggtttgtaaacattactaatgtatctttcaccttctatatattagagtaccttatttttttttatttctatttttgaagcaaatttattttttattacatgagatttaaaattctagcattaattcatgggcaataaagaaatcctaacattagctattacgttttcaattatctaccatctactcttgtatta

SEQ ID NO: 271042 - DNA, 388 bp, Glycine max
tgttctagtgtgtgattgtttgttgttgtaactcgttcttcttcttttgttgttctgtgtttgtgtttgttttttctctcacctgaaaatgtcttgctgcggtggtaactgtggttgcggaagctcctgcaagtgcggcaacggctgcggaggctgcaagatgtacccagacttgagctacactgagtcaaccaccaccgagaccttggtcatgggagtggcacctgttaaggctcaatttgagggtgctgaaatgggtgtgcccgctgagaacgatggctgcaaatgtggaccaaactgctcctgcaacccctgcacttgcaagtgaggtgttgggagagcaagcttcaagcagagatagcccttaattaggaataatgattaacta

SEQ ID NO: 271043 - DNA, 384 bp, Glycine max
ggttctttgcgagatagaacagaaagccgtggctgtcctagtctcttctttccctctacccatttcagtttcaggatggaatctcacgtgaagcacgcccttgttgtcaaagttatgggtcgtactgggtctagggggcaggcgactcaagctagagtgaagtttttggatgatcaaaaccgacacatcatgaggaacgtgaagggacccgtgagaaaaggagacattctcaccctacttgagtctgtaagagaagcaagaaagttgcgctagaggatctcttcatggtttgacgcaagacttaaacaaaacatcgctggttttcgtgtaggtaaaggatgtcaaatgttaattgtcatggacctgaattatgcacctactatg

SEQ ID NO: 271044 - DNA, 336 bp, Glycine max
ggggttttgttggaatggtaaccaaccaaaaccttaccgggcccggctttcttggtccgggtttggcttcaggatggaatctcaggtggaagcacgcacttgttgtcaaagttatgggtcgtactggatccagaggacaagtgacccaggttagagtgaagtttttggatgatcagaaccgtcacatcatgaggaatgtgaaaggacctgtgagagaaggagacattctcaccctactcgagtctgaaaaggaagcaagaagattgcgctagatggtctcttttttttggcttgcccccaaattcgaacaaaagcaatatttttcttgatatttat

SEQ ID NO: 271045 - DNA, 238 bp, Glycine max
ctttggggctttctttcccggggttgttgcggttgaggagaacaacaacaataacaagaacaagatgaagaggtccccggtggtttctcggagcagcattgacgatggaatgctttccttcacttccctgccggctgcaaatataaaatcagttaacggtgcttgtgtcggtaccggtgattcggatcactcggatctggaagcttccgtggcgaaacaggtggtggagcccgagaaa

SEQ ID NO: 271046 - DNA, 396 bp, Glycine max
tttctgtataactgatgtcaacattcatcatgcatacacattttttgctgttgttcattgtgtttaacatcgggtatttagagaaccgatgttgtcatatatatgttaacatcggttttacaaaaccgatattaatattgatacattcaacatcggcactttcaacatcggttttagaaccgatgtagaatgttctaaataaccgatgttgaaagtgtattttctaatagtgaataccctatagtaaatcccctttattaattttaataaggttaaattactcatttgttcctatagtttcacgattcttacctttttggtctctatagtttgaaagtggtttttttagtccatatagtttacattttaattcttttttaatccatataattttaa

SEQ ID NO: 271047 - DNA, 301 bp, Glycine max
ttatagagacagagggcacgatgtcaccgttaaggacgagaagacccttctcttcggtgacaaggcagtcactgtttttggacacagaaaccctgaagagatcccatgggggtcaactggagctgacatcattgttgagtccaccggagttttcaccgataaggacaaggctgccgcacatttgaagggtggtgccaagaaggttattatttctgcccccagtaaggatgcccccatgtttgttggtggtgttaatgagcacgagtacaagccagagcttgatattattttcaacgctagc

SEQ ID NO: 271048 - DNA, 367 bp, Glycine max
cacggtgatgggaattttatgatgaacaacattagtgctcgtgcatctgtaggagccggtgttggtctttctggaaatacccctgaaattagttcacccaatttcagaatgatgtctctgcctaggcatggttccttgttccatggaaatagtttgtattctggacctggagcaactaacattgagggattagctgaacgtggacgaagtatacgacctgaaaatggtgggaaccaaattgatagttagaagctgtaccagcttgatcttgacaaaatcgtctgtggtgaagatacaaggactactttaatgattaaaaacattcctaacaagtatacgtcgaaaatgctgcttgctgcaattgatg

SEQ ID NO: 271049 - DNA, 290 bp, Glycine max
ttggggtattataaaaacatgttgaagcaacggggtgctcgtgaggtgtcgttgctaacttgccaggcttttaaatgcacgtgcgacgccctggcaggagtgagaatgacttccgacggagcaacgtcggcggcgtcgcatctgaggaaaccatctgggaaggagaaactgaacaacgcgttgagacagaggatagggagatccatcgtacccaagatatactacggtcttagggcgcatgggaactactatttgcccaaacactgctacaacaatgatgtcttgaatgc

SEQ ID NO: 271050 - DNA, 374 bp, Glycine max
gacattgtgtttagtggaggacacatgaatagagctaggcaataacattcaggggctccgaaaagggggagaatggaggattgccttgagggtccacacttagccaatcatgaaacacagctccaaactcgaaggtggaggacacatgaacagcgctaggtaataacattcatggggctccgaaaaagggggagaatggaggattgccttgagggtccgcacttaggcaatcatgaaacatagctccaaactcgaaggtggaggacacatgaacagcgttcggcaataacattcatggggctccgaaaaaagggggttggagagacctaacggtgcaccgggtttttccacctgaatggcaaacatgctttttg

SEQ ID NO: 271051 - DNA, 416 bp, Glycine max
  unsure (1)..(416): unsure at all n locations
ccaagccgtccgccaacccgtccgacggtttggtttaagcgacagaaggggaagtaaaatcttaaatttctgaacattgaacaactcttcacacaacanaacttttttctggcattgtagcatcatgactggcagagaaatcctccatatgatgaaggtgaaagcagggtttggaacaccagacacagggaatggaaaaggcaaaatatcaaaacacattacacatggctttcacttgatgaagggcaaatcagcgcatcctatggaagattatttagtttcagaatttaagcaagaaaaggacagagaattaggcttgtttgcaatatttgatggccacttaggccatgatgtagcaagctatttgcagaaccaccttttccaaaacatcttgcaacagcatgacttttggactg

SEQ ID NO: 271052 - DNA, 360 bp, Glycine max
tttatagtctacagaagggttcctgtcttttcgaatgtgaaattattttttattgctaaaggaatatgttcaacattagcatttttattagccttttaaatgtgaccttccaacctaccaaactaaaactataaaagtcatataaaatatattttctatgattaaaagataattaattaaaaaatatcactaaatccttcgttagagtagatattatgtcaaaatataaatttagtgcacaaaattaatttttaacgctaaatcgtttataattttaaataataaaaagaaaatgggtaaaataaacttattctactctattagtaactaaacaatcataaattatttttctctatattc

SEQ ID NO: 271053 - DNA, 279 bp, Glycine max
ttgggtctcacacaacccttcaatgacgtccatggccactttcttcgcccaaacctccttcccctcccactctctctccaaaaccttcgatacccatttcgcccctgccccgaaagtcaacgtctttgtgaacttcagggcgaggaggcacgttggggtgcgagtttcgaacgcgctgatcgaaccagatggagggaagctcgtggagcttgtggtgacggattttgagagggatttgaagaagggtgaggctctttcgttgccgaggatcaagctctc

SEQ ID NO: 271054 - DNA, 380 bp, Glycine max
cgacgagttcggccacatgctcgccgtaatcctcaaggaaaacggcgttcgcgccgacggcggcaactttgaccagggcgcacgcaccgacctggccttcgcgaccctacgcgccgacggagagcgtgagttcatgtactacagaaaccccagcgccgacatgctcctcaagcccgaggaactcaatctcgaactcatcagatctgcataagttttccattacggatcaatcagttagatcgtgtagccatgcagatcagcacacttgtaggcaatggaagtagccaatgaatctgggtgcttgctctcctatgaccctaaccttcgactacctttgtggtcgtcggctgatgaagctcgtaagcaaatactgagcattt

SEQ ID NO: 271055 - DNA, 427 bp, Glycine max
cccacgcgtccgtcaccatgacagcttccatccttggcagcccagccgtcaccaaccggtgggcagttgcaacgcagaggagatcactcgtagtgaatgctgccaaagctgttgaagcagaaaaggtcagttatgacaatgacatggatggtagcaatggaaggaggaacttgatgttcgccgcggcggcggctgctgtttgctctgttgctgggatggcagtggcagatgagcctaaaccaggaaccccagaagccaagaaaaagtatgctccgatttgtgtcaccatgccaactgctaggatttgtcgcaattgagggactttggtttttattttacttctgatgattggaaatgtacaatggggttgttgtaatgctttgatgatttcatttgatcctcactgtacaagatgttcataaaacta

SEQ ID NO: 271056 - DNA, 441 bp, Glycine max
aacattgccagtgccattcccttcacaccattctcacaaaacaactttcaaactctgagagagaatggctgccaacacattgatgagtactgctatctcagccttcccatctctcctttcttcctcaaaatccagatttgccaccgcagttcctctttctagctttggtgtcaccaatgcctcttcttctcgcttttctatgagtgctgactggatgccaggccagcctagacctccttaccttgatggttcatcacctggtgactttggattcgaccctcttcgtcttggtgaagtaccagagaatcttgagaggttcaaagagtcagaactcattcactgcagatgggccatgcttgctagtccagggattttggttccagaggcattgggcttatgcaactgtgtaaaggctcatgaatgggcagcagtttctggggg

SEQ ID NO: 271057 - DNA, 413 bp, Glycine max
attactattagaccctccgataagttccaatctttttcggtcttttctccaccggactgaaacccgtcttcatttgatccggtgagagagagttcccctttggttgcgtgaatcttcagaaaagggttgtccttgtaatataatagttcgtgaattggagtttgtgtttatagcaagagaatggatgagtcaaaaaacaggcataatgataatttgggtgtgaacaaaatggggaaaaacattaggaagagcccattacaccagcccaattatggcaacaacaacaacagcagcatgaatgggggtagacagcaacagcaacagcctcagcctcaggtttacaacataagcaagaatgatttcagggatattgttcagcagcttacagggtcttcctctcagtctcaggatca

SEQ ID NO: 271058 - DNA, 340 bp, Glycine max
aaacaagtagttgagaactaagattaatgaaatggcttcctcaatgatctcctggccgggtgttaccaccgtcaagcgtgccgatgccggcatggttgcttcattcaccgggctcaaatccatggctggctttcccactagcaacaccaacaatgacattaccttcattgctatcaacggtggacgacgtcgatgcacgcaggcatctccaccaatcggcaacaagaagttctagactctatcctacttgacagacctcgacaatgcccaataggctaaagaagtcctattccttttaacgaaaggattgattccttgctttaaattcgagttggaacac

SEQ ID NO: 271059 - DNA, 297 bp, Glycine max
ggatccgatgacagccatgtccttacatgactaaaccctgccagcagatggtacaagaggggctcattactgcatcaatgtgtggccctaaattctgctctatgaatataacggaggatgtgaggaagtatgctgaggaacatggctatggaactgatgaagctctgcaacgcatgatgcatgctatgaatgctgaatatctagctgacaataacactatcactatatagcaacatgttaaatctttccaacagatttacttactcgattaatactgaatgtatcaataagacttaa

SEQ ID NO: 271060 - DNA, 439 bp, Glycine max
cccacgcgtccgtccaggtgacaatgttggctttaatgtgaagaatgttgcagtcaaggatctcaagcgtggttttgttgcatccaactccaaggatgaccctgccaaggaagctgccaacttcacatctcaagtcattatcatgaaccaccctggccagattggaaatggatacgcaccggtgcttgattgccacacttctcacattgctgtcaagttttctgaaatcttgaccaagattgacaggcgatctggtaaggagcttgagaaggagcccaaatttttgaagaatggtgatgcaggtatggttaagatgattccaaccaagcccatggtggttgaaactttctctgagtatccttcccttgggcgttttgctgtgagggacatgcttcaaactgtggctgtcggagtcatcaagagtgttgagaagaaagac

SEQ ID NO: 271061 - DNA, 502 bp, Glycine max
aaaaaaaaataaataataatataaaaaaaaattaaaaaaaaaaaaaaaaaacaaaaataaagggagggttataaaaaaaatatataaaatataaatacatacaattaaaatattattaaattataattattatatataatatttactatctcttatactaatatatatttttattttatatttaatatatttattatttatctttatttatatattttatctatttatttttaatatctatctattatttatatttcatattatattttttatatattttcttttatattttttatatatattttttctattttattatttctattttaattttttatttattattatttattttttatatatctttttttatttaaatttatctattcttttatttatttctttaatatttacttttttattattattattattattttaatatttatttattattatttttaattttattaattatttatttattatttattttttttta

SEQ ID NO: 271062 - DNA, 325 bp, Glycine max
tccacgcgtacgtacggctgccagaagacgacagaaggggagccaagaaaagaaaatggtcagccattttcttcgtagggaaacactctgaaattctcagttatgtcttggcaagcgtatgtggattatcacctactgtgtgaaatcgaaggtaaccacctcactcacgccgctatcatcggccaagacagaagcgtttgggctcagagcaccaactttcctcaattcaaacctgaggaaataactgccatcaataatgactttaatgagcttggatcacttgcttccactggattgattatcgggggcaccaaatacatggtca

SEQ ID NO: 271063 - DNA, 417 bp, Glycine max
aagggaagaaaaacttagctactaaggaaggatcaaagagaatggctcaagcaatgggatcaatggctggcttgcgtggttcctctcaagctgtgttggaaggtagccttcaggtgagtggctccacacgcttgaatgtggggagtggaagcagggtggcctcagtcacacgtgcagggttcacagttagagcacaacaacaacaagtgagtggtgaggtacaaagcagccgtagggcagtgctttcacttgttgctgctggtttggccactggctcttttgttcaagctgtgcttgctgatgccaaatctatcaaagttggaccaccttccccaccttctggtggattgcctggaacgttgaactcagatgaagcaagagaccttcagctgccattgaaagataggttcttccttc

SEQ ID NO: 271064 - DNA, 314 bp, Glycine max
cccacgcgtacgcccacgcgtccggtaaaactctccacgaagtactcttgtctactaggagtggggacgtacaatacctaaacctacagatgctacataatcttttatattgctagttcgagatttacgatctacagctatgaatctgaatcatgaccttgcatccgagaagaacttccagattcatacgacggcagctaaattggtcttactcagatctactactctatgattgatcagtatacacttcaacaacatccgatttgtatcagttatttttcaacagataatgtgtttgtgcaaattattttctt

SEQ ID NO: 271065 - DNA, 254 bp, Glycine max
gcccccaggcttctaagtcattgaaaaatttgcaaagcatctgtagccaccccactgtggtggttgtacttaaactacattcccatttgtttttgctttatgagatttcatcatcctgtatttttggtttctgttttcggacttcaatggaaattaatggatgagaactaatgaataagctattgtgttgtgttgaaaaaaaaatactactattatcaactactctaattaaactgattttacacttaaacaac

SEQ ID NO: 271066 - DNA, 454 bp, Glycine max
  unsure (1)..(454): unsure at all n locations
gcaaaaggagcgacccgaacctgctcactggtgctcttgttggtggacctgatgcatatggtgacgttgctgatgaaagagataactatgagcagacagagccagcaacctataacaatgctcctcttatcggtattctggcaagactaggtggaggtcatggtggctataaccagcttcttccagttgttgttccagctcctaagcctgttgttaccaagcctcaaccaacccccagtcccaagacaactccacctccagcttcgtggtcaggtccaatttccattgaacagaaaatgaccacctcgtggattgcccatggaataacttactacagatactcaacagtggtgactaacaaatctaacatgagtctcaaattctctcaatctttcaatatccaagctttatggtccaatcntgggggttacaaaatcaggtgattcatacacat

SEQ ID NO: 271067 - DNA, 405 bp, Glycine max
ggtgttaagcaccctcataactcaactcttcaagtagaggcaatccagtgtatgctatacaaagtccatattacttacaagtatacaaagcccatatacttacaagtaggatggtgacacataaattgagatgacaccaattgtgtgtgatagtgattacatatgacttcaagatcatttgtggaagaacatcacaatttgctaaatgataaatttgtcactctcacaagaactgctattaatgatctcccattgctggaacaataaatatgattttcaggcatacctcaactcaggcgttacttccttccggtaacgtaatcaatcttggagttgaatcatattccattgcagttccacagttggagcatttgacaatgttggtgggaccaccatttgaaattg

SEQ ID NO: 271068 - DNA, 369 bp, Glycine max
taaatgatatcattttgagaaaaaaaaaaaattaaattaaaaaaaaaataaaaaaaaaaaaaaagaaaagatatattaaaaaaaaaaatattaaaaataatcatacaattaacaattataaaactaacattttttttttttctattatatttttattttaatcattttttattttttatttttattttattatatattcttatttttattttattatttattttatttttttttttttatttttattttttacttattcaatttttaatttcatttattatttattttattttttatttttcattttattttttatatttctttttattttttatttatttatttattttatatttttttatttatatt

SEQ ID NO: 271069 - DNA, 379 bp, Glycine max
gtgttctctctctgcttcagcttcggcttcgagaagggtcgattgggtccccaagcggtttcttctctgtgtctgacaaactttataacccttatcaaacatgagtggtcgcttttctcgcacaatttatgttggcaacctgccctctgatataagagagtcagaaattgaagatctattctacaagtatggccgtataatggatattgaattgaaggttcctccccgccctccatgttattgctttgttgagtttgataatgctcgagatgccgaagatgcaattcggggtcgagatggatacaactttgatggttgtcggttaagagtggagcttgctcatggtggtagagggccatcatcaagtgatcgacgtgga

SEQ ID NO: 271070 - DNA, 417 bp, Glycine max
attagggtttttgagtgcggtgcggcgatcctagcactctcttctgcagctttcgcggacagcttcattcaccatggctgagcaaaccgagaaggcttttttgaaacaaccaaaagtgtttctcagctcgaagaaaactgggaagggaaagagacccggaaagggtgggaaccgcttttggaaatccattgggcttggatttaagactcccagggaagccatcgaaggaacctacattgacaagaagtgccccttcactggcaatgtttccatccgtggccgtatcttggctggaacatgtcacagtgctaagatgaacaggactattattgttaggaggaattatctccattttatcaagaagtaccagaggtacgagaaaaggcactccaacattcctgctcatatatcacctgc

SEQ ID NO: 271071 - DNA, 335 bp, Glycine max
taaaaaataaaaaatataaaataaaaatttaatataaaaaaaaaaaaaaaaaaaaaaaaaagaaagaatatttacaacaacatatacaaaaatctaaattatatcaaaataattcatacttttacattatcttttatatattctaatttattttttatttattaaatttctttcttctcattttttttcttctttattctattcatattctcatatttatttacctttttttttatatataattccttcttttatcttactttatttcttttaatttttcttcttttttcatatacttttcctttaatttctatttcttattttttatttttttt

SEQ ID NO: 271072 - DNA, 356 bp, Glycine max
gttcattagactctcacagacctagcatacatacacacatggctgccatgaactatggcggattggcctgcatctatgccagatctgctgcagcatgctacgagctcaatgacaaggtcactaacgaggcctctgacgcatactctggctacaaagggccatagatcaaatgtgatgccagagttcccacataccaaagaatccgaaggaaggagaggtgcccatgttctgtaggcagctaccctagtcatctatgcagcctccaattctatctgcaatgcatacatcattgatgattaccatcagaggagcaaagctaacaaggaattgaatgacaacaagaggttatgtactac

SEQ ID NO: 271073 - DNA, 420 bp, Glycine max
cagaagaacaagtagttgagaactaagaaggagaagcaaatggcttcctcaatgatctctggccggagctgttaccactgtcaaccgtgccggtgccggcatggttgctccattcactggcctcaagtccatggctggcttccccaccagaaagaccaacaatgacattacctccattgctagcaacggtggaagagtgcaatgcatgcaggtgtggccaccagttggcaagaagaagtttgagactctttcctacctgccagaccttgatgatgcacaattggcaaaggaagtagaataccttcttaggaagggatggattccttgcttggaattcgagttggagcacggtttcgtgtaccgtgagcacaacaggtcaccaggatactacgatggacgctactggaccatgtggaagct

SEQ ID NO: 271074 - DNA, 393 bp, Glycine max
cccacgcgtccgcacagattttgattcgattcgattcgattcagtcgaggttttaagcagcagcaagatgtctgggcgtggaaagggaggaaagggattgggaaaaggaggagcaaaacgacatcgtaaggtgctccgcgacaacattcagggaattacgaagccagcgattcgtcgtttggctcgcaggggtggcgtgaagcgtatcagcggtttgatctacgaggagactcgcggtgttctcaagatcttcttggagaatgtcatccgtgacgccgttacttacacggagcacgctaggaggaaaaccgttacggctatggacgttgtttatgcgcttaagaggcatggaaggaccctttacggatttgggggtagggtttttgcttgatt

SEQ ID NO: 271075 - DNA, 421 bp, Glycine max
ctttgatctctgtccccgctgcgtctctcgtaatcatgcctaagcaaatccacgagagtaaggatttccttctcactgccagaaggaaggatgcgaggtcagtgaagatcaagaggagcagagatgtggttaagttcaaggtcagatgctccaagtacctctacacactttgtgtgtttgacccagagaaagctgataaattgaagcaatctcttcctccaggtttgagtgttcaagacctgtaaaggtactgggcgagagatcaaggaagagcaattcattgattcttctgaaatttgattctctgtagttgaagcttgagatttttgtcagttggtcttttattatagattattgctaagacatggttgtttttatctgttttggaaaatgaaacttgaatttatgtctaatggagtat

SEQ ID NO: 271076 - DNA, 405 bp, Glycine max
aacaatctttgttccatttcggcatgaaaccctaattcactcgcttctcgatctcgtgagagcaatctttccacgctcgtcttcgcgctccatctgtacaagaagatccgtcacgagcgttggttatacgatggatgggaacaaggacgacgcgttgaaatgtttaagaatcggcaaagaggcgatggaaagcggcgatcggtcacgcgctttgaagttcgtgacgaaggcgcgtcgcctcgaccccactcttcccgtcgacgatctattgtccacgatagaggtggatgcaagggatcaagcccccggcggcgaagcggaaggccccacgaagcccactgatcaaccttctatccgccggagggccaccggggcggctgcgaccgtctcggccgggccctcgtc

SEQ ID NO: 271077 - DNA, 359 bp, Glycine max
gacctatcttggtagagatttgaagtttaaaccttcaaattaatcaaaccattttaattgggctttagattctgagtcactgctgctatggcgctacgcgtacttcttgtgttggggatgttgctgatgttgtgccttgttaaggtttcatctgatccaaagatagaagaagaaatactggaagcagaagaagaactgcagtttcccgataacgagccacttatcgtgagagacgcgaacagaaggctaatgcaagatatggattgtggtgggttgtgcaagacgaggtgcagtgcacattcgaggcccaacttgtgcactaaggcgtgtggcacgtgcttggtgaggtgcaagtgtgt

SEQ ID NO: 271078 - DNA, 403 bp, Glycine max
  unsure (1)..(403): unsure at all n locations
gtctctccctctcctccagctggttcttangccaacgcctttctcccatcaccctcccctctcttcttccgggtaagtcaacagagaagcaatgtcctattgtaatgaggcttaaacgatggtaacggaaggagtgtaaaccaaacagccttcctatcttgcacaaaatgcatgttaaacttggagatacggtgcaagtcatatctggacgtgaaaggggtaaagttggggagattactaaaatcttcaagcataacagcactgttatagtgaaagatttaaatttgaagacaaagcatgtgaagagtagagaagagggggaaccagggcaaattattaagattgaaggtcctatccacagctcaaatgtgatgctctactccaaagatcagaaggtagcaag

SEQ ID NO: 271079 - DNA, 416 bp, Glycine max
cccacgcgtccggcacatttggaaagtgttgtttttcttttttttcatttgcattgcaaagcaagaaccttgcaaattgcaatggcttccaacaaggttattgccaccatcttggttctttctctccttgcctactcaacatcattcaccaatgcatgtggcacatgccacccaaaacctactccttctccccctcctccatcagggaagtgccccaaggacacattgaagctaggggtgtgtgctgatgttctaggacttgttaatgttgttgttggttcccctgtctctagcaagtgttgtgcattgcttgaaggtttggctgattcggaggctgcactttgcctttgcactgctattaaggccaatgttcctggaatcaacttgaatgtgcctatcacactcagtgtgctact

SEQ ID NO: 271080 - DNA, 211 bp, Glycine max
accacgcgtccgcccacgcgtccggtaccaacattgttgtggaagaattttataattgcaatgtgcctggaaaattatctaccaaaaaaaaaaaaaaaaaaaaaaaaaaaaaaaaaaaaaaaaaaaaaaatacaaaaaaaaaaaaaaaaaaaataaaaaaaaaaaaacatataaaataaaaaaaaaacaaataaaaaaaaatatataaaag

SEQ ID NO: 271081 - DNA, 421 bp, Glycine max
ccactgcacaagtatctaaaatcaagcaaaggtggactctttggagatggtatgaaagtgaacttctccaagttccttggtgataaagagggaaatgtggttgatcgctatgcacccacaacttctactctgagcattgacaaggacttgctgaagttgttggatgcatgaatgaagctatgaatgactggagctgccaatagatgaattgtgattagaatatgaattatgaataagatatgtattgcatatgctgctgcaatttcctgtgtgccttgtatgtgtaccgaaacagttactcttgtagctctgacattaggttcataaccatgatattgggtacttattatagtgtgaatgtaaacttaagcttccttttaccattccagtgatctacctattccatttattggttttaaaa

SEQ ID NO: 271082 - DNA, 410 bp, Glycine max
ctctaatatttttctcactgtcttgtctctccagagaactgtatagagagagatgacgtctgcaacatctggtgcgtgtgttaaatgggttgggatcttccttcttgagtggaggaaacaggagccaaacccttctggccactgctattggaggcaaagtttgtgctgctgctgttactgttagtcctagaagactcattgtggtagctgctgctgcaccaaataagtcatggctccctggtgtcagaggtggtgtcaacctcgtctacccataatggcttgatggatccctaccaggtgactattgcctttacctactaggccttttgaaggacccagcattccttaaatggtacagataatctgatcttatttattggatatgggcaatggcttccattttaggaatc

SEQ ID NO: 271083 - DNA, 382 bp, Glycine max
gaattttaaaaaaagtgtgttacctaatttgaaggatgtgaatcatgtatcttttgtcacaaaataaaaggcatgaaccttcgggcaggaacaaacataaattactaccattaagataatattatacacgtgacaaccacatccatttaaacaagaaaattatgactgaacaataattttaaccattgaactctgtaacttgcatatttatgtgtaagctcatgcagctttttcagtttctgcagcttctgctgctgcttcttcctcccgaagcttctttaaagacggaggtggtcttacaacaatgcttttcttccattttttatcaagctttctagacaacctcttattgataccctcctcaatttctctttcccgcttc

SEQ ID NO: 271084 - DNA, 461 bp, Glycine max
cccaagccctatacaaccaaaccctaacacacacccatttgattcagtttccatggctggcgctcaaggttgcatttttggctgcagtgctctgcatggttgtggtgagtgcacccatggcacatgcagctatcacgtgcgggcaggtgacgagtagcctgtccaattgcatcggttacctccagaagggaggaacgccgtcgtcgggatgctgcaacggagtgaagagcctcaatgccgacgccaagaccaccgccgaccgccagacggcgtgcaactgcctcaagtcggtcgccagccaaatcttcggcttcaacgccaacaactccgtctcgctccccggcaaatgcggagtctccatcccctacaagatcagcacctccactaactgcgctaccatcaaggtttgaagagaaagtcatggacgcatgatacccgaaactactaactagtatatgagt

SEQ ID NO: 271085 - DNA, 403 bp, Glycine max
gttcattcactggatttggggttccctaagcacaccattattttattatgaatgagtggcgatagcagcaacaacaacaatataagtaaaagaatctctgtgttgtcatcacacttcgctagatccagccccatcatggcttcagagaagcaagcggctcttgccgtcactccctctgatgctgatgctcctaccatatttgacaagatcatcaataaggagattccttctactgtggtttatgaggatgacaaggtgcttgccttcagggacataactcctcaagctcctacacatattcttatcattcctaaattcaaagacgggttaagtggtctatccaaggctgaggagaggcactttgaagatcttggccgccttctggacactgccaagctggttg

SEQ ID NO: 271086 - DNA, 357 bp, Glycine max
cccacgcgtccggttcatcttgttccactacgtccagatccggagatggcaagacatgagggaccctggctctgtcaaccaagaccccatcttcaagcaatacagcttgccccaacatgagtatggataccctgctagtgtgcttaaccccttgaactttgcacctactttggaggccatggagaaggaacttgccaatgggagattgactatgttggcattcttgagattcatagctcaacacaacatgacaggcaaaggaccatctgagaacctattgctgcacctctttgacctgtggcacatcaccatcatcaatacaattcgtggctactaattttgtatacaatgacatgg

SEQ ID NO: 271087 - DNA, 442 bp, Glycine max
ctcattaaagccctatgggtgcagcttgatgtttcgggtgaatttcgcaatggagctcttcgaggaatcatatccttgtctagcaagtttattccaactatcatgaaccttatgaaaaaaactagcagaggagggacagaaccctgcagctaacaatcctcagagaaccccatcaaaaagcagttacaatgagggtcatgccgtgtcatctagcgcctcatctaacttgactagattggacaacggaaccgagtatgcgagtccattaaaagatgagtaggtgaagacactcatcttactgaaaaccaatttattctgttgggagatggtggtgtgtctggtggctgcatgcttgtccacaaaattcatgacttgtgagcattcaagacattcaaaggcattgggtttttttgtgcaagtgccatattcagggggccatgat

SEQ ID NO: 271088 - DNA, 196 bp, Glycine max
cccacgcgtccgcccacgcgtccgaaaaaaaaaaaaaaaaaaaaaaaaaaaaaaaaaaaaaagaaaaaaaaaaaaaaaaaaaaaaaaaaaaaaaaaaaaaaaaaaaaaaaaaaaaaaaaaaaaaaaataaataaaaaaaaaaataaaaaaaaaaaaaaaatatttttaaaattttaaaattataaaaataatttat

SEQ ID NO: 271089 - DNA, 313 bp, Glycine max
cccacgcgtccgtacacgcgtgctatttttacttacaggcctctactatactgggtcggcttctgctctagaacagacaatgctgaaacatcatttcttctcctctctcattatccaaaccatcccttcatgcaaatggcaaaggcttatctgaattctctgacctccgaagctcatcaagcttccttaccttttctagaaaatcatcatatgatttccattctctcattgacttccagacctatgcatttggaagccgtggaagatacaagaatgctatgaccgaatcaaaactagatgtttgcataaacgg

SEQ ID NO: 271090 - DNA, 420 bp, Glycine max
gaaatcgttcctatcatcacttctcaaatctcgaaccctctcgttcgtgccgatcacgaggtcacacttcatcaatggcgggtagaggcaaaaccctaggatccagcgccgctaagaaggccacctcaaggagcagcaaagccggcctccaattccccgtcggtcgtatcgccaggttcctcaaggccggaaagtacgccgagcgcgtcggcgccggagcccccgtctacctcgccgccgttctcgaatatctcgctgctgaggttttggaattggctggaaacgctgcgagagataacaagaagactcgaattgttccacgccacatccaattggcggtgaggaacgacgaagagttgagcaagcttctaggagatgttaccattgctaacggcggtgttatgcctaacattcacaacc

SEQ ID NO: 271091 - DNA, 356 bp, Glycine max
aaaaaaaaaaaaaaaataaaaattatattaaaaaaaaaaaaaaaaaaataacaaggaaaagaataaaaacaaaagaaagtatgaaaaaaaaaaaaaaataaaaaaaataaataaaaaacttaaaataaaaaaaaagggactcttatttttaaagtatccattttactttacactttatttccacttatatttttttcttaatgtaccccaaattcaatttcattgtcattcttttaaaaacatcttaatttggaaaaacctttgctttcccaaatttattcactttgcaaaaattcctcttttactaacttggcgtattatctaaaatgccctcacattttgtctttacaaaaatt

SEQ ID NO: 271092 - DNA, 450 bp, Glycine max
atcacatagcagaatggcttctactcaatgtttcttgcaccaccatgctcttaccacggctgccagatccccatcacaacgcatcatggttagcaccaagcctaaccagcttgtttgcaaggcacagaagcaagaggatattgatgtcagcccaatctctcgccggttagctctaaccgtgctcattggtgctgctgctgttggctccaaagtccaacctgctgatgcagcttatggggaagctgccaatgtgtttggaaagccaaagacagacacagatttcctgccatacaatggagatggattcaaactatcgattccctcaaagtggaacccaagcaaagaggttgagtacacaggtcaggttgttagatatgaagataactttgattcaaccaccaacgtggttgtcaccatcactccgactgattaaaagtctatcactgacta

SEQ ID NO: 271093 - DNA, 425 bp, Glycine max
gcttacactatgaaattgactgtggagaagggaaaaaggtataccaaaaggaagatatggcacaggggagcttgtttacttgggttagcgatgatgtattcagaaagcctacatttgcccgttttctttcacttttagataattacaatccacatcaaggatgtaaggaagtagtcacatctgaagagagacaagagcaagcttctttcatagaagaaatcagtagaacagcaccaattaagtatcttcacaagtatcttgcatccaagcaaattgtatcagggaattaccaagatttcaaaagaatgattaccagtctgtggtttgacctttatggccgtggtggcacttctggttcctcttctgcttttgaacatgtttttgttggagaaaccaaacaatgtggtgaagtttctggctttcat

SEQ ID NO: 271094 - DNA, 269 bp, Glycine max
tacggctgcaagaagacgacagatagcgtgttctagtgtgtgaatgcttgttgctataacgtcggcttcttctattgttggtctgtgattgtgtttgattttttctctcacctaaaaatgtcttgctgccatggtaactgtggttgcagaagctcctgcaagtgctgcaacagctgcagatgctgcaagatgtacccagacttgagctacactgagtcaaccaccaccgagaccttggtcatgggagtggcacctgttaaggctcaatt

SEQ ID NO: 271095 - DNA, 340 bp, Glycine max
acaaagcgttcccatggcaaacatgattgttgcttccaccaaacctctggttccagtcggcacgcgagttcccgttcccccacacccatagtccccattctccacatttcactccccaaatccccaaccttgaaacttatactcccgatttcaaagccccatatgctgtcccttcttgtagggatagcaccactgttcttgatcatgacccttccttgcatatgaaattgataaagcatcacttcttgactttaaccttacccttcctataataatgttggagtttctacttcttatggttgcccttgacaagatattgttcaaccctcttgtgaaattt

SEQ ID NO: 271096 - DNA, 362 bp, Glycine max
agcattttcatttttcaacttgagagaagaagagaaggggaaaaggaaaaaaaggcaaaaggggtaaggatctgagcgatgagcaagtgtcttcaatgaaggaagctttctctttattcgacacagacggtgacggtcggatcgcgccgtcggagctggggatcctgatgaggtctctgggagggaacccgactcaggcccaactcaaagccatcgtggccgaagagaacctcacggctcccttcgacttcccccgattcctcgatcttatggccaaacacatgaaacccgaacccttcgatcgccaactccgcgacgccttcaaggtcctcgacaaggacttcaccggcttcgtcggcgtc

SEQ ID NO: 271097 - DNA, 424 bp, Glycine max
  unsure (1)..(424): unsure at all n locations
tccgtccgtccttagataagtcatgaannctttgtcatcaacgtttgttcccatttcactttgtcggaaaggatagttcatggtctaatgggaaaaatgacatgaggagccaatccaaaaaggtggtctgagactgagagnttttcccttctaatcgctgcaacctgaacctctgttgttgttccaaatggaggatgttggcagaggagaaatctgtaattccacaaccctctccctctcctgctgatgagtccaaagctcttgtcatagttgagaagactagtgaagttgctgaagagaaaccgattgaggggtctgtgaaccgagatgctgtgcttgcaagagttgcaaccgagaagaagctgtcactaatcaaagcatgggaagaaagtgaaaagttcaaagcagataacaagtctcacaa

SEQ ID NO: 271098 - DNA, 347 bp, Glycine max
acaatttttacattactcaatacactacactaacacaatccccttccctcttctctttctatccagattctccaccagccatggcagtttcttcagcaacagcttcctccaaactcatactattcccccatgcatcatcatcctcttcccttaattccacacccttccgctccttcaccaccaacacccacatactaacccctctctcctcctccttcctccactctatcaccgtcctccgccgcaccccttcttccaccaccaccccgcgtcgcaccttcatccgccttgccgtccgcggcaaattcgagcgcaagatgccccacgtgaacatcggcaccatctgc

SEQ ID NO: 271099 - DNA, 402 bp, Glycine max
cccacgcgtccgcaaagttagaagcaacgaagatcatggcttctctagcaaccttggctgctgttcaaccagctacgatcaatggccttgctggaagttccctctctggaactaagctctctttcaagccctctcgccacagtgtcaaatccaagaacttcaggagtggtgccgtggtagcaaagtatggtgacaagagtgtgtactttgatttggaggatctgggcaacactacagggcagtgggacttgtatggctcacatgcaccttcaccctacaaccctcttcagagcaagttcttcgagacatttgctgctccattcacaaagaggggattgttactcaagtttctgatattgggaggggttccacccttgcatacttagtgcaactgccttaagt

SEQ ID NO: 271100 - DNA, 224 bp, Glycine max
cccacgcgtacgttcacaatctttacaagcagcttgttagctctggacatgcattgggtgcaaaacgttgggttgcaaccttatatctacaattttaaatactcgctagtgccatgtcatcaaacattcccactgttaatgtttgcgtgataacaaaccaagacgggagaaatatcatgatgcatcttgctgaaaaaacggtgataagcctttgtgctagactg

SEQ ID NO: 271101 - DNA, 286 bp, Glycine max
ctaagactttccccacgctctttttggctgaaaggtggacgacgtttcttgtacttgatggactatccatggtgaagctcataaccccagaagagaatggagttgaagcccagatgatgttttcattgtgcaaggctgagaataagcattgaacttcctactctgcagggctggttcttgcgtttcatgtgttgggaaaattgtgaaaggtgacgtggaccagtcagatggtagcttccttgatgatgaacaaatagaaagtggatgggttctcacctgtgttgct

SEQ ID NO: 271102 - DNA, 357 bp, Glycine max
cttcggaacttttgaacaagaatggttaatggaaaagctgcttatttcaactaaaaacctaggggctgaactgaaagatgctactttagtctatgttgatatttataccattaagtatgacctcatcacaaatgccgcgaaatatggtttctcgaatccgttgatggtatgttgcggctatggagggcctccttacaattttgacgtaagggtgacatgtggtcaacctggttatcgggtttgtgatgaaggggctcggtatgtgagttgggatggaattcatcaaactgaggctgcaaatacattgatagcttctaagatactttccatggcttattccacaccacggacaccttt

SEQ ID NO: 271103 - DNA, 312 bp, Glycine max
cacaagatccttccaatacaaatgcagtttcatacaaaacagcagcgagagagaaagtgataaggcagggatacaacattgttgggatcattggagaccaacggagcgatctcctcggaggccacataggcgaaagcaggacctttaagcttcctaatcccctgtactacattcagcaggtccttcacctctcaacaatctagcttgctcctatctatctatatgtaataagacgcgttcaaataggggcactagcttcactttatgttggttcagctgtgagtcaacaagccatgtaagagacttcactat

SEQ ID NO: 271104 - DNA, 301 bp, Glycine max
ctgatgagacggaaatgaaagatgctgttgctgctcttgatggtcagagtttggacggaaggccaattagggtgagtgttgccgaggacaggccaaggcgtggttccttttgagcgttatctcatgtagttccccatgtcagctgctggagttatcttgcatttttttaatagctgaagatatactatagtgtcaatttttgttcaaaggaaaatcctttcttggggcaccaatttcagattagatttacgtattttggtgttattagtttaatgccctgatgaaaattaagttgtaattt

SEQ ID NO: 271105 - DNA, 295 bp, Glycine max
cttgcttcttcactttttttttttcctctgtctcctcctcaatcttcattgtggtggtctttcccttggtgacaaaccaagactaacacacacagaacatagcttgtgttggtgaggtgagaagataaagaaagaatggcatttgcaggaacaacacagaagtgtatggcctgtgacaaaaccgcttatctggttgataaggtgaccgcggataaccgagttttccacaaagcttgcttcaaatgccatcactgcaaaggaaccctcaagctgatcaactacaactcttttgagg

SEQ ID NO: 271106 - DNA, 336 bp, Glycine max
cttccgagcattttccgccatttgcaaggccttttttattccttaatgtccaaaaaaccaggggggttcctttgttttctgaatccaaaaaataaaattctggggtcttttattccccatttttaatactaaattcataaaaaggagagtaatgagcttaatctttcgctcagacgatgtactgatatattctatggcggacgttcgaagaacaagcaatttattctgggccgatttcactttgttaggttcattggcgttattgttcgttgctatttccagatatcttggtatggatatgttctttatttctgaaaacgacatattcaaaaagct

SEQ ID NO: 271107 - DNA, 335 bp, Glycine max
cccactcgtccgcccacgcgtccgatacaagctgtctccaacctcatctctgacgggtccgccccagcactcgccgcctttgtcgtggacatgttctgcacaaccatgattgatgtggccaaagacttgaaggttccttcgctggtcttcttcacctcaggccttgcctttcttggtttgatgcttcatcttcacaccctgagggaacaggacaagacccacttcagggagtcccaaactcacttgctcatcccctccttcgccaacccagtcccgccaacagctttgccttctcttgtgctcgacaaggactgggaccccattttcttggccta

SEQ ID NO: 271108 - DNA, 300 bp, Glycine max
aattttcttttccttcactttcccgagaaaaaaataacacttttcactttcttcagtacgttctcacttcgatatggctcgtacgaagcaaaccgctcgcaagtccaccggtggcaaggcgccacgtaagcagctcgccaccaaggccgctcggaagtccgctccggcgaccggaggagtgaagaagccccaccgcttcaagccgggaaccggggcgctgagggaaatcagaaagtaccagaagagcaccgagcttctcatcaagaagcttccatttcagaagctcgtgagagaaatcgc

SEQ ID NO: 271109 - DNA, 322 bp, Glycine max
cgaccacgcgtccgaccactcgtacgctcactcacaaactcacactgaactgaaaaacatcaaaagagagagggctgagcaaaccttgatcatgatcaagcctgatggcgtgcaaagaggccttattggcgagatcattagcagatttgagaagaaaggtttctacttgaaaggtttgaaacttgttactgtggaccgtccttttgctgagaagcactatgctgatttgtctgccaagcctttctttagtggtttggtggattacattatctctggccctgttgttgccatgatctgggaaggcaagaatgttgttacaact

SEQ ID NO: 271110 - DNA, 262 bp, Glycine max
cttttcacatttccctacctctgctttcaagatgcagatcttcgtcaagaccctggcggatagaccatcacccttgacgtggaaagctctgacaccatctacaacgtctaggccaagatccaggacatggtaggaattcccccggatcagcaacgtctcatcttcgccggaaagcagctcgaggacggccgtaccctcgccgactacaacatccagaaggagtcaacccttcaccttgtccttcgtctccgtggtggcatgc

SEQ ID NO: 271111 - DNA, 346 bp, Glycine max
gctgttgttgctgctcatcctccgttacctccgagctctgcaccgaagaacgaaggctgggtaagacacatggaatgggatctgctcgcaagctcaagtcccaccgcaggaggcaaaggtgggctgacaagtcatacaagaaatcacatcttggaaatgaatggaagaaaccttttgctggttcatcccatgccaagggaattgtccttgaaaagataggtattgaggctaagcagcccaactctgccattcgtaagtgtgccagggttcaacttatcaagaatgggaagaagattgccgcttttgtccctaatgacggttgcttgaactacattgaagagaatga

SEQ ID NO: 271112 - DNA, 389 bp, Glycine max
ttaatattttcctcactgccttggctttccaaaaaactgtttaaagagagatggcggctgcaacatctggtgctgtgttaaatgggttgggatcttccttcttgagtggaggaaacaggagccaaacccttctggccactgctattggaggcaaagttggtgctgctgctgttactgttagtcctagaagactcattgtggtagctgctgctgcaccaaagaagtcatggctccctggtgtcagaggtggtggcaacctcgtcgacccaaaatggcttgatggatcgctaccaggtgactatggctttgacccactatgcctttggaaggacccagcattcctcaaatggtacagagaaactgagctgattcatgggagatgggcaatg

SEQ ID NO: 271113 - DNA, 379 bp, Glycine max
ggagcttaccttacctgaagatggcttcggtgtcctttgccgtgggactcttacggtacgcttcagttcgatttcccgtattgagcaacgccaactcactgaaactcagttcctcagctagcatctctactccaattcttcagcaaaagctctgctctcttctttcccccctccctctaagccctcgccctcgccctctcaccattgtatccgctaagggctacaaaatgaaaacccacaaggcatctgcaaagcggtttatggtgaccggacgaggcaaaatagtgcgtaggagagctggcaagcagcatttgctcgtcaagaaagataccaagcgcatatcccgactcttcaaatgcacgcggtcagcatgagcgac

SEQ ID NO: 271114 - DNA, 244 bp, Glycine max
tttctacttactacataccaattaagaagccaccagtgcacaagcctccagtgtacaagccaccagggtacaaaccaccggtttataatccaaatccaccggtttacaagccttaaccacctgtttacaagccaccatatatgaagcctccatacaagaaaccaccttatggaaagtaccctccagtaaaggacaacacccatgcctaaagcaagcaatgaggtctattatctacttaataaat

SEQ ID NO: 271115 - DNA, 353 bp, Glycine max
attttatctttattccactgaatagtacatgagcatataaatggataccctttagattatctatctttatattatctataaagggtaaagatatccgatgtgaatctatttgtttagttttctatcggtatgtatataggtgaataatccaacatgcctttttgtgaagtaaaaaaactaccctcgatccatgcctcaaaagggttgataataagtaaaaaaaatcaatgaattcatgataaaacccttctgcgtttttttattataaatttttttgtcaataaagggatcaaggggttgggggatcaaatggtaaagttcttttgttggtaaattggaagattagaaacatg

SEQ ID NO: 271116 - DNA, 329 bp, Glycine max
tccactcttcctcccacgcgtccgctacagcaacggagaggatgagaagagagtagagtttgtgaaagagatggcactcgtaacaacaaacccaaccatcaatgatgggcctctgttcgccgaagttgacatgggttccgacttcaacgccccaacggttcgagctaccgttgttcaagcctccaccatcttctactacacaccagccaccttagataaggctgagaggttgttggctgaagctactagctatgggtcccagcttgtggtgtttccagaagcctttgtgggtggctacccgcgtggttcatcttttggtctttcgatcg

SEQ ID NO: 271117 - DNA, 87 bp, Glycine max
ccaaaacaaacccactaagatggctttctttgtatccttcctagtgctgcttcttggagggcttattctcatgcctcaaaggctttc

SEQ ID NO: 271118 - DNA, 322 bp, Glycine max
tccccgtctacccccaccctcccaaaaaatttttttatatccaaaaagtttaatttccttccttaaaattccaaatttttgccggtttaatccttcaattttcaaaaaaattttaaaaaaaacccttaaccccctcgacactgattatattaatttgctgcaaattcactcgccacatcgatatcttacatttttttgctagttttcctattattattcaaaatggagatccattgtgccatttatttatcaattgcaaactttccaagaacttatcaatgagacaaaggtacgctacatatgtgtttcaaattacacttca

SEQ ID NO: 271119 - DNA, 336 bp, Glycine max
cccacgcgtccggaagactcctcaatcatccatagacatggccaccgtcacttgggcagcagtttctattccctcattcactggcctcaaggcaagcgcatgcaaagtgagtgccgccgcagttaaagtctcagctccccaagccacaaggttctgcggcatcaaggcttccctcatagaccttggagtcgctgttgtggccactgctgcgagcgcagttctagctagcaacgccatggccattgaagtgttactgggcactgatgacaggtctctggttttctctaccaactctttctccgtggcccctggggaaaagatcgtgttcaagaacaa

SEQ ID NO: 271120 - DNA, 381 bp, Glycine max
  unsure (1)..(381): unsure at all n locations
acgcgtccgctttgtcctctttgttagaaagcgcgttcacttggcgtggntctcttcgattcgtaagagttttcttgcttctcctgtcttggctcgagatccgggccaagcacagaagaatccgtttctgatttgcattttgtactcactggtttggcttgtttttttctctttgtataaatggcttcgagcgaggggtttctgaccgatggccagagggaactgctaaaaattgcaagtcaaaatgcggagaatctgtcttcgtcgccgaagtctcagtcgtccttgctgtctgaccatcatgtgaaagcccctgctggtggtaaggcacaaaccgctggaatagctgtgaggcatgtgcgtcggtcacactcgggaaag

SEQ ID NO: 271121 - DNA, 314 bp, Glycine max
gtaccggtcctttattcccttttctacccactcgtccgaaaaaaaaaaaaaaaaaaaaaaaatttataaaaaaaaaaaaaaaaaaaaaaaaaaaagaaaaatataacaaaaataaaaacacccccatccctcaaaaaaaacctaattttaattacacttactttcacttccactcctcctcttttttcctcaccttccttttatacaaccccctcatttctaaacttcttctcctcaaaaaacattcccttttcccaatttaccctctttccataatatccctcactaaccaaccttcctaatatttactcacc

SEQ ID NO: 271122 - DNA, 150 bp, Glycine max
tcaccctctacgcttctccctgccagggggggtatctccagagattctatgcacaagaggcgcgccactgccggcatcaagaacgcacgcaggaagaagagcaagtatgagctcggtcgccaacctgtttacactaagctgccaagcaac

SEQ ID NO: 271123 - DNA, 370 bp, Glycine max
cccactcgtccgccgcaccgaccaactccgccagcctctacgccgccaccaagaaagccggctaggagatcgcccacacctacaaccacatctacggcctctccctcaccggactccgcttcttcaccgtctacggcccctgggggagacccgacatggcttactttttcttcaccaaggacatcctccaagggaaaaccatcgacgtgtaccagacgcatgaggggaagcaggtggcccgtgacttcacctacatcgacgacatcgttaaaggctgcctgggagccctggacaccgtccagaagagcaccgggagcggcggcaagaaaaatggccccgcccagctcagagtatacaatctggggaacac

SEQ ID NO: 271124 - DNA, 268 bp, Glycine max
tatccctacaaacccccagcttcttttgtgaaaaatttgcaaagcattttaagcccaccccactttgtgttgtgtgtacttaaactacattcccatttgtttttgctttttgagatttcatcatcctgtatttttggtttctgttttcggacttcaatggaaattaatggatgagaactaatgaataagctattgtgttgtgttgctttgtttcaaaaaaaatcaaataaaaaaacataaaacaaataatataataaactctcaaaaa

SEQ ID NO: 271125 - DNA, 407 bp, Glycine max
gtaccggtcggaatcgggggcgccacactcctgccaacccttccgttttttttaaaaattttcccttctttaaaaaaagcgtgaaagcgggggtcgttcaagatgagagctaactgaaacaacaagcgcatgaggaggttgaagaggaagcgccgaaagatgagacaaagatctaagtaggtgcttgagcaggagttgagatgagctttccatctgctaccagcctcatgacattttaggctgttatggctcttatgatcttgaagtctagtcgctaggggagcttcactcttgacttagtttgctttactggtcctggtcctggtccaagactattgagtgtgggttaagttgtgatgtttagtgttttgtggtatctaattatgtactgggttttatacttttgg

SEQ ID NO: 271126 - DNA, 297 bp, Glycine max
acctagatactatgatggacgctactggaccatgtggatactgcctatgtttggctgcactgatgcttctcaggtgttgaaggagcttcaagaggctaatactgcataccccaatggcttcatccgtatcattggatttgacaacgttcgccaagtgcagtgcatcatcttcatctcctacaatcccccaggcttctaagtcatttaaaaatttgcaaagcatctttattcatcccactttgtttggtgtacttaaactacattcccatttgttttttctttatgagatttcatcat

SEQ ID NO: 271127 - DNA, 281 bp, Glycine max
  unsure (1)..(281): unsure at all n locations
cccaaaagaattttttaaatcttatgcccccccccccnttccatttcatattactctacatatttcacttcctcacaattttctcccatattattacaactaatattacttcatgaacaatactcctcttctcttacatattaaccctcttcacactaaaattcccattctcatccacattatcaaacccacttcctaaaccctcattacttctcattacatttataaaatttttaatttacataaatccctttcttccttcatacccttacctaataact

SEQ ID NO: 271128 - DNA, 374 bp, Glycine max
atcttttcacggaaccaaattacgaggatccactgaatcacgatgccgctgctgtgttgagagagaacccaaagatgtttgaatctaacgtgaggagggcaatggctggagggtatgtcgggcaaacctttttcccacgctgtatttagaccttttgcacgataccttcaagatcctgttcaaatatgttatcaatgcatgaaggcccgtggtttgtaaaatttatcaaaaaattggattttactttcgtcagttatgttatttttcttggtggagaaacaggccaagttcttaagaccaccaagcttcaaaaagccaaacaagtggaatgttattgtaacatgtgctttaattgaatgttaacgtattattct

SEQ ID NO: 271129 - DNA, 340 bp, Glycine max
ttaattaacactaatccaaactcctttatgaaactagtgcagacatccttggaagggagtgggcgtggttattgggaaacttcacaacataatattgaaaagctcatgcagttgtattcagaagtggaagacaaaatcgaaggctttgatcgctgaatttaatagctattcttgaaaagaacatacaacagtgaatagaagagcagcatccttcaaatgtgattatgatttccttttctcattttttgagatcaagtctcgtttgtgcagttctgaatttcaacccctgcgaacaaataaaggtttaagttcataattgatttcttagattattttcttg

SEQ ID NO: 271130 - DNA, 335 bp, Glycine max
  unsure (1)..(335): unsure at all n locations
ttccnntttcaacacctcctccttctttggttattcaccgattgagttcattttttctctggcgtgaaaataccttgctgcggtcgtaactacagttgcagaagctcctacaaatgcgtctacagctgcggatgcttcaatatgtacccatactcgatctacactgaatctaccaccacctagacctttctcatgtgagtggcacctgttcaggctcaatttgagggtactgaaatctttgttcccactgagaaccatttcttcatatgtgcaccaaactactcctgcaaccccttcactatcaaagtaagtgtttatagagcactcttcaaaca

SEQ ID NO: 271131 - DNA, 314 bp, Glycine max
cccacacgtacgggaaatggcttcctcaatgatctcctccccagctgttaccagcggcaaccgtgccggtgccggcgtggttgctccattcaccggcctcaaatccatggctggcttccccacgaggaagaccaacaatgacattacctccattgctagcaacggcggaagagtacaatgcatgcatgtgtggccaccaattggcaagaagaagttcgagactctttcctacttgccagacctcgatgatgcccaattggcaaaggaagtcgaataccgtctaatgaaaggatggattccttgcttggaattcg

SEQ ID NO: 271132 - DNA, 171 bp, Glycine max
cacagcttcagttcgtttttgttgatcctgtgaacttatggctgacggggtggttgtgttggatacatggtccagcatgtttgggatgaaggttaagattgcattatctgaaaagggtgttgagtatgaatacaaggaagaaaatctcaggaacaagagtccttttccttt

SEQ ID NO: 271133 - DNA, 423 bp, Glycine max
aaaggttctgctctttttaccatccaatttagttatctcaaatggctcgtacggagcaaggtgctctctaagtacaccggcggcaaggcaccacgtaagcacactggccaccaaagcagctcgtaagtatgctcctgctaccaacggtgtcgaagaatccgaacagataccgtccgtgaaccgtatcgctacgcgagatccggaagtaccataagagcacggaacttctgatacggaagctcccgtttcagcaattggtccacgagatcacgcaggacttcaagacctaccttagatttcagagctccaccgtatactccctccaggaagccgccgaggcctacttgattggactctattaagacaccaatctctgcgctattcacgccaagcgtgtcactatcatgcccaaggatattcaac

SEQ ID NO: 271134 - DNA, 378 bp, Glycine max
ccagtttctccttgattgatggagttgtataatttgagaaatatggacctgacaggaaagaggtgattgtttaccctcgagaagtacagcctgagaaccccaacagctatagagcaaggaagagagagtacttcagggtgaggcgtgaacgcaaaaaagctagacaaggagcaatacttaaatcccaactcgtgctggcttccgctgatgatgcagcaatcactaatccaatgtgttgactcttattcaatcgcttaaatgtgtaaaataccccgctcccaattttttgcttttgtgtacctgtaaaacctttagcattgttttgagttttattgaagtagcaatgtaccattagtcattaaaaaaaaaaaaaataat

SEQ ID NO: 271135 - DNA, 444 bp, Glycine max
caacctcagtggtgccacacggccagctccatctgcctctagccctgcctccgtcaaggcggtggctcttttctccaaaaagaaggctgcacctccaaaaaaagctgcagctgctgctcctgccaatgatgagcttgccaagtggtatggtcctgacagaaggatcttcttgcctgagggtctcttggaccgatctgagatcccagagtacttgaccggagaagtccccggagactatggttatgacccatttggtcttagcaagaagccagaagatttttccaaatatcaggcattagaattgattcacgccagatgggcaatgcttggtgctgctggattcatcattcccgaggcctataacaaatatggagcaaactgcggtcctgaggctgtttggttcaagactggagctctgcttcttgatgggggtaccttgaacta

SEQ ID NO: 271136 - DNA, 394 bp, Glycine max
gccacgcgtccggaacgctgctgccgaaacccttcccgatccctaaggtaagtgagtagtgggtgggtgagaatggtggagacggcgaagggtaggaaggaggaggtggttaccagagagtacaccattaacctccacaagcgcctccatggctgcacatttaagaagaaagctcctaaagctattaaggagataaggaaatttgcccaaaaggccatggggaccaatgatgtgaggttggatgtgaagttgaacaagtttgtctggagccagagaatcaggagtgttccaaggaggattagggtaagaattgctcgcaagatgaatgacgatgaagatgccaaagaagagctatactctcttgtcaccgatgatgagattcctaaagatgagc

SEQ ID NO: 271137 - DNA, 478 bp, Glycine max
atggacggatggacccacgcggccgaaaggttctgttctttttaccacccaattcagttttctcaaatggctcgtacggagcaagcggctctcaagtccaccggcggcaaggcgccacgtaagcagctggccaccaaggcggctcgtaagtctgctccggctaccggcggcgtgaagaagccgcacagattccgtccgggaaccgtagcgctccgcgagatccggaagtaccagaagagcacggaacttctgatccggaagctcccgttccagcgattggtccgcgagatcgcgcaggacttcaagaccgaccttcgatttcagagctccgacgtctccgccctccaggaagccgccgaggcctacttggatggtctcttcgaagacaccaatctctgcgctattcacgccaagcgtgtcactatcatgcccaaggatattcaactcgctaggcgtattacgggcgagcgcgcttaaa

SEQ ID NO: 271138 - DNA, 437 bp, Glycine max
acgcgtccgcccacgcgtccgctatgatgagcacaaccatgaaagatttcccccaggtgaccgaagcaagagggcatttgcctacttcgtccttacaggtggtaggtttgcttatgcctctttggtccgtctccttgtcctcaagtttgtgcttagcatgtctgccagtaaggatgttcttgctctggcttcacttgaggttgatctctccagcattgagcctggcactacagtgaccgttaagtggcgtggaaagccagtgttcatcaggcgccgaaccgaggatgatatcaagctggcaaacagtgttgatgttggatctcttcgcgatccccagctggatgctgatagagtcaaagacccagaatggctcattgtgattggggtttgcacccatttgggttgcattccattgccaaatgctggtgactttgggg

SEQ ID NO: 271139 - DNA, 438 bp, Glycine max
cccacgcgtccgctgggatctgataaggacaagcgcagagagactcttgagaaggaagataaatccaaaaagtctgtcaacatcaatgagtttctgaagtccccagagggtgaaagttactataacccgggtgggcatggacgccgtcatggtcgtggacgtggtgcaagaggaggttatggtggctatgcaactgctaacattccagctccatcaattgaagatcctgggcaattccctactttgggtgtcaagtgagaatttccagtactgtgctgacatttttatgtactacctcctctcaattttggttcactgctttgaagcaggaaaaagaactatggtaattggatttcctgtatgggcaatttttttttataacgtcttaaaatgtaaatttagattggttctttgtgccccccttaatctcttataata

SEQ ID NO: 271140 - DNA, 370 bp, Glycine max
gccacgcctccggcctaaacagtggcctcaccgtggcctattgttgtggcgattgctgagtgaaaggcaaccttcgaaaagcagtaggcatatatcacgttagataacacacactcttatcgggacctataccgaacactacttgtgacagtacctgacattggtgaatacatctttggtgccattattttctacgaaactatttaccaatccactatcaatggaaggaatatcgttgacctactcgttgatcaaaacatcgatgccgacatcaatgtcgacaagggttttgtgcccctagctgattcatacgatcaatgattgcaccaacgtcttgattgacttgcttcttactaagctgaatactacc

SEQ ID NO: 271141 - DNA, 327 bp, Glycine max
ctcattcctttctattcatttcttcattccaccatcaccatggtcaaggagaaggagagcgtggtggtcaagaacaagaagccaaacaacaatgccgacgagcttcacttacgcggcgtccggaagcgaccatggggccgctacgccgccgagatccgtgaccccggcaagaagacccgcgtctggctcggcaccttcgacaccgacgaggacgccgcccgcgcctatgacgccgacgcccgcaacttccgcggacccaaagccaaaaccaactttcccgtgccccccgacgacaacaacaacaacaacgtttacgtgaacaaaaac

SEQ ID NO: 271142 - DNA, 449 bp, Glycine max
cccacgcgtccggttcgtcttttacatcatgatggagtctcaggtgaagcacgcgctttgtgtcaaagtaatgggtcgtactggatccagaggacaggtgacccaggttagagtgaagtttctggatgatcagaaccgtcacatcatgaggaatgttaaaggaccagtgagagaaggagacattctcaccctactcgagtctgaaagggaagctagaaggttgcgctaagagggtctttctttcttgatctttatggtagttagtcggtgctaaaggttatagcaccctatcttgtcttggatctattttcattcgaattatggcttgagttttgctgttttgagtctaagcttcaaggttgaagtatgttttggcttaatatatgattttaattatggcttgagttttggattaatatgatttggcttctatatagtgatattcctgc

SEQ ID NO: 271143 - DNA, 341 bp, Glycine max
cccagccgttgcgccacgcctactcacatccaaccatgtctcttatcagtggctctgtcaaactttaccgccaccccactttctttgtttgtacttaaactacattcccatttgtttttgctttttgagatttcatcatcctgtattattggtttctgttttcggacttcaatggaaattaatggatgataactaatgaataagctaaactgctctcaaggataataagggcttgcaaagatgaagacaacagaatgaaagcggagaaatgggttaacttgtagtgaaactgatgaaaaaaatcatacatccttctagagttgatcttgaagtcaatgaaa

SEQ ID NO: 271144 - DNA, 445 bp, Glycine max
caaacccactaagatggcttcctttgtatccttcctagtgctgcttcttgcagcccttatggtcatgcctcaagggcttgctacttactacaaaccaattaagaagccaccagtgtacaagcctccagtgtacaagccaccagtgtacaaaccaccggtttataagccaaaaccaccggtttacaagccgaaaccaccggtttacaagccaccatataagaagccaccatacaagaaaccaccttatggaaagtaccctccagtagaggacaacacccatgcctaaagcaagcaatgaggtctattatctacttaataaataagaggaactgctttgtgttttctagcattgtgatttacaacttcgtagcaatgcatattcttgactcttgcatgcacttcaatccttcgtagcattaatgatgtggccaagtcatcatgagca

SEQ ID NO: 271145 - DNA, 413 bp, Glycine max
atcaattctaggatctggtctgaagcgcatgaagagattgcatgttcatttctgttgtggtgtaccaacagatggagaagtaattagtggtatgaggcaggatgtcaatgttctgatctttctggacgttagaaaagcattagaagaaagtatgaagctttacatttctgacaacaaggtgatcttgacggaaggttttgatggtgttgttcctccgaagtattttgaaaggatagaatcatggccgagcagacagcccatttctttttaaagttcttttacaattttgcttttaggttcacaatacgttgaggattatttaaataaaataaaaaatgtctaaaaaattcttaatattataaaataatatataatatcataaaattataaaaaaaaaaaaaaaatacaaacaa

SEQ ID NO: 271146 - DNA, 428 bp, Glycine max
tccctggcggcttccaccgcagctatgtcagaaatgcttggaaaccccgtgagcctgaggggcgccaccaggtctgctccatcaccgtctacacctgttactttcaagaccgttgcgcttttctccaagaagaaggcagcaccacctcctccaaagaaaaagcctgctgctgtatcccccgccaatgaggaactcgccaagtggtatggtcctgacagaaggatcttcttgcctgagggtctcttggaccgatcagagatccccgagtacttgaccggagaagtgcctggagattatggttatgacccgtttggtcttagcaagaagccagaggacttcgccaaataccaggcgtttgagttgattcatgccagatgggcaatgcttggtgctgctggattcatcattcctgaggcctttaacaaata

SEQ ID NO: 271147 - DNA, 457 bp, Glycine max
accatggaggctaagttggccaccaccataatacttattttctccgtaatttggcttatgggggtggatggcatagacccttgtgcctctcaagcggataattccgacctgaacgtgattcccatctacagcaaatgctcaccgttcaaaccaccaaagtcagactcatcgtgggacaacagaattataaacatggcctcaaaagacccactccgattcaaatacttgtccaccttagtgggccaaaagaccgtgtccacggccccaatcgcttcgggccagaccttcaacatcggcaactacgtcgtcagggtcaaattgggaacccctggtcaacttttgttcatggtcctcgacaccagcaccgacgaggccttcgttccatgctcgggctgcacgggctgctccgacaccactttctcgcccaaagcctgcaccagctatggcccattggact

SEQ ID NO: 271148 - DNA, 384 bp, Glycine max
cgaatcgacccacgcatccacgcctgaagcaaccattgcaatcgcaacccaagcctttatcttaaccccacccctctccgggctaaggccagctaccgcacctgccatccatgcaagcaaaactccatcctaatccttatccagccctaatcccctcaatttctacataacaatcacagcatcaaccgtcgacgagaccacacacgcaccatcaaaattagagactgtacctgtcgagttcaccccaccagaacttgacccaaacactcgttacccgatcttctcagacatgcaccagcgggctcctgcacaaggcacatgttgacgaataccatgtcattacatgggactcaccctaagaacagatcttagaaatgcccactg

SEQ ID NO: 271149 - DNA, 435 bp, Glycine max
cccacgcgtccggctaaatccctagtaagccgccatggtgaagtactcaagggagcctgacaatccaaccaagtcttgcaaggctagaggcgccgaccttagggttcattttaagaacactagggaaactgcctttgcaatcaggaagttgcccttggttaaagctaaaaggtacttggaagatgttcttgcgcacaagcaggccattccgttcagacgtttctgtcgtggtgttggaaggacagctcaagcaaagaatagacactctaatggccaaggaaggtggcctgtcaagtcagcaaaattcatccttgatttgctcaaaaatgctgagagcaatgctgaagtgaaaggtttggatgttgatgcgctttacatttctcatatccaagtcaatcaagcacagaagcaaagacgccgaacataccgagccca

SEQ ID NO: 271150 - DNA, 447 bp, Glycine max
gagataactagaaacagtgtcatgaaaattaaagtacttgatttcttagttgggacaatgttagtagcatggcaatgccatgcgtactatatgttccctctactaatgaacactggatatggtgcccgtactccagaggtgaaatgcgcaagtagcacgcttgctgtggaagcacacaacatctttagctttgagaccattcctgaagagtgcgttgaagcaacaaaagaatacatccatggcgaacaatatagatcagactccaaaacagttaaccaacaagcttacttttatgccagagacctcgaagtccatcacaaggacacatttgagttcaatatagatggcaccgtactctctaatattccatactacaaaaaacatggatatcgggtggagaaatttaactcgaccttgtatgatgaatgggttaacaagggcaatgca

SEQ ID NO: 271151 - DNA, 381 bp, Glycine max
gcattattcaatggccaccacagcagctctatccggaaccatggtgagcacgtgcttcatgaggaagcaacctatgacgaccaagagcctaaagacattccccaacgctctttttggtctgaaaggtggacgaggtggtcgtgtaacttgcatggcctcgtacaaggtgaagctcataaccccagaaggagaagtggagtttgaatgcccagatgatgttttcattgttgacaaggctgacgaagaaggcattgaacttccctactcgtgcatggctggttcttgcgtttcatgtgttgggaaaattgtgaaaagtgacgtggaccagtcagatggtagcttccttgatgatgaacaaatagaaagtggatgggttctcac

SEQ ID NO: 271152 - DNA, 454 bp, Glycine max
aaaaaaaaaaaaaaaaaaaaaaaaaaaaaaataaaaaaaaaaaaaaaaaaaaaaggaaaaatgggaaaataaaaaaaaaaaaaaaaaaaaaaaaaaaaaaaaaaaaaaaaaaaaaaaaaaaaaaaaggccgacccttttaaaggatccaagttaccatacccttgcttccaaagaaaatccttttttacaggctcactaaaataaattcaactgtctaaaattttaaaacttatgtactggaaaaaccttgacgtaccaaaactaaatcacttttaaaaaaatccccttttccccaattgcctaaataccaaaaaggcccataccaatcccctttccaaaaatttccccatcctaaatggtaaatgtaaccccccttttatcggcccattaacccctgcggatttgggatttacccccaccttaaccgttacatttgcaaagcccttacgcccc

SEQ ID NO: 271153 - DNA, 457 bp, Glycine max
gtagcaaggagactagttctgtattcagattacattgcaaaaatggcatcattcaccatggcagctgctatctttggctgcccagctgtcaccaaacggtcggtagtggctgcgcagaggagattactcgtagtgagtgctgtcaaagctgaaggggaaaaggtcagttatgacaacaatgatagcaatggaaggaggaacttgatgttcgctgaggctgctgctgctgttttctctgttgctgggatggcagtggcagatgagcctaaaccaggaacctcagaagccatgaaaatgtatgccccggtttgtgtcaccaatcctacagctaggatttgacgcaattgaggatctcctgttacattttacctctgatgatcggaaatgtacgttggggatgtagtaatgtttttgatttaatatgatcctcattgtactagatgttcataaaactatc

SEQ ID NO: 271154 - DNA, 446 bp, Glycine max
gtcaaatttcgtggaatatgctccaccaaccaccactaacaagacctatttcactgatgggctagcgaaactttcttcgaccaggaatggtgtacccattggcacaccgactcctctgagctggctctttatctatccggagggaatttataagctcatgacatacataagggacaactacaataatccaccagtgtacattaccgaaaatggcgttgcggaatcaaagaatgactcacttgcaatcaatgaagcccgaaaggatggtattcgaattagataccatgatggccatctcaaatccctgcttcatgcgatcaaagatagagttaatgtgaagggctactatatatggtcattttcagatagctttgaatgggatgctttacacagctcgatttggcatcatatatgtggattacaagaacaatttgagtagataccct

SEQ ID NO: 271155 - DNA, 368 bp, Glycine max
cttgggttctggaacacaggcattcactcttgatcattcaacaggagactttgttctcagaaatccaagcatcaaaattcctccccgtggtcaaatttattcagtaaatgatgcacgatattttgactggcctgaaggtttaaggcaatatatagacactgttagacaagggaaaggtagataccccaagaagtactcagccaggtatatatgttctctggtggcagatctccacaggactttgttgtatggtggtgtggcaatgaatccaagggaccatcttcgtcttgtttatgaagcaaaccctcttagtttcattgtagagcaagctggttggaaagggtctgatggcaaaaataggattcttt

SEQ ID NO: 271156 - DNA, 312 bp, Glycine max
cccacgcgtccgctttccctttttttggacttatccttctttctgcaactccagaatggggtccaaaggggcaaaaaatctagcactctcttcagccttgttgctccttttggtcggttttgcaacctcagacatcaatcaatacaaagcacaatgtacggataaacttcttggtctagctggttgtctttcctatgttggtggcgaagccaaagtccccaccatggattgatgctctggtatcaaagacgttattaacaagagcatgaggtgcctctgcatcctcatcaaggatcgtgatgatcctagtct

SEQ ID NO: 271157 - DNA, 434 bp, Glycine max
gtgaatagtcttaaaacagaataaaatcttaagctgtttaactgaatgctaggtgctagtgaaatgaataatggcttttccaatagcaatggaaacaaactagggggagtgaactttgcaatgtaatagccagcattcctgaatagccttgaagcaagtgccaataaacactcatgcggtatttgatagcaaaaacacagaactagccagcaattttgtaggttggatttaccaaattatccagcccagaaactactttaatggattctatgacatcaccaactttgaggtctgccaagtaatcctcattatctgttacatagccaaagactgcatatcgaccatccaatatattggcattactgggagttagctcactttctttcaatagccaaaatatctggctggaggcagagttgtcctcaaattcatct

SEQ ID NO: 271158 - DNA, 322 bp, Glycine max
cccacgcgtccgcccacgcgtccgaaaaaaaaaaaaaaaaaaaaaaaaaaaaaagaaaaaaggaaaaaataaaaaaaaaaaaaaaaaaaaaaaaaaaaaaaaaaaaaaaaaaaaaaaaaaaaaaaaaaaaaaaaaaaaaaaaaaaaaaaaaaaaaaaaaaaaaaaaaaaaaaaaaaaaaaaaaaaaaaaaaaaaaaaagctaccactttaaaaataacaatcttaataacaaatgaatgctaatatacaaggtatttttcataataccaaaataacattcaatagcattacttttaaaaaaaatggttaaggaaaaacccgg

SEQ ID NO: 271159 - DNA, 445 bp, Glycine max
gccagagcctggtctgcaatccctatgtggtgtcatgtcacctggtggtccttgatcaatgactaacattgaaacccctggatctgccagtcaacctgatgaagaatttaaaccaaatgctgcaatggaggaaatgattattaattttcttatcagagttgcgctagtcatagagccaaaggacaaagaagcaagtgccatgtacaaacaagctttggagctactttcacaagctttggaagtgtggccgaatgcaaatgtaaaatttaattatttggaaaaacttctgagcagtatacagccatctcaagcaaaggatccatccactgcactggcacagggtttagatgtcatgaacaaagttttagagaaacaacctcacttgtttataagaaataacattaaccagatttctcaaattcttgaaccatgtttcaagcataaa

SEQ ID NO: 271160 - DNA, 442 bp, Glycine max
ataaacgggtggtgcctctcttccatctccccagccaaaacctctctcaggaaggccacatgacgcccttccgtcttcgcaacccttaacactccttcttctccttcctcttcatcttccttcccctctctcattcaagacaggcctgtttttgctgcccctgcccccatcatcaccccaactgtgagagaggatatggcaaaggaatacgagaaagctattgaagaacttcagaaattgttgagggagaagagtgaactcaaagcgacagctgctgaaaaagtggagcagataacagcttctctagggacatcatcatctgatggcatcccatcatcagaagcctcagacaggatcaaagctggtttcattcacttcaagaaggagaaatacgacaagaatccagctttgtatggtgaacttgccaaaggccaaagcccca

SEQ ID NO: 271161 - DNA, 243 bp, Glycine max
aactggaaaggttaagcgtctatgtaattattcatgcacatgtagtgagataattaagagtgttcaaaaaaaaaaaaaaaaaaaaaaaaaaaaaaaaaaaaaaaaaaaaactaaaaaaaaataaaaaaaaaaaaaaaactaaaaaaaaacaaaaaaaaaaaagaatacaaaaaaagatattaaaaaactaaaaaaaaaaaaaaaaggaggggagccatcttaaagccacagcttttgaaaaag

SEQ ID NO: 271162 - DNA, 378 bp, Glycine max
accgacgcatgggtcgatctacaactcctgattcttgttagatgcaaaacaaaggaaatgggaatttgcaagactttagtactgataaaataaacataaacacaaataccaaaaaaaacctaaacaaataaaaaccaaacaaaaaaaaacaacatacattacaaaagtataaaacaaaaaaaaaaaaactaaaaaaaaaaacacacaacgtttattaactgcaaaactattcctcaagatttcaaagatatatatgaaactacatgctacgaaaccaaaatagattagactccataaaaaaacgccctaaaagctaaaacctatgctaaacccatcaaaatcactttcaaaaccacatgcttttttcaagttgatgaa

SEQ ID NO: 271163 - DNA, 355 bp, Glycine max
cccacgcgtccgcaattttctagggttttattcattttccgatggcttctgcagatgatgagtacggttgctttgtcggtgggctcgcttgggccactgacgaccatgccctcgagagagccttctctcagtacggcgaaatcgttgaaacgaagattatcaacgatcgtgagactggcagatccaggggttatggatttgtgaccttcgcctcggagcagtccatgaaagatgcgatcggagcgatgaatggacagaacttggacggccgtaacatcactgtcaatgaagctcagtcccgcactggcggcggcagcggctgaggatgaggatacaatcgtggtggctgtggata

SEQ ID NO: 271164 - DNA, 349 bp, Glycine max
agaaaatgaaagtcattgttttcttcgttgctataataattttaggtgcagaatggcaaggcaatgggtcagagcatgagcatgagcatggccacagctaccaaattttccctttgcgaatgaaaaccggccccggtggccactacattccggaggtatcgtgcaaaagttggaggcttggtgtggaagcacacaacgtcattgactggagaaccattcctcaagattgcgagggatatataggaaactacatgcttggccaccaatatagatcagactccaaaacagtttgccgtgaagcttatttttatgctaaaaccatcaacatcactgccaaaaccacatgggt

SEQ ID NO: 271165 - DNA, 418 bp, Glycine max
ctggggctgcttgcgataatgctaagaagtacatagaggctggtgcgtctgagcatgcaggaaccttttacacgaagggagctgaaccacataaggcagctgttattggagataccattggagaccctcttaaagatacttcaggtccttcactcaacatcctcatcaagctcatggccgttgagtcgctcgtcttcgcaccatttttcgacactcacggtggcctgcttttcaagatcttttgatttgagggtagagttttctatcaatttatcctatttttctcggaacctgcatcaagcaattttctttgtaccaatatacccttctcacctttaggggtagctcttctaattatcaggacttgctcttcaaattatcaagacttgaaatttgtactaaatgtaatagccttttc

SEQ ID NO: 271166 - DNA, 407 bp, Glycine max
ctaatatttttctcactgtcttgtctctccagagaactgtatagagagagatggcagctgcaacatctggtgctgtgttaaatgggttgggatcttccttcttgagtggaggaaacaggagccaaacccttctggccactgctattggaggcaaagttggtgctgctgctgttactgttagtcctagaagactcattgtggtagctgctgctgcaccaaagaagtcatggctccctggtgtcagaggtggtggcaacctcgtcgacccagaatggcttgatggatcgctaccaggtgactatggctttgacccactaggccttgggaaggacccagcattcctcaaatggtacagagaagctgagctgattcatgggagatgggcaatggctgcagttctaggaatc

SEQ ID NO: 271167 - DNA, 311 bp, Glycine max
cccacgcgtccgtccacgcgtccggtggtgccttatcgctgtggttatcatctgcttcttgggctttcttagatctcttctttctctacgccggacgccgaaaccatggccggaaaaggacagggtcctgctatcggaatcgatctcggaaccacctactcttgcgtcggtgtgtggcaacatgaccgcgttgaaatcatcgccaacgaccaggggaacagaaccacgccgtcttacgtcggattcactgacaccgcgcgtctcataggtgattcggccaagaatcaagtcgccatgaaccccattaacac

SEQ ID NO: 271168 - DNA, 401 bp, Glycine max
aacaaacaaacaaaaacacaaaaaaaaaaaataaaaaaaaaaaaaaaaaaaaaaaaaaaaaagcaaaaaataaaaacaaaacaaaacaataaaaaaaacaaccaaaaccaaaaacaaaaaaaaaaaaaaacacaactataaaaaaaaaatcccataaccacctaactctaacatcaaacttaaacaccataacaatgcttcaaatcatccccaactaccttaataacaaaaccactccattcttactatcccattcactgacaccgaccgtctcatttaaaattcagacaacaatcaaatccccatataccccatcaacaccctcttaaatgccaacaagtttattcgtcatactattcactcattactctcatcacacctatatcatacttaaacctttc

SEQ ID NO: 271169 - DNA, 438 bp, Glycine max
ctctgttacaccacttcaacttctagtgaaatatctgatcaattaatggctcagtatttcgttttgtttgttttggtgtttgccagccaactgatggctggattcaatgcaccgctaccgctaccatctccgtcatatggaaatcatacaaccattctcagcatagacggtggtggtatcaggggcattattcctgcgactgttcttgaatacttagacaaggctcttaaggctaaggatccaacaacatctttagcccattattttgatgtgatatcaggaactagtactggtggcctcatgactgctatgttagcagccccaaactcatctaatgccaatagtcctctctttactccctcggaagtcgtgcaattctacaagaactatggccctaaaatatttgaacctagagcttggtatgatcttgacaaatgt

SEQ ID NO: 271170 - DNA, 361 bp, Glycine max
atctgcattgctcaatttacaaagcatacacaactaactaacaatgactcagactggtgatcggtctcttactaaacacacatatgtacacactagactagttcaagtcttaaatattaaaatgacctccgtgatcgtgacctactgcaagcgcgtactcggtctcataaagatcaacgggttccccatttacctcgttgagcctgaaatcctccgcttcaaagccttcgagcctatcctcctgatgcgtaagatccgcttagacggcgtcgacatgcgcattcgcgtcaaggagtggccgccacaccttccacatctacaccatctgccagagcatcaccaaggcgctcgtcgcgttcta

SEQ ID NO: 271171 - DNA, 426 bp, Glycine max
  unsure (1)..(426): unsure at all n locations
ctggcggtgcttgggataatgctaagaagtacatagaggctggtgcgtctgagcatgcagggaccgtgggcccgaagggatctgaaccacataaggcagctgttattggagataccattggagaccctcttaaagatacttcaggtccttcactcaacatcctcatcaagctcatggccgttgagtcgctcgtcttcgcaccatttttcgccactcacggtggcctgcttttcaagatcttttgatttgagggtagagttttctatcaatttatcctatttttctcggagcctgcagcaggcatttttctttgtaccaatataccctctccacctttaggggtagctcttctaattatcaggacttgctcttcaaattatcaggacttgaaatttgntactaaatgtagtagcttttcgatttttc

SEQ ID NO: 271172 - DNA, 424 bp, Glycine max
  unsure (1)..(424): unsure at all n locations
aattgacggacgcatcagactatcagcgttgctcaattcacagagcaacacaacgaactaacaatggctcagactggggatgaggctcttacgaaacacggacaagcagagctagaacaagtgcagagcttcagtcgcaagaagaccgccgtggccgtgacctactgcaagcgcgggcgcggtctcatcaagatcaacggctgccccattgagctcgtggagccggagatcctccgcttcaaggccttcgagcctatcctcctgttgggtaagagccgcttagacggcgtcgacatgcgcattcgcgtaaaggatggcggcacacctgccagatctacgccattcgccagagcatcgncaaggcgctcgtcgcgttctaccagaagtatgtcgacgaacagagtaagaaagagatcaaggacat

SEQ ID NO: 271173 - DNA, 439 bp, Glycine max
ctttccattcgttcaccgccccaatctctgcagcgccttcgatctagaaaacagtgactgggagaacaaagaaggctggcattgttggaaaatacggtacccgttatggtgccagtctgcgaaagcagattaagaagatggaagttagtcagcacagcaaatttttctgtgaattttgtgggaagtatgctgtgaagaggaaagctgtacgaatatggggatgcaaggactgatgtaaagtgaaagcaggcggtgcttatactttgaataccgcaagtgctgtgacggtacggagcaccatcaggaggttgagggagcaaactgagagtcgagctttttagtgatgttatcaattactattagactttgcgtgatatgcctaattagtgttcactgaactgcattgggtgtattcaaaagtaactccttaaaagttaat

SEQ ID NO: 271174 - DNA, 349 bp, Glycine max
cccacgcgtccgtacattagttcttgttattcattattcattctcagcttcttgtcttctggggggcaaaaggggtcacttttcagatccgagattgagctcctttacccatcatcatcatggagctcctcgggtacctgaatcagggtcacccttctagaggaacaacacttgttattactctttcattggtgctttcgacacttgtgtccttctccactttcacacatgccttctcttcttctgcgtttccggaactgaatcctataaaacctaggcactcacgtcttctcaggagtgccgtgcaacatgaaactcctacatcacagctttctgaaatatggtcacc

SEQ ID NO: 271175 - DNA, 335 bp, Glycine max
ttggttttccttcactttcccgagaaaaaaataacacttttcactttcttcacgacgtgctgacttcgatatggctcgtacgaagcaaaccgctcgcaagtccaccggtggcaaggcgccacgtaagcagctcgccaccaaggccgctcggaagtccgctccggcgaccggaggagtgaagaagccccaccgcttcaggccgggaaccgtggcgctgagggaaatcagaaagtaccagaagagcaccgagcttctcatcaggaagcttccatttcagaggctcgtgagagaaatcgcgcaagatttcaagaccgatttgcgtttccagagcagcg

SEQ ID NO: 271176 - DNA, 352 bp, Glycine max
aggacgcgtgggcggacgcgtgggcggactcgtgggcaaattttttggtttggggataggtggagtgatacgcgtcacattttcataataataaaaaaatggcagcggcggcggcagtgacggtgctactcccacctaggattccgaccaccaccaacgttacccgctgctctgctttgccttctctacctcctcgcgtctccaacaccaaaaccactttgttctcaccttccctcaacaacttttcagtgtcccgaaaatcttctctgcttcagaccagagcttcttcagaagaatcatcctcagtagatgccaatgaagtgttcacagatttgaaagaaaagtgggatgc

SEQ ID NO: 271177 - DNA, 395 bp, Glycine max
gaaaagaaaaagaaagaagacatttcctttcgaattgaggaagggaaaggtgggttggatggccaagtcatcttgcttagctatcacgttgatctgcgccgccacggtattggtggcgatgagtcggtggccgacagccgtgggcggcggggaccaccacttgggaatgggatgggtttccagcacgtgcaaggggaccattgctgagtgcctgggaggggaggagtacgagttggattcggagatcaaccggcgcatcttagccaccaacaagtacatcagctacgttgcgctgcagaggaacactgctccctgctctcgccgcggcgcctgctactacaattgccgacccggagcacaggccaatccttacagccgtggctgcagcgccatta

SEQ ID NO: 271178 - DNA, 449 bp, Glycine max
tcgttggttacatcttcactttcccgataaaagcataacactggacactttcttcacggcatagggacttctatatgggtcgtacgaagcaaaccgctcgcaagtccaccggtggcaaggcgccacgtaagcagctcgccaccaaggccgctcggaagtccgcttcggcgaccggaggagtgaagaagccccaccgcttcaggccgggaaccgaggcgctgacggaaatcagaaagtaccagaagagcaccgagcttctcatcaggaagcttccatttcacaggctcatgagagaaatcgcgcatgatttcaagaccgatttgcgtttccagagcagcgctgtttccgcgcttcaggatgctgctgaggcttacctcgttgggttgatcgaggacactaacctctgcgcgattcatgctaagagggttaccattatgcccaacgatatc

SEQ ID NO: 271179 - DNA, 425 bp, Glycine max
gctgtccactaattttcttttttcctgcattgtcgttttgatccctcccccagacgaaacggaccctctcctctttcggaaccttcgccgcccttctccggccaaattccccgcggtttctcgaacttccgacgccatctccggccacctcagagagtgaagaaggtcgttgacgatgagcaacgtgttcgagggatacgaacgccaatactgtgagctctcggcgaatctagcgaaaaagtgcactgctgctggtgttcttaatggagagcaaaagaaacagaaagtttctgaagtaaaggctggaattgatgaagcagaagctttgattagaaaaatggaccttgaggcaagaagtttacagccaaacatcaagggtgtgcttcttgctaagttgcgagagtataaatcggatctcaacaatc

SEQ ID NO: 271180 - DNA, 434 bp, Glycine max
  unsure (1)..(434): unsure at all n locations
tgctactacacccaagtattccaaggccaggtatgatgaaattgtgaaggaaggctcttcgtacttgaagaaagtaggatacaaccctgacaagattccttttgttcctatctctggttttgagggagacaacatgattgagaggtccacaaaccttgactggtacaagggtccaactctgcttgatgcacttgaccagattagtgagcccaagaggccctctgacaagcccctcaggcttccccttcaggatgtgtacaagattggaggtattggaactgtgccagtgggacgtgttgagaccggtgtcttgaagcctggaatggtggtgacttttgcaccaactggactgacaactgaagtcaagtctgtggagatgcaccatgaatctcttacagaggcacatnctggtgacaatgtgggattcaatgtta

SEQ ID NO: 271181 - DNA, 455 bp, Glycine max
caaaaaatggagaacacaaggccaaatagaagtgacatgcacctctcagcagaggaagaagccaccatagaggcaaagaccagagactactttgatggggttgcaccacaacgccacacaaagcctcaacgaagtgagtattcagctcaatatgtggatgctttctccaatgcccatcactcttcttcttcttcttctataccagaattcatgcaattccaacgcctcgagaatgatccccaagagaagaaattggagtacaatggaagtcaagtaccggaagaatttgtggaaacagagtattaccaagatctcaacagcgtggacaaacaccaccatacgacgggaacaggatttatcaaagtagagaaaaatggaaatgactttcacatagaaccagataatgacactggttgccatcactcttgcaagtgcaatccagcaaccaatgattg

SEQ ID NO: 271182 - DNA, 322 bp, Glycine max
  unsure (1)..(322): unsure at all n locations
gcaagatataagaattagatttaattttgttatgctgtcaacgtaaagatttttacgctggtaattagtaaaaactcgtgtgcccctattactgagcaaaaaaaaaaaaaaaaaaaaaaaaaaaaaaaaaaaaaaaaaaaaaaaaaaaaaaaaaaaaaaaaaaaaaaaaaaaaaaaaaaaaaaaaaaaaaaaaaaacaaaaataaacaaagaaaataacaaaaataaaaaatacaataaaaaaaaaatactaaattcataaaaaaaatcanaagagaccaaaataaactacaactgaaaaaagaggtataaatacaaaaata

SEQ ID NO: 271183 - DNA, 435 bp, Glycine max
gaagaaggaaatggcttcctcaatgatcctccccagctgttaccaccgtcaaccgtgccggggccggcatggttgctccattcaccggcctcaaatccatggctggcttccccacgaggaagaccaacaatgacattacctccattgctagcaacggtggaagagtacaatgcatgcaggtgtggccaccaattggcaagaagaagttcgagactctttcctacttgccagacctcgatgatgcccaattggcaaaggaagtcgaataccttctaaggaaaggatggattccttgcttggaattcgagttggagcacggtttcgtgtaccgtgagcacaacaggtcacctggatactatgatggacgctactggaccatgtggaagctgcctatgtttggctgcactgatgcttctcaagtgttgaacgagcttc

SEQ ID NO: 271184 - DNA, 453 bp, Glycine max
gtgagtcagtgaccgagttgaaccatgtcggacgaagagcaccatttcgaatccaaggcggatgccggagcctccaagacctatcctcagcaggccggaaccatccgcaaaaacggctacatcgtcatcaagggtcgtccctgcaaggttgttgaagtttctacttccaagactggtaagcacggacatgctaagtgtcactttgttgggattgatattttcactgccaagaagcttgaagatattgtgccctcttcccacaactgtgatgttccccatgtgaatcgtactgattaccagttgattgacattgctgaggatggatttcttagcttgcttactgaaaatgggaacaccaaggatgacctgaagttacctacagatgagagtctgcttactcagataaaggatgggtttgctgaaggtaaggaacctgttgtgtcagttatgtct

SEQ ID NO: 271185 - DNA, 429 bp, Glycine max
gaagaaggaaatggcttcctcaatgatcctacccagctgtaaccaccgtcaagcgtgccggggccatcatggctgctccattcaccggcctcaaatccatggctggcttccccacgaggaagaccaacaatgacattacctccattgctagcaacggtggaagagtacaatgcatgcaggtgtggccaccaattggcatgaagaagttcgagactctttcctacttgccagacctcgatgatgcccaattggcaaaggaagtcgaataccttctaaggaaaggatggattccttgcttggaattcgagtaggagcacggtttcgagtaccgtgagcacaacaggtcacctggatactatgatggacgctactggaccatgtggaagctgcctatgtcaggctgcactgatgcttctcatgtgttgaacg

SEQ ID NO: 271186 - DNA, 450 bp, Glycine max
gttgaaggcggcgtgagaatgttggacattaacctattcagagaggagaagggcgcacaacgcctgaactcatacgcgaatcccaacgccgtcgtttcgccagcgtccaaatcgtcgacgaggtcatcaatctcgacaaagaatggctaaaacgtcaattcgagttggaaaatctccgcaaggaattcaacaagatcaacaaggaagtctccaaactcaagcgtgctggggaggatgcttctaagttcattactgaatcataggagaccaaaaaatcgattgcggataaagaggttgaagtgctggaaactctgaatctcttgaattccaagttggaaactattggaaacctcgtacacgattccgttccaattagcaacgatgaggccaacaatgttgatgatagatcgcgtggagagaaaagagtggagcctaagctgaagaatcatg

SEQ ID NO: 271187 - DNA, 326 bp, Glycine max
gctggattatcaggtttcctggataccttttcccagatccgctagctccaggcgatccggtggccattgtcaatgcttggtgcccttgcctgcacccttccatagatccttgacaagaatgacctacaatctcatgacgtcgattgcttgcaggcctgctcgactacaatccttacatggagtcctcacctactcgggcaacccatacctgacccatgctctacatcatccatgctatctatgctgatcaggttgtgctcatggaatacgctgtacgtgacagaattagtccttgaccacttttcgaatgacttgacccaatctac

SEQ ID NO: 271188 - DNA, 443 bp, Glycine max
ttcttcagcaactgcgattttggatcggaacctcttctgcggcgtagcaatgggacactccggcgtttggaattctcacccaaaaaactacggtcctggttctcgcacttgccgagtgtgtgggaatccacatggattgatcaggaagtatggccttatgtgctgcaggcagtgcttccgtagcaatgccaaggaaattggcttcatcaagtatcgctaaaagagctgttgtcacctacggaccaatattatgttctggcactaggatgttttgaagatgttatgtttgaagaaacttgagacttgtttttttcatctattttattatcagacataatgtgtggaacgaagaatacttttatataaattgttttgcactaaacaaaatctactaaaaaaagggcggactgcctttacgtttttctgttatgattttggacatt

SEQ ID NO: 271189 - DNA, 435 bp, Glycine max
ctcaagatgctgccagagctttggatgttctgaacttcactcctctcaataagaggcccatgcgtatcatgtattcgcatcgtgatcccagtatccgtaaaagtgggcaaggaaatatatccattaagaatttggatagggcaattgaccacaaggcgttgcatgatactttgtctacatttgggaatatcctttcgtgcaaggtagctacagattcatctgggcaatcaaaaggctatggctatgttcaattcgataatgaggaatctgcccaaaaggccattgagaagctgaatggaatgctgctgaatgataaacaagtgtatgtgggacccttccttctcaagcaagagagagaaagtactgctgacaaggcaaagttcaacaatgactatgtgaagaatctgtcagaatcaaccactgatgatgaattga

SEQ ID NO: 271190 - DNA, 337 bp, Glycine max
cccacgcgtccggttgggatcttccttcttgagtggatgaaacaggagccaggcccttctggcctctgctattggaggcaaagttggtgctgctgttactgttaatcccagaagactcattgtggtagctgctgctgcaccaaataagtcatggctccctggtgttagaggtggcggcaatctcgtcgacccagaatggcttgatcgatcactaccatgtgactatggctttgatccactagtccttgggaatgacccaccattcctcagatggtacagagaatctgagctcattcatgagacgcggccaatggatgcagatctaggaatctttctt

SEQ ID NO: 271191 - DNA, 464 bp, Glycine max
acttgttagggttgattttctttcccttgctagtgcctgccttgcttatcatcaacaatggtctggcaagtgatccagatatcatatatgactatgtttcaccacagaatagcagtgtcaatggaagcttctttacttacactggattaagaggagtccttcatcaaattcctcaatctttcaaggcaacaaaagtaaccctggttgaatttcctgctctcaatggacaaagtatatcatatgcactatttcagtaccctgctggtagcatcaaccctcctcacatccacccccgtgccgccgagtttctgttccttgtaagtggctccctgcaagtaggatttgttgacactactcgcacactttacacacaaaaccttcaatcaggtgatatgttcatatttcctaaagggttgatacattatcagtataatccacaatccagtccagccactgctatatct

SEQ ID NO: 271192 - DNA, 356 bp, Glycine max
cccacgcgtccgagaacataccaatctacaataaacgatgattctcattatctgcctcagtttttctcttctctctttctcccatgcttctgtcctagatttctgtgttgcagattatgcaggtcctattggacctgcaggatattcctgcaagaagccttcaaaggtcacagcagatgattttgcttacagtggccttggcattgctggtaacacctcaaacattatcaaagctgcagtgacccctgcatttgatgctcagtttgctggtctcaacggtcttggcatttccgcagcacgtttggacttagcagcaggtggagttataccacttcacactcatcctggagcttcag

SEQ ID NO: 271193 - DNA, 290 bp, Glycine max
ctaccgccttggtgaaaggaacctttgaaaaaggtctttgggaccttaaagaaaaaccctggtagcgctaaattcccaccactggagaactcatttaatccttccgctatattatcttgaacacatttgcagctccatacgctgctgataattttggacaatatccttatggcggcttaatcctgaaccgtacatctctacccagaaggtttatcccatctgaagcaaccccatattatgattagatggtgaataatcctcaagattcttatctgagaacaatcacaccc

SEQ ID NO: 271194 - DNA, 469 bp, Glycine max
  unsure (1)..(469): unsure at all n locations
acgcgtgcgcccacgcgtccgcccacgcgtccgttctaatccttctttcgcctactcctccctctctctgactttcacacgcagcgaggtagcgtcttcttcttccgtttctctgcatcggtgtgaacaatggctacatacgctgcgatgaagcccacaaagcccgggttggaggagtcccaagaacagatccacaagataaggatcaccctttcctccaagcacgtcaaaaacctcgagaaggtttgtgcggatttggttcgcggtgcaacggataagagactcagggtgaagggacctgttaggatgcccactaaggttcttcacatcactaccaggaaatcaccctgtggtgaaggtaccaacacatgggacagatttgaacttagggtgcacaagagagtgattgacctctacagttccncagatgtggttaagcagattacctctatcacgatcgaaccttgtg

SEQ ID NO: 271195 - DNA, 454 bp, Glycine max
  unsure (1)..(454): unsure at all n locations
acgctcagttcccccctcttcattttgtagtcctcctttacctgcaaaaaacagcagatggctggtcttagcctcatacttatctggttatttttattgagtctgtgcctttattcatgtcctacttcggcccagttaagtagacaccactatgcaaaaacatgccccaatgttgaaaacattgtcagagaagcagtcaaaaagaagtttcatcaaacatttgttacggttcctgctaccattcgtctcttcttccatgattgcttcgtgcagggttgtgatgcctcggttttggttgcatccacaaaaaacaacatagcagagaaggatcacccagataatgtttcactagctggagatggatttgacacagtgattaaagcaaaagaagcagttgatgcagttccattgtgcangaacaaagtttcatgtgctgatattttagccttggcaa

SEQ ID NO: 271196 - DNA, 459 bp, Glycine max
  unsure (1)..(459): unsure at all n locations
acgctagtattttcgtttctgaacccaattaattaagcacacaaggaccataacatacctatagctcaatatcacaagtcttatggaggcagagcgagacaagtacaagatgatcaactttgaagaaaccgagttacgactcggcctgccactcagtggaaacgagacgctcaaaaacacttgcagcactgggaagagggttttttcggatactgccgtggatttgaagcttaacctttcctcaacctcaaacagtgcttcttctgacctggctaaagagaagaacatcactgctgctgcacctnctgctaacgacccagcaaagccacctgcaaaggcacaagtggtggngtggccaccagtgaggtctttcagaaagaacattgttcaaaggagtaacaacaatgagggcgaaaaagccgncacaagtagtagcaacaatgtgaacacgggagcagc

SEQ ID NO: 271197 - DNA, 457 bp, Glycine max
acgcccacgcgttcggcacggtgagaagaagtggaagtgcgaaaagtgctccaagaaatacgctgttcaatctgactggaaagcccataacaagatttgtgggactagacagtacaaatgtgactgtggtacaatattctccaggaaggacagctttgtaacgcatagggctttttgtgacgccatggcggagcaaaatgcgaggcttccgtcggttttgtcaaaccttggaagcgagattttgatgaatgctgctcaagctccaagagtaatgccacagggtttacaattacatgggtttcattcagagtttggtgggccaggccaagaaccatacattggaaattttgcggatgtgaaccatcatgagcataagctaaagatgccactatggctagaccagaccaataatcctcttcagcttaatcatcatcatcctctaagcgtttcaagcaac

SEQ ID NO: 271198 - DNA, 453 bp, Glycine max
gttacttacaggtttcagaagcctgccaccgttgtttgcagatacacctaatgcagttcatgaattaacaatagcaagggatatatatgagcatgctgttgtccttagtgtgaaaattgaggatcaagatgctttcgaaagggatttcttccagttgaagccttattatacagatgcctgcaatcgtcttccaccatctcctcaggagtaccctatactgggtctcaacctgttgagactacttgtgcagaataggattgctgagttccatactgagttggaattgctttcatctgctgctcttgagaatccttgcattaagcatgccgtggagttagaacaatcttttatggaaggggcttacaatcgtgtcttgagtgcacggcagacagtgccacatgatacatacgtttatttcatggatcttttggcaaagactgtcagagatgaaat

SEQ ID NO: 271199 - DNA, 284 bp, Glycine max
gaagtgttcggattgcggcgacgtgagcttttcgctgcccgcgacgttgtgagaagtcggctgaaccttatcatttagaggctggagaaactagggcttgatgtcgttgattagggtttatgattatgctcagtaattttagttgtgtttgagtttgagtatctttatggttttgtgtcaccgtggttcttgtttttgaccaatatatctggttgtttatagtcgatttaatgaaatgataatcagaaattggagtatcgaaaaaaaaaaatttaaaaagataa

SEQ ID NO: 271200 - DNA, 326 bp, Glycine max
acgggggagcttgaacaatttgtccctactcatcaagcaatatggattgtcaaagagtactgaggaggccatgtttgtgattgaagcttataagactctccgtgaccggggtccataccctgcagatcaagtggtcaaggaacttgatggcagttttgcttttgttgtctatgacagcaaggttggcagtgtctttgcagcactgggttctgatggaggagtgaagttgtattggggtattgcagctgatggatctgtggtgatctctgatgatctagaagtcataaaagagggttgtgccaaatcctttgctccctttcaacaag

SEQ ID NO: 271201 - DNA, 464 bp, Glycine max
cccacgcgtccgacagaagttgtgcttgttcgcaaaaccatcaatggcatcagcattatcgtctctgtgctccacctcttcttcactgttacagcacagtttcaccggaaactcgaaggctcctcccactactcaattccccaacaaaaatgtacgcttttcggtcttcgctcaaaagaaggcaaagaaacttcgaaagattattttgaaggaagatgtggcttatgtaggaaagcaagggcaacttcttgatgtgaaggctggctttttcagaaattacctgcttcctatgggaaaagcacaacttgttactccacagcttctcaaggaaatgaagatagaagaagaaagaattgaggctgagaaaaaacgggtaaaagaagaggcacagcaacttgctctaatttttgaaactgttggggttttcaaggtgaagcgtaaaggtggtaaaggaaaacaaattt

SEQ ID NO: 271202 - DNA, 433 bp, Glycine max
gatcgagataactagaaacagtgtgatgaaaatgaaggtccttgttttcttcgttgctacgattttggtagcatggcaatgccatgcgtacgatatgttccctctccgaatgaacactggctatggtgcccgtactccggaggtgaaatgcgcaagttggaggcttgctgtggaagcacacaacatctttggctttgagaccattcctgaagagtgcgttgaagcaacaaaggaatacatccatggcgaacaatatagatcagactccaaaacagttaaccaacaagcttacttttatgccagagacctcgaagtccatcccaaggacacatttgtgttcagtatagatggcaccgtactctctaatattccatactacaaaaaacatggatatggggtggagaaatttaactcgaccttgtatgatgaatgg

SEQ ID NO: 271203 - DNA, 421 bp, Glycine max
ttcctaatcatggtcatagcttagaaacagtgtgatgaatatgaaggtccttgttttcttcgttgctacggttttgggagcatttcaatgccatgcgtacgatatgttccctctccgaatgaacactggctatggtgcccgtactccggaggtgaaatgcgcaagttggaggcttgctgtggaatcacacaacatctttggctttgagaccattcctgaagagtgcgttgaatcaacaaaggaatacatccatggctaacaatatagatcagactccaaaacagttaaccaacaagcttacttttatgccataaacctcgaagtccattccaaggacacatttgtgttcagtatacatggcaccgtactctttaatattccatactacaaaaaacatggatatggtgtggagaaatttaac

SEQ ID NO: 271204 - DNA, 337 bp, Glycine max
cggacgcgtgggctgcgcgtgaacaagccttatgtaagccaaagccatggttaagcataagaatgttatccccaacggacactttcgtaagcactggcagaactattttaagaccttgttcaatataacaccaacggaaacacagaaacactgtggtctcgacaaaaaaactctgaaaatattttccacacatatacatctagaccttttacacccattgcacatggtcaaactttgaaatacaacatgaaagtgagatctgaaaggggattttcccttgaagaactcaaggcagcaggtattcccaaaaagcttgcaccaacaattggtattgctg

SEQ ID NO: 271205 - DNA, 370 bp, Glycine max
gttggctttgactcaaaagctgtgtgtggcatcagaaaatgaacagtttatcaatggcaggtctccacccaaatcttcttcccactttcaattccaacactcttacctttccttccatcaaactcaaaccctcactctcgcacgtgccttctccaacccccacacgcttcagtctctctgtttccgcggcggaaaccaccgcttttgccgcccctcccactccccaacctgagaagcttggagttgtagttaagccaacggagaagccgagacttgtgttgaagctcatatggatggagaagaacattggaattgcgcttgaccagatggtaccgggccatggcaccattcctgtgagcccatattactt

SEQ ID NO: 271206 - DNA, 372 bp, Glycine max
actgttttcttttggtgtgtaatgtcttgaaccataaaaaataaaaaaaaaaaaaaaaaaaaaagaaatttgtaaaattaaaaaaagaaaaaaaaaaaaaaaaaaaaaaaaaaaaaaaaaaaaaaaaaaaaaaaaaaaaaataaaaaaaaaaaaaaaaaaaggccgccccttttaaaaaacccaatttaacatacccttccttccaactctaaaccttttttatagtgtcccctaaattaattaaaatgcccttctttataaaaacttctaaactggaaaaacccttgttttaccaaatttaaacccttaaaaaaaaatccccttttcccaaattgccttaataccaaaaaacccctaactaatcccctttt

SEQ ID NO: 271207 - DNA, 413 bp, Glycine max
acgcccacgcgtccgggaaggtgaaaaagaatataaagaaaaggatgatgggaaggaagtgagagagaagaagaaaaaagaagacaaagacaagaaggagaagaagaaagttactggaaaggacaagaccaaggatcttagtgcgctgaagcagaagcttgaaaaaattaacggaaaaatacaaccactccttgaaaagaaggctgatatagaaaggcagataaaagaagctgaagctgagggtcatgtagtcaatgggaaggacaaggatgaggtacagtagctgtttaggatacacttatactatcttgcgtaatatgcaaactatgtttgctctttttaagttgttttgtgtaataaaggttgctttttatttgattgaggagtgatacattttgtcattcttatgcttt

SEQ ID NO: 271208 - DNA, 330 bp, Glycine max
acgcccacgcgtccgcaagattctcacaaacaactcttgataaagaaagaatggctgccaacagattgaggagttctgccatctcagccttcccatctctcctttccttctcaaaatccaaatttgccccaacaattcctctttccaactttggtgtcaccaatgcctcttcttctcgcttttccattaatgcttattggatgccctggccagcctaaacccccttacctagatggttaaacacctggacactttatattacacctcttgcctctgggaaaaaccccagaaaatctttagaggtccaaagagtcagaactcattcactgc

SEQ ID NO: 271209 - DNA, 314 bp, Glycine max
gcgtatcactccaagacagatgaggaaaaggaatttgaaattgagagtggtgctcattgatatggaatatggagacattgcttttttggtggttggagatgcatgattgtggtgtgctttgttttcatttcatcatatgacagccttgtgggtttctttggtgtttcttgatgcatacttaatttactttattattgtgtatttatctcttccatttacaaaaaaaaaagtttgtgtaggtttccttctttgaagtaaaaagaaattaaatatgtactgaaaatggaataatagtgtgttttatttgtgtttta

SEQ ID NO: 271210 - DNA, 451 bp, Glycine max
gctatctccgatggctctctctgcgcatatttgccgtttccccgccacacgcgctgacacgtctttgccggagagtctcaccagaatccggtgccggaaacctctctccgtccgatgctccggcgattccacttccggctctgtgggttcggagttcgatccgaaggtgtttcggaagaaccttactcggagtaagaattataaccgcaaaggatttgggtacaaggaagagaccctccaactcatgaatcgcgagtacaccagtgatatcattaagactttgaaggaaaatgggtatgagtatacatggggtactgtcacggtgaagcttgctgaagcctatggattctgttggggagttgagagggctgttcaaattgcttatgaggccagaaaacagtttcctactgagacatattggcttaccaatgaaatcattcacaaccccact

SEQ ID NO: 271211 - DNA, 127 bp, Glycine max
ccggaaagtgagcgtcaaagaacgaaatgtcttttgagagtttttagatttgtgtttggggaagtacttcagataatgtgaattatcttgtgtatccgaatccaacttaatgttacttgctttttac

SEQ ID NO: 271212 - DNA, 301 bp, Glycine max
cccacgcgtccgcattaattcacttgcccgcaaatccttggtcaatgccgacggtattatagagaaaacattcttggggggtaagtactctttggaaatgtctgctggtatttacaaggattgggttttcaacgatcaaaccttggcttatgaacctggcaagaaaagaattgcttgtaaaggttcattttgttcccattgaatttgacttttgatcgaggactatccttatgcttctgatgggctagagatatgggatgctatcaagtcttgggtggaagaatatgtctcattctactac

SEQ ID NO: 271213 - DNA, 369 bp, Glycine max
gcctagaaccttcttcctttacacctcgctggaaccagcgatggatcctcagcctgagcgagtcagctacatatgcggagattgtggaatggagaatacgctgaagcccggtgacgttatacagtgccgtgagtgcggttaccgtattctttacaagaagcgcactcgtcgcattgtccagtacgaggcacgctgaagaaaactgctataacgtttgcaagtaatttccatgaagaaattgttactacatctgtgttgtgtgatattgaagaactacttttaattctacagtagatggctttttgggagatgtttaccaaaggataaaaactttgaatgtgaatattttacaaacatccgggtttcatt

SEQ ID NO: 271214 - DNA, 329 bp, Glycine max
ctcgaaacggagattcaaagtgggttgcctcacaaggactaccacgacccaccccccgcgccattctacgaccccgccgagctccgaaagtggtccttcttccgagccctcatcgccgagttcgtcgccaccctcctcttcctctacgtcaccatcctaaccgtcatcggctacaaccaccagacagccaccgccgccgagccctgcaccgccttcgccttcctcggattcgttgggccctttgaagccttaattttggccctcgcttatggcaccgccggcatatcagggggacacataaacccggcggtgacgttcgggttgttttt

SEQ ID NO: 271215 - DNA, 234 bp, Glycine max
cccactcgtccggaggaagtagatcatcttaatgcatttccggttgcttaatgctccggacaaacgcaatgatcaaaggaaaatgctctggatagaataatgatgctcccattctatgatatgtaatcaattccaaatcattatctccatataaatccttcttaatttgttcaaatccccttgaacaaccagattcaaacaaatttttacctaaaacctaaccctaatcttttt

SEQ ID NO: 271216 - DNA, 397 bp, Glycine max
cggactcgtgggccaacacctggctcaactcatgggctcactggctcaaggctgaccccagaaagtacctcaagatgaaggagaggcttgtcggcgtctctgaggagaccaccactgttgtcaagaggctataccaaatgcatgagaccggcgccctcctcttccctgccattaacgtcaacgattacgtcaccaagagcaagtttgacaacctgtatgggtgccgtcactcgctccctgatggtctgatgatggccactgacgttatgatcgccggtaaggatgctgcggtctgcggatacggagatgtactcacgggttgtgctgctgccctgaagcaatgctgagcccgtgtcattgagaccgagatcgaccccatctgtgccgttcaggctct

SEQ ID NO: 271217 - DNA, 428 bp, Glycine max
cccacgcgtccgcaagaactagggtttgcagtcactgctctgtttcaccgagtttgggcgtggagatcagaaccaaatcgtgttctctttcattggcaaacatggcaactcaaatgagcaggaagagaaagtatgttgcggacggagtgttctttgccgaactgaacgaggttctgacacgtgaattggcggaggacggttactccggcgtcgaaattaagggttacgccgatgcgcaccgagatcatcatcagagccaccagaacccaagccgttctaggtgagaagggaaggagaattaaggaacttaccctaatggtgcagaaaaggttcaaattccccgaaaacagcgtcgagctttatgctgagaaggtcaacaacagaggcctgtgtgccattgctcaagccgagtcgcttcgctacaagct

SEQ ID NO: 271218 - DNA, 330 bp, Glycine max
agctccttcacctccttagtttcgaaagcatggcttccctggcggcttccaccgcggctgtgtcagagatccttggaaaccccgttaacctcagatgcgcaaccaggtctgctccataccactacacctgcaccttcaaaccgcgaacttttttccaagaggaagccagttcaacctccaaagaaaaagcctgccgctgtatcccccgccaatgaggaactcgccaagtggtatggtcctgacagaaggatcttcttgcctgagggtctcttggaccgatctgagatccccgagtacttgaccggagaagtgcctggagattatggttat

SEQ ID NO: 271219 - DNA, 366 bp, Glycine max
  unsure (1)..(366): unsure at all n locations
gcatgttttactatgctggaagtgaagatcactctgaggagcctcacttcctccaagctgggtttctttgcagaaaaccactcggccaaaaccgtgacatcttcatgtacagagggaacacaccattttgtagcaaagagtgcagacaggaacaaatagagattgatgagtcaaaggagaaaagttggaagctttcttccaaaaggggtgtgagacaatcagagaccaatcaaaattccacacccaataaggctgtaagaacaggcacagttgcagtggcctaatcaaagaataatccatgacatgatgatgagtggngaaagtgcccaatttttgaggaaaaaaagatggatattgaaatggaaa

SEQ ID NO: 271220 - DNA, 450 bp, Glycine max
cccacgcgtccgcagatcaatgcagagctgtgtatgcatgctcacatctgttttgggttgatgatcatgataacatgaaagatggagagagggtcctattatgtcttaagcgggctttaagaattgcaaatgctgcccaacaaatgccaaatgcagcacgaggtagcactggatcagtaatgctcttcattgagatattgaataagtatctttacttctttgagaagggaaacctacaagtcaccgttgctgctatccagggcttaattgagttaattatgaatgagatgcagagtgataccacaactcaagatccagctgctaatgctttcttagccagtaccatgcgctatatagagttccagaaacaaaaagggggtgcggtaggcgagaagtatgaagccatcaaggtttcacatgctggatgaccgatacccttgttggtgtcgt

SEQ ID NO: 271221 - DNA, 451 bp, Glycine max
ataactagaaacagtgtgatgaaaatgaaggtccttgttttcttcgttgctacaattttgggggcatggcaatgccatgcgtacgatatgttccctctacgaatgaacactggctatggtgcccgtactccggaggtgaaatgctcaagttggaggcttgctgtggaagcacacaacatctttggctttgagaccattcctgaagagtgcgttgaagcaacaaaagaatacatccatggcgaacaatatatatcagactccaaaacagttaaccaacaagcttacttttatgccatagacctccaagtccatcccaaggacacatttgtgttcagtatagatggcaccgtactctctaatattccatactacaaaaaacatggatatggcgtggagaaatttaactcgaccttgtatgatgaatgggttaacaagggcaatgcaccggcac

SEQ ID NO: 271222 - DNA, 314 bp, Glycine max
acgcccacgcgtacgctttgttcaggctattgttactggcaagggccctattcagaacctttggtaccacgttgctgatcctgttgccaacaatgcttgggcttatgccactaactttgtccctggacaatgaggatgcctacatgcaatgcaatcttctgctcccttttgcagttcccttgtgtttaactccattttcactaatgtaactacacctgtgtagcagaaaaatctgtatgagaacccattatatttatatattaaaaatttgggtccccagaaaaaaaaaaaaagttatgatataatggaggggg

SEQ ID NO: 271223 - DNA, 216 bp, Glycine max
cccacgcgtccgtatttgttcaagcttttgctgattggagattctggtgtaggcaagtcgtgtcttctcctgaggtttgctgatgattcataccttgacagctatatcagtaccattggagtggactttaaaatccgcactgtggagcaggatgggaagactattaaacttcaaattggggacactgcgggtcaggaacgtttccgaacaatcact

SEQ ID NO: 271224 - DNA, 163 bp, Glycine max
gtactttctaatccctttgagtattgtgatattgtgaccaccacaacccacaggtctttacgaggtccaagaggtggtatgatattcttcaagaaagatactgtgcatggggttgatttggagcctgccattaccattgctggttttcctggtctacaagggg

SEQ ID NO: 271225 - DNA, 320 bp, Glycine max
acgcccacgcgtccgggacaagcaccctccatgcgagatttgttcatgcggttgaacttcttgggggccatgaaagagctactccaaaatcagttcttgagctcatggatgtgaaggatctaacactagctcatgtgaagagccatttgcagatgtatcgaactgttaagaccactgacaagcctgcggcatcttcaggccattcagatgggtctggagaagatgatttatctccgatgggtagcacccgccatccgtggtggtctccgacaatttcccaccacagagggcggccggaatgggccggacaacaggacatg

SEQ ID NO: 271226 - DNA, 405 bp, Glycine max
aaagaaagaggatttacatgtggtgaaacccacaacatctgtggatgaagctttggagatgcttgttgaaaacaggataactggttttcccgtgattgatgataactggaaactggttggtgttgtttcagattatgatttgttagcactggactctatatcaggtcacgggctaaaggataacaacatgtttccagaagttgacagtacttggaaaactttcaatgaggttcaaaagctgctaagtaagaccaacggaaagttgattggtgaattgatgaccactgcccctatggtcgttcgtgagaccaccaatctcgaggatgctgcgaagttgttgctagaaaccaaatttcgacgcctaccagttgtagatgctgagggtagactggttgggattatcac

SEQ ID NO: 271227 - DNA, 463 bp, Glycine max
acgcccacgcgtccgcccacgcgtccgattgcaaagaaaatacacattacattactaagtcttggttcatttgagtagtagtgatggctagcctcaaggttgcatgtgtggttgctgtgatgtgcatggttgtggtggccatgagtgctgcacccatggcacaggccgcaatcacgtgcgggcaggtcgccggcgacatgtctccgtgcttcagttatcttcgaagcggcggaaaaccgtcgcaggcctgctgcaacggagtgaagtccctcagcagcgcggcgaagaccaccgcggaccgtcagggggcgtgcagttgcctgaaaaaccttgccaataatatgggacagagtttgaatgccggcaacgcagcctctctccctggcaaatgtggcgtcaacatcccttacaagatcagcaccttcaccaactgcgccaccatcaaattctgaaaggcaatttt

SEQ ID NO: 271228 - DNA, 457 bp, Glycine max
cccacgcgtccgcaaggctctactctactgcttcaccttctgctctagaaaattcagtggggatacatggcttcggctactctctctgtagccaaaccagcccttcaggcaaatgggaaaggcttctctgaattctctggcctccgcagctcatcaggcttccttcccttttctagaaaatcttcagaggatttccattctgtcattgccttccagacctatgcagttggaagcagtggaggatacaagaagggtgtgacagaagcaaaactgaaggttgccataaacggatttggaaggattggaaggaacttcttgaggtgctggcacggtcgcaaagactcccctcttgatgtcattgccatcaacgacaccggtggcgtgaaacaagcctctcaccttctcaagtacgattcgatcctcggaaccttcgatgctgatgtcaagcctgttggca

SEQ ID NO: 271229 - DNA, 272 bp, Glycine max
acgcccacgcgtccgcccacgcgtccggtgtaccttgagcacaacaggtcacctggatactatggtggacgctactggaccatgtggaagctgcctatgtttggctgcactgatgcttctcaagtgttgaaagagcttcaagaggctaagactgcataccccaatggcttcattcgtatcattggatttgacaacgttcgccaagtgcactgcattagcttcatatcctacaaaaccccaggcttctaagacatttaaaaatttgcaaagca

SEQ ID NO: 271230 - DNA, 327 bp, Glycine max
cgagataactagaaacagtgtgatgaaaatgaaggtccttgttttcttcgttgctacaggtttggtagcatggcaatgccatgcgtacgatatgttccctctccgaatgaacactggctatggtgcccgtactccggaggtgaaatgcgcaagttggaggcttgctgtggaagcacacaacatctttggctttgagaccattcctgaagagtgcgttgaagcaacaaaggaatacatccatggcgaacaatatagatcagactccaaaacagttaaccaacaagcttacttttatgccagagacctcgaagttcattccaaggacac

SEQ ID NO: 271231 - DNA, 225 bp, Glycine max
cccacgcgtccgctgtgattgtgtaatttaaaagcagaggataacattggcccatgacgcgacacatgcaccacctaataatcataattttacatctttacatacaaaatacaaagactttaaattttaaaaagaagaaaagagataaacagatcatcttaatgaaatgaaaccaaaacccacaaacattggcttgatttttgttgttgttgttgttcccaactt

SEQ ID NO: 271232 - DNA, 356 bp, Glycine max
gcgtcgagaatgttcatttgaattttgagctttatagtgtcaataagataagggggtgagtacattggaggagaatgggcaaaaaatgatggatacgaacatcaagaaagctaaaaatcttgcagtttcaatggcaacgaaagcggcctcactagcaagagaattgaagtccattaaatcagatctctgttttatgcaagaaaggtgtggtttacttgaagaggagaacaggagactgcgtgatggatttgcaaaaggagttagacctgaagaagatgatctggtgaggcttcagctggaagcacttcttgctgagaagtccagactggccaatgaaaatgcaaatcttgtcagag

SEQ ID NO: 271233 - DNA, 291 bp, Glycine max
gaggatttacatgtggtgaaacttacaacatctgtggatgaagctttggagaggcttgtttaaaacaggataactggttttcccgtgattgatgataactggaaactggttggtgttgtttcagattatgatttgttagcactggactctatatcaggtcacgggctaaaggataacaacatgtttccagaagttgacagtacttggaaaactttcaatgaggttcaaaagctgctaagtaagaccaacggaaagttgattggtgaattgatgaccactgcccctatggtc

SEQ ID NO: 271234 - DNA, 403 bp, Glycine max
cccacgcgtccgggaatgaaaaggaaatttgaccctaatgatgtctctgaagagaatgcggttgactcacaaaaggaggagaatgggaaaaaaatgatggatacgaacatcaagaaagctaaaaatcttgcagtttcaatggcaacgaaagcggcctcactagcaagagaattgaagtccattaaatcagatctctgttttatgcaagaaaggtgtggtttacttgaagaggagaacaggagactgcgtgatggatttgcaaaaggagttagacctgaagaagatgatctggtgaggcttcagctggaagcacttcttgctgagaagtccagactggccaatgaaaatgcaaatcttgtcagagaaaatcaatgtcttcatcagcttgtggagtaccaccaac

SEQ ID NO: 271235 - DNA, 385 bp, Glycine max
cccacgcgtccgggaatgaaaaggaaatttgaccctaatgatgtctctgaagagaatgcggttgactcacaaaaggaggagaatgggaaaaaaatgatggatacgaacatcaagaaagctaaaaatcttgcagtttcaatggcaacgaaagcggcctcactagcaagagaattgaagtccattaaatcagatctctgttttatgcaagaaaggtgtggtttacttgaagaggagaacaggagactgcgtgatggatttgcaaaaggagttagacctgaagaagatgatctggtgaggcttcagctggaagcacttcttgctgagaagtccagactgggcaatgaaaatgcaaatctggtcagagaaaatcaatgtcttcatcagc

SEQ ID NO: 271236 - DNA, 453 bp, Glycine max
acgctctcactcacaaacgcacactgaattcaaaaacatcgaaagagagaggcatggccgatcggaccttcatcatgatcaagccagatggcgttcaaagaggccttattggcgagattattagcagatttgagaggaagggtttttacttgaaagggttgaaactcgttactgtggaccgtccttttgctgagaagcactatgctgatttgtctgcaaagcctttctttagtggtttggtggattacattgtctctggccctgttgttgccatgatctgggagggtaagaatgttgttacaactggccgaaagattatcggagccacaaacccagctcaatctgagcctggaactattcgtggtgactttgctattgacattggaaggaatgttatccatggaagtgattcagttgagagtgctaacaaggaaattgcattgtggttccctg

SEQ ID NO: 271237 - DNA, 349 bp, Glycine max
acgcccacgcgtccgatggccacctctgctattcagcaatcagcattcgcaggtcaaactgctgtgaagcggctcaatgagttggtccgcaagaccggtggcgccggcaaaggtcgcaccaacatgcgccgtaccgtcaagagtgctcctcagagcatttggtatggccctgatcgtcccaagtacctgggtccattctcagagcagattccgtcatacctgaccggagaattccccggtgactacggatgggacactgctggactatcaactgacccggaaaccttcgccaggaaccgggagctggaagtgattcacaacagatgggccatgcttggtgcacttggct

SEQ ID NO: 271238 - DNA, 448 bp, Glycine max
cggagagtttgcagctgcatcatcgatcatcgtcacctcatggacggacacgattcacaagacccgaagcagagccctgctgacatgactgcctttgtgcaaaatcttctccagcagatgcaaaataggttccagacaatgtccgactccattgttacaaagattgatgatatgggaagtcgcataaatgagttggaacaaagcatcaatgacctaagagcagagatgggagtggagtcctctccatcacctgcgacccctgctaagccaacagaggaaatcaccaaagaagagggttcagcttaagtggcgtgttctgatatcagttgctcggtattcatgtattcatgtattgtattgcacaaggattgatgttatgcatctacttttgtctgctgtagtggttcagaaaacagatgtgctgtatagctatgagtgcatctcgata

SEQ ID NO: 271239 - DNA, 413 bp, Glycine max
  unsure (1)..(413): unsure at all n locations
accacgcgtccggtataaggccaaagctcccccttctggctcaagcttcatccaatgccaaaatgttgtggatgaagcactccatgttaatgcaacatgctcttacaaggattgcactttctgagggatatggaatggtggtggcggagctggagaaaacaacttttttattgcctaatttttctttgaaattgccaatgaggctggttttgttgatccaaacgcccgcaatgccaaagatcgtcctgtggattttgagaatgcatcaaaggttgtctgtaacacagaattaaaggatctcaaatccattttccctcgtgttaaagatggagacgttccttatatatgcttagatcttgtatacgaatatacattgctcgttgatggatttggcatacatccgcancaagaga

SEQ ID NO: 271240 - DNA, 453 bp, Glycine max
cccacgcgtccgcccacgcgtccgggggctggttttgtgcccaggaatttggatcaagatgggcttggtgaagttatagcgatgtcaagtgatgaagcacttgaaactgcaaagcaattagcactccaggaaggcttgctggtgggaatttcttcaggagctgcagctgcagctgctttgaaggttggaaagaggcctgagaatgcaggaaagcttattggggttgtcttcccaagctttggtgaaagatatttgtcaactattcttttccagtcaatacgggaagaatgcgagaaaatgcaacctgagccatgaattgactttgcttgttaatgtttcatactcattttccacaagtatctgtatggaatgacagtgtcagatgtccatgttatgcccgcgtttctcatttttgacactcaagaaattagataactgtgtacaggtcattga

SEQ ID NO: 271241 - DNA, 457 bp, Glycine max
gttttgacttggcaggaaaagagctcttcctccactcacatatttcatagttggccaattgggtattaatggctggttaagttgcagtgttcaaatgctcaggttttttggaataggttacggctctcccactttggccactgcaatgtctgatttaatccctgcttttaccttcatacttgccatcgtcttcaggatggaaaaattggattggaaaactaacagtactcgggccaagtccattggcacattggtatcaatcgctggagccttaataattactctgtacaaaggccaggcagtcataaacaatcatgcatcaaataaattgttccccaaaaaacatgtttcatctgagcaatttgactgggtaataggggcagtgttgcttgcgggtcatagctttgttctctcattggtattcatagttcagacatggataatcagaaattaccct

SEQ ID NO: 271242 - DNA, 420 bp, Glycine max
cttgtggcttgtggcaagtctcctcctcctggttacacctgctccctctaaaccagtgaagggattgaggaaaatatggtcaaaatcgacatgagaggatgtcgagccacactatctctcttctgtcctgattggaactgctggtgtttgttttgctattatttgaaaaaccatttgtttttaattgagattgttgcatgtatgttttaatcctaggcaagtagcaacaaagatgcttctctgtgacatgttcaattattaatttatctggaaaaaaaaaaaaaaaaaaaaaaaaaaaaaaaaaaaaaaaaaaaaaaaaaaaaaaaaaaacccccccaagggaaaaaagaaaccccaccctaaaaagcccataaaaaccggggggggaaaggaaaaaaaaaaaaaagggggggccccttt

SEQ ID NO: 271243 - DNA, 158 bp, Glycine max
gcttgctcctatctatctatatgtaataagatgcgttcaaataggggcactagcttcactgtatgttgtttcagctgtgtgtcaacaagtcatgtaagagacttcactatgttgttttctctttcgtggctttaataaattatgcgcccttgttccat

SEQ ID NO: 271244 - DNA, 415 bp, Glycine max
ctcactcactaagctaaacaatttcatcaagcctgccatggcttcctcgtgtgcttcctgtgccattgcagctgttgccatctccacaccaagttcccagaagaatggatcactcttgggaagcacaaaagcttcttttcttagtgggaggaaactgaaggtgaacagttttacagcaccagttggagcacgatccagcactacagtgtgtgcagttgctgagcctgataggcctctgtggttcccaggcagcacccctcctccgtggctagatggcagtttgccaggagatttttggctttgatcccctaggtcttggatctgatcctgagagcctgagatggaatgtccaagcagagcttgtgcactgcagatgggccatgttgggagctgctggcattttcattccagaatt

SEQ ID NO: 271245 - DNA, 212 bp, Glycine max
gcgatgcgctcctgtcctcaactggccgattcgtgcctccggtgctgttacttcgaagagcttagagtgctcaaagcacagcctacgctcatgatacattagcatgggataacaccacaggattctgatactatcgtgttggcctacgtcatcgccgtcatgatcaacagggacagtcacaggcatacgtatctcatagtcagaggtgaaat

SEQ ID NO: 271246 - DNA, 335 bp, Glycine max
cgacccagcgcgtccgcccacgcgttcgccgcactgctaatggggatcgatcttacaaatggatgacttgctatgtgttccgtgcttgcatactagtttcaagcttatgtcactggacaaggtcctgctgagaaccttgcagaacatctcagtgacccttatggcaacaacttgctcactgtcatttctggatctgctgagagagctcctactctctaaatcattcatcttcatgttattctccaatcttacttaatgtactatacatatcactgagatcttaatgcattcggctgtagtccttggaactcagatgttggaatccaagctgacat

SEQ ID NO: 271247 - DNA, 408 bp, Glycine max
cccacgcgtccgatgttattttgctcaaaaaaaaaaaaaaaaaaaaaaaaaaaaaaaaaaaagaaaaaaaaaaaaaaaaaaaaaaaaaaaaaaaaaaaaaaaaaaaaaaaaaaaaaaaaaaaaaaaaaaaaaaaaaaaaaaaaaaaaaaaaaaaaaaagggggggccgttttaaaggatcaaagtttacttccgggggcttgcaacgtaatattttttttatgggggccccaaaattaaattcatgggccggggtttaaaaacgtgggaatgggaaaaaccggggggttaccaaattaaatggctttgaaaaaaatccccttttagccagttggggaaataacaaaaaggcccgaaccaatggccttttcaaaaagttggccaccttaaatggcaaatggaacccccc

SEQ ID NO: 271248 - DNA, 468 bp, Glycine max
cccacgcgtccgaaaaaaaaaaaaaaaaaaaaaaaaaattttaaaaaaaaaaaaaaaaaaaggggaaaaaggaaaaaaaaaaaagggaaaaaaaaaaaaaaaaaaaaaaaaaaaaaaaaaaaaaaaaaaaaaaaaaaaaaaaaaaaaaaaaaggggggggccgttttaaagaatcaaattttttttccgcgggtttgaaaaaaataatttttttttttgggccacaaaatttaatttaattgcccgggtttttaaaacgtggggattggaaaaaccgggggtttcccaaattaaatggttttaaaaaaaatccctttttcccaagttgggttaataaaaaaaaggcccgaaccgttggcttttccaaaaatttgcccatcttaattggaaattggaacccccttttttccgccctttaaagccggggggtttgggggtttaccccaaggggacccttttatttttcaa

SEQ ID NO: 271249 - DNA, 416 bp, Glycine max
cccacgcgtccgctttctttccctcacgtctctctctcacatcatcatggcctccccaacgctaatgacccccagatcagtgaaatcactcacacccatcaagcccaaacccaccaccaccatcgccgccactctcacaccacccacaacaacctccaccgccgccgccacccaccctcgccgccgcgaattcttgtccatcatcaccgccaccacatggctggtccctctgagcccggcactggcttcctcggacgaggaatacatgaaggagaccgaggaagtgatcaacaaagtgaggacaacaatcgtgatggacaagaatgaccccaacgtggcaaccgcggtggcggagttgagagatacctcgaactcgtgggtggcaaagtacaggaggggaaaaaagcgctctggga

SEQ ID NO: 271250 - DNA, 373 bp, Glycine max
tacacacgttcgtacaaaggatgatatagcagatatgatagcagctgagatcagcgctaagacctggactgtacattagcctctgtattaacgtctctactcaagcctgaactggctcatgacatgactgaacggacgaatggacaaacttttggacaacctgctacatgcaacgcgagatgcaaatcaagcatcacaataagagttaccatcaaagctgattactatgctgataagctcattacgaccgctaaaacagtgactgtaccagtgaccattaatgaggccatggatgactgcaatgctacctgggctaaaagtgtgccttaaatcactctagataacactcaagcttaccgtaaggcataccgta

SEQ ID NO: 271251 - DNA, 331 bp, Glycine max
caagttaataataagggaggaaagggtgcattactatctagttcaccacactagcaatacgtgtggactcattgctaaatggccaccaaattttgcatttcatccgagggagaacaaaatactcttctcactgaaacacccggttctcgtttctctagagtccatatcctgaattgtccatggggtttgcagcagatatggcacttaattactttatctcaactatcacacaaactgacatttataaggtaactggctactcatgctggatgcgttatgcgatatttgaccacctgggctggatcaatgatcccatcatacaataaagctt

SEQ ID NO: 271252 - DNA, 468 bp, Glycine max
gttaccatttgctcccagtacagagcttaaccgagcttcacaaagatgaatcgggaaaaggggatgaagatggccggttcggttagaactgggggaaagggtaccatgagaagaaagaagaaggctgtccacaagacaacaaccacagatgacaaaaggcttcagagcaccctgaagagaataggggtgaatgccatcccggctattgaggaggtcaatatctttaaggatgacgtagttatccagtttctaaatcccaaagttcaagcatccattgctgctaatacttgggttgtcagtggttctccacaaacaaagaagttgcaagatatactccctagcattatccaccaattaggaccagataacttagaaaacctgaagaagctagccgagcaattccagaagcaggctcctgaatgagccgccggttcaaccacagctcaagaggagaatgatgatgacgat

SEQ ID NO: 271253 - DNA, 457 bp, Glycine max
cccacgcgtccgggcactgactcacacccacaatagtcgggggcagcttcaaagtacctccgcattgtctcctactcttactgttctcttctcttctcatcatttttattttttccaatcaaaccaaacaaaacataagcaccgctcttttctctccgaaatccccatctcccttcacttctgagctctggacgagatcccagatctcaccatctttcacgcactcttccatcagattcaccctttcgtttaacgcaaactcataacttgaaggttaatggctgctccaccggcaagggctcgtgccgattacgattatctcataaagcttctcttgatcggtgacagcggtgttgggaaaagttgcctccttctgcgtttctccgatggttctttcaccactagtttcatcacaactataggcattgattttaagataagaaccattgagcttgat

SEQ ID NO: 271254 - DNA, 450 bp, Glycine max
cccacgcgtccgcccacgcgtccggatccggtacccataacagtatcatgcatataaccatgctttgaaattactgtgaggggggactacgcaatatttttggatcttcctttgatttttaggccaaaggtattccaggtgtttctgttcttatattctcgctaaagcttatattccaggttggaagcttcttttttgtgtgggggggagggttgtgtcaaggatggtatgatgatatagcatctattgactttgcacatcaattgatggctattaatgaatttggcattatggattgaaatccattctcaggaaatggtgaagaataagacactgatattctcatttgattcaaccaagaaagctcgttttggtgtgctacctcggtatgctaaggatgaaaagcttattagatggtttgagttacccaactgcttcatattccacaat

SEQ ID NO: 271255 - DNA, 251 bp, Glycine max
acgcccacgcgtccgatcgacttggtcaaaaaataaaataaaaaaaaaaaaaaaaaaaaaaaaagaaaggaaaaaaaagaaaaaaaggaaaaaaaaaaaaaaaaaaaataaaaaaaaaaaaaaaaaaaaaaaaaaaaaaaataaaaaaaaaaaaataaaaaataaattaaataaaaataaataaaaaaaaaaaatattaaacaaaaaaaaaaaaaaaaatatcacttttttatataaattaaatttatttt

SEQ ID NO: 271256 - DNA, 452 bp, Glycine max
caaatatggaatctgaagcactgatatggggtgacaaactcatactgaagggattgtcattgcatggtgttcatggagcactaccggaagaaaggaagctaggccagaagttcgtggtagatgttgatgcatggatggatctgaaagcagctggcaaatctgatcacttatcagatacaattagttacacagatatatatgatatagctaaggaaattcttgaagggtcacctcaaaaccttctggagtcagtggcacaaaaaatggcagggactactctgacaaattataagcaaatatctgctgttcgagtgaaggttgaaaagcctcatgtggcagttcaaggtccacttgattacttacgcgtggagatacttagacgcagaagcgatttgtcagaatagaaatttcatacgtttggtctctctggtttttggtgctctcattctgat

SEQ ID NO: 271257 - DNA, 424 bp, Glycine max
cttccaacgaccacaaatcactgcaattcaaggtttgaacttcccatggcgagcgctgttgatgcttccggaaacccgatcccaacttctgcggtgttgatggcgtcgtcgaagcacattgggataaggtgccactccgagaatttggagtttctgaagtgcaagaagaaggatcagaaccctgaaaagtgcctcgataagggtcgtgatgttacccgttgtgtccttggccttctgaaggatctgcaccaaaagtgcacaaaggagatggatgaatatgttggctgcatgtactaccatacaaatgaatttgacttgtgtcgcaaagagcagcaagcatttgagaaaaagtgctctttggaatgaaattatgcactgcttgtgtcgaaaataatatcacaagcaatttggagtgagcaaatga

SEQ ID NO: 271258 - DNA, 355 bp, Glycine max
aaagcattgaattcaaaaacttaagttcattccttgtgttttgctttcttcctcaaaaccaggcatgtcgaacacatgcggcaactgcgactgcgctgacaagactagctgcaccaagggaaacagctatggtgttattgtagagactgagaagagttacatcgagactgttgtcatggatgttccagcagctgagcatgatgggaagtgcaagtgtggcactaactgcacttgcacggactgcacctgtggccattaaagaatatgtatgaaaatgtaattggcatgtgtttggcaatacaaatatccaaataatggaatcttcggatgaataaatgtgtgtgctggtatcctg

SEQ ID NO: 271259 - DNA, 394 bp, Glycine max
cccacgcgtccgcggacgcgtgggaagccacttgaggtttgatttgcatacttttggtgttggaagagctattcgatctgccaaaatgaagggacgtgtaagatggaatgaggataatattggagaaattgaagcaaacaagcccgtgaggcaaaaaatcgctgaagtccctttgccaccaccaaaagagacagaaaggcagctctctaaaaaggaaaggaagaagaaggaacttgcagagcttgaggctcttctagctgattttggagtggcaccaaaacaaagtaaagatggtcaagatgagtctcaaggtgctcaggataagacaggtgttgagactgatggagatggagaaaagaaagaaaatgtccctgcagaatccaaaacttccaag

SEQ ID NO: 271260 - DNA, 457 bp, Glycine max
cccacgcgtccggaaaatggtttgtttttcatggagacctctgccaaaactgcgtccaacgttaatgatatattctatgaaatagccaagaggttaccaagggctcagccagctcagaacccagctgggatggtacttgttgatagacccgccgaaggaactagggctgcatcatgttgttcataagtatttgaactgtatttgcactccccaaccctttttaattaatcatgttttctgtggtttgtatgtactacacactttgatatcactgttatgtggagctccaactgcaatttacaaaacacaacttgatctggtgcaaaatatatatcctttggacgtgtagtttgtgtcccatgatttgtttcattgtttgggtatacgaggtgaaaaagcattaatgttcagcttcattcgtatgcttctaaacaagattagtgattctttgcaaaaa

SEQ ID NO: 271261 - DNA, 417 bp, Glycine max
gagactagttctgtatttagattacatggtttaaatggcatcattcaccatgacagcttcgatctggggctgccgagctgtggccaaacggtcggcagtggctgcgcagaggagattactcgtagtgagtgctgccaaagctgaaggggaaaaggtcagttatgacaacaatgatagcaatggaaggaggaacttgatgttcgctgtggctgctgctgctgttttctctgttgctgggatggcagtggcagatgagcctaaaccaggaacctcagaagccaagaaaaagtatgccccggtttgtgtcaccaatcctacagctaggatttgtcgcaattgaggatctcctgtttcattttacctttgatgatcggaaatgtacgttggggatgtaataattgtttttgaattaatatg

SEQ ID NO: 271262 - DNA, 452 bp, Glycine max
cttccccatggaaatcttaagccaacagatttagtgttagcaggccctgatttcaatgctggtcggactgactacggtctgcaccggctgatgacgccggctggaattgcagagcagatactaaatctcggagcccttggataccgtgctccagaacttgctactgcatccaaaccagttccatcctttaaggctgatgtctatgcacttggtgtgatcctaatggaattgttaacaagaaaaagtgcaggtgatatcatttcagggcaatcaggtgctgatgatcttacagattgggttaggctgtgcgagcgagaaggaagggtaatggactgtattgacagagacattgcaggtggggaagaatcctccaaagagatggatgaactgcttgcaatatctctcaggtgtattcttcctgtaaatgagaggcctaacattagacaagtttt

SEQ ID NO: 271263 - DNA, 433 bp, Glycine max
cttcaagaaagacactggtgacacaagggagactcctgccattgatgtatgccaggggctactaggtgataaggccaacctgagcatatacgacccgcaagtaaccgaggaccaaatccagagggatctatccatgaacaagtttgattgggatcatcctatccacttgcagcccacaagtcctactactgtgaagaaggtcagtgttgtttgggatgcctatgaagcaacaaaggatgcgcatggcctttgcattctaaccgagtgggatgagttcaagactcttgattaccagaagatatttgacaacatgcaaaaaccagcatttgtttttgatggcagaaacattgtggatgctgataagttgcgtgagattggcttcatagtttactcaattggtaagccactggacccatggctcaaagacatgcct

SEQ ID NO: 271264 - DNA, 268 bp, Glycine max
gccttttcatatataaatccttccaactactttataagttattgcaatgatatcaaaaaccaagcaaatcgggaaagttctgttgccgtcatacatggattcctatttaaattgtgcataaccgtatggataagcaatacactaactctttaattgcggatccaatttggatccttaagatgtatcggcactgaattttttaatataataatatcgatacatactgattctgaattaagcgacctctattgattcaaactctctatct

SEQ ID NO: 271265 - DNA, 412 bp, Glycine max
cccatttttcacaccaccaacacaagatgtttctccacattgtgttcctccttttccttctggcatccacttcccatgccactgtccaagacttctgtgtggcagacctcaaaggtgcagacacccctgcaggctacccctgcaagccacctgctaatgtcacttcagatgactttgtgtacactggcttagctgaagctgcaaatgtcacaaacataatcaatgctgctgtgaccccagcttttgttgctcaattcccaggtctcaatggccttgaactatctgcagcaaggttggaccttggtcctagtggtgttatcccactccacactcatcccggtgccaatgaactactcattgtgcttcaaggtcacatccttgctggattcatatcttcaggtaacatagttta

SEQ ID NO: 271266 - DNA, 285 bp, Glycine max
cccacacttccgaatcatactactttaacactcatcactgacatcatcaccgtatccaactgtgcaactgataaacatacatgtggcgagcagaaacacacaaaacacactaaatagctatatatatcctgccaacttacatcatctttctacccccaaaaacatatccaaatacatttcttcggatgccacaatttacttatcatttggcaggaacgattcaaatgctcttagtttgcgacccgctccaattcaatctcctaagaagaaccatttcttattcct

SEQ ID NO: 271267 - DNA, 462 bp, Glycine max
  unsure (1)..(462): unsure at all n locations
aacccaaccggaccggggctatcaaaggcagaggagagagtaacgaacgttgcttctaactggtcagaatcatgtcttggtgcaccattgagtccgatcccggtgtgtttacagaacttattcagcaaatgcaagtgaaaggagtacaggttgaggaactttattcattggatcttgactctctcaacagccttaggcctgtttatgggttgatttttcttttcaaatggcgtccaggagaaaaggatgaccgagtggttatcaaagatcccaaccctaacttgtttttttgctagtcaggtaattaataatgcttgtgcaacccaagcaatcttgtccattcttatgaattcaccagacattgacattggtccagagctgacgaaattgaaagaatntaccaagaatttccctcctgaactcaaaggtttggccatcaataacagtgaggccatacgtaca

SEQ ID NO: 271268 - DNA, 455 bp, Glycine max
  unsure (1)..(455): unsure at all n locations
cccacgcgtccggtgctttctccactgcctaaaccgactctctctctctgcctgtgcaagcgggttacttggctgggtgtgagtgattgccccaatggccgcgtgtggctatatatctgctgccaacttcaatcatcttgttggcgccagaaacttatccaaattcagttcttcggatgccacaatttcgttatcatttggcgggagcgattcaatgggtcttagtttgcgacccgctccaattcgtgctcctaagaggaaccatttctctcccttgcgtgtcgtttgcgtcgattatcctcgaccggagctcgaaaacactgttaatttcgtcgaagctgcttacttgtcttccaccttccgtgcttctccgcgtccactaaaacccttgaacatcgttattgctggcgcangattggctggtttatcaactgcaaaatatttggctgatgctg

SEQ ID NO: 271269 - DNA, 322 bp, Glycine max
aaaatgtggcttgtgcatctctcaaccccttttctgaacggacatggtcattccaccaccgttctgtccaagcacagttcgggggtgactcagacccactgggccccaccgagtttcctgcctcaaatcaatgcgatgaagacaatgcatgggagagtggtgtgctccaccagcgacaagacggtggcagtggacgtggtgcggctggcccctcacccaaagtacaagatgctcgtgaggaagaagaagaagtaccaggcccacgaccccgataaccaattcaaagtcggcgacatcttccagcttcataagaccaggccca

SEQ ID NO: 271270 - DNA, 347 bp, Glycine max
ctcctggcgcctgagacccttcgatttcggctatgcccccgggctgccgcgtgactgggcctcgtcggggctacgatttcacagcaccttcatcggcgacgcctcgctcacaaagcgcccgatgggccgcgtgttgaacccgctgcgcgaaatgggcgtgcaggtgaaatcggatgacggtgaccgtcttcccgttaccttgcgcgggccgaagacgccgacgccgatcacctaccgcgtgccgatggcctccgcacaggtgaagtccgccgtgctgctcgccggcctcaacacgcccggcattacgacggtcatcgagccgatcatgacgcgcgatcatacggaaa

SEQ ID NO: 271271 - DNA, 465 bp, Glycine max
  unsure (1)..(465): unsure at all n locations
cccacgcgtccgacctatgcacccagagacgaggaagagcatgctgagaaattgatggaatatcanagcgagcgaggtggaaaggtgaagttacaatctatagtgatgcctcttactgagtttgaccatgaggaaaagggagatgcgctatatgcaatggaacttgccctgtcgttggagaagctgacaaatgaaaagctgcttaacttgcacagtgttgcctcaaagaacaatgatgtgcaattggcagattttattgaaagcgagtttttgggtgaacaggtggaagccataaaaaaaatctctgaatacgttgctcaactcagaagagttggcaaaggacatggtgtgtggcactttgatcagatgctactccatgaggaaggagttgctgcttgattaacattttttttctacctctcgttcgtgcatctagttagttattcggattagtattttcaggtc

SEQ ID NO: 271272 - DNA, 454 bp, Glycine max
tgcttatgaggctgttcgccttcacagtcactcttgtcgctgctatagacattgcggacgaggagcaaaccaaggttggtcccattcaacttataaattccttaccacctttggatgttcctctcactgctaagtggcatcaaatgtccgccatcgtgtactttctggtgaccaatgcaatagcatgcacgtatgcagacctgtctctactccttgccctcgcgaatagaagtaaaagcaaaggcttgtggacattgatcgctgtcctcgacacattcatggtggctttgctcttttccggcaacagagccgccgctgcagttggtgtccttggctacaaatgaaactctcatgtgaattggaacaaggtgtgcaatgtctttaggaaattttgtgatcaaatggctgcttcaattggtgtgtcactgattggatcattagcattcctcttgct

SEQ ID NO: 271273 - DNA, 303 bp, Glycine max
gaacgaccgacccgacggctcgatacccacacccatgacacattcgtgtttactgtttttagcaccgtactaatataatggggaatagtgcaaaatacatgggtattgggtttacaaatataacttgaccttgtatgatgaatggattaacaagatctattgcaccatcactgaccatgactcttaaatattacatacaagcaaatttctattctctctaacattatacatttgtgatgaagaaccctgcccaaacaggccgtaacacaaacactcttgccgatcgatagctaccacacatac

SEQ ID NO: 271274 - DNA, 351 bp, Glycine max
taccactcttaccaaacactttgctcagacctaagcttttgcatcacttagactcctcaatgatctgttcatcatctaataccagttgcaaccgtgccactcccatcctaataacttcaatcactttcctcaatttcaaggctgtctttcacaccaaaaacaccaacatattacataaacctacatttctagcaacaatttaagatttcaattcattcactctttcccaccatttttcattaataatttaaaaactctttactacctatcataccattatgattcacaattttcaaatgatatactattcctacattattaatatattacatttccttgctactatattct

SEQ ID NO: 271275 - DNA, 416 bp, Glycine max
ctcgaagtccatcccaaggacacatttgtgttcagtatagatggcaccgtactctctaatattccatactacaaaaaacatggatatggggtggagaaatttaactcgaccttgtatgatgaatgggttaacaagggcaatgcaccggcactgcccgagactcttaagaattacaacaagctggtgtctcttggcttcaagattatattcttgtcaggaagaacactggacaaacaggccgtaacagaagcaaacttaaagaaggctggctaccacacatgggaaaaattaattctcaaggatccacaagatccttccactccaaatgcagtttcatacaaaacagcagcgagagagaaactgataaggcagggatacaacattggtgggatcattggagaccaatggagcgatct

SEQ ID NO: 271276 - DNA, 463 bp, Glycine max
gaaatggcttcctcaatgatctcctccccatctgttaccaccgtcaaccgtgccggtgccggcatggttgctccagtcaccggcctcaaatccatggctggcttccccacgaggaagaccaacaatgacattacctccattgctagcaacggtggaagagtacaatgcatgcaggtgtggccaccaattggcaagaagaagttcgagactctttcctacttgccagacctcgatgatgcccaattggcaaaggaagtcgaataccttctaaggaaaggatggattccttgcttggaattcgagttggagcacggtttcgtgtaccgtgagcacaacaggtcacctggatactatgatggacgctactggaccatgtggaagctgcctatgtttggctgcactgatgcttctcaagtgttgaaggagcttcaagaggctaagactgcataccccaatggcttca

SEQ ID NO: 271277 - DNA, 456 bp, Glycine max
acgcccacgcgtccggtttccgtgactgagatgtctggaggtgttattcaacaaatggtgatgagtaaactgcacccggggtttactaactctcccttgttgtcacccatcgtagcaaaaaaagatgatgctggctctactggcagtcagtccttaagagcacttgcattaattggagctggtttgtcaggtcttttcagtttttcaacaatggcagcagctgatgaagctgaacatggcctggcatgtccaagctatccatggcctcacaagggaattcttagttcatatgatcacgcttcgactcgtcgtggtcatcaagtttatacagaagtctgtgcttcctgccattctatgtctttgatatcgtatcgtgatttggttggtgttgcttatacagaagaagaggtaaaggctatggcagctgagattgacgtggttgatggccctaacgat

SEQ ID NO: 271278 - DNA, 382 bp, Glycine max
aatgaaagaaagcacaaaaaacagcgccctagatttgctcttctttgcttcaggggaaagaggaaaacaaataacgatggcgtgcgcttctatcctccgcagacttctcttcgcttacgtcttcatacgtctctgcttaccaagaatttaacgaattttgagtagatggacgacgctgcagcaaaagcactcagacctaatattgatgcctttacacatccagtgcatactcaagttggcttacaacttcctgagatagatctgaataccataattgctgaagctattgcttaaaagggcctaggaggcgttctcttcatatgcggcagctactatgcagctttgcttgtgatactgcaccagctgatttgcaccctaatcc

SEQ ID NO: 271279 - DNA, 447 bp, Glycine max
cccacgcgtccggctctcttggactcagttcagtttcacgaccgatcctacaatggcgacagtcagggtttccttttccgctaaaaccctaactctaccttatcaccccaaaaccccaatctccaactttaccccggtaacgaatcttcgcctccctccttctatcgtgacccgaacccgcaattgtaaccggattcgggcggcgctggatggggatttctcggcgaaaaggagcagcagcagcaacaacaacgaccagagggagacgataatgttacctggttgtgactacaaccattggctgattgtgatggactttccaaaggaccctgcacccacccgtgaacagatgattgacacgtacctcgacactcttgccactgtcttgggaagcatggaagaagctaaaaagaacatgtatgcctttaacaccaccacttacactgg

SEQ ID NO: 271280 - DNA, 261 bp, Glycine max
aggaaccctagctagggtttggaagaagctgatccgagaagatggtgcagcgtctcacctacgcgcaaacgccacagctatgctaccaaatccaaccagcacagagtcgtcaagactcccggtggcaagcttgtttatcagaccacgaagaagagggccagcggacccaagtgccctgtcactggaaagaggattcaagggattccacatttaaagccagcagagtataatagatcaaggttacacagaaaccgaaagact

SEQ ID NO: 271281 - DNA, 417 bp, Glycine max
ttaagcagaccgggaaaaaacagtttcattgtgatgattgtgggatttgtagacttggtgggcgtgagaattattcccactgcagtaagtgtgggtgttgctactcaaatactctgcgtgataatcatttgtgtgtggagaactccatgaggcatcattgtcccatttgttatgagtatctttttgactcattgaaagacattgctgttatgaaatgtggtcacacaatgcatagtgaatgctacctagagatgctaaagcgtgacaagtattgttgtcccatatgctccaagtcggtgatggacatgtctagggcatggaagagaattgatgaagagattgaagcaactgtcatgccttgatgatatcggtacagaaaggtttggatactatgtaatgactgtaatgacacaactg

SEQ ID NO: 271282 - DNA, 410 bp, Glycine max
  unsure (1)..(410): unsure at all n locations
ttttgaaaagaaacttcaacttgttggtgttggttatcgtgctatggtaaaagggaacgaggtcgtgctgaatcttggattttctcatcctgttaagatgataatccctgatggcctcaaagtgaaggtggaggaaaacaccagaatcacagttagtgggtatgacaaatctgaggttggccagtttgctgcttcaattangaagtggagacccccagaaccatacaaaggaaagggtgtcaaatatgctgacgaagttgtaaggagaaaggaagggaaagcagggaagaagaagtaatggggagtttcaatttttcattttcatttatctcttggtgtttttcctcgcttgttagtaatggaaatggaaatattttacccaagtaaaagaaatttatattcattgagat

SEQ ID NO: 271283 - DNA, 459 bp, Glycine max
ggttcaccccaccagaacttgattcaaacaccccttccccgatcttcgggggcggcaccggcgggctggtgcgcagggcacaggtggaggagttttatgtcattacgtgggactcacccaaagaacagatctttgaaatgcccactggcggcgccgctatcatgagggagggtcctaaccttctcaagttggccaggaaggagcagtgcttggctcttgggactaggctcaggtccaagtacaagatcaagtaccagttctacagggtcttccctaatggggaggttcagtatttgcaccctaaggatggtgtttaccctgagaaggtcaacgccggacgccaaggggtgggtcaaaacttcaggtctattggtaagaatgttagtcctattgaggtcaagttcactggcaagcagccctatgatttgtgagcacacaactctatctttatcatcatca

SEQ ID NO: 271284 - DNA, 323 bp, Glycine max
ccggaccggaatgagccgagtcgaccgcacgcatacggtttattatcatttatgattgattatgacttttgctaaaaaaataataaatttataatatggctaagggaaaaggggaaaaaaaaaaaaaaaaaaaaaaaaaaaaaaaaaaaaaaaaaaaaaaaaaaaaaaaaaaaaaaaaaaaaaaaaaaacaaaaaaaggccagcgacataaaaaaaaaaaaaataaaaaaactcataaaaaaaaaaaggggccgctttttaaaagaaaccaaagttacaatccccgccttggcactttaaaacttttttattgggaaaaccaa

SEQ ID NO: 271285 - DNA, 350 bp, Glycine max
gcgcccacgcgtccgcttattcttcattagatcctcagtttgatcgaccctcatttctgtgaactgagagtgctgtaggtgttattcggcagttatttaggaggaaactccaatctcattctcctaattcttcttttaagtcatccattatcacaaagaaagatggtgctgactctactggcatcaactccttaagagtgcttgcttttgttacagctggtgtgtcagggtttttaggttttgcaacaacagcatttgctgatgaagctgagcatggcctgtcatgttcaagctatccatggcctaacaaggtcatccttagttcatatcatcatgcttcgattcgtctt

SEQ ID NO: 271286 - DNA, 346 bp, Glycine max
cccacgcgtccgctagaaacagtgcgatgaaaatgactgcccttgatttcttcgtcgctacaactctggtagcatggtaatgccatgcgtacgatatgtgccctcatagaatgaacactgtctatggtgcacgtactccggatgtgaaatgcgcaagatggaggctggctaaggaagctcacaacatctatggctatgcgaccattcctgatgagtgcgtcgatgtaacacaggaatacatacatggcctacaatatataacagactacctaacagttaatcaactagcttactttcatgccatagacctcgaagtccatactaaagacaaatttgagaacactat

SEQ ID NO: 271287 - DNA, 322 bp, Glycine max
cccacgcgtccggatcaaccctgacccctaaggccaggggtttttctcggcttcttcagattcctgaaatggcgtctgtttcagctttagccaagtacaagctcgtcttcttgggtgaccaatccgtgggcaaaaccagcatcatcactcgcttcatgtacgataaattcgataacacctatcaggctacaattggtattgattttctatcaaaaactatgtatctcgaagatcgaactgttcgactgcagttgtgggatacagctggccaggaaagatttagaagtcttattccaagctacattagggactcatctgtagc

SEQ ID NO: 271288 - DNA, 412 bp, Glycine max
gatcgagatctctttgctgtttgccgaggatcggagcttctccgcgcccgtcatggaggtggctaggactgtaaaggacgtctccccgcacgatttcgtcaaggcgtactccgcccacctcaagcgatccggcaagatggagcttcctcactggacggatattgtaaagactgggaagttcaaggagcttgctccatatgaccctgactggtacttcattagagctgcttcaatggcgagaaagatctatctgaggcagggagttggagtgggtgcttttcagaagatatatgggggtcgcaagaggaatggaagtcgtccaccccatttctgcaagagcaatggggcaattgcccgcaacatcctgcagcagctggaggctatgaagatagttgaactagatcttaaaggg

SEQ ID NO: 271289 - DNA, 302 bp, Glycine max
gaccgacgcgtccgaccacgcgtccgcaacggtttagtctattgtaggaaaatggggagctcttaggtcgcgcggaccagggtcacactataacggccatcagttctgaaagattgttgaagcccatcttgtcagctgatgaagtatcagtctgtgtacatggaacctacaggaagaatcttgattccatcttgaaatcatgtctgaaacgcatgacaagactacatgttcacttttcatgtggcttgcctacaagcggcgacgtgatctctggcacgctactgaacattatcatactgatg

SEQ ID NO: 271290 - DNA, 465 bp, Glycine max
  unsure (1)..(465): unsure at all n locations
cggacgcgtgggcggacgcgtgggcggacgcgtgggctttgatgaatatgcagtgtgcttttttaagtcaaagcatcatcaaagcacactgcatcctaacagcacacgtacgtagaaaggtgaagttccaggtcttgcacaacatacacaacacaccataatttattttatatacaatcttatggtgcccaagatgcagatgcatggactaattaaacaacaacgttagtctgataggcagtgtccatagatatattgggtacccataaaatggccttgcttccaaggaaatggcaaacagggttagttccaggatcaactcccatgagttcatgaagcatgtgatgattcattccagaagtatctgagtggcatacagcaagtgcctgagttttggttccatcaccagccaccaatggaaccatgaaagctggtgtttcacggactntatggcagtaaaatact

SEQ ID NO: 271291 - DNA, 342 bp, Glycine max
gcaaatgcagcaatacttgaggctgatgatgatgaagaactcttggagaaagtaaagcgtgacagaaagaagagacttgagaagcaaggtgtgatcagttcttccaaacaagaaacagggtatcttcaagatctggtgtacaagctaagcacggttggtcaagcacttgaaaagaatgatctatctgctgctggctctgtccttggaggaaacgcggacgcagattgcgtccaaagggctaatatagccttcaattaactgagctccagtcctgaagagaagactgaggtatactcattcaactcctcattagcttcactaatttcatcagtttctaaaatg

SEQ ID NO: 271292 - DNA, 420 bp, Glycine max
cccacgcgtccggaatcgttttcttcagaaaatttgccatcgttgagggaagcgcgagagccttcgttgttcaagatgagagctaagtggaagaagaagcgcatgaggaggttgaagaggaagcgccgaaagatgagacaaagatctaagtaggtgcttgaacaaggagtggagatgatgtgcttttccatctgctaccagcttcatgacattttatgctgtcatggctcttatgatgatcttgaggtctagtggcgaggggagcttccatcttgactttagtttagctttactggtctaaagattgctgttttagtgtgggttaagttatgatattgagagttttgtgttatctaattatgtactggtacgttttgtatactttttggtttatcttaatagcttaaatattagtatttt

SEQ ID NO: 271293 - DNA, 433 bp, Glycine max
cccacgcgtccgggaggagagatagatggcaggcatgtctgacatgcagaacaggcaagcgggaccactcccccctggtcaattcaggggcgctccccttactcgccctcgctctgatcccgtagaccgtgagaaaacttgccctcttttgcttcgggttttcaccaagactggtggccaccactcggacgaagaatttgctacgagaggaaaggagcccaaagatgaagtccagatatatacatggaaggatgctacacttcgagaactaactgacctggtcaaagaaggtgctcttgcagcgaggaaaagagatgcgaagctgtcatttgcatttgcgtatcctgacaagcgtggtcgttatgtcgtgaggccggttggcatggcattttcgtatggaaataatcggcgattggatgatgcaaagacatta

SEQ ID NO: 271294 - DNA, 429 bp, Glycine max
cttgcacggtcgatgagttcaacgagtccatcgactgcatcaagctggtgtctgaggaacttgcggactgggtttcggccagtaggcctgagcggtggtcagatgcgttcttcaagggtctgagacacggacattactcgtctaacgctgcagcgatgttcaaggaatggctaccgctgaaacggattgaaccttcggtcgttcagatggttgacattgtcagatgcaagatgatggaaatgatatttatacgaagggagtcttctaggacttggactgagattcttacaccgtccacgagctgcaagctgcaggaagagatcaacaaatcacacgggctcgatgttgtgtgttcgaccgatagtgtgtttgatgtgcgagatgaatctctgcatgtcgtgaacattgagaactgggagtgcatatgtc

SEQ ID NO: 271295 - DNA, 286 bp, Glycine max
actcatacgacacctacaccacacaaatgccttctctaacatgtagaaattgtctccaatggatgttagcgaatttgaaaagagttgacagtctctgatcgtctattcgatcatacacttatttgcccttactcgcgtcatcttaaccacgcacttctacttcaaaatcagcgatcacatcttttcaaaatccccgtctacggcttctctgtcagtttaatcgatgaaaccaacattttcgaatggagcgtgaccataaatggaccgtccgatactctttacgaaa

SEQ ID NO: 271296 - DNA, 361 bp, Glycine max
ctgatgcgctacattgttattggggcatgcttcttcggacaaagaacaccctttaataatgaagctgatggtactaacatgacacttaaaccaaccactaatgcagttttaagcgcttaattagtaggctttggcctatttggtgtaccttcctaagatgaagaatggtggcatcgatccaaaccagaaatcagattcaaattcaatggattgattattggttcatgatctgatcactttgtcatatccataaagaagggagaaaaagaaagtttggaatttgcagaagctttgcaagtattttaagttgcaataaccgtgagaaatgaaccactgtggaagatgttcaatataatacata

SEQ ID NO: 271297 - DNA, 257 bp, Glycine max
  unsure (1)..(257): unsure at all n locations
ctggagagttggaaagtggaaatgcaggagagccagcaaaactgatcaggcagagataccgtgaagccgcagacttgatcaagaagggaaagatgtgtgctctcttcatcaacgatcttgatgcangagctggtcgtcttggtggacccacccaatacactgtaaacaaccaaatggtgaatgccacccttatgaacattgctgataacccaaccaatgtgcactttcctggattgtttaccagggaaaagattccc

SEQ ID NO: 271298 - DNA, 430 bp, Glycine max
ccacgcgttcggaggagtgttacgggagggcgatactggcgagccccggggacggtgaggtgctggcgatgtatggggggcttgtgtgggaggcttaccgcgacagcgagagagccggcggttatttacagcgagcggtggagtcttcgccggatgacagctatgtgctaaggtcgtatgcgaaatttctgtgggatgccgaagaggacgaggaggttgggagctcagcgtcatcgacgccaccgatggtaaagtccttgtgatggacattctggtaactgctgaactgactgagtatagaggcaatctctaagttcgatctataacaacttgtagagcactgagggtgttgttgacgaagactgaaggcgttgatgacgaaggcgatggtggaggcttttgtgccaagcactattgatatgctatggat

SEQ ID NO: 271299 - DNA, 292 bp, Glycine max
aaaagtagaggctgcaccggtcgggttcaccccaccagaacttgacccaaacaccccttccccgatcttcgggggcagcaccggcgggctcctgcgcaaggcacaggtggaggagttttatgtcattacgtgggactcacccaaagaacagatctttgaaatgcccactggcggcgccgctatcatgagggagggtcctaaccttctcaagttggccaggaaggagcagtgcttggctcttgggactaggctcaggtccaagtacaagatcaagtaccagttctacaaggtc

SEQ ID NO: 271300 - DNA, 314 bp, Glycine max
cccacgcgtccgctcgttatagaattgcactggggattgcacagggtttggcatacctccatcatgatttgcttcttcctattatccaccgagatatcaagtcaactaatatcctgttggatgttgattaccagcccaaggttgcagactttgggattgccaaggttttgcaagcaagaggagggaaggattccacaacaactgttattgcaggaaccatatggttacttagccccagaatttgcatattcatcaagggccaccaccaagtgcgatgtctacagtttttgggcgatttggatctaatacctcac

SEQ ID NO: 271301 - DNA, 377 bp, Glycine max
  unsure (1)..(377): unsure at all n locations
actagttctagcttgcgtgtggaacaccttcaggagacattgtagttgtaaattcaacagatatgcagattcacacaatgataaaaaaggctcaccttggcatagtaactgctttagcattctcccctgattcaagggcggtggcttctgtatccatggattcaagtgcgaaggtaacaataattgaagagaagaagactaatgggcttagcttggggattgcattatttatcatcctacttgcagtagccgcttacttnctgaggcangaaatttgaaagtgaaaggtccaaagatttgcttattggaatatgaaaacattagcatcttgtgaatgctactgcttaattttgatgcattgtcattttttaaggggt

SEQ ID NO: 271302 - DNA, 448 bp, Glycine max
agcagttattggagcatgtgctggtaaacaaatcaggtactctatagatccttttggctgggtttgtgcaaatatacgtcgccagtcagcccacgatgaaccaagaacacatggagcagttattggagcatggtttggggcttggccaatgcctcttgactgggagaggccatggcaggaatggcccatttctgtgagctatgggaccgtagctggttacctggtggcattggttgcatcattgggctttgttcttgcttgtggtagatcacaacatatcaaaagagaatgaagtgctagtagaagcatctgattatactaattgtgggtgagatgtagaagcataatatcttgatgaactagacatggaagctgtcttctttaagacctgtttgtaagcaatggataatgaattatgatgacaaagggaaaattggtgctataaaac

SEQ ID NO: 271303 - DNA, 438 bp, Glycine max
  unsure (1)..(438): unsure at all n locations
ccacgcgtccggaggagtgttacgggagggcgatactggcgagccccggggacggtgaggtgctggcgatgtatggggggcttgtgtgggaggctcaccgcgacagcgagagagccggcggttatttccagcgagcggtggagtcttcgccggatgacagctatgtgctagggtcgtatgcgaaatttctgtgggatgccgaggaggacgaggaggttgggagctcagtgtcatcgtcgccaccgctggtaaagtccttttgatggacattctggtaactgctgaactgactgtgtatagaggcaatctctaagttcgatctataacaacttgtagagcactgagggtgttgttgacgaggactganggtgttgttgacgagggctaaggtggaggcttttgtgccaacaactttgtatatgctatggatggtcagtt

SEQ ID NO: 271304 - DNA, 437 bp, Glycine max
cccacacatacagaggagagaatatggcgaccacaggcgctttgtgtggcacgatgtttgacaccttcttcctgaagaggcaggcatcagtgaacatgacaagcttcaaggctaacgctgctgtctttggtgtaaaaggaggacgaggaggtcgtgtgagggccatggcaacttacaaggtgaaactgataactccagagggagagcaagaatttgaatgcccagatgatatatacattcttgatcaggccgaggaaaatggcattgatcttccctactcatgcagggctggttcttgctctgcatgtgctgccaaagttgtgagtggcaaactggaccagtcaaatggtagcttccttgatgacgacccaattgatgcatgatatgctctcacctgcgttgcttaccccacctcagatcatgtcattgagactcac

SEQ ID NO: 271305 - DNA, 257 bp, Glycine max
gccaccgtcacttctgcagccgttgctattccctcattcactggcctcaaggcaagcgcaggcaaagtgagtgccgcagttaaagtctcagctccccaagccacaaggttgggcatcaaggcttcgctgaaagacgttggagtcgctgttgtggccactgccgcgagtgcagtgctggctagcaacgccatggccattgaagtgttgctgggtggtgatgacgggtctctggctttcgttcccaacaatttctccgt

SEQ ID NO: 271306 - DNA, 165 bp, Glycine max
gtacccttctcctccaccaccaccatataagtacccatctccaccacccccagtctacaagtacaagtctacaccacccccagtttacaagtacacatctcctgctacaccctataagtgttcatctactccaccaccaccatacaagtacccatcaccacacaa

SEQ ID NO: 271307 - DNA, 394 bp, Glycine max
  unsure (1)..(394): unsure at all n locations
gcaaaagccagaaaaaactgtgtttgaattaaaactcgagtcctacgaagtggcttccaaaattaaaatcatcaaggaggtccggggctttactgatttaggtttgaaggaggcaaaggatttagtggaaaaaacacctgctgttataaagaaaggtgtttcaaagtaagaaggggagcagataatagagaaattgaaagctcttggtgcaaaagttgttatggaatgaagtgatgtatgttgtttcttccagctttcaatattttagttgtctgaaattttgaaaatttcagattgctagccaaggatactgcaaattttgctagtgctgtcactgtgtgttaatgttttagcataaactggaatttgattntatgcacgtttgcaacattat

SEQ ID NO: 271308 - DNA, 312 bp, Glycine max
ctttctctcttctctctacacccaaaccctaactaccgaccctgttcccgtgtcgtatccgtcatgaaaggaggaaagtccaagaccgaatctaagagagccgatcccaaacttgctgtgaataagaagggagccgccaccaatgctaggaaacccgccggcaaggggaaggcagcgaaagaccctaacaagccaaagaggcctccaagtgctttcttcgttatcatggaggagttcaggaaggtattcaacaaagaacatcctgaaaacaaagcagtgtttgctgtgggcaaagctgctggagcaaaatgg

SEQ ID NO: 271309 - DNA, 426 bp, Glycine max
gtataaggcaagatcttggttcaacagggttgttaccctttcccctgacgggggagacgggagagctctctgctacaagtttgaacttcagcatggaagtgaagagagccaaaaggatgttttgaaaagatgtgttgctgcagagccgaagcatggagaaaaatggcaagtgatttctaaggctgtcgagaattcccacttaccagttgaagccattcttaagaaaaccgtggttgctatgggtaaagaagagacgtctattctttccgatggcaccaaatctcaggctccatcccactgaagtagagattacataggagtggttgctgcatgatgcgtaaaggttttcttcatatagggcgcttctgtgctaatgatggtacgcactcaacgagttggttgtcactctttgcttatatgcctttt

SEQ ID NO: 271310 - DNA, 342 bp, Glycine max
ctgaagagttcgaaagcggaaatgctcgagagccatcactcctgatcaggcagagataccgggaagccgcatacttgatcaagaagggaaagatgtgtgctctcttcatgaaccatcttgatgcacgaactggtcgtcttgctggaaccacccaatactctgtcaataaccatatggtgaatgccagccttatgaacattgccgataaccccagcaatgtgcagcttactggtatgtataacatggcatagaatgcccgtgtgcccatcatcgtcaccggtaacgatcgtttcacactctatgcacatatcatccgtgatgcgcgaatcgaaaattctactg

SEQ ID NO: 271311 - DNA, 241 bp, Glycine max
aaaaagagttctttcaaaatgcaaacagcctttaccttctttgaccccaacgttgtgccatgggcacccgcaaagagtgtctgccatattggcatttttcccaccaaattgaaagccccgcgctcctcacctcgttactctccgattagggttgcaaccgtgtagcccgacactttaactgtctactacaactctgcgttctcagagtttcctgcagaagcatgcgaaactgtatgagggg

SEQ ID NO: 271312 - DNA, 333 bp, Glycine max
taccggtctcggaagacccaggccgacgcacacgtgcgcgcacacgtgtgccaaaaacaagcaagctgactcatgaggggcaaaaatgggagcatgcggctccatgggtatgtattaacgatccttgtatattaagatctttaatgtgtgaccattagacgccttattcgagaaagttagcattaggaatatccgatcatataatgcctactgcggaagacattgaccggcccataccgcattaagtacttagcactattctcttgctaatccacgtcctacctcactggcgactttctagatgactacagcttacacactggtgcactttac

SEQ ID NO: 271313 - DNA, 352 bp, Glycine max
gtcagttgcaggaaaaatggtttcgctgaaactgcagaagcggctcgccgcgagcgtgctcaagtgtggcagaggaaaggtttggcttgaccccaatgaagtcaacgaaatctccatggccaattctagccaaaacataaggaagctggttaaggatgggtttatcatcaggaagcccaccaagattcactctcgctcacgtgctcgtcgaatgaaggaagccaagaggaaaggacgtaactctggatccggtagccgtaagggtccaaggaaggcagggtttccaactaaaattctatggttgaggagaatgcttgtgctaaaaccctggtttcgaaggtccaggaattct

SEQ ID NO: 271314 - DNA, 402 bp, Glycine max
cgaggcgatcgcgtcgctgaaggagaggaccggatcgagccagtacgcgatctcgaagttgatggaagacaagcacaaggctcacctcccggccaacttcaagaagctcctcctcgttcagcttcggaaacttaccgccgccggcaaactcaccaaggtcaagaactcttataagatctctgccaagcccgccactgctgtgaagccgaagtccgctgctgccgccccgaaggcgaagccgaagtccgcaactgctgcagctaaggcgaagctaaagccgaaatctgctgcagcgaagctgaagaaggctgctgtgaagccgaaacggaaatcctctgctgtgaagcctaaatctaaggctgcggtcgtgaaatctaaagctgttgcccctaagcctaaagc

SEQ ID NO: 271315 - DNA, 361 bp, Glycine max
acaaaatccgaagctgcaaaattgcttctaagtgcagtaaccgaaacccaatgacccacctagccatggtttggcttcaaacatggctccctgaaccctagcgtttatccctcttcgccaacaacgctgatccgatcccgatctgtttttgattccgatccgatccaattcaatggctggggcagcctctgctctgttcctccttgacatcaaaggccgcgttctcatctggcgcgactaccgcggtgacgtcaccgccgtcgaagctgaacgcttcttcaccaaactcatcgaaaaagacggggatccgcattcttaagatccggatgtgtatgataatggtgtgacctacttgtttata

SEQ ID NO: 271316 - DNA, 271 bp, Glycine max
gggcaaagattttgagcacaatggcctcgacacaatgctttttgcaccaccacgccctcacgactccagctagagcttcaacacagcgcctagttgtgagcaccaaaccaaaccacattgtttgcaaggcagcacagaagcacgttactgtccaagagggtgaggacactactactggccttgtctctcgcaggttggccctcactgagctcattggtgctgctgctgttggctctaacgtggcacctgctgatgcagcctatggagaagc

SEQ ID NO: 271317 - DNA, 299 bp, Glycine max
cacacgcggccggcatcgcctccaccttattctacacattatatatatcctctacatccaggcttggggataccaaagctgcgagatgacaacaactcacacaatatggaaaccctgcacctgttcactcttcttggaagaccactgctttctgtcgcaggattgcaagcaatgttatggcaatggctaccaccagagaggcacccgcagcagaagttgccacgaccgaactctctgatgccgagacgcccgatattgtgaagactattcaaaacacttgggacaaagttgaagacaaa

SEQ ID NO: 271318 - DNA, 357 bp, Glycine max
ggaacgccagcaatggctaaagcagggaaagtgaggagctccatggaggaaaagccttaaagcggctcaaatatggggatgggggcatacttgatagcaactacaattgccgcaaccatgtcaagcccagacatggcttgaggtggatgatgagactcagaactgaaagaacctggcttccgttggggctcagcatcaacctcattgattagatcctgcagggtgtctgaaaccttatatgggctctctactttgactacgctagcaccctggaaaaggatgaagagactggattgtgcgtctaaaccgccatgtgacgaagcatgcacttgtagaaattgcaaagacttatctctt

SEQ ID NO: 271319 - DNA, 374 bp, Glycine max
  unsure (1)..(374): unsure at all n locations
cccacgcgtccgcccacgcgtncggtttaatcttcaagtcacattaattcttcatcttttgtccacattatatcataatttgtttattccacaagctttttgcttaaggaaataatggttcagttagctgattgaaaaaaaaaaaaaaaaaaaaaagaaaaaaaaataaaaaaaaaaaaaaaaaaaaaaaaaaaaaaaaaaaaaaaaaaaaaaaaaaaaaaaaaaaaaaaaaaaaaaaaaaannngggggggggcctttttaaaggaccaaattttacgcccgggggttggcaaggaaatattttttttatggggaccccaaaataaattcaagggcccggtgttaaaaacgggggggggggaaaaacccgggg

SEQ ID NO: 271320 - DNA, 316 bp, Glycine max
ggaagatgagtttgagggcatcagagatagcgaagaagttgaatctgcaacctcacccaggaggtgggttttacgtggagacattccgagaccattccgtccagctttcgacctctcagctcccccccgaatacaaagtggatcgccctgtatcgacctccatctattttctcgttccttctgggagtgtgtctcgccttcatcgcataccctgcgccgaaacctggcatcattacatcggcgaccctctcaccgtagtggaattgaatgagaaagatgggagcgtaaaattcacttgccttggatcagatctgac

SEQ ID NO: 271321 - DNA, 329 bp, Glycine max
atcagcaccacattcacctgagctttttgtgaggattccaaagcatggcttcccttgcagcatccactgctgctgcttcccttggcatgtcaaaaatgcttggaaaccccatcaacctcagtggtgccacaaggccagctccatctgcctataaccctgcctccttcaagactgtggctcttttctccaaaaagaaggctgcacctccaaaaaaagctgcagctgctgctcctgccaatgatgagcttgccaagtggtatggtcctgacagaaggatcttcttgcctgagggtctcttggaccgatctgagatcccagagtacttgacc

SEQ ID NO: 271322 - DNA, 436 bp, Glycine max
  unsure (1)..(436): unsure at all n locations
cccacgcgtacgattgtctttgcctcactttgctgccgtacctaatcggagagctcccggtgactgcgatcggatttcatggctcctaagaaagacaaggctcccccaccttcatccaagcccgccaagtctggtggtgggaagcagaagaagaagaagtggagcaagggaaagcaaaaggagaaggtgaataaccaggtgctgttcgatcaggctacctatgacaagctcctctccgaggcacccaaatacaaactcattactccttccattctctctgaccgtttgaggattaatggatcacttgcaaggaaggctattanggaattgatggccagaggttcaataaggatggtgtctgcccatgctagtcagcagatttacactagagcgacaaacacctagatgtactgggtataatttatgtagtattgat

SEQ ID NO: 271323 - DNA, 382 bp, Glycine max
ctctctttgatacccttttgttctttttggtgctttaatttgcactagcaagggggttggttttatttctgtttgcttgcaacaatggctgtggctaataagttactttctgttttgatcattgccctcattgccatttccatgcttcaaacagtggttatggcatctcatggacatggaggccaccactacaatgacaagaaaaaatatggacctggcagtctcaaaagcttccaatgcccatcacaatgctcaaggaggtgtggcaagacccagtaccacaagccctgcatgtttttctgtcagaagtgttgtaagaagtgcctatgtgtgccaccggggtattatgggaacaaagcagtgtgcccttgctacaacaact

SEQ ID NO: 271324 - DNA, 466 bp, Glycine max
  unsure (1)..(466): unsure at all n locations
agcacctgcaaatcaaccttatcatttacctgaaaagcatgctgcatccactgctcagacgagtgcctcagaatatgccatggaagccttctggtccggcccttaatcctaaacctgttgttagtgttaggcaagacacaattcttgggaagcagtttgaggatgtgaagcagttctacacactcgggaaggaattgggtagagggcaatttggggtgacatatctttgcactgagaattcaactgggttgcagtatgcctgcaagtccatttccaagaggaaacttgtgaagaaatctgataaggaggacataaagagggagattcagattatgcagcatttgagtggtcaacccaacattgttgagttcaaaggggcttatgaggataggaactcagttcatgttgtgatggagctgtgtgcaggtggngaactttttgataggattattgccaaggggcatta

SEQ ID NO: 271325 - DNA, 408 bp, Glycine max
  unsure (1)..(408): unsure at all n locations
cccacgcgtccggagaactaagaaggagaagcaaatggcttcctcaatgatctgttccccggctgttaccactgtcaaccgtgccggtgccggcatggttgctccattcactggcctcaagtccatggctggcttccccaccagaaagaccaacaatgacattacctccattgctagcaacggtggaagagtgcaatgcatgcaggtgtggccaccagttggcaagaagaagtttgagactctttcctacctgccagaccttgatgatgcacaattggcaaaggaagtagaataccttcttaggaagggatggattccttgcttggaattcgacgtggagcacggtttcgtgtaccgtgagcacaacaggtcaccangatactacgatggacgctactggaccatgtg

SEQ ID NO: 271326 - DNA, 455 bp, Glycine max
cggacgcgtgggcggacgcgtgggcggacgcgtgggcggacgcgtggggcgaaatggacgatgtaccagaacttgtgatgagcaaagggatcatgtagcagacgagcaaattttgcgtgtcatttttctggaccctgaacgctctagccctgctttggataagcttaaacggcagctagctgaggctgaggctgcattggaagcaagaaagaagcccccggaggagacaggtcctcgagttgctggtgaaggacttgttatagatgaatggaaagaaagaagagaaagatacctggccaggcagcaggttgaagtggtagattcagtgtaaaatatttctttatttttttggttgtgcccttaatgttctcccatttgtatgtccagaaattgaattgcttggccactgcatatgtcaaatgtggttgagtgacctactaaaaagtgcctaaata

SEQ ID NO: 271327 - DNA, 337 bp, Glycine max
  unsure (1)..(337): unsure at all n locations
cgcaggaggagcacgaccaccgcttccgtatcttcaagaacaacttgctccgcgccaagtcgcaccagaaattggacccctccgccgtccacggcgtcaccaggttctccgatctcactccgtctgagtttcgcggccagttcctcggcctgaagccgctccgccttccctccgacgctcagaaggctccgatccttccgaccagcgaccttcctaccgatttcgattggcgcgaccatggagctgttaccggcgtcaagaatcanggctcgtgcggatcgtgttggtcatttaacgccgntggagctttgaaggtgcccatttttttttaccgggg

SEQ ID NO: 271328 - DNA, 331 bp, Glycine max
gcgcggacgcgtgggtacaaatcctgtccatgctactatttttgctgctttcactcccaaaggggaagggggggaacaactctatgattgcaagccttatacaaacattggcaaacctttttaactaacttgtaacgcttaaatggttttaggagggagtgtttatgttggtgaaagcttggaaaatggctacttctattgtcatgcatagattgaagatttaatgctcaaatacctatttaaggtttctaaaatattaaatgacctaggaagtggaagtaatgttgatgtttgtgtgataaccaaagggacataaggaatatctcacgaa

SEQ ID NO: 271329 - DNA, 366 bp, Glycine max
actgactcttcttaagaaacacctgttcaattatcaagggcatgtctcagctgctttagttcttggtggggttgatatcactggacctcatttgcatactatttatcctcatgggtcaactgacaccctcccatttgctacaatgggatcaggttcacttgctgcaatgtctgtatttgagtctaagtacaaggaaagtttgagtagggatgaaggcattaagctagttgttgaggcgatatgtgctggtatatttaatgacctaggaagtggaagtaatgttgatgtttgtgtgataaccaagggacataaggaatatctcaagaaccaccttctaccaaatcctcgtacctatgtcaatccaaa

SEQ ID NO: 271330 - DNA, 412 bp, Glycine max
  unsure (1)..(412): unsure at all n locations
gcgtcgctccgcaccagtttcaccgcacgaatatcttgttgtttggagcgatccgagaaggactctgtaaacatgttggtttaccaggacctccttacaggtgatgagcttctctctgactccttccgttacaaggaaattgagaatggaatgctgtgggaagttgaggggaagtgggttgttaaaggagcagttgatgtagacattggtgcaaacccttctgctgagggtggaggagaagatgagggagttgatgatgcagctgttaaggttgttgacattgttgacacattcagacttcaggagcaacccgcattcgataagaagcagtttgttaccttcatgaagaggtttatcaagaatttgactcccaagctcgatgcagagcaacangagttgtttaagaagcaca

SEQ ID NO: 271331 - DNA, 439 bp, Glycine max
  unsure (1)..(439): unsure at all n locations
cccacgcgtccgaaacaaatcccagggagccaccaaccatggcttccaagctctgcgactggtgcaaatcagccactgctacgttgtactgccgccccgacgcggccttcctctgcggcgcctgtgactctaaggttcatgccgccaacaagctcgcatcgcgccacccgcgcgtcgtgctctgcgaggtgtgcgagcaggcgcccgcgcatgtgacctgtaaagccgacgccgccgcgctctgccttgcctgcgatcgcgatatccactccgccaaccccctcgccagccgccacgagcgcatccccgtcacgccgttcttcgagtccgtacattcagtcaaggcctcctcgccgatcaacttccaccaccgcttcttctccgacgccgacgctgatgctgacgtcagcaccgaggaggccgangccgcgtcatggct

SEQ ID NO: 271332 - DNA, 333 bp, Glycine max
tggatatggatgggcaattgcaaaatctcttgctgcagccggagctgaaattcttgttgggacatgggtacctgctctgaatatttttgagtccagcctacggcgtggaaagtttgacgaatcacgcgtattaccagatggttcgctgatggagattaccaaagtttatccattggatgcagtttttgacaatcttgatgatgtgccagaagatataaaagcaaacaagcgctatgccggttcatctaaatggacagttcacgaagttgctgaatctgttaaagaagactttggcagcatagatatgcttgtgcactcacttgccaatggacc

SEQ ID NO: 271333 - DNA, 412 bp, Glycine max
atgggatgttgacaatacccggctgaagcatattttcagtaaacacggtaatggtgtgagggctcgggtagtctatgacagggagtcaagtccatcacgtggctttggctttgtcacaatgtctgatgagacagaaatgaatgatgccgctgctgctcttgatggcaagagtttggacggaagggcaattaaggtgagtgttgctgaggacaggccaaggcgtgtctccttttgagcgttagcatatgtagttccccatgtcacctgctggagttctcttgcatttttttaatagctgacgatatactatagtgtcaatttttgtttaaaggaaaatcctttcttggggcgccaatttcagattagatttaaatatttcgttggtattaacttaatgtccagatgaaagtta

SEQ ID NO: 271334 - DNA, 395 bp, Glycine max
tataccccaacccttatacaaccaatccctatcacacacccaaaacatacaggggacatggcttgccttaaagagcgcattaggggctacactgctctacatggttgatatgagtgcacccatggcacatgcacctataacacgcgggcaggaaactagtgatcacgcccaattgcatcgattacctccacaaaggacaaacgccgacacatgatgctgcaacggaatgaagagcctcaatgccgccgccaagaccaccgacgaccgccagacggcgtgcaactgcctcaagtcggccgccagccaaatcttcggcttcaacgccaacaacgccgcctcgctccccggcaaatgcggagtcttcatcccctacaagatcagcacctgcaccaact

SEQ ID NO: 271335 - DNA, 248 bp, Glycine max
acgatatgtatcgccaatagcgaagtgtgttgctgcattcgcagctaaaattcttgttggggcatgggtacctgctgtgaatgtttctgaatccactctacaccatgcaaagttctacgaatcacgcctattaccagatatgatcgctgatggagattaccaaagcttatccattggatgcagttcttgacaatctcgatgatgcgcctgatgatataaaagcacacaatcgctatgccatatcatct

SEQ ID NO: 271336 - DNA, 395 bp, Glycine max
cccacgcgtccgaaaaaacagattcaacttttagcatacctgtaatcaatgcggggcatgggcatatacaacatggcactcaggcactaatacatctttataccattgaaagagagataggacaactgtaccaaattaaagttgggcttgtgggaaaccttgctaatgagagaacagttctctcacttgcatacttactagccaagtatcatgatgtgaaaatttattttgtctctccaaacgcggttaaaatgaacgatgacataaaatactatgtgacattaaatggagtagagtagtaagaaagtgctgatttgttgtaagatgcttataagtgcgatgtggtttattaaactcgcattcataaagaaagatttagagagaaaattgaactt

SEQ ID NO: 271337 - DNA, 368 bp, Glycine max
cccacgcgtccgaacgaatttatctagacttttttaaaatgacatacaaacatgaaaacgttatttatttagatggaaagggaaactacaccactattcatccaatatcacccttcaatatcaaatactatactttatacgctttacataggccaaaatcatatacacacttaataaatgaataacatattgagaattttacatgactcaaaatatttaacacatatgacctctacaataacagtaatattctactacacatacaaaaatttaagccatactatataccactcatcgagaagtatatcccaacatttcttaagcttagtaactttaaaacatacacatctatatggaatcaacatcat

SEQ ID NO: 271338 - DNA, 335 bp, Glycine max
gacaagtggtcatgagcatggaggcaagaattggagtgatgggcaccaagttgtgtatgaggagctatttctaattctacggagaggttggtcctgtcactgtcgagggtttcaaagaaggcaacatcgactcccagatcaaaactgaggccaccgatggatacgacgccggccatgttggataccgaaaggtcagagaccgtacattgaccaaacccgaaacgggtcatctccataaggccggcgccattcccatgcgccatcttaacgagttccgtattcaaaccatcgatggcttggaccttaatcaacgccttctttgtgatgaaactttt

SEQ ID NO: 271339 - DNA, 294 bp, Glycine max
cacacacatagaaacccaacaacaagaatgaagaagatgattctaaccctcttcttcaatatcattttatctctcctctccctctcccacgcctccgtggtggatttctgcgtagcagactacacaggccccaatggccccgcagggtactcatgcaagagcccagcaaaggtcacggtggacgacttcgtctactccggccttggcaccgccggcaacacctcaaacatcatcaaagccgcggtgacgccggcgttcgacgcgcaattccccggcgtcaacgggcttggaatc

SEQ ID NO: 271340 - DNA, 358 bp, Glycine max
cccacgcgtccggaccgtcttcccgttaccttgcgcgggccgaagacgccgacgccgatgacctacggcgtgccgatggcctgcgcacaggtgaagtccgccgtgctgctcgccggcctcaacacgcccggcatcacgacggtcatcgagccgatcatgacgcgcgatcatacggaaaagatgctgcagggctttggcgccaaccttaccgtcgagacggatgcggacggcgtgcgcaccatccgcctggaaggccgcggcaagctcaccggccaagtcatcgacgtgccgggcgacccgtcctcgacggccttcccgctggttgcggccctgcttgttccgggctccgacgtcacca

SEQ ID NO: 271341 - DNA, 403 bp, Glycine max
acggttatgactccttcttatacgactttatcttattctcatatagatatataatggggcattggtatcacctgaaagggtcttgctcataaagaaacttaaaatacagaaacgcctgcaagtgcggcaactacttataaagctgtaagatgtacccaaacttgagctacaccgagtcaaccaccacctataccttagtcatgggaatggcaccaattaaagctcaattagagagtgctgaaatgcgtgtattcgctaagaacgacggctgcaaatgtagagctaactgcacctgcaacccatgcacttgcaagtgatgtgttgaacaactaaagcttcaaacagagatggcccttataaataatgataaaaactatgtgtagtttcaaaaattcaaaattat

SEQ ID NO: 271342 - DNA, 361 bp, Glycine max
cccacgcgtccgaaagagcagcttcaactttttgcatacctgtaatcaatgcggggcatttgcattttcagaatggcactgtgacactgattgatctttataccattgaaagagacatacgaaaactggaccgaattaaagttgggcttgggggagaccttgcttatgtgagaacagttctctcacttgcatacttactagccaaatatcaggatgtgaaaatttattttgtttcttcaaacgcggataaaatgaacgatgacataaaatactatctgacatcaaatggagtacagtgggaagaaagtgttgatttgttggaacgtgcttataaatgcgatgtggtttatcaaactcgcat

SEQ ID NO: 271343 - DNA, 335 bp, Glycine max
gcgcagcctagcctccagaagacgaatcgaaaatgccgtcgcacaagacattcataatcaggaagaagttggcgaataagatgaggcagaacaggcccattccctactggatccgcatgaggaccgataacaccatgaggtacaacgcgaagcgccgtcactggcgtcgcaccaagcttggattatgaggtgtatgctctgcctaggttcaatttatccaattaattaatgctttattttcttgaggcaaaaacaatgtgttgagtttttaatattttgcatttgttcgaagactatattgtgtaacgaacttattgtagcgcatactcatggcg

SEQ ID NO: 271344 - DNA, 364 bp, Glycine max
cccacgcgtccgcccacgcgtccgggggactttgaggcctggtacccctggccctggagggcaccctacaatgcactactttaacccttcttttaggacttcttccactcctccaaggaaatctcctttcctttcatcagataaagaagggtctggtcctcatggtgctggacttcattctagcaataggttgtctcttgagacagattctaatggctcttcaactgtgacttgccacaaatgtggagagcaattcaacaaatgggatgctgctgaagctcatcatttatccaagcatgctgtgactgaacttgtggaaggagattcatcaaggaaaatagtggagatcatatgcaggactagc

SEQ ID NO: 271345 - DNA, 462 bp, Glycine max
  unsure (1)..(462): unsure at all n locations
cccacgcgtccgcggatcctctaccgccgtttcctcaaagacactctcaactgggccggggatcgccacctcttgtgacgacgacgcttcaaacctccgcgaaaggttcgaggagaacagacacgtggaagaccctgataccattgacaggctcatagcggatgctgaagcttcctacaacaagtggcgccatcctgatccttatattgttccttgggctcctggtggttccaagtttactcgcaacccaactccacctcaagggattgagatagtttataattatggccgagaagataatgactgaaatctgattttttcttgcatccttacaatgaataaaggtctgcaatcaaactgttctgtattactagattgtggattaaatgaccttcatttatgtgatgagcatacatngatacagattgacggaatcatgcctgcttatgatgttgaaaattt

SEQ ID NO: 271346 - DNA, 457 bp, Glycine max
gcgaacccaacgccacagctgctgagaatgttgagcagataacagcttctctgggaacatgatcatctgatggcatcccatcatcagaagcctcagacaggatcaaagctggtttcattcacttcaagaaggagaaatatgacaagaatccagctttgtatggtgaacttgccaaaggccagagccccaagtttatggtgtttgcttgctcagactcaagggtgtgcccatctcatgtgctagatttccaaccaagagaggcctttgtggacagaaatgttgctaacattgtcccaccatatgaccagtcaaaatacgctggaactggggcaacagttgagtatgctgatttgcatcttaaggtgtctgaaattgtggtcattggacacagtgcttgtggtggtattaaagggcttctgtctttcccatatgatggaacctactctacttgatttat

SEQ ID NO: 271347 - DNA, 287 bp, Glycine max
  unsure (1)..(287): unsure at all n locations
acgcccacgcgtncgcacacaggctccacaaaacatctcatcattcacccaacaaaatggccctggttctgatgattccgatctcactggtcaccctctggctcggttacaccctataccagcgattaagattcaagctccctccgggtccacggccctggccggtagtcggtaacctctacgacataaaacccgtccgcttccggtgcttcgcggagtgggcgcagtcttacggccccataatatcggtttggttcggttcgaccctaaacgtcatcgtttcgaac

SEQ ID NO: 271348 - DNA, 363 bp, Glycine max
  unsure (1)..(363): unsure at all n locations
cacacntccaaaaaaaaaaaaaaaaaaaaaaaaagtaaaaaaaaaaaaaaaaaaaaaaaggaaaaaatgaaaaaaaaaaaaaaaaaaaaaaaaaaaaaaaataaaaaaaaaaaaaaaaaaaaaaaaaaaaaaaaaaaaaaaaaaaaaatacggtcgttcttttaaaaaaataaaattttattcacccttaaaaaaaaaaaaatactttttataatttctcactaaaataaaaatatttgacccttttataaaaattttaaaatttaaaaaacctttccttaaaaaaattaaataatattttaaaaaaaaacctttttaataatttctttaaaaaaaaaaaaaatcataactatattttctttt

SEQ ID NO: 271349 - DNA, 455 bp, Glycine max
  unsure (1)..(455): unsure at all n locations
gcgaaagcgaaaagagattcnaatccaaggaagggaaaggaaagtaagagaagagaagaatgggcgaagggggacaagtgattggtgtccacagcgtgnaggagtgggaggaacatctcaagaagggacaagagtccaagaaattgattgtggtggattttactgcttcttggtgcggcccatgccgtttcattgccccaattcttgcggatatggctaaaaagttgccgaatgtcaccttcctcaaggtggatgtggatgaattggcgactgtttccagggagtgggaagttgaggctatgccaaccttcctattcttgaaagaaggcaagctggtgaagaagcttgtgggtgccaggaaagaggagctgcaagacataatagtcaaacttgctgcaattgatgctgcctgaagtgccatatgaatatgttgagaataattgactattgtcttc

SEQ ID NO: 271350 - DNA, 392 bp, Glycine max
  unsure (1)..(392): unsure at all n locations
ncccacgcgtccgctgcttcgcactgatcgccattcccattcgatggcttccagtgaatcagcccctttcaagaaaattcanattcaaagggatnacactacatttgacgcatatgtggttggaaaagaggatgctcctggaattgttgtgattcaggagtggtggggtgtggattactaaattaagaaccatgccgtgaagatttctcagcttggtagtgggtttaaagctcttattccagatttatacagaggaaaggttggtctggatgtttctgaagctcatcatttgatggatggtcttgattggcaaggtgctgtgaaggatattgctgcttcngttaactggcctaaagcaaatggcttcaaaaaggctggtgaaactggatttt

SEQ ID NO: 271351 - DNA, 422 bp, Glycine max
  unsure (1)..(422): unsure at all n locations
aacacaanccaantgaaaggganaaaggataagaatcaaagagcataatntgagggatcgtgcacaggattggggagacccttcatntnnnanggcacaanaaggaggaggagcataagggtgagcaccatgctggagaatacagaggggagcaccatggtgaacacagtagtgagtacaaaggagagcatcatggtgaacacaaagctggagagtaccatggtgagcacaagccagagcacaaagaggggttcctagacaaagtcaaggacaacatccatggtgagggcggcgccgccgagggcgagaagaagaagaaggagaagaagaagaaggagcatggccatgagcatggccatgacagcagcagcagcaatgacagggattaaactgctgcatcacctatatatttaaaaaggtta

SEQ ID NO: 271352 - DNA, 374 bp, Glycine max
  unsure (1)..(374): unsure at all n locations
aatggtttcnctgaaactgcanaagcggctcgccgcgagcgtgctcaagtgtggcaaagggaaggtttggcttgaccccaatgaantcaacnaaatctccatggccaattctcgccaaaacataaggaagctggttaaggatgggtttatcatcaggaagcccaccaagattcactctcgctcacgtgctcgtcgaatgaaggaagccaagaggaaaggacgtcactctggatacggtaagcgtaagggtacaagggaggcaaggcttcccactaaaattctatggatgaggagaatgcgtgtgctcagacgcttgcttcgcaagtacagggaatctaagaagattgacaagcacatgtatcatgacatgtaca

SEQ ID NO: 271353 - DNA, 412 bp, Glycine max
  unsure (1)..(412): unsure at all n locations
ggaagcaattcaagctgtattgaagtcctgtttggctaaaatttacaagaggcanaantagagtcaacttgaggcgaggaccaagattgtttaacatgcaatanaaactagagttctgatttctatctagtatctagagcagtatcatgttccgtggcttggaattttttaaaaattgattttcttcttgccttttttttctaattttgttttttcagtgttaacatcttgttgtattttatcttgtaatattgtttgactattttcttcttaaacttttgggtcattattattagacgtctgctatttatataatattatttcagtattttctctcttgggaaattctttattttttatatttcttttttttttattatatattttctattttttttttttttattttttt

SEQ ID NO: 271354 - DNA, 419 bp, Glycine max
cttatccctctaatcactctaactgttgcaaatttgtactatttttcaatggcttctgcggatgttggggtccggtgctttgttggtgaacttgctattgtcaccggcaacgattccctctagaaagccttttcaatctactgcgacatctttgaatcgaatgttatcaaccaccgtgagactggaacgtccagaggattccgatttgtgaccttcgcctcagagcagtcaatgaaagatgcgatcgcaggaatgaacggtcagcacctttactgacgtaacattactgtcaactaagctcagacccgcgccagccgttgtggtggtggaggccgttgttacggaagtggccgtggatacaaccgcagtagcagcggatatggtcgtagctgtggcggttatccatactgagatcgtcg

SEQ ID NO: 271355 - DNA, 466 bp, Glycine max
  unsure (1)..(466): unsure at all n locations
ggaataatgtcttcttcattctctgttcggtttcttgctcctccatcatcatgcttccccaggtctcnggccaagagatggctctgcgccgccaccaccccaacggtggctccggcaactgcctcctcggaggtggaggcttcaaggttggagcctagagtggaggagagagatgggttctgggttttgaaggaagagtacaggggaggcatcagccctcaggaaaaagtgaagcttgagaaagaccccatgaagctctttatggaaggtgggattgaggacttggctaagatgtcccttgaggaaattgagagctccaagcacaccaaggatgatattgatgttagactcaagtggcttggcctttttcataggagaaagcagcattatggtagatttatgatgaggctgaagcttccaaatggggtgacaacaagtgcccaaacacgatatttggctagtgtga

SEQ ID NO: 271356 - DNA, 363 bp, Glycine max
  unsure (1)..(363): unsure at all n locations
aattatgggaaaaaaaagtggtgatccgtctagcaaagatgggtgctacatttnnnaaattatggctactgctcttaatgatatggtattgcagggaataataaaggaagagcaattggatacttttaacatccctttctacactccatccccatctgaagtgaaattggaagttcttaaagaacgttcatttgccattaattgtttagaggtgtctgtagtgcacttgagcgcttgtgatgaatggagtgttcttgacttttaatcttaaagctgatacaatttgacacaaagcattagggctgtggcagaatctatgcttgttagccacttttgttaaactatcatttatgaacttttcaa

SEQ ID NO: 271357 - DNA, 369 bp, Glycine max
actttttctacttacctttgctcttaagccaaatacgatggcagccatggcagccacaaccctctcttcaaacggcaaactctcattcttcaacggaaagcccgtcacatattcttcccgcgtcgcgcccaccaccaaattatcctcatccaaacaaggcacaatttccatgtccctaaccccacccccctacgacctccagtccttcaaattccagcccatcaaagaatccatcgtgtcacgggaaatgacgcgccgctacatgaccgacatgataacctacgccgacaccgacgtcgtaatcgtcggagccggttcggccgggctctcctgcgcgtacgagctcagcaagaaccccgccgtgagcgt

SEQ ID NO: 271358 - DNA, 441 bp, Glycine max
tcaaaagttctagtgtccatttccacagtttaaaaaaaaaaaaaaaaaaatggaaaaattaaaaatataaaaaagggaaaaaaaaaaaaaatattccaccctttttaaaaatcccaactttcctaccccttcctcccaccatcctggcgttttatcttacaactttttttattttaattccccaacccaccatttcaacctttttctctctaaacccctccctttcccaactttccctcctttccccccttttcccttttttcaaattcccttatatactataaaacccccccctttttccccctcctacccttttcccccctttattgtcccctaaaactccccttttaccccccctctttttcctcaaaattttttttttttcgaaaattttcccatttatattccccaaaccctctttcccccccccttttttttttt

SEQ ID NO: 271359 - DNA, 399 bp, Glycine max
  unsure (1)..(399): unsure at all n locations
aactggacaccntacgctgtctgattgcacatgcctgcggagtgnnaaaccgaggcncggtgctggatgggttggcctnaacntncctataactggcgtgacggctcctttcacgcccaacgcgtgtttgcgagggtagcgtcagcaatctcaagattctagtctgtaacagtttgtgttacttctgcacagtgggagaacgcgcggagtcagctaccggagcatatcatggtcgttgagatgaacatgaacgattcttggttccgtgatattggacctacttttgttgtgagaagaagcaccacgccggaatctggtgatgcagtgagcangattgcatggattgactggaattttaatagttggggaggcttaaaagatggatgttactgtgattgg

SEQ ID NO: 271360 - DNA, 352 bp, Glycine max
cggacgcgtgggcggacgcgtggggtcggtgtgggtgtttgaatctggtgaaggatgtcaattgttccaatcaacgagggtgatgccaacggctccaaccccttcgcttcgtggggtcaattcgtggattttcctctccctccttccatctccggcttcttccccggcttggaattcggattctgattcggatcatccgtgaacacacgtgtggactggagggagactcccagagcgcacgtgtggaagctggtgcttcccggcttctccaacgaggacgtgctggttgagctccaagacgagagggtgctccaagtcagcgtggagagcggcaacttcgtcacgaggttta

SEQ ID NO: 271361 - DNA, 360 bp, Glycine max
  unsure (1)..(360): unsure at all n locations
aaaaggattgaaagatgggtcaagcactatgttgctatcaagttgatcagtcaaatgtgggtatcaaggagcattttggaaaatttaataatntcctaaaacctggatgtcattgcctgccttggtgtcttgggtaccagattgctggtagtttgtcactgcgtgtgcagcaacttgatgttcgatgtgagacgaaaaccaaggacaatgtctttgtcactgtggttgcatctgtgcaataccgagctgtgtctgagaaagcatctgatgcattctataggcttaccaacacaagggagcagatccaatcatatgtttttgatgtcatcagggccagtgtaccaaagttggagttggatt

SEQ ID NO: 271362 - DNA, 456 bp, Glycine max
  unsure (1)..(456): unsure at all n locations
aaattgcaagaacggcttcaggctcttgcgatcaacaaacgcagcgttttgatctcagatgtganggggagagaatggcaacaacagtgagaagtctgaagataaagacaagtacgtgcaaacgtatagtgaaggagctgcattcttatgagaaggaagttgagagagaagctgccaaaacagctgatatgaaggaaaaaggagccgatccctatgatctcaagcaacaggaaaatgtcttggctgagtctaggatgatgattcctgactgccgcaagcgccttgaggccgctttggcagacttgaaaggattattggctgagttggaggagtcggatgagaaggccagtcctgagattgatgaagctcggaacaccatcgtagaagttgaaaaagtatttgaaacaacagaagattaacaaggttgtttgattagtgctcttgatggaggatatt

SEQ ID NO: 271363 - DNA, 450 bp, Glycine max
  unsure (1)..(450): unsure at all n locations
ggacccgtcgcgcaagtanttgagaactaanaaggagaagcaaatggcttcctcaatgatctcttccccaggtgttacgagtgtcgaccgtgccggtgccggcatggttgctccattcactggcctcaagtccatggctggcttccccaccaggaagaccaacaatgacattacctccattgctagcaacggtggaagagtgcaatgcatgcaggtgtggccaccagttggcaagaagaagtttgagactctttcctacctgccagaccttgatgatgcacaattggcaaaggaagtagaataccttcttaggaagggatggattccttgcttggaattcgagttggagcacggtttcgtgtaccgtgagcacaacaggtcaccaggatactacgatggacgctactggaccatgtggaagctgcctatgtttggttgcactgatgcttc

SEQ ID NO: 271364 - DNA, 337 bp, Glycine max
  unsure (1)..(337): unsure at all n locations
ttttcatttcatcntccgttcaatggccaccacancanctctatccnnaagcatnntgggcacctgcttcatgaggaggcaacctattaccaccacaagcctaaagacattccccaacgttcgtgaagctctttttcgtctgaaaagtggacgacgtgttcttgtcacttgcatggcctcatacaacgtgaagctcataaccccaaaatgagaagtggagtttgaatgcccagattatgttttcatttttgacaaggcagaggactaaggcacttaacttccctactcttgcaaggccggttcttgcgtttcctgtgttggcaaaattgtggaatgt

SEQ ID NO: 271365 - DNA, 375 bp, Glycine max
  unsure (1)..(375): unsure at all n locations
aataangcctccttcaactaccttctnacaaggcactttggtctaaccctatgtgccgccctcttcttaaaaaatattcatcngacnaacatnccttcttctctgattactcttangctcaccaaaagctttctgagctttttttttcttaagcctaagcaactttttagggattctttgagaggcaccatgcccataatatttctctcataaattctatcgtcatggtttctaatgcgccactgttggttcctcaaatttttatatagcttttgaatgtatttttctggactttgttatgatgattggaatttcgttttttttatttatggtccatccttttgttaaataacatttttcaacgatttccatatt

SEQ ID NO: 271366 - DNA, 439 bp, Glycine max
ggaagtagttgagaactaagaaggagaagcatatggcttcctcaatgatctcttccccagcgggtaccactgtcaagcgtgccggtgccggcatggttgctccattcactggcctcaagtccatggctggcttccccaccaggaagaccaacaatgacattacctccattgctagcaacggtggaagagtgcaatgcatgcaggtgtggccaccagttggcaagaagaagtttgagactctttcctacctgccagaccttgatgatgcacaattggcaaaggaagtagaataccttcttaggaagggatggattccttgcttggaattcgagttggagcacggtttcgtgtaccgtgagcacaacaggtcaccaggatactacgatggacgctactggaccatgtggaagctgcctatgtttggttgcactgatgcttc

SEQ ID NO: 271367 - DNA, 239 bp, Glycine max
tccctctcccaaagaacaccggccaatgggccccgacccccgaagggaaaagcgccaggtggaagccttcctgcgaaacacacaacaaccatcggctttgaaaccattcctgaaaagtgcgttgaaccaacaaaggaatacatccatggcgaacaatatagatcacactccaaaacagttaaccaacaagctcacttttatgccagagacctcgaagtccatcccaaggacacatttgt

SEQ ID NO: 271368 - DNA, 494 bp, Glycine max
  unsure (1)..(494): unsure at all n locations
accggnccggaaggccgcggtggacgcacncatccncatatatagcanccaaaaaagaatgaagaatactgcgttgtgcactatctttgtactccgggctttcacctcatgcctaccttcanccaccgctgctagtgtgtacgatacggatggtaatattcttcaaaagggtcgcacatattttgtgttggcagctacaagaggaaacggcggtggaatagaatttgccgcaactggaaacgacacttgccctctaactgtcgtgcaatctcccagtggcgactctattgggtttccaataaggttttcatatccatttatagaaacgcttgatgatatccttgaaggctttggtttggagattcgtttcgcttatcgaccgccgtgtagccccagttctatagccactactaagtggactatcgtcaatgatgcttttaagcttactaaaacttcatcatcgataatacccggttttttttatatttgggggg

SEQ ID NO: 271369 - DNA, 196 bp, Glycine max
  unsure (1)..(196): unsure at all n locations
caaaaaaaaaaaaaaaaaaaaaaaaaaaaaaaaaaaaaaaaaaaaaaaaaaaaaaaaaaaaaaaaaaaaaaaaaaaaaaaaaaaaaaaaaaaaaaaaaaaaaaaaaaaaaaaaaaaaaaggggccgcccccccaaaagaaccaaaccnaacgaccccggccagccaacgaaaaagcccnncaaaagggccaccaaa

SEQ ID NO: 271370 - DNA, 360 bp, Glycine max
  unsure (1)..(360): unsure at all n locations
aaacccggncgaccgacgcgtgggcttttatcaactgctgttcctgcgcgtgaacaagcctcaggtaagccaaanccattnttaggcataagaatattatccccaacggacacttccntaancactggcanaactatgtgaagacctggttcaatcatccagcacggaagacaagaagactgttggctcgtcataataaagctgtgaagattttccccagacctacagcttgacctcttagacccattttacattgtcaaactttgaaatacaacattaaagtgagagcttgaaggtgattttccctttaataactcaaggcagcatggatttccaaaaagcttgcaccaacaattttta

SEQ ID NO: 271371 - DNA, 413 bp, Glycine max
  unsure (1)..(413): unsure at all n locations
ncccacccctccgctcggggctcaccccatgcaaggagtcgaagcacttcgcggggcntgggaagcaggcgatagagaagctggagtcntcnctgaagctctacgaggcgggcagcgcccccgcactggccattaaggcgagcgtggagaagacgaagaggaggttcgacaactacgcgaagcaggggttgctgtgcggcggcgatgggttgccgcacctgatcgtgagcggagaccagaggcactggggtgagttcatcacacccggaatactattcctgtacatctcgggatggatcggctgggtgggtcggagctacctgattgcgatcagggacgagaagaaacccaccatgaaggagatcatcatcgatgttcctctggcttctcgcttgctcttcaggggtttcagc

SEQ ID NO: 271372 - DNA, 314 bp, Glycine max
  unsure (1)..(314): unsure at all n locations
aagaggctgtacccacgtggcagttactgcgacccagtgggccgggcctcagatccananaataaanccacccttcaattggcggagatcaagcacgcccgtctcgccatggtgggcttcttgggctttgcagtccaagctgccgccactggcaagggcccgctcaacaactgggccacccacttgagtgacccactccacacaaccatcattgacaccttctcatcctcctcttaagaagaagcaaaagaagaagaattgtctttcttgtgcctggtcattctagttatattgtaaaagtctttttcttcttc

SEQ ID NO: 271373 - DNA, 345 bp, Glycine max
  unsure (1)..(345): unsure at all n locations
acgcccacccgtccgcccacgcgtccgagaatcacagttagtgggtatgacaaatgtnangtgggccaggttgctgcgttcaattangaantggaaacccccagaaccatacaaaggaaagggcgtcaaatatgctgatgaaattgtaaggagaaaggaaggaaaagcagggaagaagaagtaatggggggtttcaattttcctttctcatttatctcctgttgtttttcctcatttgttagtaatggaaatattttaaccgagtaaaagaaattcatattcattgagataagcttgagtcacttatgcttatgatgaaatttaaaagcatagcaatccataact

SEQ ID NO: 271374 - DNA, 363 bp, Glycine max
aataattaataaaaagaaaaaagtgtaagatcaaatagaaatttataaaatctatgatcctggagtagttccctagacaaaatagaagtaagttcacaaacaagattcaagaataagattctctgatgaaaggagagaaatatgtctgaggatccgctgggtataaggagtgaaagaggggatcatttgtttcttgaacagttcttttaaaaaaattttctatcggatttttgagtcataggagattttatgatttatgacttggaggatttttaagaatagaaaggaataactacattgagttcatcgatttgccctagatatcaatagactcataaattattttttattcgaaaccaatta

SEQ ID NO: 271375 - DNA, 445 bp, Glycine max
cccacgcgtccgcccacgcgtccggttgcactacgtcgagatccgaagatggcaggacatgaagaacgctggctgtgtcaaccaagaccccatcttcaagcaatacagcttgcccccacatgagtgtggataccctggtagtgtgttcaaccccttgaactttgcacctactttggaggccaaggagaaggaacttgccaatgggagattggctatgttggcattcttgggattcatagttcaacacaacgtgacaggcaaaggaccatttgagaacctcttgcagcacctctctgacccgtggcacaacaccatcatcaatacaattcgtggctactaagtttgtatccaatgacatggataagcctgtgtccttctcgtgtaatcctgaatggatgaattttgagagtgatttgggcgtgattgtgggatccatctattttca

SEQ ID NO: 271376 - DNA, 405 bp, Glycine max
  unsure (1)..(405): unsure at all n locations
aaatttcagttttttctcataatgggtgccaccaatgccaataatgaaacggtcgcanaggttcctgagtggatgcgcgtcttcaaagatggcaccgtggaacgcccacttgattttccgatcgtgccacccactctcaacactggactctcatccaaagacatcaccatctcacaccaccctccaaaaccaatttctgcacgcatttaccttccaaacatcaccaattcccagactaagaaacttcccatctacgtctactttcacggtggtggcttcttctttgaatccgctttctccaaacttttcaatgaccattttctcaagttggtccctcaagccaacattataatggtttccggtgagtacagacttgctccaaaacaccctcttcctgcagcttac

SEQ ID NO: 271377 - DNA, 440 bp, Glycine max
ggcccacgcgtccgcccacgcgtccgaacttttgttaccaaaaaacaacctcaaagtttgaggcattgaggcttgtgtgtgccactagttgctcatcacaccagccatgggcttcacccattcccacactcaccacactcccaaaatgcacaaccgcagaacacgtgaaccagctccacgcacgcatgatcacaaccgggttcctcaaaaacccttccctcaccgcaaaactcgttctttcttgcatttcctcaccccgtgagcctcttgtcgagttcgctcgctacgttttcttcaagcaccacgcttttcgcgatttccgtgatgacccttttctctggaacgctctgctcaggtcccactctcacgggtgtgaccccagaggggccctagttctgctctgcttgatgatcgaaaatggggtgcgtgtggatgggtac

SEQ ID NO: 271378 - DNA, 413 bp, Glycine max
ggcccacgcgtccggtggatttggcggaggaggtggtggtggtggaattggacaccactagggcgttgcggacattgcatgcatgacaaagtgatattttaacgtccttgtattagccatgataattggtttattgaaaaatattgtgcgagtaagagaattaattattaatgttggtttcataatattaatgtgctctgtttttatttatagttaacgttgaaggaaagaatcggagatatatcatatatgtactatttttgtattcaatgagaagaagaaatggtaggaaaatcactttcaaaaaaaaaaaattaatataaataattttatattttataatttatttttaattaataagatttatattattatattttattttaaattatataaataaaattataaaaggg

SEQ ID NO: 271379 - DNA, 445 bp, Glycine max
cccacccctccgaccggcactgcccgagactcttaagaatgacaacaagctggtgtctcggggcttcgagattatattcttggcaggaagaacactggacaaacaggccgtaacagaagcaaacttaaagaaggctggctaccacacatgggaaaaattaattctcaaggatccacaagatccttccactccaaatgcagtttcatacaaaacagcagcgagagagaaactgataaggcagggatacaacattgttgggatcattggagaccaatggagcgatctcctcggaggccacagaggcgaaagcaggacctttaagcttcctaatcccctgtactacattcagtagttccttcacctctcaacaatctagcttgctcctatctatctatatgtaataagatgcttcaaataggggcactagcttcactttatgttggtt

SEQ ID NO: 271380 - DNA, 289 bp, Glycine max
  unsure (1)..(289): unsure at all n locations
ccactcgtttctaaaaacaagtacttnagaactaaaaatgaggaaatggcttcctcaatcatctcctccccanctcttaccaccntcaaccttnccagttccttcataatttctccattcacctgcctcaaatccatggctgtcttttttactattaataccaacaattacattacctccatttctatcaacagttgaatagtacaattcatgcatttattgccaccaattttcaataacaaattcgagactcttttctacttgccagacctttattattcccaattgg

SEQ ID NO: 271381 - DNA, 221 bp, Glycine max
  unsure (1)..(221): unsure at all n locations
cttgtatagacatgcatatgttacttaacaccagaaatgttcttttattatttttatatcgcgactgctattaaagtgctcntctctttataaaaaaaaaaaaaaaaaaaaaaaaaaaaaaaaaaaaaaaaaaaaaaaaaaaaaaaaaaaaaaaaaaaaaattttttcttttaatatcaagaaaacatttcatacccccccattccactcctttctactct

SEQ ID NO: 271382 - DNA, 296 bp, Glycine max
  unsure (1)..(296): unsure at all n locations
attatctatattgantatcggaatgtacaaagaggttccatcccattattctttgcatatgaaatcatatttatatctaataaaataaaatataaataaagtgttatttttttttttttttatttataaaataaaaaataatattatttaaataatatattaaatatattataatataatgttgcccccctcttttaatatctaaatttttctatcctttctttcacaatatatattttttaataatttccacattataaaattttctttcctcattttttaaaaatctttttaat

SEQ ID NO: 271383 - DNA, 339 bp, Glycine max
gaaggcatcaatgtaatcagagtgagagataagagatctagggagggaaattggggcttcgtgttgcgatgacagtaaggaacgtcttaaacaaaaacaattttcagaatggaacaatgtttaataatttggaatctgaaaaagaaaaaaagaaaaaaaattaaatttattaaaataaaaaaaaaaaaaaaatatttaaaaaaaaatattaaaaaaattagattaaataaaaaaaaaaaaaataaaaaaaaaaatataataaataaaataaaaaaatggggggggccttttaaaagaaacaaatttttttcccctgtgtttaaaaataaaatatttttt

SEQ ID NO: 271384 - DNA, 422 bp, Glycine max
  unsure (1)..(422): unsure at all n locations
cgttattcttggcagaactttttcagatgtcgaaaccctagcgctcctctccgccttcacggtcttcgtcgtctggctcaccagcgttggatctgttctcgtctccgctctcatgcttggcgtcgccgtcgtctgcctccacggcgcgttccgcgtgccggaggatctgtttcttgacgaccaggacaactctcaggccaccggattcctctccttcctccgcggccctgccgcctccgccaccgctgttcccaccgttgccgcacgcgtttaagtaaacaaaaaaaaaaagatctcagcgaaatcctcagatctggggatgtttctcccgatctgatgagttttggtgcctggaagcagaatgaatcttgaaatgtagcttctcttttatttntggtttttaaattcccttatctgtctaa

SEQ ID NO: 271385 - DNA, 250 bp, Glycine max
taatcttttattgataaccgctttatcggtggatttgtgttttgattatatgggccttgggggatggaaaaaggagaaaaaaaaaaaaaaaaaaaaaaaaaaaaaaaaaaaaaaaaaaaaaaaaaaaaaaaaaaaaaaaaataaagggaaatgtaaaaaaaattaaacttttattaatatcaaataaaaaaaaacaaatatcttaccttctaaatacaactttattaactgttaaaaacacatttaataa

SEQ ID NO: 271386 - DNA, 343 bp, Glycine max
  unsure (1)..(343): unsure at all n locations
tgaactcatgaccgatattgacaggcgatcctgcaaatatctttacgaggatccgaaatttgtgaagaacggtgattcttcttttnttaagatgattccaaccaaacccatggttgttgaaactttctccgagtatcctccacttggtaggttttctgttatggacatgcgtcaaactgttgctgtgggagtcatcaataactttgagaagaatgatcctaccgtagccaatgtcaccaatgctgcccataagaataattgaatcgtgcgggctggttcatcatgggatgttggttacaataaatgttggttttcttttctttactcttttgtcttcttttct

SEQ ID NO: 271387 - DNA, 404 bp, Glycine max
  unsure (1)..(404): unsure at all n locations
gagcttccattgtgctcactcatctctgacaacgaaaccctcttcatcttgtgctatctgggacgagcatcatggcctcaanagcantgttattgttggctatgtgtgtgcttccggcgatggttgtggccattcgcccagcaaagaaccctttttgcgtgaagggtcgtgtctactgtgacccttgccgtgctggttttgagacctcagctaccacctacattgctggtgctgagattatgttgcaatgcaagagcagggttagcaacgaggttgtgtacacgaagaaggggtacaccgactcaaccggagcatacacaatgtacgtggatgaggatcacgcacatcagatctgcagtgccaagcttgtaagcagccctcaccctcaatgcaaggaagtcacc

SEQ ID NO: 271388 - DNA, 367 bp, Glycine max
gcgcccacgcgtccggctggcttgcgtggtgcctctcaggctgtgttggaaggtagccttcaggggagtggctccacacgcttgaatgtggggagtggaaccagggtggcctcagtcacacgtgcagggttcacagttagagcacaacaacaacaagtgagtggtgaggtacaaagcagccgtagggcagtgctttcacttgttgctgctggtttggccactggctcttttgttcaagctgtgcttgctgatgccaaatctatcaaagttggaccacctcccccaccttctggtggattgcctggaacgttgaactcagatgaagcaagagaccttcagctgccattgaaagataggttcttccttc

SEQ ID NO: 271389 - DNA, 426 bp, Glycine max
cccacacatccgcccacgcgtccgcatgcccatttttcacaccaccaacacaagatgtttgtccacatggtgttcgtcctttgccttctctcatccacttcccatgccactgtccaagacttctgtgtggcagacctcaaaggtgcagacacccctgcaggctacccctgcaagccacctgctaatgtcacttcagatgactttgtgtacactggcttagctgaagctgcaaatgtcacaaacataatcaatgctgctgtgaccccagcttttgttgctcaattcccaggtctcaatggccttgaactatctgcagcaaggttggaccttggtcctagtggtgttatcccactccacactcatcccggtgccaatgaactactcattgtgcttcaaggtcacatccttgctggattcatatcttca

SEQ ID NO: 271390 - DNA, 448 bp, Glycine max
acgcaagcaatcacccttttttttttttttgttttttttttttttttttttttttttttttttgttttttgttaaattttttatttttttttttttttttttttttttttctttatttagtttaaaaaaaaaaaataaaattaatttttttttaaaaaaaaaaaaaaaaaaaaaaaaaaaaaaaaatgtgtggtcgttttaaaataaaaaaaataaaataacctttctttaaaataaaatatttttttttttttaaaataaaaaaaaaataattttactttctttaaaaaaaaaaaataataaaaaaaaaaatatttataataataaaaattattattataaaaaaattattttcttattgaatattaaaaaaaaaaaaaaaaatattcaataattttttttaaaatatttctacttaaaattaaaatttaaaacctcctttttcttt

SEQ ID NO: 271391 - DNA, 341 bp, Glycine max
  unsure (1)..(341): unsure at all n locations
caaaagttgcgtggcaatagcatactcttactctgattcnttantggagaaaaggggcaacaatcatcgccggcaccccaactacatcaatcactcgcacaggtcatgtgctcaaacgacctgttggggcctcatcctctaccggtcttggattgccagcaatggccaaggcggggagagtgaggtgctccatggaggaaaagccttcaagcagctcaaacctagggatgggggcatccttgttagcagctgcagctgccgcaaccatgtcaagcccagcagccatggctttggttgatgagagactcagcactgaangaactgggcttcccttttggctt

SEQ ID NO: 271392 - DNA, 402 bp, Glycine max
caaacccactaagatggcttcctttgtatccttcctagtgctgcttcttgcaggccttatgctcatgcctcaagggcttgctacttactacaaaccaattaagaagccaccagtgtacaagcctccagtgtacaagccaccagtgtacaaaccaccggtttataagccaaaaccaccggtttacaagccgaaaccaccggtttacaagccaccatataagaagccaccatacaagaaaccaccttatggaaagtaccctccagtagaggacaacacccatgcctaaagcaagcaatgaggtctattatctacttaataaataagaggaactgctttgtgttttctagcattgggatttacaacttcgtagcaatgcatattcttgactcttgcatgcacttc

SEQ ID NO: 271393 - DNA, 328 bp, Glycine max
cccatgctttctggtgagtgcaataactcgttgtacattcctagtgtccgggggagacatggctaatatgtgtgttttggtgtaccttcttgctctgtctgtggccacaagtgccataaacgttcccaaccccaacgatgctggtcttaaggaccagaagaactttatcagctatggtggagttggtggttattcctggattgataacaatggactgtcttttgtaggagctggtgccggaatatgaggtggttttagcggaggtggaggacttggaactggacttgatgatggacttggtagtggccttgtccgtcctaccggtgga

SEQ ID NO: 271394 - DNA, 418 bp, Glycine max
cccacgcgtccgctaaccaaccctgacactccttcttctccgcttcctcttcgatcatggcttcagaatgccgccgaagttcgacccctcccagatcgtcgacgtcttcgtacgcgtcaccggcggtgaggtcggcgcggcgagttccctcgccccgaagatcggtcccctcggtctctcccccaagaagatcggagaagatatcgccaaggaaaccgccaaggactgtaagggcctccgcgtcaccgtcaagctcaccgtgcagaaccgtcaggccaaggtcacggtggtcccatccgccgccgcgctcgtcatcaaggccctcaaggagcccgagcgtgaccgcaagaaaacgaagaacatcaagcacaacggcaacatctcgctagacgacgtcatcgagatcgctagggttatg

SEQ ID NO: 271395 - DNA, 423 bp, Glycine max
ccacaaacgcttgcatggctgcacatttaagaagaaggctcctaaagcaattaaggagagaaggaagggtgctcagaaagcgatggggacgaatgatgtaagagtggatgtgaagctcaacaaggctgtgtggagccaggggatccggagcgtcccaaggaggattagggttcgcattgctcgcaagaggaacgacgatgaggatgcaaaggaagagctctattcccttgttactgtcgtcgaaatccccaaagaggagctcaaaagtttggaaaccaaggttattgatgatgaagattgattatgtgttggttatatatctgttttttttatagttgatgtggatttgcgaatatcttttattttgttgagacattggagatatgtagtttgataattggttgccttcctctcgtttgattc

SEQ ID NO: 271396 - DNA, 437 bp, Glycine max
gtgagagagagagcgagcagtttcatacacagagagaggggtttgggattggagggatgggcgctgcgtctcttcctcttctctttcgatccatccctcattcctaatcctccaatccaaccacctcagcctcacactcacatatacacatatctgaacgcgtatcgtccctcctatggcttcaaagcgcatcctcaaggagctcaaggacttgcagaaagacccaccaacttcttgcagcgctggtccagtagctgaggacatgttccattggcaagcaacaataatgggtcctgctgatagtccttatgctggaggtgtattcctagtcactattcacttccctccggattatcctttcaagcctcctaaagttgcctttaggactaaggtgtttcacccgaacatcaatagcaatggtagcatttgtcttgata

SEQ ID NO: 271397 - DNA, 349 bp, Glycine max
aagagtcacaccactacacctgccttccagcgcatttgttgtaatattgttggcagagggagctacagcagctctctcaaatgggttgcatcaatctttcttgcccagcgatttcctcattgacattgctttttcctcttaccagtatgaaagaccttacaagattgacagcaaaggactgagcaactggtataactacactcacggaccacgtagaactgtaataatggatgcaatcaatggggatatcgcgattgatcattatcatcgctacctggaggatatatatttaatggaaactttgggagtaaacagctaccctttatacctgtcatcggcaagaattcta

SEQ ID NO: 271398 - DNA, 356 bp, Glycine max
gcgcccacgcgtccgctaaccaaccctgacactccttcttctccgcttcctcttcgatcatcgcttcataaggccgccgaagttcgacccctcccacatcgtcgacgtcttcgtacgcgtcaccggcggtgaggtcggcgcggcgcgttccctcgcccctaagatcggtgccgtcgctctctgccccaagaagatcggagaagatatcgccaacgaaaccgccaaggactggaagggcctccgcgtcaccgtcaagctcaccgtgcataaccgtcaagccaaggtcacggtggtaccatccgacgacgcgctcgtcatcaaagccctcaaggagcccgagcgtgaccgctagaaaa

SEQ ID NO: 271399 - DNA, 461 bp, Glycine max
aaccgccggggagacccaggctcgacgccacgcgtacgatcaaggcttccctcaaagacgttggagtcgctgttgtggccactgctgggagcgcaggtctagctagcaacgccatggccattgaagtgttactgggcactgatgacgggtctctggttttctctcccaactctttctacgtggcccctggggaaaagatcgtgttcaagaacaacgcaggtttcccccacaacgttgtgttcgacgaggactagattcctagcggcgtggatgcagggaaaatctccatgagcgaagaagaccttctcaatgcggctggtgagacttacagcgttactttggatgccaagggaacctacagtttttactgttcgcctaaccaaggacctggtatggtgggaaaagtcaccgttaattaattatatattgtctcctacgtctaagttctcatatgcttgttt

SEQ ID NO: 271400 - DNA, 436 bp, Glycine max
cccacgcgtccggcattattcaatggccaccacagcagctctatccgggagcatggtgagcacctccttcatgaggaagcaacctatgacgaccaagagcctaaagacattccccaacgctctttttggtctgaaaggtggacgaggtggtcgtgtaacttgcatggcctcgtacaaggtgaagctcataaccccagaaggagaagtggagtttgaatgcccagatgatgttttcattgttgacaaggctgaggaagaaggcattgaacttccctactcgtgcagggctggttcttgcgtttcatgtgttgggaaaattgtgaaaggtgacgtggaccagtcagatggtagcttccttgatgatgaacaaatagaaagtggatgggttctcacctgtgttgctctacctaggtcagacgttgtcattgagacacac

SEQ ID NO: 271401 - DNA, 274 bp, Glycine max
ggggatgatgaggtggaggaagagcatgatcatgaacccgaagaatctttgaaacccggacctgagggtaagaaggatgctgaagtccctttgccaccaccaaaagagacagaaaggcagctctctaaaaaggaaaggaagaagaaggaacttgcagagcttgaggctcttctagctgattttggagtggcaccaaaacaaagtaaagatggtcaagatgagtctcaaggtgctcaggataagacaggtgttgagactgatggagatggagaaa

SEQ ID NO: 271402 - DNA, 238 bp, Glycine max
ggacgccaaggggtgggtcaaaacttcaggtctattggtaagaatgttagtcctattgaggtcaagttcactggcaagcagccctatgatttgtgagcacacaactctatcttcatcatcatcatcccccgtgcttcctttatatgctatatattctcatgtgatatcatgtacctattgtcaattttattatgccacaaatattgcttaaactctgtaccttaattttacacttcaa

SEQ ID NO: 271403 - DNA, 198 bp, Glycine max
agatttggtttttctctatttgcgtgcgtgctagtatagtcgttgctgggcagtatggcgggaatcttttcgttggttactgggaggccgggactaagtggattcggatcttcctcaactgctgaacaagttactgaaggaattgatgccagcaatctcactgcaatcatcacaggaagagcgagtggcataaggttg

SEQ ID NO: 271404 - DNA, 402 bp, Glycine max
  unsure (1)..(402): unsure at all n locations
ctttcttcaccgcccgctttttctttctttcctacacaaaacatgactccgcccaatcggcaaaccttcgagtaccccaacttcaaacttgtcatcgacggcgacggtggcacaggaaagacaaccttcgtgaagaggcatttcactggtgaattctataagaaatatgaaccgaccattggtgtggaggttcattcgatggattttttcacgaactgtggaaagattctcttctattgttggcatactgctgcgcaagaaaagtttggtggcctcatagatcgatattatatccatgggcaatgtgcgattatcatgtntgatgttactgcccgtctaacatacaaaaatgtccctacctggcaccgcgatcttttgtcggctctgtgaaaacattccaat

SEQ ID NO: 271405 - DNA, 221 bp, Glycine max
agaaggaaatggcttcctcaatgatctcctccccagctgttaccaccgtcaaccgtgccggtgccggcatggttgctccattcaccggcctcaaatccatggctggcttccccacgaggaagaccaacaatgacattacctccattgctagcaacggtggaagagtacaatgcatgcaggtgtggccaccaattggcaagaagaagttcgagactttttct

SEQ ID NO: 271406 - DNA, 374 bp, Glycine max
cccacgcgtccgcccatttttcacaccaccaagccaacagaagatgtttctccacattggtttcctcctttcccttctctcatccacttcccatgccactgtccaagacttctgtgtggcagaccttaagggtgcagacaccccttcaggctacccctgcaagccacctgcaaatgtaacttcagatgactttgtgtacacaggcttagctgaagctgcaaatgtcacaaacataatcaatgctgctgtgaccccagcttttgttgctcaattcccaggtctcaatggccttgacctctctgcagcaagattagaccttggtcctggtggtgttatcccactccacactcaccctggtgccaatgaactactca

SEQ ID NO: 271407 - DNA, 339 bp, Glycine max
aaaaaaaatataaaaaaaaaataaaaatttaaaaaaaatttaataaaaaaaaaaaaaaaagagaaaatagataaatatgtataatattttaaacctcccttatttaaagggccctttcttcttacgtcttaccttcttatttgggccctcttttttttaaattcaatattttttttttttccccccctttaatttaactatctcttttcttacccctacttatcttctttagcccgttttttacaaaatctacttttttaaaactgcttgcgtcttcaaatattcgcctttaataaaatttcccatttataaatgccctttaataatatatatgcccct

SEQ ID NO: 271408 - DNA, 434 bp, Glycine max
  unsure (1)..(434): unsure at all n locations
cccacgcgtccggatttttcaagctctaccctcccttccctccactttcgtccctcttgttcttttgcttctgtttttgaggcgaanaaggatggaattgtaatgctgggaatataattggagaattgggggaggagtaagggaggaaatcatacacaatgcccgagttccccttgagctcgaggttggaaagggtgcaaaatagcttgagagagaatggttctctggtgtatctcaatgtgtatgatcttacacctgccaacaattatctttacgcctttggggttggaatctttcattcgggcatagaagtgcatggtatggaatatggctttggagcacatgaatacccaacaagtggtatatttgaggtcgaacccagaagctgtcctggcttcatcttcagatgttcagtattgttaggcaggaatgat

SEQ ID NO: 271409 - DNA, 371 bp, Glycine max
gaagattccacaacagttttagggagattcaaaaagagagagtggaaaaggtggcgcgggtgatcacagtggtgttgtgcgccatggctattctattatgcgccgcggtcggtgcgttgtgggtggaggaggcggcgaacccgatacgaatggtgtctggcgtggaggcggaggtggttcgggtgatcggggagtgccggcgtgcgttgaagtttgctaggttcgtgagcaggttcgggaagagttaccaaagcgaggaatagatgaaggagaggtacgagatattctcgcagaatctgaggttcatccgctcccacaacaagaagcgtttgccctatactctctctgttaatcattttgctgattggact

SEQ ID NO: 271410 - DNA, 434 bp, Glycine max
cccacgcgtccgcccacgcgtccggtttcagcgagcattctacaatggcggctataccagttaatcccaagcctttcttgaacaatttgactgggaagcctgtaattgtgaaactgaagtggggaatggagtacaagggctatctcgtttccgttgattcctatatgaacttgcagctggccaacactgaggagtacattgagggacaatttactggaaatttgggagagattttaatcagatgtaacaatgttctctaccttcgaggagtaccggaggatgaggaaatcgaagatgctgctgaagagtatagagtgatagaagctgctaatggctatgacataaacagaactcgaatttctactgtttttgtatcttcacataaatgtacgttttttgtagtcaatgtgtagagatttgaatcaatgatgcac

SEQ ID NO: 271411 - DNA, 414 bp, Glycine max
ctctgtatcatttcatttcgataatcatccatagttactgaagaaaatggcaaccatcggcgctgctatcacaaccccatcgatcacccgcgcatgtctagtgcaaaaacgttctcttgggttctcatctcccgttcttggtttgccagcaatgggtaaggtgggaagagtgagttgctccatggaggaaaagccttcttctgtgaaggaaagcagctcaagcatgttggggatgggggcatctttgatggcagcggccagcgccgcagccatgtcaggcccagccatggccttggtggatgagagacttagcactgaaggaaccgggctacccttcggcctcagcaacaaccttctcggttggatcctgttcggcgtcttcggactcatctgggctctctattttgtctacac

SEQ ID NO: 271412 - DNA, 401 bp, Glycine max
  unsure (1)..(401): unsure at all n locations
cccacgcgtccgcgaaagttttattttgagcacaatttaaaaaacaagcatatcctcagtggcaattacgaaaatataaaagcaagccacaatgcctaagcagatccacgagattaaggatttccttctgacggcacggaggaaggatgcgaggtcggtgaaaatcaagaggagcagggatgtcgttaagtttaaggttcgatgctccaagtatttgtacacgctttgtgtctttgatcctgagaaagccgataaattgaagcaatctcttcctcccggtttgagtgttcaagacctgtanaggtgctgagtgcggcagcgtgcgtttggttatctttttggtgcctcatgctctagattttgtggcttgcttttatattttggtaattgttatgaggata

SEQ ID NO: 271413 - DNA, 439 bp, Glycine max
tcctgaccatcttacccataacctctggatgctggttttggagctattgtagagcgggcaaggatcttcagcgcctttccctttccgggcttcttactgaccgtgtttttgaatatattgggacttatggcaagaagcttgagatgctttctgtggctttcgcgggagatagcgatctgggactccatcatgtgctgtctgggtgtgacaaccttaggaagctggagatcagggactgcccctttggtgacaaagccctcttggccaatgctgcaaagctggagacaatgcgatccctttggatgtcctcttgcttggtgagttatggagcatgtaaactgctgggtcagaaactgccaagacttaatgtcgaagtcattgatgaaagaggacctccagattcaaggccggagagtagtcctgttgagaagttatacat

SEQ ID NO: 271414 - DNA, 425 bp, Glycine max
ggcagatatatctaccgagggttaaacatttagcatatttgctgagggggtacctttgtggacactacatactatccataatatggtcgaaaacaatccagcaagggtttttggttcttctatgtttctatgtttgcttgtgttgatcacttggaacaacattgttgttgttgttccacaagctgaggctcgagcattctttgtttttggtgattcgctagttgacaatggcaacaataactacctattcaccactgctcgtgccgactcatatccttatggaattgactatcccactcacagggccactggccgtttctctaatggcctcaatatcccggacattatcagtgagaaaattgggtcagaacccacattgccgtatctaagtcgcgagctcgatggagagaggctactcgttggtg

SEQ ID NO: 271415 - DNA, 412 bp, Glycine max
gaaccttgcattgtatctacccacttctcaaccaacaatggcaatggcagcccaagccgctctcttcaccccacccctctccggtctcaaacccagcgaccgagccaccgcgccatggaaacaatcctccaccctctccttctccacctcgaagcccctcaagttctcgcgaacaatcagagcagcagccaccgaccagaccacagaggcaccggttgggttcaccccaccggaactggacccaaacaccccttccccgatcttcggaggcagcaccggcgggctcctgcgcaaggcccaagtggaggagttttatgtcatcacatgggactccccgaaagaacagatctttgaaatgcccactggcggcgctgccatcatgagggagggtcccaaccttctcaagttggcg

SEQ ID NO: 271416 - DNA, 413 bp, Glycine max
  unsure (1)..(413): unsure at all n locations
aattccggtcgacccagcgtncgcttttctttatccaatacgatggcagccatggcaaccacaacctcttttaaacggaaactcgattcttaacggaaagcccgtcacatattcttcccgcgtcgcgcccaccaccaaattatcctcatccaaacaaggcacaatttccatgtccctaaccccacccccctacgacctccagtccttcaaattccagcccatcaaagaatccatcgtgtcacgggaaatgacgcgccgctacatgaccgacatgataacctacgccgacaccgacgtcgtaatcgtcggagccggttcggccgggctctcctgcgcgtacgagctcagcaagaaccccgccgtgagcgtggccatagtcgagcagtcagtgagccccggcggcggcgcgtggc

SEQ ID NO: 271417 - DNA, 436 bp, Glycine max
cttgctcttcctcagtagtgcgattttcgattctcttctctgcaactatgcctaacccggaggtcttgttcgacatgaccatcggcggtcaacctgccggccgcatcgtgatggagctctatgccgacgtgactcccagcaccgccgagaacttccgcgcgctctgcaccggcgagaagggcgccgggcggagcggcaagcccctccactacaaaggctcgtccttccaccgcgtgatcccgaacttcatgtgccagggcggcgacttcaccgccggaaacggcaccggaggcgagtcgatctacggcgccaagttcgccgacgagaacttcgtgaagaagcacactggtcccggcatcctctccatggcgaacgccggtcccggaaccaacggatctcagttcttcatctgcacgacgaagacggagtggctcga

SEQ ID NO: 271418 - DNA, 439 bp, Glycine max
  unsure (1)..(439): unsure at all n locations
gtttcgtttcgggtttgacgttgttcacaatcactttctgcgcttcactcactcccttgaagcggttgtctttctttgtcgaactcgtgcgaacatgcgtgagattcttcacatacagggagggcaatgcggaaaccagatcggagcgaaattctgggacgtggtgtgcgcggagcacgggatcgattccacggggaggtaccagggggacaacgagttgcaactcgagcgagtcaacgtctattacaatgaaccgagttgcggaaggttcgtgccgagggcggtgctcatggatctagagccagggaccatggacagcgtcagatctggtccctacggtcagattttgcgacctgataacttcgtcttcagacagtccggcgccggaaacaactgtgccaaaggtcactacaccgaangcgctgagttgattgactct

SEQ ID NO: 271419 - DNA, 342 bp, Glycine max
gtttttcttgaatttattgtaaaattatatagtaaatggcttactattaggattggacggtgatagtcttgtatcgtggagattcaaatgcatagcttttctatagatggatgtggatcttaattttggcaaaaaaaaaaaaaaaaaaaaaaaaaaaaaaaaaaaaaggcaaaaaaaaaggaaaaaattaaaaaaggggcgtccactctaaaaaatccatgctttcttacgcgggcaagcaacgtcatacctgttgtatagtgtcaactaattttacttcactgaccagctttttacaccggagcgactgtgaaaacccaggctttgcccaactaattgccg

SEQ ID NO: 271420 - DNA, 423 bp, Glycine max
ggggaaatttgcgttgtttttcgcggtacagctcacacacactgaacggggagtatggcggacaaggctgttacaatccgaacccgaaagttcatgaccaacaggcttctttccaggaagcagtttgtcgttgatgttcttcatccagggagggcaaatgtttccaaggctgaacttaaggagaagctagctaggatgtatgatgtgaaagaccctaatactgtatttgtcttcaaattccgaacacattttggaggtggcaaatccactggatttggtttgatttatgacacagtggaaaatgctaaaaagtatgagcccaaatacaggcttatcaggaacggccttgacactaaggtagaaaagtcaaggaagcaaatgaaggagagaaagaatagagctaagaagattcgcggagtaaag

SEQ ID NO: 271421 - DNA, 431 bp, Glycine max
cagattgtgagtggaaggcacaagcaggtaacatatgtgttgcatcctgggactggagctgcagtggaatctgcaagtcagtagagaagatcaaatatgtgcactcaaagtgtggtgaaggggatggagctgtttggagtgccttagtttaggtttggttggttcaacagaatgccaactaattcacacgtgttggcatgcatacctccctgtctttgtttttgggtgtgggaggatatgatgatatatttttggttcaactatagtctatacttggtattatgtaacataggcctcttttgttacatgtatatttgtatacttttgttccttagacccttttgcacaatgcctttggaggtagttgtgctagtgcagggtcatttttcagtgtagcatgctgaagagcaatgaagtgatagtgttgttga

SEQ ID NO: 271422 - DNA, 432 bp, Glycine max
agagaagaacagagagagatccatccatcaattccaatggccgatcagcgcaccgacgaacagatctccgagttcaaggaagccttcagcctcttcgacaaggacggggatggttgtattaccaccaaggaacttgggaccgtgatgcggtcacttggccagaacccaactgaggcagagctgcaggacatgataaatgaggttgatgctgatgggaatggtaccattgatttcccagaattcctgaatctcatggctcgcaagatgaaagacactgattcagaggaggagctgaaggaggctttccgcgtgtttgacaaggatcagaatggcttcatctctgcagcggagctccgccatgtgatgaccaatctcggtgagaagctgaccgacgaggaagtcgatgagatgattcgcgaggctgacgttgat

SEQ ID NO: 271423 - DNA, 374 bp, Glycine max
caaatgcattgtgattggatagttaagttttctaatatctcttcaaagaataagagttcgtttatgctcaaaaaaaaaaaaaaaaaaaaaaaaaaaaaaaaaaaaaaaaaaaaaaaaaaaaaaaaaaaaaaaaaaaaaaaaaaaaaaaaaaaaaaaaaaaaaaaaaaaaaaaaaaaaaaaaaaaaaaaaaaaaaaaaaaaaaaaaaaaaaaaaaaaaaaaaaaaaaaaaaaaaaaaaaaaaaaaaaaaaaaaaaaaaaagggggggggggttttaaaaaaagtatttttttaattgggggggggtaaaaaaaaaaattttttttaaggggaaaaaaaaataaaaaaaagggggggattaaaaaaaaggtgaagg

SEQ ID NO: 271424 - DNA, 428 bp, Glycine max
tgagaactaagaaggagaagcaaatggcttcctcaatgatctcttccccagctgttacgactgtcaaccgtgccggtgccggcatggttgctccattcactggcctcaagtccatggctggcttccccaccagaaagaccaacaatgacattacctccattgctagcaacggtggaagagtgcaatgcatgcaggtgtggccaccagttggcaagaagaagtttgagactctttcctacctgccagaccttgatgatgcacaattggcaaaggaagtagaataccttcttaggaagggatggattccttgcttggaattcgagttggagcacggtttcgtgtaccgtgagcacaacaggtcaccaggatactacgatggacgctactggaccatgtggaagctgcctatgtttggttgcactgatgct

SEQ ID NO: 271425 - DNA, 441 bp, Glycine max
  unsure (1)..(441): unsure at all n locations
aaaaaattgtaaaggagagtacataaatgtagacaccaaaaatgtattatgttctagaaggatcgagacattcaatgaggttacatcaggacttagtatggtcaatattttggacccgtcatgtgattggcttgatactgaaacatcttggaggagatctctacttaagaaatatccgagaaagaatttccttaatactcatctcaaattgccatccttaaactgtcggagttatgcatacttcctctgcggttattgggccaatgatgatagtgttcgcagtgcactgcatatccgtaagggaactataggaaaatggcgtcgctgtaccttcaatatacctaacaaggaggacatctcaagcagctatgagtatcatgtaaatctcagtagaaaaggctatcgttcactgatatacagcggngatcatgacatgaaaat

SEQ ID NO: 271426 - DNA, 443 bp, Glycine max
ggttatttgattggtgtgcatccatgttaagctagtggcgatcggatccagctacagcggacaacctacagatcaaggaaggaagatgttgcgtgttataaggcacaagagtattcgccccgccttctccgcaatcagacacttctcttctgcagctaaagagattactgtcagggatgctctcaactccgcactcgatgaggaaatgtcagctgatcctaaagtcttcttgatgggtgaagaggttggggaatatcaaggtgcatacaacatatccaaagggctgctcgacaagtatggccccaagagggttctcgatactccaatcactgaggctgagtctgctgggattggagttggcgctgcttactatggtctaaggcctgttgtggagtttatgacttttaacttctccatgcaggcaatacatcatattattaact

SEQ ID NO: 271427 - DNA, 421 bp, Glycine max
  unsure (1)..(421): unsure at all n locations
gggcaagccccgagcagcaatgttcaacttgatacccgaggattgggggggccacgtcggcccatgggtcaaggagatttctcagtacttcgattgcctcaagagtctccacttccgccgtatgattgtcaaagattccgatcttcggaatctcgctcgtgaccgcggccacgtgcttcactctctcaagcttgacaagtgctccggtttcaccaccgatggtcttttccatatcggtcgcttttgcaagagtttaagagtcttgtttttggaggaaagctcaattgttgagaaggacggagaatggttacacgagcttgctttgaataatacagttcttgagactctcaatttttacttgacagatattgctgttgtgaagattcangaccttgaacttttagctaaaaattgccccaac

SEQ ID NO: 271428 - DNA, 436 bp, Glycine max
cccacgcgtccgcaaatattactgcaattacataagtacaaaacaacatagcatcctggggcctttgaacatcgttttgcaaccatggaaacaggcatagcatgctacactcgcgggcctttcttgcctagtgtttcttccaagcactctccaccctccatctctccatcttttggcttgaggagtctgaaatcgagctctttatttggagaatctctaagagtggcatccaaatcaacactaaaggtttcaaagacaaagaatacttcactcgtgaccagatgtgaaattggtgacagtctggaagaattcctcacaaaagcaacaccagataaggcgttgatcaggttgttggtgtccatgggagaagcattaagaacaatttccttcaaagtgaacacggcttcttgtggtggaacacaatgtgttaatactt

SEQ ID NO: 271429 - DNA, 431 bp, Glycine max
caaggctctactctactgcttcaccttctgctctagaaaattcagtggggatacatggcttcggctactctctctgtagccaaaccagcccttcaggcaaatgggaaaggcttctctgaattctctggcctccgcagctcatcaggcttccttcccttttctagaaaatcttcagaggatttccattctgtcattgccttccagacctatgcagttggaagcagtggaggatacaagaagggtgtgacagaagcaaaactgaaggttgccataaacggatttggaaggattggaaggaacttcttgaggtgctggcacggtcgcaaagactcccctcttgatgtcattgccatcaacgacaccggtggcgtgaaacaagcctctcaccttctcaagtacgattcgatcctcggaaccttcgatgctgatgt

SEQ ID NO: 271430 - DNA, 396 bp, Glycine max
cccacgcgtccgattttctcgcaccaggttactcgctcagaacgtgccctggacaagcaggcccgaagatattcgctctttgttcgaaaaacatggaaaagtcctccaagtcgagctttctatgtataagaaaaacagaaaccggggtttggcctttgtcgaaatgggttccccagaagaagcacttgaagctctcaataatctcgaatcgtatgagtttgagggtcgcgtaatcaaagtcaattatgctcggccgaaaaaggagaaaacgccgccccctgtgaaaccaaaggtggtgacgtttaacttgtttgttgccaacttgtcctatgaagcgagcgccaaagatctcaaggagttttttgattctggaactggtaaagttgtgtctgctga

SEQ ID NO: 271431 - DNA, 399 bp, Glycine max
cccacgcgtccgaccactcttaatttctctctgccttgctcatttacacgcctctccagcctttcactttcagctttatttgaatccctctctctcctttccaaatggccagcgttgaggttgcacatcaaacaccaacaacacttccagaaaatgaaacaaccgacgtaatcaagacccaggaaacaaccccggaaccagtaccagccactgaggctcctgcaacagaacaagcagcagctgaggttcctgctcaagaagaacaacaagcaactgaggttcctgccccagaatcaaccaccgaagcaccaaaggaagaaaccaccgaagcaccaacaacagaaacagtagaaacaacaactacagaagaagccaagccagaggagcctaaagaagttg

SEQ ID NO: 271432 - DNA, 431 bp, Glycine max
cccagcgtccggctgatgatgatgatgtaaacaggactgtgaccaagaagctgcttgagaaactggggtgtcaagtaactgctgtttcatcaggattcgaatgtcttggtgctataagtggctctggtaactcattcaaaattattctgttggatcttcacatgcctgaaatggatggttttgaagttgcaagaaggattcggaaattccaaagccataattggcccttgatcatagcttttactgcaagtgcagaagaacacatcaaggagagatgtctacaggtgggaatgaatggattgattcgaaaacctatcctccttcgtgagatagcagatgaacttggaacagtcttgcaacgtgcaggtgaaaaattgtgacaacaattttaaatatctcaaattttttaggttcctcaaaattcattactt

SEQ ID NO: 271433 - DNA, 430 bp, Glycine max
gttccagagagtttgttaaagaactgtgaagaagagggtaactgcaaacaaagcaagcaggacaaaagacgcagtgatggagaggatgaagagggtgcttctgctgcttctggccttcactgttcttctcatgttgccagaagcttctgctacaaagtttactgttggaaacaaccagttttggaaccccaatattaactacactgagtgggctaaaggcaaacatttctaccttggtgactggctctattttgtgtacgataggaaccaagcgagcgtgttggaagtgaacaagacagattatgaaacatgtaactctgatcatccactcacaaattggactaggggagctggaagagacgtggttccattgaatgtaacaaaaacttactacattatcagtggccgagggttctgcttcagcggcatg

SEQ ID NO: 271434 - DNA, 368 bp, Glycine max
gcgcagtcgagccttcagaagacgaatcgaaaatgccgtcgcacaagacattcagaatcgagaagaagttggcgaagaagatgaggcagaacaggcccattccctactggatccgcatgaggaccgataacaccatcaggtacaacgcgaagcgccgtcactggcgtcgcaccaagcttggattctgaggtgtatgctctgcctaggttcaatttatccaattaattagtgttttattttcttgaggcaaaaacaatgttttgagtttttaatattttccatttgttcgaagactatattgtgtaaggaacttattgtagttcatactcatggcgtttgtcaactccttttaaagtattttcggattc

SEQ ID NO: 271435 - DNA, 381 bp, Glycine max
caaggaaggaaagttgactgtggagagggatgttgtgaggactaaaaccatcgattttgcgccaattttgcagttcgaacaagacccggttcagatccttgatgcactgttgccactgtatttgaacagccaggttctgagggcattgcaggagtccttggcgagtgaacttgccgcgagaatgagtgccatgagcaatgccacggataatgctattgaattgaagaagaacttgtccattgtgtacaatagggagcgccaggctaaaatcactggtgaaattctggaaattgtggctggggccaatgccttgcaatagtgcagtttgtaggtattgtttacttattataatgatgatgggtggtggttgcccatttcatt

SEQ ID NO: 271436 - DNA, 447 bp, Glycine max
acgcgtccggtctcgtaccaacatcactccaatctttatttggcttctcaagaaaagcctcctttctgcgtaaagcagctgctactccgcctgtcaagcaaggatcatacagacctttgtggtttgcatcaaagcaaagtctttcctacttggatggcagccttccgggtgactatggatttgaccctctgggactttcggaccctgaaggaacaggagggttcattgagccgaaatggctagcatatggtgagataatcaatggtcgttatgcaatgttgcgtgcagatggtgcaatagcacctgaaattctaggcaaggctggtctgatccctcaggagacagcactcccatggttcagaaccggtgtgttcccacctgcaggaacctacaactactgggcagactcctacacactgttcgtgtttgagatggcactgatgggat

SEQ ID NO: 271437 - DNA, 385 bp, Glycine max
attcgagctatgaagttttctgtctcacctgttgttcgtgttgctgttcaatgtaaggttgcgtcagatcttgccaagcttgttgaaggtcttaagcggttggccaagtcagatcctatggttgtttgtaccattgaggagtctggtgaacacattgttgctggtgcaggagagcttcatcttgagatctgtttgaaggacttgcaggatgatttcatgggtggagctgagatcattaaatctgaccctgttgtgtcattcagggagactgtcctggagagatcatgccgtactgtgatgagcaaattatccaacaagcacaatcgtctgtacatggaatcaagaccattggaggaaggtctttgccaggccattgactttggca

SEQ ID NO: 271438 - DNA, 469 bp, Glycine max
gaaagaaaaaagaaaagaacaagcaaatccacaaatactaatataataaatactagaaataaaggctttctacggatacatatatcgtccaaaacaacgatttttatcagctgtagcaaagaatgaaacttcatagaagtcaaaatatgaagaaatcaatgtctagatacccccttttctatggataaaagatctaattgataaaggaagcatcgtaaggatccattaacgcggttttgaaccgatacaataaaaactgcttacttatctcatgatagaaaagtcaggaatccacttatgtaataaagtacatcccccgatattttgagcagcggtgtagtatcaaatcccaaagatagaaagtcttttctctttactttataaataagaaagaaaagactttttccaagattctatataaatggatatattataaagtttatgatatattaaattgagattggtactt

SEQ ID NO: 271439 - DNA, 437 bp, Glycine max
aattagttcattctctttgcgcagttccctacctctcctttcaagatgcagatcttcgtcaagaccctcaccggaaagaccatcacccttgaggtggaaagctctgacaccatcgacaacgtcaaggccaagatccaggacaaggaaggaattcccccggatcagcaacgtctcatcttcgccggaaagcagctcgaggacggccgtaccctcgccgactacaacatccagaaggagtcaacccttcaccttgtccttcgtctccgtggtggcatgcagatcttcgtcaagactctcactggcaaaaccataaccctagaggtcgaaagctctgacaccattgacaacgtcaaggccaagatccaggacaaggagggaatccccccagaccagcaacgtctcatcttcgccggaaagcaacttgaggacgggcgcac

SEQ ID NO: 271440 - DNA, 423 bp, Glycine max
attaccgggcccgacgaaaagggtgaggtgatgatattatattattatatatctgtctcaggacatgatttcaaaaacaaaattataaggaaaatgtcattgcttatgtggtatgcttatctgtatctgtttatctttttcaaccattaattaagatgaccttcggtctggtgtacacggtctacgcaactgccattgaccccaagaagggttatttgggaattattgctcccatcgccattggtttcattgtcggcgctaacattttgttgggtggggtcttcttctggagcggtcattaaccccgctgtgacatttgggcctgctgtcgtgagctggaccttgtaccaactcactggatctactgggccttgcctttcattttttgtggaatcgctttccttgtttactaggtttgttttt

SEQ ID NO: 271441 - DNA, 464 bp, Glycine max
cccacgcgtccggcaagatatcatcacattgcaaagaaaatacacattacatgactaagtctgggttcatttgagtagtagtgatggctagcctcaaggttgcatgtgtggttgctgtgatgtgcatggttgtggtggccatgagtgctgcacccatggcacaggccgcaatcacgtgcgggcaggtcgccggcgacatgtctccgtgcttcagttatcttcgaagcggcggaaaaccgtcgcaggcctgctgcaacggagtgaagtccctcagcagcgcggcgaagaccaccgcggaccgccagggggcgtgcagttgcctgaaaaaccttgccaataatatgggacagagtttgaatgccggcaacgcagcctctctccctggcaaatgtggcgtcaacatcccttacaagatcagcaccttcaccaactgcgccaccatcaagttctgaagggcaattttt

SEQ ID NO: 271442 - DNA, 465 bp, Glycine max
tcgaacccttttctattcttctgccccagcgccacctgctactcttgctttcgcgcccagaaagcaatggctttcttttaaggtatgtgcaactgttgctgaaactggtcagccaaaatggtgggaaaagaatgcaccaaatatgattgacattcactccacgcaagaatttctgagtgctttgagtcaagctggagatagactagttattgttgaattttatggaacttggtgtgcttcttgccgagcattattccccaagctatgcagaacagctgaagaacaccctgaaattcttttcctcaaagtaaattttgatgagaataagccaatgtgtaaaaggttgaatgttaaagtacttccttacttccacttttatcgtggggctgaggggcagcttgaatcattttcatgttcacttgccaagtttcaaaatataaaggatgccatggagatacataacac

SEQ ID NO: 271443 - DNA, 468 bp, Glycine max
  unsure (1)..(468): unsure at all n locations
tttagatcatgatgcacgtctcgattgcatattcaccaattgctcaaggtgctctcactggaaagtacactcctgataaaccaccaagtgggccccgaggcagaatttatactccagaattcctaacaaggctccaacctttgctgaacaagatcagtgaaataggagagaagtatgataaaactccaacacaggtatccttgaactggctggtagcacaaggcaatgttgtcccaattccaggagccaagacagcagaacaagctgaggaattcataggtgcacttggctggagactaactgatgaagaggtagctgagctgcgtagtttggcttcagaaattaaacctgttattggttttccagttgaaaaactctagaatatagcatgcaccttctaaatcaaatgtaaangtgtactgtctctgtatattgatatagctcttggtataataattatttatttac

SEQ ID NO: 271444 - DNA, 320 bp, Glycine max
atgagtctgctcgaaatgcgcaccgggatccactgcaagctccttactttctgaccttaaattgcgtgctataatcgagaatgcacgtcaaatatcaaaggtcatagaagagtttgggtcatttgacaagtatatttggagttttgtgaaccataagcctataattagcagattccgatatcctcgacaggttcctgtaaaaacaccaaaagctgatgttattagcaaagacctggtgagaagaggtttccgaggcgtgggccctacagtcatatactccttcatgcaggttgtggggttaacaaatgaccacctcatca

SEQ ID NO: 271445 - DNA, 246 bp, Glycine max
accacgcgtccgtggcttttctcttctgtgtctaaggcatgccctgacatcacttttaacaatggtgaaagctgtgacccttctgagcaccatatagggcgtcactggaactattcacttcgttcacaacgtaagtggtccaaccaccgtaactggatctcttgctggtcttaagcctggtctccatagttttcatgatcatgctcttaattaacactaccaatggttgcctctcaactggatcac

SEQ ID NO: 271446 - DNA, 434 bp, Glycine max
cccacgcgtccgaattggcaaaggaagtagaataccttcttaggaagggatggattccttgcttggaattcgagttggagcacggtttcgtgtaccgtgagcacaacaggtcaccaggatactacgatggacgctactggaccatgtggaagctgcctatgtttggttgcactgatgcttctcaggtgttgaaggagcttcaagaggctaagactgcataccccaacggcttcatccgtatcatcggattcgacaacgttcgccaagtgcagtgcatcagcttcatcgcctacaagccctcaggcttctaagtgtgaaaaatttggcaagcatttgtagcccgcaaccccactttggttgtttgaacttaaactacatttcccattggtttttgctttttgagatttcatcaatccggattttggtttctgttt

SEQ ID NO: 271447 - DNA, 413 bp, Glycine max
tctgtatcatttcatggggataatcatccatagttactgaagaaaatggcaaccatctccgctgctatcacaaccccatcgatcacccgcgcatgtctagtgcaaaaacgttctcttgggttctcatctcccgttcttggtttgccagcaatgggtaaggtgggaagagtgagttgctccatggaggaaaagccttcttctgtgaaggaaagcagctcaagcatgttggggatgggggcatctttgatggcagcggccagcgccgcagccatgtcaagcccagccatggccttggtggatgagagacttagcactgaaagaaccgggctacccttcggcctcagcaacaaccttctcggttggatcctgttcggcgtcttcggactcatctgggctctctattttgtctacac

SEQ ID NO: 271448 - DNA, 363 bp, Glycine max
ctcttctttctctctcgctctttcttcaattccaagctttattcctcatgtctttcagaggccgcagccggccgaatgcctcatcaggcatgggtgttgctgatcacagcaagaacaccttcatggaattgaagcagaagaaggttcaccgttatctgatctttaaggttgatgagaagaaaagggaagttgtggttgagaagactggtgacccggctgagagctatgaggatttcgctgcatctttgccttgaaaatgattgcagatatgcctgccttgactatgatttcgtcactttttagaactggcaaaagagccaaatcttcttcattgcatggtttggttctctcctttatatatat

SEQ ID NO: 271449 - DNA, 402 bp, Glycine max
cccacgcgtccgctcatggttttcccacaagggttgttgcacttccaaattgctgttggtaagagaaaggcccttgcttttcctgtcttcagcagtgcttttcctggccttcaaatccttgactttgcactctttgccagcaatttctccactcctttggtgacacagaccactttccttgaccctgccatagtgaagaagcttaagggtgttcttgggggaagtggctagagtactacttatttgtgttcatggatagttttttattattttgctcaatttattattattccttgtgtttgtttcaattcgttagacttgtgcaggtctcatggtcattgaattattatgctcgtgtcaatgtagagcaattaataaatttgcatgctttatttgtcttcc

SEQ ID NO: 271450 - DNA, 418 bp, Glycine max
gcagcagagagtgcggtaggctcatccgagtttcggaagcagcaatggggatcgatctcaagggcggaggtaaaagcaaaaaaaccaaaagaacagcacccaagtccaatgatatctatcttaagctcttggtcaagctttatcgcttccttgttcggagaactggcagcaaattcaatgccgttatactcaagagattgttcatgagcaaggttaacaagcccccattgtctttgtcaaggttgattaagtataccaaggggaaggaagataagattgctgtggtggtgggcaatataaccgatgatattcgtgtttatgaagttccagccttaaaggtcacagcactcatgtttacagatactgctcgggcaagaattgataatgcatgtggtgaatgcttgacgtttgatcagtt

SEQ ID NO: 271451 - DNA, 464 bp, Glycine max
gctcgtccttacattacaagacaaattcacagtctaaacaagaaattcagaaaattaagctttgggtgaatggagaacctaatttctttggtgaacaaaatccagagggcttgcaccgctttgggtgaccacggcgaagcaagtgccttacccactctctgggactctctccccgctatcgccgtcgtcggtggccagagctctggaaagtcctcagtattggaaagtattgttggcaaggatttcttacctcgtggatcagggattgttactcggcgaccccttgttttgcagcttcacaagattgacgagggtggcagagagtatgctgaatttctacatcttcccaggaaaaggttcaccgattttgctgctgtgagaaaagagattcaagatgaaaccgatagagagactggacgaacaagacagatttcaagcgttccaattcatcttagtatatattt

SEQ ID NO: 271452 - DNA, 472 bp, Glycine max
cccacgcgtccggggaaatatcttacaaataccacattcaattgaacaagttttcattgcacggaaaatggagaacacaaggccaaatagaagtgacatccacctctcagcagaggaagaagccaccatagaggcaaagaccagagactactttgatggggttgcaccacaacgccacacaaagcctcaacgaagtgagtattcagctcaatatgtggatgctttctccaatgcccatcactcttcttcttcttcttctataccagaattcatgcaattccaacgcctcgagaatgatccccaagagaagaaattggagtacaatggaagtcaagtaccggaagaatttgtggaaacagagtattaccaagatctcaacagcgtggacaaacaccaccatacgacgggaacaggatttatcaaagtagagaaaaatggaaatgactttcacatagaaccagataatgacact

SEQ ID NO: 271453 - DNA, 458 bp, Glycine max
ctttgttgcaatatcacaaacacctcgtccgtcacaatgcagctagctgtggcggccaacgctgtcgtttcaccgtcgccgttccgacctcatccccttctccggtcatccttctccggcgtctccgttaagctcactccccaatccataacgttttcacgcttgaagcccctcaccgtcttcgccgccaccaagaaggccgtcgctgtcctcaaggggacctccgtcgtcgaaggcgtcgccactctcatccaagaagacgatggcccgacgacagtttctgttagcatcactggccttactccggggcttcatggctttcacctacatgagtatggtgataccacaaatgggtgtatatcaacaggagcacattttaatcctaataacttgacacatggtgctcctgaggatgaaggtcgtcatgcgggcgacctgtgaaacatagttgctaatgc

SEQ ID NO: 271454 - DNA, 316 bp, Glycine max
  unsure (1)..(316): unsure at all n locations
ggaggnggcacngnggcagaaggcnnaggagngnaaaacagagacgcggaaggaagacgangcnagcggccgagaccangaanangggcgacggcgagagcancaagggncacgccaaggnaancgaggangagggcccncgnggaaaacacgcgcgagacgaccaccancngaacagggacngccaacagagnaccgacgacggcggcaaaaggaagcacaagacagaagacaggaacggcacacgcaaaaccgccgccgccaaccgcaccgcccacagccacgaagagaacnagaacaccggcgncaccaaggg

SEQ ID NO: 271455 - DNA, 364 bp, Glycine max
  unsure (1)..(364): unsure at all n locations
gcagatgttgagtnccgnngcgtcggcggngggcttgcttgggtcaccggggacgatgccctcgagaaagccttttcaatctacggcgacgtcgttgaatcgaaggttatcaacgaccgtgagactggaaggtccagaggattcggatttgtgaccttcgcctcagagcagtcaatgaaagatgcgatcgcaggaatgaacggccaggaccttgacggccgtaacatcactgtcaacgaagctcagacccgcgccagccgtggtggtggtggaggcggtggtttcggaagtggtggtggatacaaccgcggtagcggtggatatggtggtggtggtggcggcggcggatacggtggtcgtcgtg

SEQ ID NO: 271456 - DNA, 486 bp, Glycine max
cccacgcgtccgctgaaattaaaagataagactaaaatcataaatttttaaaaaagtaaaaaacaaaatatctgaattaaaaaaattagaaaactaaaattataaattttcaaaatttagaaacaaaaacatgttggtgaaggtgtacggtccaacctatggagcccccaagagggtgctggtgtgtctgattgagaaggaaattgagtttgaaacagtacatattgatctcttcaagggagagaataaggaacctgagttcctaaagctgcagccattttgatcacttcctggtattcaagatggtgattatactctctatgaatcttgtgcaataatcagatactttgcagagaagtataaagaccaaaggacagacttgttgggaaagacaatagaagaaaaaggtctagtggaacaatggcttgaagtagaagctcataactttcacccaccactctacaatttggttattaatggtctggt

SEQ ID NO: 271457 - DNA, 360 bp, Glycine max
  unsure (1)..(360): unsure at all n locations
ggttgcttggcggggataagattaaagattcaacaatggcctctgcttctgctactcttctcaagtcatctcctgttcttgacaagtgcgagtgggtcaaaggccagacccttcgccaacctctcgtgagatgtaacccttcctcagcatcagctctcaccatcaaagctgcttcctatgctgacgagctcgtcaaaaccgccaaaacagtggcctcaccggggcgtggtattttggcgatggatgagtcaaatgcaacctgcgggaagcgtttggcatctattgggttagagaacacagaagctaatcggcaggcataccgtacnctacttgtgacagtaccttgtcttggtgaataca

SEQ ID NO: 271458 - DNA, 413 bp, Glycine max
  unsure (1)..(413): unsure at all n locations
aaggatcccaataggcctagtacatcgtcatttgctggtggttctgaaggtgttggtcttttgaagtggctaatgcagagcactgatgagtcaatggtgcctctgacaatcaactgctggccctcttcttctggaaatgaaacttatgtcagcattgagtatgaggcttcatcattgtttgatttgcggaatgttgtgatctcagtacctcttccagctcttcgagatgcaccatctgttagacagattgatggggaatggaggtatgactcaaggaattcctttttggagtggtctgtccttctgattgataattcaaaccgcagtgggtcaatggaatntgttgttccacaagccgaatcatcagcattcttccccatttcagttcgttttatagcaactgaaacatttag

SEQ ID NO: 271459 - DNA, 435 bp, Glycine max
  unsure (1)..(435): unsure at all n locations
gactgatatcttcatacgtncgcgtaattgcagggtgttgttcccttcatccgtgaaaaaaaaaacaacaaagtcgccacaccactgccggcaactttgtcaatggcctatggtggtgccctatttgctgatgcttgccttaagggcctcaatggagtcccagatgttgtggagtgctcattcgtgcaatccactgttactgaacttccctactttgcttccaaggtgaggcttgggaagaatggagtggaggaagttctgggcttaggacctctctcagattttgagcaacaaggcctcgaaagccttaagcctgaactcaaatcatcaattgagaaaggaatcaaatttgccaaccagtaattgaacatgttatcacatacgtgtcttgtaagctaatgttaatgttattccttcaagaaccaaatcaaattt

SEQ ID NO: 271460 - DNA, 402 bp, Glycine max
  unsure (1)..(402): unsure at all n locations
tctcacatcancatggccttcccaacactaataacccccaaatcagcgaggtcactcacacccatcaagcccaaacccaccaccaccatggccgccactctcacaccacccacaacaacctccaccgccgccgccacccaccctcgccgccgcgaattcttgtccatcatcaccgccaccacatggctggtccctctgagcccggcactggcttcctcggacgaggaatacatgaaggagaccgaggaagtgatcaacaaagtgaggacaacaatcgtgatggacaagaatgaccccaacgtggcaaccgcggtggcagagttgagagaaacctcgaactcgtgggtggcaaagtacaggaaggaaaaagcgcttctgggacgcgtttactttaaggacatg

SEQ ID NO: 271461 - DNA, 456 bp, Glycine max
cccacgcgtccggtctcaagcaaccatggcaatggcaacccaagcctctctcttaaccccaccgcctctccggggtcaaagccagcgaccgcgcctccgtgccatggaagcaaaactccagcctctccttctccagcccgaagcccctcaagttctccagaacaatcagagcagcagccgccgacgagaccacagaggcaccagcaaaagtagaggctgcaccggtcgggttcaccccaccagaacttgacccaaacaccccttccccgatcttcgggggcagcaccggcgggctcctgcgcaaggcacaggtggaggagttttatgtcattacgtgggactcacccaaagaacagatctttgaaatgcccactggcggcgccgctatcatgagggagggtcctaaccttctcaagttggccaggaaggagcagtgcttggctctggggactaggc

SEQ ID NO: 271462 - DNA, 462 bp, Glycine max
  unsure (1)..(462): unsure at all n locations
cccacgcgtccggatcctcatcatgggaaccatttttcctcctcactctctctctccactccgcaacatcaaggcttcaccctcaagaattctcttggctccctctccccaacccaagtcaaattctctcttttgctccaaacccattgtttcaagtctcagaaagaaccaaacttcatctcccaaaccttcatcgggcacaagctggttggctcatgctcaacagggcctagcagctttggctatctccttggcactcaactttagcccagttttgtttaatggcaatgcattggcatctgaagttgatgtgcttaatgagggtccacccaaagattcttatgtggttgatgattcatgagtgcttagtaaggtgaccaggtcttgattaaagccagttgttgctgatttggaaatcaaggaagaacttncgcaataattttataactgttagaaaactca

SEQ ID NO: 271463 - DNA, 470 bp, Glycine max
attttatactatacccacattttgataattatttttctagttgataagccatggctactcgaggaaagcttgaggttgacgttgatctcaagtctaacgcagacaagtactggcaaacccttaggaactccactgaaatattccccaaggccttccccaatgattacaaaagcattgaggttcttgagggtgatggcaaatcacctggttctatccgccacataagttatggtgaaggttcaccacttgtgaagtcatcctttgagaagattgaggctgttgatgaagaaaagaaggtagtgtcgtacactatcattgatggagaactcctccagcactacaaaacattcaagggagacatttctgtgactccagttggcgatggatgcgaggtgaagtggagtgctgtgtacgaaaaggttagccatgatgtttctgatccaaccctcgtcaaagattttgcagtcaaa

SEQ ID NO: 271464 - DNA, 475 bp, Glycine max
gtccggtgcattattcaatggccaccacagcagctctatccggaaccatggtgagcacctccttcatgaggaagcagcctatgacgaccaagagcctaaagacattccccaacgctctttttggtctgaaaggtggacgaggtggtcgtgtaacttgcatggcctcgtacaaggtgaagctcataaccccagaaggagaagtggagtttgaatgcccagatgatgttttcattgttgacaaggctgaggaagaaggcattgaacttccctactcgtgcagggctggttcttgcgtttcatgtgttgggaaattgtgaaaagtgacgtggaccagtcagatggtaacttccttgatgatgaacaaatagaaagtggatgggttctcacctgtgttgctctactaagtcagacgtttgcattgagacccacattgatggagagatcgaatgatcgatttatatcataatgtaatctt

SEQ ID NO: 271465 - DNA, 465 bp, Glycine max
cccacgcgtccgggccttccatggcttccgcttgtgcttcctctgcaattacagctgttgccgtctctacgccgagttccgggcagaagaatggatcaggaggttgttttcttagtggaaggaaattgagggtgaaaaaggagagagcagcaattggaggacgatcgatgggcactacagtgtgcgcagttgctgagcctgacagacctctatggttcccaggcagcacccctcctccatggcttgatggcactctacctggagacttcggctttgaccctcttggtcttggatctgacccggagagtctgagatggaatgttcaggcagagctagtgcactgcagatgggcaatgttgggtgctgctggcattttcattccagaattcctaacaaagattggtgtcttgaacacttcttcatggtactcagctggagagctggaatacttcacggacactacta

SEQ ID NO: 271466 - DNA, 471 bp, Glycine max
cccacgcgtccgcccacgcgtccgcggaaagggcaagtccacgctgttgaagcttcttgcttggaggaagataccggtacctaagaatattgatgtccttctggttgaacaggaggtagttggtgatgataaaacagctcttgaagctgttgtttctgctaatgacgaacttgttaaaattcgacaagaagttgcctctctgcagaatgcagcttctgttgaagacaaagataatgatgaggaagacgatacaggagagaagctagcagagctatatgaaaaactacagctgatgggatctgatgctgctgaagctcaagcatcaaagatattagctggtttaggttttacaaaggatatgcaagcccgtcctacaaaatcctttagtggtggctggaggatgagaatttctttagctcgagcactttttgtgcaaccaactctattattgcttgatgaacccacaaatca

SEQ ID NO: 271467 - DNA, 387 bp, Glycine max
tctgaattaccggtcggcgacgcgtccgtccaatcgttattcctattacattgagttttttcccggagcaaatgcatccggatgtagaaggacttctttcaccaccacataggaaagaagcagggaaatctcatctggattctgatgaagtgatactgagtgagttggaagatgagaagcctaaggaagttgacatgctccctgcatcagagaggcataaacgtatcgcgcacttgcaacaaagactgctccaagcagctgcagaaggagcagcgagggttaagatgagaagaggaccacacagatggtaagatttcaccttgacacaagcattgatcaaagcagactattggcttcttttcatttccatgatcatgggttctggat

SEQ ID NO: 271468 - DNA, 398 bp, Glycine max
aactagatcatctcacgtccgatttaaaacaaaaaaggaaattgggctacctatatgggaatattaagatcggtattaattgtattatataatgattttaaacatataaatgaaactatatttaaaattttataataaatatgtttaaatatataaactaaatatattttaaacttatatgaaataatttatatacaattaatacaaggttattactatttattatatttgttttacaaaatctacttgttgggatgttggttacaatagagatggcactaggttgggaagaagaaaattcgtacttacaatcggttcattaactattaactattgggtatataccagcagatttattttttaaacttatgggtattcatgcatatctgcgatacttc

SEQ ID NO: 271469 - DNA, 424 bp, Glycine max
  unsure (1)..(424): unsure at all n locations
ttgacctttagttctcatgtatcagctcaggagtgtataatctgagcgatgtcagatcttgaggctcccttgcgccctaagaggaagaaggtttgggtggactatttcgttcagtttcgatggatccttgttatttttgtggtccttcccatctccttcaccatttatttccttacataccttggggatgtaagatctgagtggaagtcctataagacgcgtcagaaggaacatgatgagaatgtgaagaaggttatcaaacgtctcaaacagaggaatccatcaaaagatggtcttgtctgtaccgctcgtaagccctggattgctgttgggatgcggaacgttgactataagagagcccgtcattttgaagttgatttgtctgctttccggaatgtacttgagatcgacanagaacggatga

SEQ ID NO: 271470 - DNA, 418 bp, Glycine max
gaagagggaggaaggggacgatttaaatcacattccaatgctcctgccaggatatctgacagagagaagaaggcgccactgaagacataattatatgacacagcctgtgatttcatcattgatttttgcctagtggatgggaaaaatgactataggtgatgatacatccaaaggcaaaggttcttatcttgattgctcatgcaacataggattgaaaattcctcctgagcactaagtggggcacctatatttttttgtcacccaagtgttgtaacatcccctccccctcttttgaataatagtttttatcaattatgaagtgtgcatctatgatttgaaggagagcagaaaggtaaggaaacgggtactgcatcttggaaattgtgtggattttgaccaattcagggtgaaaaatgga

SEQ ID NO: 271471 - DNA, 343 bp, Glycine max
ataaaagaaaaaagtgtaaatcaaatagaaatttataaaatctatgatcctagagtagttcgctagacaaaggagaagtaagttcacaaacaagattcaagaataagattctctgatgaaaggagagaaatatgtctgaggatccgctgggtataaggagtgaaagaggggatcatttgtttcttgaacagttcttttaaaaaaattttctatcggatttttgagtcataggagattttatgatttatgacttggaggatttttaagaatagaaaggaataactacattgagttcatcgatttgccctagatatcaatagactcataacatactttttattcg

SEQ ID NO: 271472 - DNA, 466 bp, Glycine max
gaaaaaggagcatgttgattatatagaaagtaaagggcaacaatcatttttgtttaccatgggtaaggacaccatcgctgacataataacctatataagaaatgctgacatgaataaaaaaggaatggttcaaataccatttactaacataacagaaaacattgtaaaaatacttttacgcgagggttttgttgaaaacgtcagaaaacatagagaaaacgacaaatattttttagttttaactctacggtatagaagaaatagaaaaggatcatataaaagttttttaaatttaaaacggatcagtacacccggtctacgaatatattctaattatcaacgaatccctcgaattttagggggcatggggattgtaattctttcaacttctagaggtataatgacagatcgagaggctcgattagaaagaattggcggagaagttttatgttatatatggtaatct

SEQ ID NO: 271473 - DNA, 393 bp, Glycine max
gcttgggagaccctgttgcgaaccagtgctgccccgtgcttcaaggcctggttgagcttgaggctgcggtgtgtctttgcaccactcttaagctgaagcttctcaacctcaacatttatgtcccacttgcccttcagcttcttgtggcttgtggcaagtctcctcctcctggttacacctgctccctctaaaccagtgaaaggattgaggaaaatatggtcaaaatcgacatgagaggatgtcgagccacactatctctcttctgtcctgattggaactgctgttgtttgttttgctattatttgaaaaaccatttgcttttaattgagattgttgcatgtatgttttaatcctaggcacggtacaacataaatgcttctctgtgacatgttc

SEQ ID NO: 271474 - DNA, 427 bp, Glycine max
  unsure (1)..(427): unsure at all n locations
ttgcctcctgttctctttccagaacagcagtctcggatgcacgacaacatggtaaaaaacgtgtccctcattcaggaactcaacggcaacatctccaaggttgtctctctctactgtgatctcaacaccaatttctccaacgtttgccaacaacgctccaaaaactcctccaaataagtcaattcaaaaggttcttcctaagtaatgtttcgtgtctgtgtcctctgtctatgtctattgcgtatgtgtctgttgttgaagttgaagaatttgtgatggtaattttgggctttgttttgtcatcaattgtcgataaggacggtgaaaaggcgaagcattgtatcgtcctctttacttctttttcttttcttttctttttatataaaaaaaaaagtttaggtgagtcgagttcgaagctcacanaana

SEQ ID NO: 271475 - DNA, 395 bp, Glycine max
cccacgcgtccgcaagtagttgagaactaataaggagaagcatttggcttcctcaatgatctggtacccagcggggacttctgtcaaccgtgccggtgccggcatggttgctccattcactggcctcaagtccatggctggcttccccaccaggaagaccaacaatgacattacctccattgctagcaacggtggaagagtgcaatgcatgcatgtgtggccaccagttggcaagaagaagtttgagactctttcctacctgccagaccttgatgatgcacaattggcaaaggaagtagaataccttcttaggaagggatggatttcctgctaggaattcgagttgaagcacggtttcttgtaccgtgagccacatccagtcaccaggattctac

SEQ ID NO: 271476 - DNA, 449 bp, Glycine max
cccacgcgtccgcagaaaaacaagtagttgagaactaagaagaaggaaatggcttcctcaatgatctcctcccgagctgttaccaccgtcaaccgtgccggtgccggcatggttgctccattcaccggcctcaaatccatggctggcttccccacgaggaagaccaacaatgacattacctccattgctagcaacggtggaagagtacaatgcatgcaggtgtggccaccaattggcaagaagaagttcgagactctttcctacttgccagacctcgatgatgcccaattggcaaaggaagtcgaataccttctaagggaaggatggattccttgcttggaattcgagttggagcaccggttcgtgtaccgtgagcacaacaggtcacctggatactatgatggacgctactggaccatgtggaagctgcctatggttggctgcactga

SEQ ID NO: 271477 - DNA, 290 bp, Glycine max
gagattggccatgttctctatgtttgggttctttgttcaggccattgtcaccggtaagggtggattggagaagctttctgatcaccttgcggacccagtcaacaacaatgcctgggcctacgccaccaacttcgtccccggcaagtgagcatgaaagaaaaggatgacttgtggacttttgagagtttttagatttgtgtttggtgaagtatatgttattgcaatgtacttcagataatgtgaattatcttgcgtatccgaatccaacttaatgttacttgctttttacg

SEQ ID NO: 271478 - DNA, 391 bp, Glycine max
ctcctgcggcgtgttcaacaatcggcggcgaaaatgccttcccacaagacgttcagaatcaagaagaagctcgcgaagaagatgaggcagaacagacccatcccttattggatccgcatgagaaccgacaacactatcaggtacaatgctaagcgcaggcactggcgccgcaccaagctcggattttaaggtccatgtcaacctccgactcgagatttttatattgtttttgttattctagaatgttactagcaatgtgtaaactggaaaggttttagcttttggtcatgtggtcacacagagggatcattgttgagcgtttccatatctctattttgtttttgtactttttttggatattaatctgagactgagatggtagtttttattt

SEQ ID NO: 271479 - DNA, 368 bp, Glycine max
  unsure (1)..(368): unsure at all n locations
taggtcantccacgtccgaagtatgcactttctgtctctgctgactgtaaagtctaatggaatattgagtaagatatacaggttgagagcagaacaagcaagatgttgtaaacgagctaaaaaaaaaaaaaaaaaaaaaaaaaaaaaaaaaaaaaaaaaaaaaaaaaaaaaaaaaaaaaaaaaaaaaaaaaaaaaaaaaaaaaaaaaaaaaaaaaaaaaaaaaaaaaaaaaaaaaaaaaaaaaaaggggggaccgttttaaaggatcaaagttaacctacgctgttatgcaaagttttaactttttatttgggtcccaaaaattaaattaaaaggctgatgattaaaaatgaggtaattggaaaaacc

SEQ ID NO: 271480 - DNA, 361 bp, Glycine max
  unsure (1)..(361): unsure at all n locations
gtttgcttcaatggaagtgatttccgcttttagcttgaattccaacgctccgatgttcgtgcctctcgcctatcggacggtggaggatttctccgaccaatggtgggacctcgtccactcctccccctggttccgcgactactggctccgcgagtgcttccaagatccccagtaccaatacgacgacgttttcgacttcgactttgacctagatctccaagataaagatgaaaatgaatggaaggaagggaaagaggtggtgtcgttgggggtgctcaaatggcgaanctgtggaagaggatgggccgaagcgccgaggtatgtggataaggcccctaagtttgtgaagcccaaggtgagc

SEQ ID NO: 271481 - DNA, 407 bp, Glycine max
gaccgacgcgtccggctagaaatctcagttcgtttgagagaaaaaaaatggcggagggtttcggttttccgcggggcaatgccggccaacacgaacgtcgggacggcaattgcaattccaattgacacctccaacataaccgtgacggcttcgccaacaaatcaatatatttttggcacctcaccagggagcacaagacttacggtgtcccccgcggccgtctaacggaacattctcactttgtacagaacgtggctctcttatacgacggtcagttcgccctctccggctcctgggacggcgagctccgcctctgggacctcgcggctggcacctctgcccgccgcttcgttggccacaccaaggacgtgctctccgtggcgttctccatcgacaaccgtcagatc

SEQ ID NO: 271482 - DNA, 359 bp, Glycine max
cgcaggcctttatagcataaacatttgagacttcattgctcactgtcttcctctagccttcagggtaggcgcctctcttgcatgtcaccagccaaaacctctctcatgactgccacattaagactttctgcatatgcaaccgttctcactccttcttatccttcttcttcaccttcttcttccttcccttctttcattcaagacaggcctgacttagctgtctatagctcccatattcacccctactgtgatagattgatatagcaaattgaaaactatcaatatattgcagatctccacaaactgctgagggagaagattgaactcactgactcaacttctgatatcgatgatcaaat

SEQ ID NO: 271483 - DNA, 416 bp, Glycine max
cccgggtcggccggcgcgtccgcttcaaatggaaaagaaaggccaattatgaccgtcatagttctggaatggggaccttcaccagtcgcgcgttggcgcagccgcttcagaacgccgacgaactcatcgactccgtcgagacatttatcttcgattgtgacggagttatatggaaaggtgataaattaatagacggagtgcctgaaacgcttgacatgcttcggtcaaagggcaaaagattagtttttgtcaccaataactcaacaaagtctaggaagcaatatggaaagaagtttgaaacacttggcctgaatgtcagcgaggaggagattttcgcatcatcctttgcagctgctgcatatctgaagtccattgatttcccaaaagaataaaaggtttatgtcatcggggaagat

SEQ ID NO: 271484 - DNA, 328 bp, Glycine max
cccactcgttcgaaaaaaaaaaatttacaaaaaaaaaaataaaaaaaataaaaaaagaaaaataaaaaaagagtctatttaaatttaaaaataatatatttaaggtacaaatagtaaatcgaggtacccattttatgataaactttccttccatttttgttcctttattatgcctattatttccggaaattgcaatggcttctttatttcttaatgttcaaaaaaacaatattttttatatacataaatcttagtaaaattctggagttattaattccccaattataatactaaattcaaaaaaattatattaatgagaataatcttt

SEQ ID NO: 271485 - DNA, 416 bp, Glycine max
cccacgcgtccgcccacgcgtccgctgacctatcttggtagagatttgaagtttaaacctggaaattaatcaaaccattttaatttgcctttagattctgagtcactgctgctatggcgctacgcgtacttcttgtgttggggatgttgctgatgttgtgccttgttaaggtttcatctgatccaaagatagaagaagaaatactggaagcagaagaagaactgcagtttcccgataacgagccacttatcgtgagagacgcgaacagaaggctaatgcaagatatggattgtggtgggttgtgcaagacgaggtgcagtgcacattcgaggcccaacttgtgcactagggcgtgtggcacgtgctgtgtgaggtgcaagtgtgtcccacctggtacatctggaaatagggaacta

SEQ ID NO: 271486 - DNA, 401 bp, Glycine max
acggttcgatcctggctcaagatgaacgctggcggcatgccttacacatgcaggtcggacggggagtggtgtttccagtggcggacggttgaccacaattatcggaggaggagattctgttgcagctgtggagaaagtaggagttgctagtgtcatgagccacatatctactggtggtggtgccagcttggacgttattggaaggcaaagagcttccaggagtccttgctctcgatgaagccgtcccagttgccgcgtaagacaattttgagcttggaaaatttttccatcctcagatttcggtgttgtcaatcttgtaaaagagcatatgttgtaggacccttcggagactgttagtgtaaatgttatcatgcttgagtgattattggcttgacacataa

SEQ ID NO: 271487 - DNA, 315 bp, Glycine max
gttttattttcaaattatttcttcaattaatagaagaaatacgaatagtagggaatatatagggaattattttatcccattcggaaggatatcgtttcataattatctatgactgtttatgtctttagcatgactgactacttgattaaatgtggaggaaagtgggataaatggccgatattacagaaaggattccattccttaataaatacaaaaaaaaaaaaaactaaaagaaagaaaacaaaaaaagaccaaaacataaactaaattatagaaaaaaagaaacaccattccaagttagggggggggtctctt

SEQ ID NO: 271488 - DNA, 370 bp, Glycine max
tgacacggtgctaccttttctagggctagcagcactgtaacctcaactcacctctcccaaatccgttccctctttcaaaccttttttttttttccaccaaatcggcgatggcaacgacgtcggtggtgccggcgaaccggcgtcgcgcggcgaaccccgcggaggagatggacttcgagacgacggagggcgtgaaggccatcgcaagcttcgaggagatggggatcaaggacgatctgctccgcggaatctaccagtacggcttcgagaagccctccgccattcagcagcgggccgtcacgcccatcattcaaggccgtgacgtcatcgctcaagcccaatccggaacggggaaaacgtccatgattgc

SEQ ID NO: 271489 - DNA, 455 bp, Glycine max
cccacgcgtccggacggttgtgacatctcgggtttatccaacaaaggcaatctatggagctgctaggttgttcttgttcaacaatgctaccgaggccactgtgacagcctcactaaaagtttggcaaatgaattctgcatttatacgcccattccaccctgatcagaagagttaaaaatttgaattggagatagaagagctatagtcacaaaggattggaatacatcttgggttggcaatttgtacttatcagttgtaatgtcctcccctgaataaccgacataaggttatggttcttgctcaaagcgcattccttcatttttgcccagttatgtttatcagaatttttgttgtaattttatcatatcatgtgaaatgatgcttacaagagaatctgttcaaagaaatatggatgtaatcgtatccaattctatgctaaaaatatttacatatgg

SEQ ID NO: 271490 - DNA, 393 bp, Glycine max
ggcacactttgataagttttttgtgcagctccaatggcaacctctcaaatcacttcatcattgaggaactggcctgcatttgaaaggtttcaaccttcaacgcttcgatttccttctgctgggcacgtcagaattgggacactgacacaaacctcgtttccctctttcgttgtcaaagccgccactgttgtcgcccccaagcacaccactgttaagcctctgggtgatagagtactggtgaaaattaaggatgcagaggagaagactgcaggtgggattttactgccagcaactgctcaaggcaagcctcaaggaggtgaagtggttgctgttggggatgggaagtcggttgggaagagcaaagtggatgttagtgtgaagacaggtttgcag

SEQ ID NO: 271491 - DNA, 337 bp, Glycine max
cttgctgaaattgtcacgaccatgttgtcattattcaccaacttgctcctcttcctatccgtgctaatcggtctatgcaattgcagggtaacaacaacaaatgaagaggtgcaaaccctaaacacaaacactcacttcaacccacaggtcccacccctccgaaccctctcttcctcgaagcggttcgagggttcctcggagttcgtgaagctcaaataccacatgggacctgtgctatcgtctccgatcaacatctacctcatctggtacggcaagtggccccaatcccagaagctcctcatcaaggacttcctcaactgaatctgcgacgaccacc

SEQ ID NO: 271492 - DNA, 370 bp, Glycine max
atttgtggacgggcatccacctttgggttgtcaagatactgcagcatatcttgttttacctattcttcttgtcgtttctcaatacgtttcaatggaaatcatgaaaccacctcagacagatccttctcaaaagaatcaacttcttattttaaagtttcttccactcatgattggctacttctcactatctgtcccatcaggactaacaatttactggcaagtccgatttggtccgaaaactccagtaatggtttataaacaatgtcctgagcacagctcaacaagtatggttgcgcaaattgggaggtgcaaagcctgttgtgaatgaaaatgctggtgggattattactgctggacgcgctaaaagatc

SEQ ID NO: 271493 - DNA, 460 bp, Glycine max
accacgcgtccgcgcttaacatcacccaagagagaacctaggacacacaacgcaacacacggagagagtttgaggaagaaatcatcatggcttcagcagcatctgggtttgtgctgactcttaatgttgcaactaacaccacaaactcaagggtggtcttgttcaacacaaagaaccacgcttctatgcttgttgcgagggctttaaacgagcctggagcggtgggacccggaaccaccactcctgcagctgaagctgaagcatagccaaaaccaccacctattggcctcaagagaggtgctaaggtgaagattcttatgaaggaattctactggctcaaaggcacttgattagtggatgctgttgatcatgaccccaacactcgctaccgtgttgtggatcgattcaacaaagtcaactatgccaatggatgaacaaacaactatgctttggatgagat

SEQ ID NO: 271494 - DNA, 445 bp, Glycine max
cccacgcgtccggaaaatggcagcatgtcaaagagaccacagaaattggtgaaggaaaactgttctccccaggaaatttgagagccacatctgacaaccccgattatgctaagttgatcgattactatgtcaatgaaaagtacacattgagatacactggaggaatggtgccagacgtcaaccagattattgtaaaagaaaaaggaatcttcaccaacgtgtcatcaccatcagccaaagccaaactgagactgttgtttgaggtagctcctttggggttcttgattgaaaaagctggaggttacagcagtgatggtcatcagtctgtgctagacaaagtcatcagtaacattgatgagagaactcaagttgcttatgggtccaagaatgagataatccggtttgaagaaaccctgtatggtaaatccaggctcaagggtggtgt

SEQ ID NO: 271495 - DNA, 216 bp, Glycine max
gtccggtggtgctagagttattccccttatctacaatgagtcacctgagaacctgagacaaggagctcgatttggtcaatggagtgctcttcactggttggtgggctgtttctggtccatatttggatactcttggaaacatttttaagaaagccttaaagaaaaatgaatcttgagacccttttccaataattgcctttaacttaagttgaaacc

SEQ ID NO: 271496 - DNA, 232 bp, Glycine max
tgggaggtggttccacccttgcatacttcagtgcaactgcctcaggtgacattctaccaatgcaagaagggaccacaactcccaccaaagctcggtcctcgtggcaagatctaatttgatttgtatcagaactccatctattgagttcctttttaattattttttttctggtttgcataatgtgtaagtatacttacagactactattcaaagatgcttctttcccgtctaa

SEQ ID NO: 271497 - DNA, 402 bp, Glycine max
caacacggacgcagagccttcgatccagaaaccatgactaagagaacgaagaaggcaggcggtgtcggaaaatatggtacccgatatggtgctagtttgcggaagcagattaagaagatggaagttagtcagcatagcaaattcttttgtgaattttgtgggaagtatgctgtgaagaggaaggctgtgggaatatggggatgcaaggattgtggtaaagtgaaagctggcggtgcctacactttgaatactgcaagtgctgtcactgtgcgcagcaccatccggaggttgagggaacaaaccgagggttgagctttttggttgatgttagattttgagcaaattaactggagaaatgattcgtttttgtttaagaagctgtattgtttcaacttacaatgc

SEQ ID NO: 271498 - DNA, 455 bp, Glycine max
  unsure (1)..(455): unsure at all n locations
gagataactagaaacagtgtgatgaaaatgaaggtccttgttttcttcggtgctacaattgtggtagcatggcaatgccatgcgtacgatatgttccctctccgaatgaacactggctatggtgcccgtactccggaggtgaaatgcgcaagttggaggcttgctgtggaagcacacaacatctttggctttgagaccattcctgaagagtgcgttgaagcaacaaaggaatacatccatggcgaacaatatagatcagactccaaaacagttaaccaacaagcttacttttatgccagagacctcgaagtccatcccaaggacacatttgtgttcagtatagatggcaccgtactctctaatattccatactacaaaaaacatggatatggggtggagaaatgtaactcgaccttgtatgatgaatggggnaacaagggcaatgcaccggcact

SEQ ID NO: 271499 - DNA, 412 bp, Glycine max
  unsure (1)..(412): unsure at all n locations
ggagaagcanatggcttcctcaatgatctcttccccagctgttaccactgtcaaccgtgccggtgccggcatggttgctccattcactggcctcaagtccatggctggcttccccaccagaaagaccaacaatgacattacctccattgctagcaacggtggaagagtgcaatgcatgcaggtgtggccaccagttggcaagaagaagtttgagactctntcctacctgccagaccttgatgatgcacaattggcaaaggaagtagaataccttcttacgaagggatggattccttgcttggaattcgagttggagcacggtttcgtgtaccgtgagcacaacaggtcaccaggatactacgatggacgctactggaccatgtggaagctgcctatgtttgggtgcactgat

SEQ ID NO: 271500 - DNA, 475 bp, Glycine max
cccacgcgtccggtttggaaggaatatagcaaaggggattcaaggtatgcaggaagggatgcaggggtagttactgttgaaggaataacagcggttttggagggtccagctagccttctagcagtatacgctatagctactgggaagtcatatagctacatacttcagtttgccatttctttgggccagctatacggaactgctgtttattatataacagcaatcttggaaggtgataatttttctacaaactcgttttactattatgcatactacattggagcaaatgcctcctggattgtaatacccttgatcattgccatccgctgctggaggaagatctgtgcagcatttcgagttcaaggtggccagacaaaaaagcctaaagttcgttgaaggaaacattttcaggttattggtcttagagatcctgagctaataatgatgttttggggtaattgagataggagagatt

SEQ ID NO: 271501 - DNA, 362 bp, Glycine max
  unsure (1)..(362): unsure at all n locations
attgatgggaaacagtactacagtttgactgttttgacaaggacagctgatggaggtgaagggggcaagcaccagctgattgcagcaactgtgaaagatggcaaactatacatttgcaaggctcaagctggagacaagagatggtttaagggagcaagaagatttgtggagagcacagcaagttctttcagtgttgcctaagaacttatcagtggagtgctattgtgcatgtgaatcatcttgaaggggtgtgtatgtgttgaattatgtggtcactttttgtccacaaggtttatgtttttgaggctgntggttgcagtaagcactttgattcttaattttttatagtctctaaggactta

SEQ ID NO: 271502 - DNA, 412 bp, Glycine max
cccccactccattttttaaaaacttttgtagcattctttacctcaaagtgaaacttaaatttacatgtttgacgctaggatataggttacaaaataactttggttagctgcaaaagaaaaaaaaaaacttggttagagctaccattaggcaatgagtaagtattaaatgaatcatcaaaacctttgatatcttaaaaaaaaaaaaaaaaaaaaaaaaaaaaaaaaaaaaaaaaaaaaaaaaaaaaaaaaaaaaaaaaaaaaaaaaaaaaaaaaaaaaaaaaaaaaaaaaaaaagggggggccttttaaaagaaccaaatttaataaccggggtttggaaacgaaaaattttttttttggggccccaaaaataaatttcgggggcggggttttaaaaaggggggggggggaaa

SEQ ID NO: 271503 - DNA, 437 bp, Glycine max
cacgctcgtaccaacggaaacacgttcacgggtcttgctatcagatatggcatgatccaaggcatggatatgacaaccaacagctgttcgtattcatccgactactgctagggacacgtaaacgaagaaaggagctgttctttttataacatgaggatcaagacgaaaaagaagtgattgacgaggctgaaaacgaagcgccgaaagatgagacagagattcaagtattgcgtctaacctattaagcttgacggtgctttgacaaaatgcttatgttgccaaatcagacacacagctgatagcggcactgatcgtatgactctgacgttctgatgcacttttgtggattttatttcgtcttatgttcttagctgaaaacaatgctgttactgcgtttgcgaatcaacaggatatcttggttgcatttctgtttctct

SEQ ID NO: 271504 - DNA, 453 bp, Glycine max
gcgaggattccgattccgccgctcattctgtgctgcgtggcagctgtgaagttcctcgccgaccccgaaaccgacgaggtcttcgccaggctgcggatggttcctctaagaaactccgagctcgactacgaagacagcgacggtaacggcgcggaggggtcggagaagcccgcgtcgttcgcgaagacgttaactcagtccgacgcgaacaacggcggcgggttttccgttccgaggtactgcgcggagacgatattcccgcggctggattactcggctgagccgccggtgcagacggtgatcgcgaaggacgtgcacggcgaggtgtggaagttccggcacatttaccgagggacgccacgtcggcacttgctgaccaccgggtggagcagtttcgtgaaccagaagaaactcgtggcgggtgattctatcgtgtttcttcgggccgagaat

SEQ ID NO: 271505 - DNA, 457 bp, Glycine max
gtgattattcctcttttaacaatccacacccaaattctagggttccgaaatggacgctggcggaaagatcaagaagggcgccggaggtagaaagggcggcggcccaaagaagaagccggtttcaaggtccgtcaaagccggtctccaattccccgtcggaagaattggccgttatttgaagaaaggaaggtacgctcagcgtgtcggtaccggtgctcccgtatacttggctgcagttctcgaatacctagctgccgaggtgcttgagttggctgggaatgccgcacgtgacaacaagaagaacaggattattccaagacacgtgcttttggcagtgaggaacgatgaggagttggggaaattgcttgctggagtgacaattgcacatggtggcgtgcttccaaacattaaccctgttttgttgcctaagaagaccgagagggcttccaaggaacct

SEQ ID NO: 271506 - DNA, 345 bp, Glycine max
atttgcagaactttgtttcccaacctccattgcctccgcttctacctcgctaccatgatcattcctgagaagaaccgcaaggagatctgcaaatacctcttccaagagggagtttgctttgcgaagaaggacttcaatttggcgaagcaccctgagattgacgtgccgaatctgcaggtgattaagctgatgcaaagtttcaagtctcgcaagtatgtgaggaagactttggcttggatgcactataactggttcctaaccaacgatggaatcgagtttctaagaacttaccttaaccttccttccgaaattgtccctgctactttgaagaaacaggccaagcca

SEQ ID NO: 271507 - DNA, 221 bp, Glycine max
acgcataaacgcatttcttctccgcttccgatgcctcgttcgaattctctttttgatcggcgaaagggatatagtgcatctcgatccacattggtcaggctggtatccaggtcggaaatgcttgctgtgagctctactgcctcgagcacggcatcggtcccgatgggcaaatgccaagtgacaagacagttgtcggtggtgatgatgctttcaatactttc

SEQ ID NO: 271508 - DNA, 469 bp, Glycine max
  unsure (1)..(469): unsure at all n locations
cttcaagttttcttgtttttggatctaaaaaactgaaaaattcagcaaattctatgttgggtttgaaaaaagattcaatttttatgcaaaagttttgttcctttaggatttcagcatcagtggctacagcctgcatgcttcacggtgcaagcagccggcccgcaaccgcccgcaaatcctctggcctttccggaaccgtccgcattcccggcgacaagtcgatctcccaccggtccttcatgttcggcggtctcgcgagcggtgaaacgcgcatcaccggccttctggaaggcgaggacgtcatcaatacgggcaaggccatgcaggccatgggcgccaggatccgtaaggaaggcgacacctggatcatcgatggcgtcggcaatggcggcctcctggcgcctgangcgccgctcgatttcggcaatgccgccacgggctgccgcctgaccatgggcctcgtcggggt

SEQ ID NO: 271509 - DNA, 317 bp, Glycine max
  unsure (1)..(317): unsure at all n locations
cccacgcgtncgattgactagtatcattaatatggctaattcctacttatccttgcttggcgggatacttggagctctgctactcacccatcaatggcttgctgatgaatctgattcttactataagccactcagttacaagaaaccacgagtgtacaaccccaagccaaagccacccattcacaagccaaagcaacccgttaacaagcccaagcaacccgttacaagaaacccccttatggtaagtacccaccaagtcaagacaaccatcacttcttaaccatgcaacaaggcatggtaatgttaactatctacat

SEQ ID NO: 271510 - DNA, 355 bp, Glycine max
accacgcgtgcgtccacgcgatcgaccacgcgtccgggaggaactaattggattagcatggagcttcatctaatagcgtggcttatcaattttacatgtgttgtgacttgaataacgagtgagtatgctttggctactacttttgaacgatgtttgtgtccatgctcctcatcgagacgcacttcggcatcgacgtttccacgccgccggagcagctcgcgaagctctacgactccatcttcgacaagttcgacggcgaccggagcggcgccgtcgaccgccgcgagttccgcgacgagatgaggaagatcatgctagccatcgccgacggcctcggatcgttccccataaggat

SEQ ID NO: 271511 - DNA, 405 bp, Glycine max
  unsure (1)..(405): unsure at all n locations
acgnttcttttttctttttttttttaaaacagttcaataaaagattaatcttggggatgaaagagcggtacatcagtgtcaaaacaactctatttaaactgtaacaaaaaataggaacaaaactaaaagctcagcgtttcccgcctccaccaccgagtttgggacctttgggcatagcacccttagaaatgcctttacctcctgctttttgtgacttggctggaacttctgctttcttagccttcttctcatcctttgatttcttgatcctctccttaatttcactgcaccacatcagagactgagataaacatatgttatccacattaaaaagtaaggctctgaaacagaaataatattttacatgattaaagtaaaacatacatgatcatgatagcaatgatg

SEQ ID NO: 271512 - DNA, 148 bp, Glycine max
gtttcattgccccaattcttgcagagttttttaaaaagttgccgaatgtcaccttcctcaaggtggatgtggatgaattggagactgtttccaaggagtggggaattgaggctatgccacccttcctgttcttgaagaaaggcaactt

SEQ ID NO: 271513 - DNA, 449 bp, Glycine max
  unsure (1)..(449): unsure at all n locations
attccaataaataccttcctctctatattttcgcacaataccctctcacccttcaacgatgagttactacaatcagcagcaaccacccgtcggtgttcctcctccccaaggttacccaccgccggattcttacggaaaggacgcgtaccctccgccagggtacccgccgcaaggaggataccctccgcaggcgtatccagcacaggggtaccctccaccctacgcgcctcctcagtacgctcagcctccgccgcaacaacaccagaattcatctggcccacgttgcttagaaggatgtttggctgctctctgctgctgctgtctgttggatgctgcttctgaaaggagaagacgttgctttgcacaaattggatttgaaactgtgttttgactttgaatatcgncgntagcttttattattctatgttgatttacatttcgtggatatg

SEQ ID NO: 271514 - DNA, 460 bp, Glycine max
ccaattatggctctgaatctttgtatctcacctaagtttaaatgggttccttccttagatggtgcttcctattctttgagaccttcacttgggtcttgttttggtaacataaacattgctagtgtgagtctaagtactactagaagtttgagtttgaggaggagtgggagtgttagtgtaagatctagtttagaaactgcggggcccacagtcacagtgggacaggtcactgaggttaacaaggacaccttctggccgatcgttaaggctgccggggataaaaccgttgtccttgacatgtacacacaatggtgtggcccttgcaaagtgatggctccaaagtttcaagaattatctgaaaagtatctggatgttgtctttctaaagcttgattgcaaccaagacaacaggcccttggcaatagagctgggaattaaagtggttcccactttcaaaattc

SEQ ID NO: 271515 - DNA, 460 bp, Glycine max
atctttgcttggccatggaatcaccgacatgtacatccactttatccatgtgaaattctggtcaatcgggatttatttggagcctgaattacttggccacttggagcagttcaaaggaatatctgcaaaggagctggaagagaacgatgagttcttcaatgctctcatttctgctccggtggagaagtttattagacttgtggtgatcaaagagatcaagggtgcacagtatggggttcagattgagactgctgtgagggataggttggcagctgaggacaaatatgaggaggaagaagaagaagctttggaaaaagttattgaatttttccagtccaagtacttcaagaaacattcagtgatcacataccatttcccaacaaattctgccactgctgacattgtggtgtctttggaggggaaagaagactccacgtatgtgatagagaatgccaatgtg

SEQ ID NO: 271516 - DNA, 306 bp, Glycine max
  unsure (1)..(306): unsure at all n locations
tcggccgacgcgtccgataacgtacttttggtttgaagaaaaatgaatctaaaggattcaatgttgatttggtctttggtactgcttaattttcttttcttcacttgttttgcagctgataatctcccgtgccctccaaaatctactatcccaccttcctcttcaccgcagaaatgccccaaagacacgctcaagcttggtgtgtgtggaagttgcttaggcttggttaaagaagttattgntacatatccaattgtatagtgctgtattcttttgaaaggtctcgctcttttttaatcatcactg

SEQ ID NO: 271517 - DNA, 477 bp, Glycine max
gctgatagcattgtgatgtcaagaagataagcatttaggaaggatgcacatccctccatttatagtggtgatttgaatcctcaacaaagagctaaccctacctactcagctgattgcagccactggtgtcttcctggattgccagatacttggaatgaactattctatactgccttgttctattaaattttgtggtttgcttactaattaacacacttcctcttcactgtttttatgagtaatattaggtaatacatttattgagagggttgcatgatatagctgcaactgattcatatgtaaagatatgctaatgagatgaaatatttttttttattttaaaaaatttaggaaaggaggattaggatagtttccaattcaaggaatgagaagtctaccttaccaaatgtaacctatcaattatgaaagctctacttgggcaatccctagagattagaaaaggaagtttctttggtc

SEQ ID NO: 271518 - DNA, 417 bp, Glycine max
cccacgcgtccgcccacgcgtccggtcgagcagtgaataccagttgctcctatagccggcgctcaacaacagggcggacaaggcagtcaccatccgaaccagaaagttcatgacaaacaggcttctctccagaaagcaattcatcgttgatgtccttcatccagggagggctaatgtttccaaggctgaactgaaggagaaattgggcagaatgtatgacgtgaaagacactaacactgtatttgtcttcaagtttcgaactcattttggtggtggcaagtccactgggtttgggttgatctatgattcagttgaaaatgccaaaaagtacgagcctaagtacaggcttatcaggaatggacttgatactaaagtagagaaatcaaggaagcaaatgaaggagagaaagaatagagc

SEQ ID NO: 271519 - DNA, 438 bp, Glycine max
acgaatttttctctcaaccggcccaatttagcataagcccagcatggccaccgcaacagcagcggccacctcgtccttcatggggacgcgcctcctggaggcccattccggggcggggcgggtgcaggcccggttcgggtttggcaagaagaaagccgccgccccgaagaaagtttccagggggtcgggctctagctccgataggcccctgtggtatccgggcgccaaggcgcccgagtacctggatgggagccttgtcggagactacgggttcgacccatttgggctagggaagcccgccgagtacctgcagttcgagttggactcgctggaccacaaccttgcgaagaacgtggctggggacatcattgggaccaggaccgagctcgcggacgtgaagtccacgccgttccagccctacagcgaggtgttcgggct

SEQ ID NO: 271520 - DNA, 472 bp, Glycine max
aaattaattgttgctggagctagcgcttatgcacgtctctatgattatgaacgtgtacgcagggtttgcgataaacagaaagctatactattggcagatatggcacacatcagtggattggttgcagctggtgtcatcccatcaccttttgattatgctgatgtagttactaccacaactcacaagtcacttcgaggaccacgtggagctatgatattctacagaaaaggggttaaagaaattaacaaacaaggaaaagaggtattgtatgactacgaagacaaaatcaaccaagctgttttccctggactgcaaggtggccctcacaaccacactattactggtttagctgttgcgttgaagcaggccactactcccgagtatagagcatatcaagagcaagttctcatgaacagctttaaatttgcacaggctctgagtgagagaagctatgaactcgtctctggtggaa

SEQ ID NO: 271521 - DNA, 485 bp, Glycine max
gttcataagatctaatatctccaacaaagtggtttacattaacatttacatgatatagttggaatttggaagacatttcgtaatgctgaataaaagcagccttcatatggttgtatggttgaaacaaatctcatttctgggagatgcaaattgttatatttttttgtagcttagggactggctggatttgtctctcaaccattctgtgccatcttccctcttaattctttctaggtattttagtattttctctgttgaaatattatctttttaaggattttctggaaaggtgtgatcatctcattctctctgtagagcattttctgtttcaggaaaggtcagaccagaggaagctgttcaagctacactctcttctctgccagacgaggttgtagatactgttggggtgacaactttgtcgtctgaagattctgtttcagaaaggaagaggaagttggaatatcttgaaatgcaagaggagctaa

SEQ ID NO: 271522 - DNA, 433 bp, Glycine max
cccacgcgtccgcaacagagagctcgggcgtggcaacttctgctgccgagacgccagagagtgtgaagactattgaagaagcttgggacaaagttgaagacaaatatgcagtgagttcacttgccgtagccggtgtggttgcattggttggctcagctggcatgatctcagcaattgataggcttcctttaattcctggggttcttgaggtcgtaggcattggctacagtgggtggtttgcttacaagaacctatttttcaagcctgacagggaagcttttctacgaaaggtaaaggaaacatatagcgaaatacttggaagcagctaaaacagtgaggaattgctgcttagattctgttcacacaaaagagatctctgtcttgcagcattttgttaaagatgcaaacctcgcttcattttggcgcaataagc

SEQ ID NO: 271523 - DNA, 373 bp, Glycine max
gcgcccacgcgtccgctgattccatagtgaagaaaaatggcttcaatcatcgcccgcaccccaagtacatgggtcactcgcacaggtcatgtgctcaaactacctgttgtggcctcatactataccgctcttggattgccatcaatggccaaggctgtgatagtgatgtgctccatgtaggaaaagccttcaagcagctcatacctaatgatgggggcatacttgttagcagctacagctttcgcaaccatgtcaagcccagcagccatggctttggttgattagagactcatcactgaatgaactgagcattcctttgggcttatcaacaacctttttggctggatcctgtttggagtctttggtctcatat

SEQ ID NO: 271524 - DNA, 291 bp, Glycine max
acgcacaaacagaggaccgtgcatgcggaaagagttatctttcaagctcaaaatggatatatgggcctctataacgaagccgatcaaatgttgtacatacaacatggtctcttatgggactaattcatgcctgacaggccgatagaaactcctatcctctttaccgtgctgcaaagttgctcattaattctaagttcgaaataggtgattggtcccaacaggaaatcacgggagtattcatgaaaaattgcatattgcattatccaatgtacagaaatatttatccaatgt

SEQ ID NO: 271525 - DNA, 270 bp, Glycine max
cccacgcgtacggaagcttggaaatgctgatgtaagacttattatagcttctcgtggtatgtggtatgctgtatgggctgaggtggctgccaatacatgccgaggtgtacctgcacagcttgctgcaaagctggtggttaaagaagctttaaggtcaatatgtcttaaggatgatacaacttgcctccttgtagtatattattccttcacatcatcccgtattgccaacaattccaagaaagaaacgttacgtgctaactttccttctct

SEQ ID NO: 271526 - DNA, 400 bp, Glycine max
cacaattgagctagttgcaagtcaccaccatggcacttgttcaaccctttgcttctctttcgatctcttttcgcgatgctcgtgttttcactgcaccaaaatgctctcccaccactcactttcctcatcggaatttggttccaactcgagcatcattcatcgctggttccccactgttgattcgaagaaatcatggaaggaatggtgcatgcaaagcaatgcctgtttcaataagatgtgagcaaagtacccaggaagggaacagtttagatgtgtggctaggccggctagccatggttgcgtttgcagtagccatcactgttgaaattgctaccgggaagggactcctagagaactttggactcacatgcacagtgtctacagtcgcccttgcagtcac

SEQ ID NO: 271527 - DNA, 354 bp, Glycine max
acaaaacagagctaagagagagtgtgtgaaatgtcgaaacaaccgacagaacatccatggcgcgactcagggtcctcagcctcttccccccgttgcagatgatcgtgagcagctccgaacagccttctcaggttggggaactaacgacgagctgattgtatcgatcttggctcatatgaatgctgctcacaggaagcttatcagagaaacttatgcccagacctatggagaagatctcctcaaggccttggacaaagaactcacgagtgattttgataggctggttcatctttggacacttgattctgctgaacgtgatgcattattggcaaacgaggcgactaaaaaatggac

SEQ ID NO: 271528 - DNA, 450 bp, Glycine max
cccacgcgtccgaaaaaaaaaaataaaaaaaaaaaaaaaaaaaaaaaaaaaaaaagaaaaaaggaaaaaggaatctatataaatataaaaataatatatataaggtacaaatagtaaatcgaggtacccattttatgataaactttccttccatttttgttcctctagtaggcctagtatttccggcaattgcaatggcttctttatttctttatgttcaaaaaaacaagattttttagatccagaaaacaaagtaaaattctggggtttttaattccccaattataatactaaattcaaaaaaaggagagtaatgagtataatctttcgctcaaacgatgtactgatatattctatggcggaggttcgaagaacaagcaatttattttaggccgttttcactttgttaggttcattggggtaattgttcgttgcaatttccagttatct

SEQ ID NO: 271529 - DNA, 392 bp, Glycine max
cccacgcgtccgcccacgcgtccggaagaagatggcacaaacgctggcaatgcccgtggcacgttcgctagctatcatctccaattctcgcctctccaacacactctccgttcccgttctgaacaaaccaaaggttcaagggtcaagcatcaagtgcgttcgtgttggcggtgtggagattccgaacaacaagcgaatcgagtactcgctgcagtacattcatggaattggaatgaccatagcgaaacagattctctgtgatatccaaatggataataaaatcacgaaggaactcactgaggaggagctaatcacactcagggacgaggtctccaaatacatgattgaatgcgacctgagacggttcaatggcggtaatataaagagactga

SEQ ID NO: 271530 - DNA, 408 bp, Glycine max
accacgcgtccgaccacgcgtccgcccacgcgtccgcgacggtttcgtgtaccgtgagcacgggaggtcggcatgatactacgatggacgctactggaccatgtggaagctgcctatgtttggttgcactgatgcttctcaggtgttgaaggagcttcaagaggctaagactgcataccccaacggcttcatccgtatcatcggattcgacaacgttcgccaagtgcagtgcatcagcttcatcgcctacaagcccccatgcttctaagtgtgaaaaatttgcaaagcatttgtagcctgcaccccactttggttgtttgtacttaaactacattcccatttgattttgctttttgagatgtcatcatccctgtatttttgggttctggtttcggacttcaatggaaa

SEQ ID NO: 271531 - DNA, 363 bp, Glycine max
agaacaagtagttgagaactaataaggagaagcaaatggcttcctcaatgatctcttcccgagctgttgccactgtcaaccgtgccggtgccggcatggttgctccattcactggcctcaagtccatggctggcttccccaccaggaagaccaacaatgacattacctccattgctagcaacggtggaagagtgcaatgcatgcaggtgtggccaccagttggcaagaagaagtttgagactctttcctacctgccagaccttgatgatgcacaattggcaaaggaagtagaataccttcttaggaagggatggattccttgcttggaattcgagttggagcacggtttcgtgtaccgtgagc

SEQ ID NO: 271532 - DNA, 356 bp, Glycine max
ataacacgtacccacaaactaagcaagcggatcaaaattgtaacttctgcttctatgttctgcctgttggatatcgcttgtcagccattgctgatactcctgataatgctactggactcatgttcactccatcctatattgatatcaagaccaacaatgacattaccttcattgctatcaacactcgtagagtgcaatacatgcatgtgtatccactcattcacaaaaagaaattcgagactcttttctaccttccacaccttaattatacacaatttgtatacgaattataataccttcttacgaacttattgatttcttgctcaaaaattttacttggaacacggtttcttata

SEQ ID NO: 271533 - DNA, 421 bp, Glycine max
  unsure (1)..(421): unsure at all n locations
ggaagaagagaagattttcatcagttgagttgagagaaggaaagggaaaatgggtaaggatctgagcgaggaacaagtgtcttccatgaaggaagccttctctctattcgacactgacggagacggtcggatcgctccgtcggagctggggatcctgatgaggtctctgggaggtaacccgacgcaggcccaactcaaagccatcgtggctgaagagaacctcacggcccccttcgacttcccccgattcctcgatctaatggccaaacacattaaacccgaacccttcgatcgccaactccgcgacgccttcaaggtcctcgacaaggactccaccggcttcgtcgccgtcttcgagctccgncacatcctcaccaacatcggcgagaagctcgagccctccgagttcgacgagtggatc

SEQ ID NO: 271534 - DNA, 275 bp, Glycine max
cccacgcgtccgaaaaaaaaaataaaaaataaaaaaaatttaaaaaaaaaaaaaataaaataggagaaaatagaaaaaaaaaaaataaaaaaaaaaaaaaaaaaaaaaaaaaaaaaaaaaaaaaaaaaaaaataaaataaattaaaaaaaaaaaaaaattaaaaaaaaaaaaaattatagggctaattttttataaaatattattatctttacacttcattataatttaaaatttttttttttatactcaataaacaaattcaattgcacctttt

SEQ ID NO: 271535 - DNA, 463 bp, Glycine max
cccacgcgtccgggccaccacagcagctctatccggaaccatggtgagcacctccttcatggtgaatcggcctatgacgaccaagagcctaaagacattccccaacgctctttttggtctgaaaggtggacgacgtggtcgtgtaacttgcatggcctcgtacaaggtgaagctcataaccccataaggagaagtggagtttgaatgcccagatgatgttttcattgttgacaaggctgaagaagaacgcattgaacttccctactcgtgcatggctggttcttgcgtttcatgtgttgggaaaattgtgaaaggtgacgtgtaccaatcatatggtagcttccttgatgatgaacatatagaatgtggatgggttcttacctgtgttgctctacctaagtcagacgttgtcatttagacacacaacgattgatagatccaatgatcgatgtatatcataatg

SEQ ID NO: 271536 - DNA, 332 bp, Glycine max
cccacgcgtccggatcctattgtgttggccttcgggatcggagtaatgattaacaggagtgcagtctttcacgggcaaggaacgggcacttgatttagttccaacgaagttgcacgagcgatctcccatattccttggtagctatgatgatgttgaggaaatcaaagctctttatgctgctgctgagggtgaacaagaatgaaattggaaaggtttcttgtatctttcgctacttacaagcgcttgttttctaattgttactagcaggtgcttataagacaactagttatctggtcatgtatatgttaataaaattggttgatgtgcctgtc

SEQ ID NO: 271537 - DNA, 455 bp, Glycine max
gcgaggccgtgtggttcaaggctggttcacagatcttctcggagggaggactggactactggggcaacccaaacctgatccatgctcaaagcatccttgccatctgggctgttcaggttgtgctcatgggttttgttgaaggttacagagttggtggaggaccccttggtgaaggacttgaccctatctaccctggtggtgcatttgaccctcttggtctggctgatgaccctgatgcattcgctgagttgaaggtcaaggaactcaagaacggtcgcttggctatgttctccatgtttggtttctttgttcaggccattgtcactggcaagggccctattcagaacctttacgaccatgttgctgatcctgttgccaacaatgctttggcttatgccactaactttgtccctggacaatgaacatttgaattcaatgcaatcttctgctcccat

SEQ ID NO: 271538 - DNA, 342 bp, Glycine max
taaaaaaaaaaaaaaaaaaaaaaaaaaaaaaaaaaaaaaaaaaaaaaaaaaaaaaaaaaaaaaataaaaaaaaaaaaaaaaaaaataaaaaaaaaaataatttatttccattttttaattacacatttttaaaactaattattttttatattatttttcttaaattattttaacttaaacatatttttacaaactttattattctgaaattcttaccatttacttatctttttattctttttttctaatatttttttttacaatttttttattttttaaaattttctaatttatcatcattatcaacattttttaacctttaatgcataatgtcattcactt

SEQ ID NO: 271539 - DNA, 252 bp, Glycine max
accactcgtccggcaatatgtgagggccgttctagctatatacgaaattctagattaataatggaatagggtaatcattggatttagttggaggggttcatatatttatggaatcgattactatactagtaataaatcgtacaaaaaataaatatatacataatatatatatattaagaacaaacacaaattatatgtgattagtcgcggaatttaaaataaaaaatgaaagctatacaaataataagatac

SEQ ID NO: 271540 - DNA, 468 bp, Glycine max
cccacgcgtccgcccacgcgtccggttttcttaaaatttcttccttgccactgccagtgtgtgaccagcatggccaccgtcacaacccaagcctccgccgcgattttccggccatgtgcctcgaaatcgaggtttctgaccggctcttccggtaaactcaaccgggaagtgactatgaggccaatggggtgccctccttctgcctctttcaaggttgaagccaagaagggagagtggttacctggcttggcctccccaacttacctcaatggcactcttcctggtgacaatggatttgaccctctgggactagctgaggacccagagaacttgaggtggtacgttcaagccgagcttgtgaatggaccgtgggccatgttgggtgttgcaggaatgctacttcctgaggttttcaccaagattggaatcatcaatgcccctcaatggtatgatgctgggaaatcggag

SEQ ID NO: 271541 - DNA, 409 bp, Glycine max
  unsure (1)..(409): unsure at all n locations
cactcataacacaaagcacaaagcaaagctcatccttgagttaaaaaatggcagcagcttcttccatggctctctcatccccatccttggctggcaaggccgtgaagctgggcccatcagccccagaagtgggaagggtgagcatgaggaagaccgtcaccaagcaggtctcctcaggaagcccatggtacggcccagaccgagtcaagtacttgggcccattctctggcgagcccccgtcctacctaaccggtgagttcccaggcgactacggctgggacactgctgggctttccgcagacccagaaaccttcgccaagaaccgtgaactcgaaatgatccactccaggtgggccatgctncgagccctgggctgcggcttcccggagttgcttgtccgcaaccgggt

SEQ ID NO: 271542 - DNA, 460 bp, Glycine max
  unsure (1)..(460): unsure at all n locations
cccacgcgtccgcccacgcgtccgattaacctttctcattccccatctcctcaccttattgagccactgctaattgctagggttccgaaatggacgctggcggaaagatcaagaagggcgccggaggaagaaagggcggcggccctaagaagaagccggtttcaaggtccgtcaaggccggtctccaattccccgtcggaagaattggccgttatttgaagaaaggaaggtacgcccagcgtgtcggtaccggtgctcccgtttacttggccgcagttctcgagtacctagctgctgaggtgcttgagttggctgggaatgctgcacgtgacaacaagaagaacaggattattccgagacatgtgctattggctgtgaggaacgatgaggagttggggaaattgcttgctggtgtcaccattgcacatggtggtgtgcttncaaacattaaccctgtttt

SEQ ID NO: 271543 - DNA, 315 bp, Glycine max
attaacctgacctctacgcgagtattccaaatcacggattccctagcagcatagactactggtgcttgcctaagcgtatcagaaatgctagcaaacctcatcaacctaacaggaaccacaaggccagatccatctgcctctacccctgcctgattcaagactgaagctcctttatacaaaaacaatacttcacctccaaaagaatctgccgctactgctcctgccaatgataagcttaccaagtcgtatcctcctgacacaatgatcttctcgcctgactatctcttggacctatctgagatcccatactacttg

SEQ ID NO: 271544 - DNA, 383 bp, Glycine max
  unsure (1)..(383): unsure at all n locations
ggctcgtacggaagaagcaaatggctaactcaatgatctgtttcacagctgttaccactgtcaaccgtgccggggccggcgtgattgctccattcactggcctcaagtccatggctggcttccccaccagaaagaccaacaatgacattacctccattgctagcaacggtggaagagtgcaatgcatgcaggtgtggccaccagttggcaagaagaagtttgagactctttcctacctgctcagaccttgatgatgcacacttggactatgaagtagaataccttcttacgaagggatggattccttgcttgaaattcgacttggatcacggcttcgcgtaccgtgagcacaacangttaccaagatactacgatggacgcta

SEQ ID NO: 271545 - DNA, 435 bp, Glycine max
  unsure (1)..(435): unsure at all n locations
taaagacattgatgttagggcacactcttctaccaccttcaaatggtaatagctcaaaatggtgtcccgtaacatgaatgtctttatcggtggttagaaacctttctggtttgaactctaatggatttgaccaaacactaacatctgtgtggatcttccaaagatttgtaattagacgagtcccttctttgacattgtagccacctaaagtgcaatcctctatgaattcacgaggtgctgaaagaggacctgcacggtataatcttaaagtttctttgaccacagcttgaatgcatgttaacttacttatatcatactcagntatacatctttctttaccaacttgaaaggcaagttctgctattactgtttccaatacaagatgatttctcaatttcacacatactggccattgtagaatagcaataattgttt

SEQ ID NO: 271546 - DNA, 428 bp, Glycine max
ctctctctctctttcctcccttccttccgtctcaacttcattttcctttcaaatagtaacggtagaggaaaatgcagcttgcaagagcacttggcttgcaaccaagacaaattgctatatggttccagaatagaagggccaggtggaagaccaagcagttggagaaagactatgatgttctcaaaagacagtatgaagctgtcaagtcagataatgatgcacttcaagctcagaaccaaaaacttcaggctgagatattggcactgaaaagtagagagccaacagaatccataaaccttaacaaagaaacagaaggatcctgcagcaatagaagtgagaacagctcagacatcaagttggatatctcaaggacaccagctattgacagtcctcattctacacatcagcaacagccaagcagacccttc

SEQ ID NO: 271547 - DNA, 441 bp, Glycine max
gcctcttaggccacagactaagttcagatatatcacttgaacttgactatttggaccttcgttccagactctttgagcattaaccatgtctgtcccattatccacattcaccccatgaaacaaaaaccttcgaagagggatcttctctcagacttgacttgtgacagccaccttaagattgacatgttcatcaacagacagtccaacttgcctcttcatgaaatgtaacgaggaagttactatcttaaaatgttattgcctagcgcttacgaggaggcacattggtggagctcacaatatattcggaaacctcagcctgatcacggtgactcatagcgatggctctcacagcttcatgctgacacgtgccgtgctggtgccatcctatggagatgttcttacagtgatgcagcaccagacacgactcatgttcaagacact

SEQ ID NO: 271548 - DNA, 211 bp, Glycine max
ctcattctgtcttatgcttatgttaatagattttgtaatggaagatatttccagtttattggattaatgtatgatcatagcaatctttacttttcaaaaaaaaaaaagaaaaaaaaaaacaaaaaaaaaaaaaaaaaaaaaaaaaaaaaaaaaaaaacaaaattcaaaaatacttctaaaaatgcacatcaattattcacaaaaagaataa

SEQ ID NO: 271549 - DNA, 472 bp, Glycine max
  unsure (1)..(472): unsure at all n locations
gcattaaccccaaaaacctcaaactcagtcctaaacgcttctttcgcaaaaaggggcgatctgtaatctcacgctccgacccaccttcattcggatccggatcttcctccgacgactccaccacaaatcacaagccttccgctggtaaccaaactccgaccagcgtcctcccgggcgtctccggagactggtccgacgtcgccgccgtcgacgtgcggngggacctcgcccaggccttccgcctcatcgaccgcgacaacgacggcgtcgtcacgcgccaggacctctaggccctcctcacgtgcctcggcgcgtcgccgtgccccgacgacgtggcggtcatgctcggcgaggtcgactgcgacggcatcaccgtagaaaggctcatgatctacgtcgcgtcgggtctgaaacccgtttcggatccggacgagctcaatgaggcgttcgatgtgttcgacacggatcgcga

SEQ ID NO: 271550 - DNA, 374 bp, Glycine max
cccacgcgtccgcatgcagtagcagtaggagcacttgctgttccatctccaactcccatcggttttttgaattccactgctccagtggaattggaacatggtcatggtcatggggtgaagctcattcaagatgggtataagtggcgcatcgttttggcttacgatggaacccaatacgcaggctggcaatatcaggagtctccccctactgtacaatgcaccgtggagaaagctttaactcaggcaacaaagcttcaaaggaaggatctctgtttggttggtgcaagcaggaccgatgcaggagtccatgcttgggttcaggttgctcatttttttacaccctttaactatgacaacttggaacaacttcatgc

SEQ ID NO: 271551 - DNA, 326 bp, Glycine max
cacaaacacatacattgtagtatcacttttgtctcggattttgttcttttgagttatggcgggcttaagggttgcatgtgtgggtttgatgtgcatggctgtgatgagtgcaccaatgatggtgcaagccgtgtcatgcaatgatgtttctgtgaacctagcaccgtgcctatcttacctgatgcacggtggagatgttccagaatcgtgctgtagcggagtgaggaacattctgggttctgccagcaccacctttgacaaacaaaccgtgtgcaaatgtcttcagcaagctgctaataactatggcatcaacgactaatacgctc

SEQ ID NO: 271552 - DNA, 239 bp, Glycine max
aaaaaacataaaaaaacaaaaaaaaaaaaaaataaaaaataataaaaaaaaaaaaaaaaaaagaaataaagaataacaaaaaaaaaaaaaaaattaaaaaaaaaaaaataaacaaaaaaataaaaaaaaaaaaaaaaaaaaaataaaaatataaaaatggctcactttttataaaacctcaataattatacatgatattttaaaacatttcaatttatataattgcacactaaaaattt

SEQ ID NO: 271553 - DNA, 426 bp, Glycine max
cccacgcgtccgcccacgcgtccgagagaatggacgctattgattctgtgttcgatccgcgcagggaattcgccgaggacagcgtcaggctcgtcaagcgatgccacaagcccgatcgcaaagaattctccaaggttgctgtgcgtaccgcgatcggtttcgttgtgatgggattcgtgggttttttcgttaagctcatcttcattccaattaacaacatcatcgtcggatctggttaggatgaggggaatcgcaatcgcctcaggaattcaagttatcaaacaaaatgagaggcagaaagagttccaacttcaaatagatagctcaatgaaattaattgtagttctgctgtatttcatttttggtttacctttgtatcttcggaagcattacaattttatttgaaatgtaaaattttgtttttcc

SEQ ID NO: 271554 - DNA, 437 bp, Glycine max
atcatggccacctctgctattcagcaatcatcattcgcaggtcaaactgctctgaagcaggtcaatgagttggtgcgcaagaccggtggcgccggcaaaggtcgcaccaacatgcgccgtaccgtcaagagtgctcctcagagcatttggtatggccctgatcgtcccaagtacctgggtccattctcagagcagattccgtcatacctgaccggagaattccccggtgactacggatgggacactgctggactatcagctgacccggaaacctttgccaggaaccgggagctggaggtgattcacagcagatgggccatgcttggtgcacttggctgcacctttccagagatccttgagaagaatggtgtgaaatttcgcgaggccgtgtggttcaaggcttgttcacagatcttctcggaaggaggacttgacta

SEQ ID NO: 271555 - DNA, 306 bp, Glycine max
tctacaacatctagtgctgggttaaacggttttgcatctcacttctcgtgtggaggaaaggggaaccatgccctgcttgctgctagcattgcagggaaagttggtgcttctgttattcctaaaagagttattgtggctcttgctgctgcaccaaatatgtcatggatccccactgtaaaaggtggtgggagtttcatagacccataatgtcttgataactctctaccaggttactatggttttgacccactatgactaggaattgaccctgcaatactgaaatgatatatacaatctaaactcatt

SEQ ID NO: 271556 - DNA, 405 bp, Glycine max
cggacgcgtgggaaaggatccaaaggtcttagtctctgtaacatggatgaagatggattggaggcttgcaagccctcagtgactcagccaaacccagttgatccatcccctgattgctgcaaggctctggatggtgctgacttgaagtgcctttgctcttacaagaactcatcagagttgcctcttctaggaattgatctaactcttgctgcttcacttcctgcaaagtgcaatctcactcctccagataattgctagttagcttctctgagctatttctgcttttcgtttttgtgtgttataatcttttttctgcagatgacctattgagaaaaaagaaaattattgtactctaattttgatccctcttatttttgtggtacaatataatgtccttaatttcct

SEQ ID NO: 271557 - DNA, 502 bp, Glycine max
  unsure (1)..(502): unsure at all n locations
aattcccgggaacaaaggaaaagccatttggatcctctcttctcttctttgatctccgttacccttttcgttttctcaacacagagagagagagagagtctttcggagttcgtttgcgtgtgttgtgtgatcagtcaccgatggcagcaccacctgcgagggcacgtgccgattacgattacctcatcaagcttcttcttattggcgatagcggtgtcggaaagagttntctgcttttgcgattttctgatggttccttcacagccatttttatcaccaccattggcatttattttaagatatgaaccattgaacttgatggcaaacgcattaagttacaaatctgggatactgctggtcaggagcgatttctaactattaccacagcttattaccgtggagccatgggcatattgcttggttatgatgttactgatgaagcatctttcaacaatattaggaattggattcgcaacattgaacaacatgcttctgacaatgt

SEQ ID NO: 271558 - DNA, 449 bp, Glycine max
  unsure (1)..(449): unsure at all n locations
cgaacacactctcacataactctctctgtctctctctctctgagtccttcttcttcttcgtgcanccaacatgagctcaatcgttcagggtttctccaagtcactggccatgaccattctctctgagatcggtgacaaaacgttttttgcagctgcgatactggctatgcgacaccctagacgcctagtcttatcaggttgcttatcggctttgattgtgatgaccattctctctgctcttgttggctgggcagctccaaatctgatctctcgcacatggactcatcacattacaacatttttattcttgggatttggactttggtccttgaaagatgctatatttgaacaaagggatgcggaagaattggctgaagttgaagctaaatntggataagattggaaggctagcaatggagctacaaaaaatagcaataaggatgatgatg

SEQ ID NO: 271559 - DNA, 428 bp, Glycine max
  unsure (1)..(428): unsure at all n locations
attattcctctccctaatggcttctcaagttcttcttcaggcactgcttgcccccaagctgagtttcccttcttcttctcgtaacgtggcgttaatttctagggttccttccaccccaatttcatggcgttgcactcccctcattgctaagcctagtttcgtagtgagagctgacaccaacctcgatggcggtggtgaagccaccgaggatgttccttcggataatgctgaaaaagtttcggaaggcgaagcagaacaagtttcggattctgaagctccgaaatcgcctagaaaaccccgagtcaaactcggagacattatggggatattgaatcacagggcaattgatgcatccgagaagcaaagaccaactccagacattaggactggngatattgtcgaaatcaaattggaggttcctgagaaca

SEQ ID NO: 271560 - DNA, 350 bp, Glycine max
cccacgcgtccggttgtggtgtttcatttgtgaaactaacaacaacacaaggccatcatcgtggcagctgcttccccaatggcaagccaactcaagtccaccttcactaggactcttgtagctcccaagggcctctctgcctcttcaccacttcacctcgtgccttctagaaggcaatttagcttcactgttaaggccatccaatcagagaagccaacctatcaagtgattcagccaatcaacggtgacccattcattggaagcctggaaaccccagttacatccagccctttgatcgcatggtacttgtccaacctgcccgcatacagaaccgcagtgagcccactact

SEQ ID NO: 271561 - DNA, 409 bp, Glycine max
cccactcgtccgacgaaacccttttctgtctctctctcttcaatttcaccctggtagcatgggtacattcctttgccttccttgaatcgttcttaattgcgagaggggatatcgtacaagttgattggcctcccattaattgcaggtctgaatgatctgatggagtctaaagtcttgaataagaagtccgttcgtactaagaaccttttgtacgaagctactctcgattacaccattgaagactttctaccacaccttggaattaaaaagtccagatctgctgcttactccaactgcatgcgcaagccatcctgagattaactagcttgtagtgaccacataacccgcgtagtcttgcatctgctatattattttagtctcttcttgtccctttttttagatctcttcc

SEQ ID NO: 271562 - DNA, 358 bp, Glycine max
atcaaacctttcaaaagttcgtctcaagttttaaactttcaaaacctcttaagaaacatcgtgacaacgtaaatagtcaataggaagccaactcaaaaaacaacacttcactaaaactctaaaaacatcccaaaatcctctctatctatataccactttacctcttaccttctaaaatgcaatttatcttcacttttaaaagccatccaatcatagaagccaacctatcaagtgattcagccaatcaactttaacccattcattgtaaacctccaaaccccacttacatacatcccttttatctcatgatactttttcaacctgtccgcatacagaaccacaatcagcccactactaa

SEQ ID NO: 271563 - DNA, 442 bp, Glycine max
gctccctcgaactgttgtttggtctcttctctcttatccatggcatcaacgttgctcaccgtaccaactcccttgctacacaaaaccaatgccatcagtttctctaacaagagaccctcatttttgcagaggagctctctgaagattcatgcaattaccaaaaaatgggaacccacaaaggttgtgcctcaggctgatagagttcttattcgtttggaggagctttcagataaaacagttggtggagttttgctgcctaaatcagctgttaaatttgagcgctatcttgtgggagaaatcctaactgttggtgctgaggctggagaactaaaggctggaacaaaggtactattcactgacatgaatgcttatgaggtggatttggggactgatgcaaaacactgcttctgtaaagcacgtgacttattggccgttgtggagt

SEQ ID NO: 271564 - DNA, 249 bp, Glycine max
  unsure (1)..(249): unsure at all n locations
taaaagcagaatttttttcattgcgtggtcccctgacacatcaagggtgaggggcaagatgatttatgcaagctccaaagacagattcaagagggagctggatggaattcaagtagagttgcaagcaactgatcctactgagatgggtcttgatgtgttcaaaagccgtgccaactaanatgattattanaatagtaggctttctggtggagcagcacccctgaagcttagttactcatatggaaaata

SEQ ID NO: 271565 - DNA, 422 bp, Glycine max
cggacgcgtgggtttcaccgcagtgttagggtttctgtagcctccaaccagaaggagagggaaatggctcccaaacatcctagtacgggtttgtttgttggattgaacaagggtcacgttgtcaccaagaaggagttgcctccacgcccttcagatcgtaaggggaaaacaagcaagcgagtgcactttgtgaggaacctcattcgagaggttgccggctttgcaccttatgaaaagcgaataactgagttgctcaaggttggaaaagataagagggcactgaaagttgccaagagatagcttggaacccattagcgccccaaggaaaagaaagaagggaatgcccatggtcttccgaagatgaaggcttgttgagcttgagaccagaagaaattagtcttggttaccttttctaggttcac

SEQ ID NO: 271566 - DNA, 302 bp, Glycine max
gtcaaaattgctgagttggaatcgtcattaaaatccattgaagatgagaaaatagaacttgaagggaaaatagcttctttatcagaggagttatcaatagaaaaggatcggattctaaggattagtgcagactttgacaattttcggaagaggacagagagagatcgcctttcattggtcacaaatgctcagggtgaagttgtggagagtttgttgcctgtgttggataattttgagagagcaaaaacccagataaaggtggagacagagggagaggagaaaataaacaacagctatcagag

SEQ ID NO: 271567 - DNA, 376 bp, Glycine max
atccttgtgtttttcctttcgggattggtttctatggcttctgaagtaatagagtaccgaggctttgtcggtgggcttgcttgggccaccgacagcgatgctctcgagaaagccttctctcattatggtgagatcgtcgaatcgaaggttatcatcgatcgtgaaactggaagatcgagagggtttggatttgtgaccttcgcctcggagcaggcgatgaaagacgcaatcgaaggaatgaacggtcagaacctcgacggtcgtagtatcacagtgaacgaagcacaatcccgtggaagaggcggtggtggcggtggatacggaggtggtggtggttatggcggcggcggttacagccgcggtggaggaggatatg

SEQ ID NO: 271568 - DNA, 430 bp, Glycine max
tattgttcaagattcaggtactgcgtttcttaagcagacacagatggctcgtacgaagcagaccgctcgtaagtccacaggaggaaaggctcctaggaagcagcttgcaaccaaggctgcacgtaagtctgcaccaactactggtggtgtgaagaagccccaccgttatcgtcctggtaccgttgctcttcgtgaaattaggaaataccagaagagtaccgagcttttgatccggaagctccccttccagaggctggttcgtgaaattgctcaggacttcaagactgatctgcgtttccagagccacgccgtgcttgcattgcaagaagctgctgaggcataccttgttgggctctttgaggacactaacctgtgtgccattcacgccaagcgtgtaaccattatgcccaaggatattcagctggcaaga

SEQ ID NO: 271569 - DNA, 414 bp, Glycine max
catgatcaagcattctcacatcgcttctcattttctcgttttcccaatcgcagctaaaaggtcctctgtacccttttacccttttctcaataagaagaaattaggaaacgcaacaatggctcaagcggttgaagaatggtataagcagatgcccgtcatcacgcgctcctatctcaccgctgctgttgtcaccactatcggatgctcccttgatataatttctccgtatcatttgtacttgaaccctatattggtggtgaagcaatatcagctttggcgcctggttactaatttcttgtactttcgtaaaatggacttggatttcctgtttcatatgttttttcttgctcgttactgcaagcttcttgaggagaactcgtttcaggggaggactgctgatttctttacatgctc

SEQ ID NO: 271570 - DNA, 311 bp, Glycine max
atttttctcactgtcttgtctctccagagaactgtatagagagagatggcagctgcaacagctggtgctgtgttaaatgggttgggatcttccttcttgagtggaggaaacaggagccaaacccttctggccactgctattggaggcaaagttggtgctgctgctgttactgttagtcctagaagactcattgtggtagctgctgctgcaccaaagaagtcatggctccctggtgtcagaggtggtggcaacctcgtcgacccagaatggcttgatggatcgctaccaggtgactatggctttgacccact

SEQ ID NO: 271571 - DNA, 432 bp, Glycine max
cttctgcagccgttgctattccctcattctttggcctcaaggcaagcgcaggcaaagtgggtgccgcagttaaagtctcagctccccaagccacaaggttgggcatcaaggcttcgctgaaagacgttggagtcgctgttgtggccactgccgcgagtgcagtgctggctagcaacgccatggccattgaagtgttgctgggtggtgatgacgggtctctggctttcgttcccaacaatttctccgtggcctctggggagaagatcgtgttcaagaacaacgcaggtttcccccacaacgttgtgttcgacgaggacgagattcctagcggcgtggatgcaaggaaaatctccatgagcgatgaagaccttctcaatgcgcctggtgagacttacagcgttactttggatgctaagggaacctacagtttct

SEQ ID NO: 271572 - DNA, 273 bp, Glycine max
caatgtaattttctaaaaaaaaaaaaaaattttaaaaaaaaaaaaaacaaaaacaaaaaaagaaaaaataaaaaaaaaattatggaccacaaccggaccgtctagactatccaatctaacctacccttcccttccacgccatagcttatctattctataacctaacttaaattcacttcactgccctttacaacacaacgactggaaaaacccatcccttacctaacttaatttacttgcattacatcccattctcgtctgatcacctaatat

SEQ ID NO: 271573 - DNA, 409 bp, Glycine max
  unsure (1)..(409): unsure at all n locations
cgcaagcaaaaagaaagaatcccaggcgaggagaaagatggaggggaaggagcaggatgtgtcgttgggagcgaacaagttccccgagagacagccaattgggacggcggcgcagagccaagacgacggcaaggactaccaggagccggcgccggcgccgctggttgacccgacggagtttacgtcatggtcgttttacagagcagggatagcagagtttgtggccacttttctgtttctctacatcactgtcttaaccgttatgggagtcgccggggctaagtctaagtgtagtaccgttgggattcaaagaatcgcttgggccttcggtggcatgatcttcggcctcngttactgcaccgctggcatctcanggggacacatataccccgcggtgacatttgggctg

SEQ ID NO: 271574 - DNA, 441 bp, Glycine max
gtagtttccaaacttaaaaatgttaaacgttttgtattaatccaacaaaaaatgggccttgtaaactaaagaaaaacaaactaagattggcccaaactgaagaaatacaaaaaaaatggcttgagatcaagcctaaccacgaaaaaagaaaaaagagaaaaatattgggactagcccttttgttgccagatgtttagattggtgaatgctatcattaacatttatagataatgtatactaaaacttattcctggtgcattgaatttcatgctttgtaatcgcaagttttagactaaagatcattcctgaactatcatgttttacattgatggtttaaactttgatattttacttcaaaaaaaaaaatatttatttatttaattaaatttaaattttttttttattatataaataaaattttttttttaaaaatttttttta

SEQ ID NO: 271575 - DNA, 412 bp, Glycine max
cccacgcgtccgcccacgcgtccggaaggactcgctgttaaactcactgggtttaaaaatgcagtgcccggtgtgtttacattgaagagagttcccgccgatgaaattatcggctacaacatcttgttctgtcctcttgataataacccatgtgggtatgttgcggttcatttcgaccaattccgaaacaggcgtttggtggtgtctgaggttcaggaggatgggttatgggttatgtttcagaaactttcatatgcatcaggattaactctttcatctgcatgaagcaccccttgccctcaaaagtcatatatgtactttcacgtagtgagagacatgagtgagactaaataaatgcttcatgctgtattcaattattgcaagtctaaataaaataatcgaagtttatgtc

SEQ ID NO: 271576 - DNA, 429 bp, Glycine max
ctccgctctttggtttgctcaaccgatctcctcagcaatggtgaacgttccgaagacaaggaagacctactgcaagagcaaggagtgcaagaagcacacgctccacaaggtcacccaatacaagaagggcaaggacagcatcgccgctcagggaaaacgccgttatgaccgcaaacagtcctgttacggtggccagaccaagcccgttttccacaaaaaggcgaaaaccaccaagaaaattgtgttgaggctccagtgccaaagatgcaagcatgtctcgcagcacgctatcaaaaggtgcaagcactttgagatcggtggtgacaagaagggaaaaggaacatctctcttctagatggaatattagaatttgcaatttcacacactctctgtacttttctcagtttgattgccatcttcggcttttaa

SEQ ID NO: 271577 - DNA, 430 bp, Glycine max
  unsure (1)..(430): unsure at all n locations
caccttcgttcactcttcttctcttgcggctagggttttagcgcagcttcttctagatttgaagaagatgggtaaggaaaaggttcacatcagtattgtggtcattggccatgtcgactctgggaaatccactaccactggtcacctgatttacaagcttggaggcattgacaagcgtgttattgagaggtttgagaaggaagctgctgagatgaacaagaggtctttcaagtatgcctgggtgctggacaaacttaaggctgagcgtgaaagaggaatcaccattgatattgctttgcggaaatttgaaacaacaaagtattattgcacagttattgatgcgcctggacatnaggatttcattcagaatatgattactgggacattccaagctgactgtgctgttcttatcattgattcgaccactggt

SEQ ID NO: 271578 - DNA, 303 bp, Glycine max
aaaacaagaactctacatacttcgtcaaatttatacctaataatgcgaagtccagcgtgggggatattccacctaagggtcttataatggcatccactttcattgctaactctacttctattcatgatatgttcatgagagttagtgagcattttacagctatgttcaatcacaacgctttcttacactgttacaccggataaagaactgatgaaatgcaattcaccgaaggcccaagtgacatgaacgatcttgtcactgtgtatcatcagtaccaggatgctactgctgactaggactagt

SEQ ID NO: 271579 - DNA, 328 bp, Glycine max
cccacgcgtccgcagaattggaatcggaataagaaaggagaattagggtttgtggagatggaagggcgaggcgttgatgaagtgaacattgaagagttggcctcgaatctttccctctacaaagatcaactgaaccaggttaggcaactcttgaacgatgacccttcaaattctgaatatgctgacatggagagggaactttccgaggtctgctctgtctcctgatgtccagcatgctttctcctcatatgagatgttcacactgagattctaagtcattgctttgactgaggaactccttgcaactgcaaagcagaatgaaatccct

SEQ ID NO: 271580 - DNA, 433 bp, Glycine max
cccaggcgtccgcacaattgcaatcggatttagaaattacaattacggtttgtggagatggaacgtgaaagcgttgatgaagcgaacattgaacagttggcctcgaatctttccctctacaaagatcaactgaaccaggttaggcaactcttgaacgatgacccttcaaattctgaatatgctgacatggagagggaactttccgaggtctgctctgtctcctgatgtccagcatgctttctcctcatatgagatgttcacactgagattctaagtcattgctttgactgaagaactccttgcaactgcaaagcagaatgaaatccctgctcctcctaacgctgctgctgcctctccaaccttgtccatacataatgacaatcaagtgctggatagcagctctgatcatcaagagaaacttcctgttggcacc

SEQ ID NO: 271581 - DNA, 236 bp, Glycine max
tcccacccatcctctcatcaaaattacaaatattctacttatctacaacaataatatacatgatcacatatacacaatcatcattcccaacactaactactagatctccaaaattaaataatataataaaaaaaaatgtcaattattaaatttcaccacaatcttcatctgccaattgctttactaccatagacaatactaacctatttaatcaataaccgatcatccaaaaataa

SEQ ID NO: 271582 - DNA, 341 bp, Glycine max
cactgttcagcttcccgtgggttttcgttttccattcctctttaccattaaggagttgtgtgcatctttgaaaccagacagcttcagtggggagttcctagtgccttcttaccgtggttcctctttcttggaccccaaggtaaggggtgcctcaactggttatgacaatgctgttgctttgcctgctggtggcataggagatgaagaggaacttgctaaagaaaacaacaagagtgcttcttcttccaagggcaaaatcaccttgagtgtcaccaagaccaagcctgatactgctgaggttattggggtcttcgagagtgttcagccttctgatactgatt

SEQ ID NO: 271583 - DNA, 279 bp, Glycine max
  unsure (1)..(279): unsure at all n locations
gaccgcacgcgtccgcccacgcgttcggaggttttgatgcaacgctgtcacttataaaggatctctatctacnaaggagcgttttaaaacccttctctctgtgattaagagaatggcttcacatcggaaacttcacacttttgaggaggtggctaagcacaaccagaccaaggattgctggctcatcatttctggcaaggtgtatgatgtcacccctttcatggaggatcatccctgaggtgatgaggttttgttatctgcaacatggaaagattcaac

SEQ ID NO: 271584 - DNA, 316 bp, Glycine max
  unsure (1)..(316): unsure at all n locations
ctgacacgtacgcggactcgtatgcggactcgttgacagacgcatgagcgtacacatgggcatacgcgtaagcgaactcgtatttgtgtaaacgaaaaatacatgttatataaatagttcatgcatggaatgctgatgattgggccacgcaaggtggtcgtgtaaaaacagattggagccacgcaccattgattgccacatatanaaactcagacatcaatactcgtgaatgtgacgtgttagctgttgtataggataatgataataaatgcactagccgtgagtttaaaacgtattgactggaaaaaccctaatt

SEQ ID NO: 271585 - DNA, 301 bp, Glycine max
  unsure (1)..(301): unsure at all n locations
accacattcacctgagctttttgtgaggattccaaatcatggcttcccttgcagcatccgctgctggtgcttcccttggcatgtcagaaatgcttggaaaccccatcaacctcantggtgccacaaggccagctccatctgcctctagccctgcctccttcaagactgtggctcttttctccaaaaagaaggctgcaccttcaaaaaaagctgcagctgctgctcctgccaatgatgagcttgccaagtggtatggtcctgacagaaggatcttcttgcctgatggtctcttggaccgatc

SEQ ID NO: 271586 - DNA, 284 bp, Glycine max
gaaaagaaaaaaaaaaaaaaaaaaaaaaaaatttaaaatttaaaaaaaaaaaaaaaaaaaaaacaaaaagtaaaaaaaaaaaaaaaaaaaaaaaaaaaaaaaaaaaaaaaaaaaaaaaaaaaaaaaaaaaaaaaaaaaaaaaaaaaaaaaaaaagcacaccaaaaaaaaaaaacaaataaaaaaaaacataaaataaaacacatataattaaaaaaaagcaaaccaaatttaaaattaaacccattactttaaaaaaataataacaaaaaaaactataactaac

SEQ ID NO: 271587 - DNA, 409 bp, Glycine max
  unsure (1)..(409): unsure at all n locations
cccacgcgtccggcaagctcatcctagagttttaaaaatggcagcagcctcctgcatggctctctcttccccatccttggctggcaaggccgtgaagctgggcccatcagcccccgaagtcgggagggtcagcatgaggaagaccgtcaccaagcaggcctcctccggaagcccatggtacggcccagaccgcgtcaagtacttgggcccattctctggcgagcccccgtcctacctcactggcgagttcccaggtgactacggctgngaccactgctggctntcggccgacccagaaacccttggcagaaaccgtgaggctcaagtgatccactccaagttggccaatcctggggccttgggcttcgtcttccccgaactattgtcccggaacggggtcaaatttgga

SEQ ID NO: 271588 - DNA, 436 bp, Glycine max
  unsure (1)..(436): unsure at all n locations
cccacgcgtccgcaaactatgaatactattttcctccttcaccaactccagcagatntatgggcaaatctcctttcctcaatgatgaaaaggttaggtgagcttgaagtgaaggttgacacactccaatctaagccatcggagatgccttatgagaaagaggaattgctaaatgctgctgtatgtcgggtggatgctttggaagcagagctaattgcaactaaaaaggctctttatgaagcactaatgaggcaagaagagctgcttgcttacattgatagtcaagaaaaagctaggttacggaagaagttttgctggtgagttttggttgctgatagaaagggactctgggagagggtgttttcgaatcatggtggttctagtgctgaccttgcacatgatgttaaactctgaatactgattcagtttaatgagta

SEQ ID NO: 271589 - DNA, 148 bp, Glycine max
cccacgcgtccgcaaaaaaaaataaaaaatataaaaaaaaaaaaaaaaaaaaagaaaaaagaaaaaataaaaaaaaaaaaaaaaacaaacaaaaacaaaaataaaacaaaaatacaaaataaaaaacaacacttaaatacaataaaaa

SEQ ID NO: 271590 - DNA, 420 bp, Glycine max
gtttgtgtttacattggacccgatgtatgtttaattcgttttgactcaggaaaacctccgggtaccgagagcaggcaaaatttatgctttcaatgaagggaattatcagttgtgggatgacaagcttaagaaatatattgatgatctcaaggacccaggtcctagcggcaagccttattctgcaaggtacattggtagcttggtaggagacttccacaggacactgctatatggtggcatttatgggtaccccaaggacaagaaaagtaagaatgggaaactcaggctcctgtatgaatgtgctcctatgagcttcatagtagaacaggctggtggaaaagggtcagatggccaccagagaatacttgacatttaaccaacagagattcatcaacgagtgccactgtacattgggagcgt

SEQ ID NO: 271591 - DNA, 290 bp, Glycine max
ttctaagataatcaaaaggaaacaaccgttcaacatttatctcacaccatttcgtgaataaaaaaaatgttatggttttcaaatattctcaatataattccgtgaccattggtttttaaaaattgttcaaaggttattaatgcaaaactttctcctatctcaagttccttataaagagaaattatattaaaaaatgttattttatcatccattcttgttactcttaaatggtaacactataccaactaaattttgtcacatatcccttaatcatttcatttacttaattt

SEQ ID NO: 271592 - DNA, 380 bp, Glycine max
  unsure (1)..(380): unsure at all n locations
gatcttcatggaggtgcatgattatccacttaaagcacctgttgatggcccagcacagtggccgttgcgccactttaaggagctacttgaagagcttgtagccattgctaggataagcaaagggaagcaacggttcaacattgatctcacaccatttcgtgaataaagaaagggtgatggttttcagatattctgaatataattccgtgaccattggtttttaaagattgttcaagggtgatgaatgcaaaactgtctcctatcgcaagttccttataaggagagtntatattaaaaaatgttatttgatgatccatgcttgttactctgaagtggtaacactataccaactaatgtttgtcacatatcccttaatcatg

SEQ ID NO: 271593 - DNA, 387 bp, Glycine max
aaatagacaagatggttgtcgatgtctcttttcaatttttccctgatatagcagtaggtttggaggacccacgtgtaacacttactgttggtgatggagttgcattcttgaagaatgttccagaaggaacttacgatgcagttatagtggattcgtccgaccctattggccctgctcaagagctgtttgaaaaacccttttttgcgttcgttgcaaatgctcttcgtactggaggaattgcgtgtactcaagcagaaagtatatggcttcatatgcacatcaatgaagacattgtggcttattgtcgtccaatattcaaaggttctatcaactatgcatggaccacagttcctacatacccaagtgggatgattggttttatgcttt

SEQ ID NO: 271594 - DNA, 333 bp, Glycine max
gaaccagattccttaatcagttgtgtatgcttaagtcatgtatttggagtggctgaatagatgtgtatttgtcattaataaagagagttgtgttagtataatggaaaccaaaataataaatgcaaaatacatacaaaacaataataaaagataactaacaacataataaacactgcacaaaaaactaacttataaaacaattattttcgacaatatcaaaatgcttatagaaaaaaaaaggccgtccttttataaggctcaaagtttattaacgcttacatacaaaatataaattcttttataatgactcctaaaataatttcaggggcctca

SEQ ID NO: 271595 - DNA, 294 bp, Glycine max
cacaatttttcttttggttgtgaatttccaatctcaggtgctgcagaggttgaggaggaggatgacatgtttatcttggtggctcctcaaaatgctgtagggaattgtattattgatgatctaagagccatgaccaatgctgctgaacacagaccagttatactaatcaatgctaggcttaaggttcagttcctagctccttttgtatgatttactgcttgattttgagggtgttattattaaatgaagataatctgaatctgactcagtactaagtcaacttcataacatgcc

SEQ ID NO: 271596 - DNA, 428 bp, Glycine max
aagcaaaaccctagcggcgcctgctttctttgttcgtgttttgcatcaggatggagtctcaggtgaagcacgcacttgttgtcaaagttatgggtcgtactggatccagaggacaagtgacccaggttagagtgaagtttttggatgatcagaaccgtcacatcatgaggaatgtgaaaggacctgtgagagaaggagacattctcaccctactcgagtctgaaagggaagcaagaagattgcgctagatggtctcttttttttttggcttgcctccaaattcgaacaaaagcaatatttttcttgatatttatggtagttagtcggtgctaaaggggttatagcaccctatcttattggtttggatctattttcattcgaattattgcttgacattttgatgtttaaaacttcgagattgaagtatg

SEQ ID NO: 271597 - DNA, 363 bp, Glycine max
cccacgcgtccgtccattgctagcaacggttgaagagtacaatgcatgcaggtgtggccgccaattggcaagaagaagttcgagactctttcctacttgccagacctcgatgatgcccaattggcaaaggaagtcgaataccttctaaggaaaggatggattccttgcttggaattcgagttggagcacggtttcgtgtaccgtgagcacaacaggtcacctggatactatgatggacgctactggaccatgtggaagctgcctatgtttggctgcactgatgcttctcaggtgttgaaggagcttcaagaggctaagactgcataccccaatggcttcatccgtatcattggatttgacaac

SEQ ID NO: 271598 - DNA, 352 bp, Glycine max
gattctgttgcagctgtggagaaagtaggagttgctagtgtcatgagccacatatctactggtggtggtgccagtttggagttattggaaggcaaagagcttccaggagtccttgctcttgatgaagccgtcccagtcgctgtgtaagacacttttcatcttggaaaattttcccatcctcaggtgtcagtgttgtcaatcttgtaaaagagcatatgttgtaggacccttcgaagtctgttagtgtaaattttatcttgcttgagttattattggcttcacacataaattgcgtgtaactgtaaaccctggctgagagccataaattcaaataaatcttttagttgctggc

SEQ ID NO: 271599 - DNA, 426 bp, Glycine max
cccacgcgtccgctcaagttttatgttattctcttcagtcttttatagcttttagtaatcttttaagttaatttgcagtagatagaaaattgctttttatcatcatcttggttccttccttgcctgccacaatgcgatctacggagtcatcaacttcttccattgtgattttatctttgcccctttcaactggcaagaatcacggcttgattcatgaggtttgctaggtctgcaccactgaatcccggagttctcatggcaatgacactaagagagacatccttgtcaagcttcttcatttcagtgagcaactgattcaatgtttgctctctttcatcatttcctccaactatacctgtacctcttagcctccctacatcatctatttcatcaatgaacttacttgtatctaatgtattaaaagaa

SEQ ID NO: 271600 - DNA, 481 bp, Glycine max
  unsure (1)..(481): unsure at all n locations
tgctggtacgcctgcggaaccgcgccggaaatccccgcgtacgggcaaacagagatgctgtcaatagagcgtccttcatacctgctgatacaccacttaaactggctgattactacaagatccaaggggtgttctcccttggaagtatccctgactaccccactggtagtggtggctaccttcaaacttctgtcatggaagccgatttccgaggctttatagacgttgtgtttgagaacactgaagacactgtggagtcatggcacgttgatggccacagcttctttgtagtaggaatggatggagggcaatggtcatcagcaagcaggctaaattacaatttaagagatacagtttctcgttccacagttcangtgtatcccaagtcatggactgcaatttacatgcctttggataatgtgggaatgtggaatgtgaggtctgagaattggttcatcagtatttgggccagcaattttat

SEQ ID NO: 271601 - DNA, 436 bp, Glycine max
gcggacacaactgcatggactctagggcgaatgttcgaatttttgcatggatcagctctggatgctccgattattactccagcaaactgccaacagattattactgtgctgcttcagagcatgaaggatgttccaaatgctgctgacaaggcttgtggagctctatattttcttgcccaaagctatgaggatgctgcatatgcgacctcttcattgacccccttctttcaagatattgatcatgctcttctcactgtaactcacagagaggatgctggagaatcccgccttagaacagcagcctatgaagccttaaatgaagtagtgaggtgttctaatgatgaaacagctcctatggtggtacaacttgttcctctcatcatgatggagctccatcaaactcttgaaaatcagaaagtttcatctgacgagaggc

SEQ ID NO: 271602 - DNA, 348 bp, Glycine max
aggagattctgttgcagctgtggagaaagtaggagttgctagtgtcatgagccacatatctactggtggtggtgccagtttggagttattggaaggcaaagagcttccaggagtccttgctcttgatgaagccgtcccagtcgctgtgtaagacacttttcatcttggaaaattttcccatcctcaggtgtcagtgttgtcaatcttgtaaaagagcatatgttgtaggacccttcgaagtctgttagtgtaaattttatcttgcttgagttattattggcttcacacataaattgcgtgtaactgtaaaccctggctgagagccataaattcaaataaatcttttag

SEQ ID NO: 271603 - DNA, 435 bp, Glycine max
cacaatctctaatggcactcaggatgtgtgcttcttccactgccaatgcactcaaactctcttctgtctccagacctcatctcttgcctcctttttctttctccagatgcttatcttccgtcttggatggacttaagtacgctgattcacatgaatgggtcaagcacgaaggctcagtcgccaccattggtatcactgaccatgcccaggaccatcttggagaggttgtgtatgtggagctgccagaaccaggtggcacagtttccaagaagtctggcttcggagccgttgaaagtgttaaagcaacaagtgatataaactctccaatctcgggggagatcgttgaggttaacaaaaagctcacagaaacgcctggcctggtcaactcaagcccatacgaagatggatggatgatcaaagtaaagccaagcgatc

SEQ ID NO: 271604 - DNA, 423 bp, Glycine max
agactcttccttttctcttctctgtctaaggggtgccctgagatcacattgaacaatggtgaaggctgtggccgttcttggcagcagtgagggtgtcactggaactattcacttcgttcaggagggaagtggtccaaccaccgtaactggatctcttgctggtcttaagcctggtctccatggtttccatgtccatgccttgggggacactaccaatggttgcctctcaactggatcacatttcaatcctaataacaaggagcatggtgcccctgaggatgagaatcgtcatgctggtgatcttgggaatgttaatgtcggtgatgatggtactgtcagcttcactattactgacagccagattcctgtcactggaccaaacaacatcatatgaagggcggttgttgtccatgctgatcctga

SEQ ID NO: 271605 - DNA, 408 bp, Glycine max
cccacgcgtccgcccacgcgtccgccaaaattagggtttttgtcgtagcaggaagaagcagcaatggcgccgaagataacacgcaaggtcagcagaaaccccgaattgataaggggaatcggaaagtactcgaggtcgcagatgtaccacaagaggggcatttgggctatcaaggccaaaaacggtggcgtgttacctcgccacgaccccaaacccaaacctgaaactcccactgaaaaaccacccaaattttaccccgctgatgatgtcaagaaaccccttgtcaacaagcacaaacccaaaccagctaagctcagggctagcattacccccggaacagtgttgattcttcttgctggtagatttaagggaaagagggtagtgtttttgaagcaactaccttctggg

SEQ ID NO: 271606 - DNA, 456 bp, Glycine max
atggaggaggagcaggaggtggtggagttggaggacttggaggtggtatgtggctatgagtgcgaaacaagtatactgaaccttgatagtattgataaatttgaaatgtttcttctgcatcaccaaaaaaaaaaaatcacttttttttatataaaaaagtatttgcttaattatattatgatttttctattttccttccttttatttatatattttttttatttattatgtaataaaacttttttgaactttttttatttttttgtaactgttatatattgtttgtactgttttataaacaatttttatataatgatattttaaatatatttttttaatttttattaaatgaatgtttattattagaaacttactattttttttataatctttttttttttaaaagtaaactaattattttttttatttattatattttaatgtttcttttatttt

SEQ ID NO: 271607 - DNA, 327 bp, Glycine max
gggcaatgtgcgattatcatgtttgatgttactgcccgtctaacatacaaaaatgtccctacctggcaccgtgatctttgccgggtctgtgaaaacatcccaattgttctttgcggtaacaaggttgatgtcaagaataggcaagtgaaggcaaagcaggttacttttcacaggaagaagaatttgcagtactatgagatatctgctaagagcaactacaattttgaaaagccatatttgtactgggtcaggaaacttgcagtcgattctaacttgcactttgtataatctcttgtattgtcttcacgagatgtttaaattgattta

SEQ ID NO: 271608 - DNA, 436 bp, Glycine max
gcttactgtgaagcgggaaagagaaattgaggagggtatcaataagaggttgtctagaaagcttgataaaaaatggaagaaaagcattgttgtaagaccacctccgtctttaaagaagcttcgggaggaagaagcagcagcagaagctgcagaaactgaaaaagctgcatgagcttacacataaatatgcaagttacagagttcaatggttaaaattattgttcagtcataattttcttgtttaaatggatgtggttgtcacgtggataatattatcttaatggtagtaatttatgtttgttccttgccggaatgttaactttattctttttctgtattcttcgtttttgatgctattgttgtttttagtttgtttatattaatttttttctattattctacttcttcatttttcttattggggtgtttttttttt

SEQ ID NO: 271609 - DNA, 409 bp, Glycine max
ggcttcgaaacgcatcctgaaggagctcaaggatttgcagaaggatcctcctacgtcatgcagcgcaggtcctgtggctgaagacatgtttcactggcaagccacaatcatgggacctgctgatagcccatatgcaggtggtgttttcttagtttcaattcattttcctcctgactatcccttcaagccaccaaaggttgcttttcggactaaggtgttccacccaaacatcaacagcaatggcagtatatgtcttgacattctcaaggaacaatggagcccagctctaaccatttccaaggtccttttgtcaatttgctcattgttgacggatcccaaccctgatgatccacttgtacctgagattgcacacatgtacaagaccgacagggccaagtatgaggctaca

SEQ ID NO: 271610 - DNA, 203 bp, Glycine max
aagaaatataactaatattctttagaataatcaaaaagaatattaaattcaaatgaattgtgagatagaaaaaatacttaaaaaggaggtttttgtaatgcttgatctaaaaacatatcatttcgtggcaccagtattaagtactctatggttcggtgctttgtcagttcttttgatagatatcaaatcgtttttttcatatt

SEQ ID NO: 271611 - DNA, 360 bp, Glycine max
cccacgcgtccgattcatattttccatttttatttttctaataaaacaaaacaacataagcaccgttcttttctctctgaaattcccatattcatcacttctgagctctggacgagatccctctctctcccattccagatctcgccatcagattcaccctttcattttaagcaaagtcataacttgaagaaggttcatggctgctccaccggcaagggctcgtgccgattacgattatctcataaagcttctcttgatcggtgacagcggtgttggaaaaagttgcctccttctgcgtttctccgatgggtctttcaccactagtttcatcacaactataggcattgattttaagattag

SEQ ID NO: 271612 - DNA, 286 bp, Glycine max
gcggaaatatgccttctcagaaggttgaaacgggtcatcaagacacggtccatgatgttgcaatggattactatggtaagaggctggccacggcttcatcagatcacacaatcaagataattggggtgagcaactcggcctctcagcatctagcaaccttgaccggtcaccaaggacctgtatggcaagtggtgtgggctcaccctaagtttggttctctacttgcgtcttgttcctatgatggccgtgtcattggttggaaagagggcaaccaaaatgaatggac

SEQ ID NO: 271613 - DNA, 346 bp, Glycine max
ctccggctgaaacctttcttcacaaaatggcctcaactacactaacaaccctctccctgcgcaacctctcttatcctacaccctcctcctcttcttaccctacgcacctctccgccaacccctcctccctccaattccccaacttctcccaccgcgccaccaccacgcgccgcgcccgcgtcgtcgtcgtctccgccgtcgaggcaccggagaaaatcaccaagctcggcgacgaaatcgcgggactcacgctcgaggaggccaagaacctcgtcgacttcctccaggacaagctcggcgtctccgcggcagcgttcgcccccgtggccgtcgccgcgggtgccgt

SEQ ID NO: 271614 - DNA, 438 bp, Glycine max
gcctttcatagtgagatagccctagaaatgtttcgtgattctttgtttgctctctttcgactttctgccttctcctcctcactcctacctttaaccactgctcaagattacgttctcgacacggacggtcacgcggttgaaaatcacggtacatactatttgttgccagcgaaatcaggaagcggcggtggtggaatagaggtagccgcaactggcaaagaaagttgcgctctcactgtagtgcaatctctgaacgaggactccatggggctaccattgaagctttcaagcccatccatcactacgtctcacttcaccgaatacacttcgttgagcatcgagttcacttcggcgccggcgccgtgttcgtccgcttcggagtggaccgttgtcaagggattacccgaaagacgcgccgttaaacttaacgattacggg

SEQ ID NO: 271615 - DNA, 439 bp, Glycine max
cccacgcgtccgcgcagatattgtgattaatggcttgccatcaacggaaacccgtgaggtatttgaagaaattagcaagtactggaaagagagaatcacagtgcctgccatcatttccttagcaaagggtgtggaggctgaattggggcctgaaccacggataataactcccacgctaatgatcaatcaagcaactggagttctcattgagaacatcctttaccttggaggtcctaacatttgccttagaaatttactacaaggaatatgccaacgctaggatttgttttgctaatagtgtatgaatccatttgcataattttttgatggtattccactttatagtgtggattatttgttcctttgtctttattaatttatggtgtgtttattgtttttttttttttttttttttatagttttttttttttctaaattt

SEQ ID NO: 271616 - DNA, 431 bp, Glycine max
gacacaactgcatggactctagggcgaatgttcgaatttttgcatggatcagctctggatactccgattattactccagcaaactgccaacagattattactgtgctgcttcagagcatgaaggatgttccaaatgttgctgagaaggcttgtggtgctctttattttcttgcccaaggctatgaagatgctgcatctgcgtcctctccattgacccccttctttcaagatattgttcatgctcttctcactgtaactcacagagaggatgctggagaatcccgccttagaacagcagcctatgaagccttaaatgaagtaatgaggtgttctaatgatgaaacagctcctatggtggtacaaacttgtcctttcatcatgatggagcttcatcagactcttgagaatcaaaagggttcatctgacgagag

SEQ ID NO: 271617 - DNA, 434 bp, Glycine max
  unsure (1)..(434): unsure at all n locations
gcctttcatagtgagatagccctagaaatgtttcgtgaatctttgtttgctctctttctactttctgccttctcctcctcactcctacctttaaccactgctcaagattacgttctcgacacggacggtcacgcggttgaaaatcacggtacatactatttgttgccagcgaaatcaggaagcggcggtggtggaatagaggtagccgcaactggcaaagaaagttgcgctctcactgtagtgcaatctctgaacgaggactccatggggctaccattgaagctttcaagcccatccatcactacgtctcacttcaccgaatacacttcgttgagcatcgagttcacttcggcgccggcgccgtgttcgtccgcttcggagtggaccgttgtcaatggattacccgaaggacgcgccgntaaacttaacgatta

SEQ ID NO: 271618 - DNA, 328 bp, Glycine max
cccgaagacacgcgcgcctgcgatgaacgacgaatatgcgattctcgctgctgtcgtcggactttctgacgggtcgaccgcactgctacctttaaacaatggtcaagattacgttatcgacacggtctgtcacgcgggtgaaaataacggtacatactatttgttgccagcgaaatcaggaagcggcggtggtggaatagaggtagccgcaactggcaaagaaagttgcgctctcactgtagtgcaatctctgaacgaggactccatggggctaccattgaagctttcaagcccatccatcactacgtttcactttaccgaatacact

SEQ ID NO: 271619 - DNA, 223 bp, Glycine max
cagcgctcaaccaaagatgcagaacgaggtaggacagatcactgagctttacattcctaggaagtgctgcgccacaaacagattgattactcgctaaggaccatgcttcgggtcagatcaacattgggcatgtggatgataatggcgactacaatggctatttgtccacttttgtcttctgcggatgcattcgtgctctgggtgattgctgtcagtgctatat

SEQ ID NO: 271620 - DNA, 476 bp, Glycine max
gtacgcctgcggaaccgggccgggacccacgcgtgcggccttccatcgtgagatagccctaaaaatgttacgtgaatctttgtttgctctctttctactttctgccttctcctcctgactcctacctttaaccactgctcaagattacgttctcgacacggacggtcacgcggttgaaaatcacggtacatactatttgttgccagcgaaatcaggaagcggcggtggtggaatagaggtagccgcaactggcaaagaaagttgcgctctcactgtagtgcaatctctgaacgaggactccatggggctaccattgaagctttcaagcccatccatcactacgtctcacttcaccgaatacacttcgttgagcatcgagttcacttcggcgccggcgccgtgttcgtccgcttcggagtggaccgttgtcaagggattacccgaaagacgcgccgttaaacttaacgattacggga

SEQ ID NO: 271621 - DNA, 335 bp, Glycine max
cccacgcgtacgaaagttttaatactatttaaaaaaaaaatattaaaaaaaaaaaaaataaaaaaaaaaaaataaaaaaaaaaaaaaaaaaaaaaattaaaaaaaaaaaaaaaaaaaaaaaaaaataaaaaaaaaaatataatataattattaattatataaaaatatatatataaatattttttttttattttaattaaatatttaaaaaaatttttatttatttatttatatatatttttttttttttttattttttttttatttatattattatttttttataatttgtattcttttttatatattttttttttcattatgttttaattttt

SEQ ID NO: 271622 - DNA, 278 bp, Glycine max
cagtttcaccgcacgaatatcttgttgtttggagcgatccgagaaaaactctgtaaacatgttggtttaccaggacctccttacaggtgatgagcttctctctgactccttccgttacaaggaaattgagaatggaatgctgtgggaagttgaggggaagtgggttgttaaaggagcagttgatgtagacattggtgcaaacccttctgctgagggtggaggagaagatgagggagttgatgatgcagctgttaaagttgttgacattggtgacacat

SEQ ID NO: 271623 - DNA, 369 bp, Glycine max
cccacgcgtccgataacccataaccgaccgcaccaccgttttcctttgctttgcgttctacaatgtcgaaaacctcagagattattacatgcaaagctgctatttgctggggaataggaaaacctgtgactgtggaagagatacaagtagaccctcccaaagccaccgaagttcgagttaagatgctttgtgccagtatatgctccacagacatctctagcacaaaaggattcccacataccaattttcctatagcacttggacacgaaggagttggtattatagagagtgtcggtgatcaagtaacgaatctgaaagaaagggatgtggtaattccaacatacataggggagtgtcaagaatgtgaga

SEQ ID NO: 271624 - DNA, 276 bp, Glycine max
tcttgggagaagaggtcgagtttcacagcagcaatggtgtacgtcaaggctcagaaatcaaaagcctacttcaagagatatcaagtcaagttcaagagaagaagagagggaaaaaccgattaccgtgccaggattcggctgattaatcatgacaagaacatatataacacttcgaaataccgattcgttgttcgctttagcaacaaggacattgttgcacaaatattattttctagcattgcttgcgatattgttctttgttgagcatatgcacat

SEQ ID NO: 271625 - DNA, 409 bp, Glycine max
cgcctctgttctctgtcactgctgcgtctctcgtaaccatgcctaagcaaatccacgagattaaggacttccttctcactgctagaaggaaggacgcaaggtcggtgaagatcaagaggagcagagatgtggttaagttcaaggtcagatgctcgaagtacctctacacactttgtgtgtttgacccagagaaagctgataaattgaagcaatctcttcctccaggtttgagtgttcaagacctgtaaaggtacagggcgagagaccaagaagaagcaattcattgattcttctgaacttcgtttttctgtagttgaaacttgagattcttttcagtgtcttttatttttagatcattgctaggacatgtgtgttttcatctgttttggaatatgattcttgaatttat

SEQ ID NO: 271626 - DNA, 434 bp, Glycine max
taaacctactaattctcgtcttcatctccttcctcgccgctttgtgctgctgttgcaaaacttagggttgagcctttttttgaggttttcagcgcttctttctcacaatggttcttcagaatgatattgatttgctgaatcctccagctgagttggagaagagaaaacacaaactcaagcgtcttgttcagtcaccaaactctttcttcatggatgttaagtgccagggatgcttcaacataacaactgtgtttagccactctcaaactgttgtggtgtgcggaaactgccagactgttttgtgccaaccaacagggggacgggcgaggttaaccgaaggttgctcatttaggaagaagggagattgaatggtttgttaaccagacttttctttgtcaatgatttgagattttcggttgttaggtttttgagat

SEQ ID NO: 271627 - DNA, 432 bp, Glycine max
cccacgcgtccgcccacgcgtccgcccacgcgtccgctgctttggaggatactgacaagaaggatggttcagaagaaaatgcagctactaataagaaggctgattctgattctgaagaggaagaaaacgataatgagcaaaaagagaaaggcatctcaaacaagaagaaaaagcttcaacggaggatgaaaattgctcaactgaaacaaatttgctcaaggccagatgttgttgaggtgtgggatgctactgcatcagacccaaagttgctggtgttcttaaagtcttataggaatactgtacctggacctaggcattggtgccagaagagaaaatttttacagggtaaacgagggatagagaaaccagcctttcaacttccttgatttcattgctggcactggaattgagaaaatcagacaggcttatatt

SEQ ID NO: 271628 - DNA, 432 bp, Glycine max
caaaactcaagcattgcatccctcttgatttgtagtttgttttgtgctttagataaaagttctgccaaatcaagaggggttttaagatcatagtgtgtgttttgcaacaatggctaagttctttgctgctatgatcttggcactctttgccatttccatacttcaaacagtggtaatggctgctaatgaacaaggaggccacttgtatgacaacaagagcaaatatggaagtggaagtgtcaagagttaccaatgcccatcacaatgctcgaggagatgtagccagacccaataccacaagccctgcatgtttttctgtcagaagtgctgcaggaaatgcctgtgtgtgcccccggggtattatggtaataaagctgtgtgcccttgctacaacaactggaagaccaaagaaagaggacccaagtgcccttg

SEQ ID NO: 271629 - DNA, 340 bp, Glycine max
tttgcattgcaaagcaaaaaccttgcaaattgcaatggcttccaacaaggttattgccaccatcttggttctttctctccttgcctactcaacatcattcaccaatgcatgtggcacatgccacccaaaacctactccttctccccctcctccatcagggaagtgccccaaggacacattgaagctaggggtgtgtgctgatgttctaggacttgttaatgttgttgttggttcccctgtctctagcaagtgttgtgcattgcttgaaaggttggcttgatcggaggctgcacttttgcctttgcactgctattaaggccaatgttcttggaatcaactt

SEQ ID NO: 271630 - DNA, 211 bp, Glycine max
gagattacaaaattctcttccgtttcatgattagggtttcaccgttacagtgaaacatggcaaaaccaaagcgaatctctctgcgtatctttgcgctgctcctcttgatttccacctcttcgtttcagcttctccgcgcttccgatgacgccgatgatgatgcgatcttctatgattcgttcgacgaggattttgaagaccgttgggttgt

SEQ ID NO: 271631 - DNA, 453 bp, Glycine max
acttagagcagttttctctcggagacacattcattatcaagtgtgagttcatcataaaacaattgattgatatcttgccatcatttatggcttccttttggccattcttggcaattgtcatggccttaatggcatgcaattgttcatcattggcctctgctttttgacatagcatgcatgtttcaaccatttcatcagcacttacatcattgctaggtgcctctttatacttactttctactatgtcacctgatattgagcctttggtttctactttgtgatgttctgctttttttttacttgtgtttttattgttttttttttctgttttttctatgccctttttactcctgattttctttattttttttttgttttttttgggttttctattattactgtctattggttctttttttctgttcttttatgttttttttttcttcttgtttt

SEQ ID NO: 271632 - DNA, 260 bp, Glycine max
cccacgcgtccgcgcagatattgtgattaatggcttgccatcaacggaaacccgtgaggtttttgaagaaattaccaggtcttggaaggggggattaaaaggccttgcatcattttcttaacaaaaggtgtggaggcttaattggggcctggaccaccgataataacttccacactcattatcaatctagccactggagtccccattgagaacattctttaccttggagggtctaacattggcttagaaatttacaacaa

SEQ ID NO: 271633 - DNA, 236 bp, Glycine max
aaaaaaaaaaaaaaaaaaaaaaaaaaaaaaaaaaaaaaaaaaaaaaaaaaaaaaaaaaaaaaaaaaaaaaaaaaaaaaaaaaaaaaaaaaaaaaaaaaaaaaaaaaaaaaaaaaaaaaaaaggggggggcccttttaaaggatccaattttccttccccgggcttgcaacgtataattttttttttggggtccccaaaatcaaattccttgccccgcttttaaaaccgtggggcct

SEQ ID NO: 271634 - DNA, 346 bp, Glycine max
aaataactaggacaattgtgaaactttctgtgcaacgaaactgctaatgcaaaccaaatctcatgacaaaacacctgtgacacacaacaatacatataacactccagctttatggccatgtagtggccgattcagatgaacttcattacaaatcaaggggatagaccaatgttatatggatcacagacatgcgatgctgtaataaggactcgtgcgcgtaaacatatgctgcatttcaacttgcctacggatgttacacgagtgaactttggtcatacgcataaaccgtctactaacacgcttatctcgacgacatccactgcaagtcgaacgtgctctgtgcctt

SEQ ID NO: 271635 - DNA, 301 bp, Glycine max
gtggaataaaaaataaagctctttgtgatggaaaccagattcatagccttgcatggacactttggaaagagaaaaatgctttacagttgattgactcaagcataaaggactcatgtgttatctcagaagtactgcgatgcatccatgttagtctcttgtgcttgcaacaatacccgggagataggccaaccatgacatcagtaattcaaatgttagggagtgagatggaactggttgagccaaaagagcttaggtttcttcaaagcaagattttgggatgaaggaaaaataaagctttaat

SEQ ID NO: 271636 - DNA, 166 bp, Glycine max
aaaaaaaaaatgaaggccgttctaaaactaaaaaaaaacaaaaaaaaaaaaaaaaaaaaaggaaaaaaaaaaaaaaaaaggggggaaaaaaaaaaaaaaaaaaaaaaaaaaaaaaaaaaaaaggggcggcataaataagggaaaaaggggacctaaatggacttat

SEQ ID NO: 271637 - DNA, 404 bp, Glycine max
  unsure (1)..(404): unsure at all n locations
gcagaaagcaagctcatcctagagttttaaaaatggcagcagcctcctccatggctctctcttccccatccttggctggcaaggccgtgaagctgggcccatcagcccccgaagtcgggagggtcagcatgaggaagaccgtcaccaagcaggcctcctccggaagcccatggtacggcccagaccgcgtcaagtacttgggcccattctctggcgagcccccgtcctacctcactggcgagttcccaggtgactacggctgggacactgctgggctttcggccgacccagaaaccttcgccagaaaccgtgagctcgaagtgatccactccaggtgggccatgctcggggccttgggctgcgtcttccccgaactattgtcccgcaacggngtcaagtttgga

SEQ ID NO: 271638 - DNA, 387 bp, Glycine max
ggttcttttttttttttaaaaaagtcacgacggaataaaatttactagaataatattaaattaacaacacagataacataattccttcacactgatcactcgtttgataaaaggatctctaactagataaaataagaggcaaacaaagaaacccatagtagaatgggtgacccttattctcaaacacaaagtggttaattaacaacacgagtagaaagatgatagatctatcatcttctatcaaagcactcttaattaattttttaaaattaacaacgtttggtgcagaaacatctgcgacggaagccacgggcgtgggctccagtgaaacgtttggttcggcaaacagagccacaggtggggtcactcaaacatggccccttgaaa

SEQ ID NO: 271639 - DNA, 401 bp, Glycine max
gaaacagtgtgatgaaaatgaaggtccttgttttcttcgttgctacaattttggtagcatggcaatgccatgcgtacgatatgttccctctccgaatgaacactggctatggtgcccgtactccggaggtgaaatgcgcaagttggaggcttgctgtggaagcacacaacatctttggctttgagaccattcctgaagagtgcgttgaagcaacaaaggaatacatccatggcgaacaatatagatcagactccaaaacagttaaccaacaagcttacttttatgccagagacctcgaagtccatcccaaggacacatttgtgttcagtatagatggcaccgtactctctaatattccatactacaaaaaacatggatatggggtggagaaatttaactcg

SEQ ID NO: 271640 - DNA, 342 bp, Glycine max
cctctttcttcctcttcctcagtagtgcgattttcgattctcttctctgcaactatgcctaaccctaaggtcttcttcgacatgaccatcggcggtcaacctgccggccgcatcgtgatggagctctatgccgacgtgactcccagcaccgccgagaacttccgcgcgctctgcaccggcgagaagggcgccgggcggagcggcaagcccctccactacaaaggctcgtccttccaccgcgtgatcccgaacttcatgtgccagggcggcgacttcaccgtcggaaacggcaccggaggcgagtcgatctacggcgccaaagttcgccgacgagaacttcgt

SEQ ID NO: 271641 - DNA, 384 bp, Glycine max
agaacacgtagttgagaactaagaaggagtttcaaatggcttcctcaatgatctcttcccgagctgttaccactgtcaaccgtgccggtgccggcatggttgctccattcactggcctcaagtccatggctggcttccccaccagaaagaccaacaatgacattacctccattgctagcaacggtggaagagtgcaatgcatgcacgtgtggccaccagttggcaagaagaagcttgagactcttttctacctgccagaccttgatgatgcacaattggcaaaggaagtagaataccttcttaggaagggatggattccgtgcttgaaatcgagttggagcacggtttcgtgtaccgtgagcacaacaggtcaccaggatacta

SEQ ID NO: 271642 - DNA, 451 bp, Glycine max
ggtgaagtgaacacaatggagagaagggttggctatgaggtgctggtggctttggtgacccttttggttttctcatttgcttgtgccactgcttcatcatcaggaccaacaaaactccaccaccgtgtggagcaattcaggaggaatctgcttgctaatggccttggtagaactcctccaatggggtggaacagttggaatcatttcagctgtcaaattaacgaaaaaatgatcagagaaactgctgatgcccttgtttctactggtctgtccaagcttggatacacttatgtcaatatagatgattgctgggctgaattaaatcgggatgctaagggtaatctggtagcaaaaaattcaccgtttctttctggaatcaaagctcttgcagattattgtcacagcaagggtcttaagcttggaattattcagatgctgggtattttacttg

SEQ ID NO: 271643 - DNA, 453 bp, Glycine max
ctctctctctcaccttcgagaacatcgacaaaaagataaagggtgaataattagcagctccttctagttccggtgtcggtgtgggtgtttgaatctggtgaaggatgtcaattgttccaatcaaccagggtgatgccaacggctccaaccccttcgcttcgtggggtcaattcgtggattttcctctccctccttccatctccggcttcttccccggcttggaattcggattcggattcggatcatccgtgaacacacgtgtggactggagggagactcccagagcgcacgtgtggaagctggtgcttcccggcttctccaacgaggacgtgctggttgagctccaagacgagagggtgctccaagtcagcgtggagagcggcaacttcgtcacgagttttaagggtccccgacaacggtaacctagaacaacttaaagccaacatgcgtcac

SEQ ID NO: 271644 - DNA, 451 bp, Glycine max
  unsure (1)..(451): unsure at all n locations
cgcacattaagttatataacacatatttgcttgcttagaaatactattattgaagatatggggagtgtagattatgagtaccctttgggcatgaacaactttgagagagtgcaccaagtcgaggttccaccgccacagcccgttttcaagtctttaaagtactctntgaaaggagactttctttccctgatgacccctttgaggcagttcaagaacaagccagcttccaagaagttcatgcttggccttcagttcttcttccccattttcgaatgggctcccaaatacacctttcagttcttgaaagctgacctcatagctggcatcaccatcgctagcttggccattcctcaaggcatcagttatgccaagctcgccaacctcccttcaattcttggactatgtgggtagttcattcatactcatcatcaactcttaatcggaataaaaa

SEQ ID NO: 271645 - DNA, 372 bp, Glycine max
  unsure (1)..(372): unsure at all n locations
aaccatggcaatggcaacccaagcctctctcttaaccccacccctatccggtctcaaagccagcgaccgcgccttcgtgccatggaagcaaaactccagcctctccttctccagcccgaagcccgctaagttctccaaaacaatcagagcagcagtcgccgactagaccacagaggcaccagcaaaagtagaggctgcaccggtcgggttcaccccaccagaacttgacccaaacacccctgtcctgatcttcgggggcagcaccggcgggctcctgcgcaaggcacacgtggaggagttttatgtcattacgtgggactcacccaaagaacagatctttganatgcccactggcagcgccgctatcatgag

SEQ ID NO: 271646 - DNA, 211 bp, Glycine max
tgatgtttcaaaaaatttgcaaggtaaaaatcatttgatgcttagctagaataccccaaagggttgctaacaacagccccgctgtggggacatcatagaacgaatactatgctatgatcgccaaggctggagtgcataattacacatgggacaatgtggatctgatcattgcatgctcaaaatattacagagtgtgctgccttaacattct

SEQ ID NO: 271647 - DNA, 456 bp, Glycine max
  unsure (1)..(456): unsure at all n locations
cggaagaaaccctagccactctcccggcgtcacgatgcagatcttcgtgaaaaccctaacgggtaaaacgatcacgttggaggtggagtcttcggacaccatcgacaacgtgaaggccaagatccaggacaaggaaggcatccctccggaccagcagcgcctcatcttcgccgggaagcagctggaggacggccgcaccctcgccgactacaacatccagaaggagtccacgcttcacctcgtcctccgcctccgtggcggcgccaagaagcgcangaagaagacctacaccaagcccaagaagatcaagcacaagcacaagaaggtcaagctcggcattcttcagttctacaaggtcgacgattctggaaaagtccagaggctccgcaaggagtgccccaacgccgagtgcggcgctcgcaccttcatggccaaccacttcgaccgccactactg

SEQ ID NO: 271648 - DNA, 411 bp, Glycine max
cggacgcgaccgtagccactctaccggcgttacgatgcagagcttcgcgaaaaccctaacgggtaaaacgatcacgtcggaggaggagtcttggcacaccatcgacgacgtgtgggctaagatccaggacatggaaggtatccatccggaccagcaccgtttaattttggtcgggagggatttgtaggacggacgtaccacttgacgctacaacattcataacgcgtccatgcttgacatcggcctgcgcctccgtggctgcgccaagagatgacagaagaatacctacaccatgcgcactaagatcaatcataagctcaagaacgttaagctcagtatactacagttgtacaagtgcagacgattctggaacgagtccgaggctctcgtaggagtgccccaacgccgagt

SEQ ID NO: 271649 - DNA, 393 bp, Glycine max
cccacgcgtccgatactattttcttgtcgttgagaagcttcgcgaacgacagcaaagaaccctagaccgtcacagaaccattccatagccatgtctggtgttggccctctttctcaggattgggaacctgtcgtcctccgcaagaaggctcctaccgtcgccgccaagaaggacgagaaagccgtcaacgccgcccgccgctctggcgccgaaatcgaaaccctaaaaaagtataatgctgggacaaacaaagcagcatctagcggcacttcattgaacactaagaggctggatgatgatactgagagtctagctcatgagaaggtgccaacttgacttaagaaggctataatgcaagctaggatggacaaaagcttactcagtcttaacttg

SEQ ID NO: 271650 - DNA, 454 bp, Glycine max
  unsure (1)..(454): unsure at all n locations
accaagtacaccaacaccgtcgccggggaagggagggaacactccatgtccaccaccaaagtctcctgcacaggctacatgccccattgacacgctcaaactaggtgcttgtgtggatcttcttggtggcttggttcacattggcttgggagaccctgttgcgaaccagtgctgccccgtgcttcaaggcctggttgagcttgaagctgcggtgtgtctttgcaccactcttaagctgaagcttctcaacctcaacatttatgtcccacttgcccttcagcttcttgtggcttgtggcaagtctcctcctcctggttacacctgctccctctaaaccagtgaaaggattgaggaaaatatggtcaaaatcgacatgagaggatgtcgagccacactatctctcttctgtcctgattggaaactgctgtgtttgatntgctattatttgaaaaac

SEQ ID NO: 271651 - DNA, 370 bp, Glycine max
  unsure (1)..(370): unsure at all n locations
attttatactatacccacattttgataattatttttctagttgataagccatggctactcgaggaaagcttgaggttgacgttgatctcaagtctaacgcagacaagtactggcaaacccttaggaactccactgaaatattccccaaggccttccccaatgattacaaaagcattgaggttcttgagggtgatggcaaatcacctggttctatccgccacataagttatggtgaaggttcaccacttgtgaagtcatcctttgagaagattgaggctgttgatgaagaaaagaaggtagtgtcgtacactatcattgatggagaactcctccagcactacaaaacattcaagggagacatntctgtgac

SEQ ID NO: 271652 - DNA, 443 bp, Glycine max
ataactcgtcctttcctttgtcgtctcatttagaaaacatggacaccgtgacactgacactcctttctctccctccggttccggtccgtacagtgtccgcgactgcatcgacctcgtcctctgtccgtctcactcactcctactcctgctcggccaggcagaggctctcctctcacagaacaagactcaggttccggaatcattcctctgcggttccaaaacttacggtgacatgcggtgcggctgtgaccgagatcaacgagacccaattcaaagacacggtgctgaaggctaaccgtccggttcttgttgagttcagcgctacttggtgcggaccttgccgtctcatctcttccgccatggaatccctcgctaaggaatatgaagacagattaacggatgtaaagattgatcatgatgccaacccgcagctaattgaagag

SEQ ID NO: 271653 - DNA, 328 bp, Glycine max
gttagggttcacaacttttccttttccttttgcttgcgaatctgaatcaaataatcaatcatccattcattattcatcatgtcgtcggcgaagaaaatcacgctgaagagttcggacggcgaggctttcgaggtggaggaggcggtggcgctggagtcgcagacgataaagcacatgatcgaggacgactgctccgacagcggcatccctctgccgaacgtgacgagcaagatcctggcgaaggttatcgagtactgcaagaagcacgtctaggccgcgaattctgaagacaaacccttcgaggacgatctcaaggcctgggacgctg

SEQ ID NO: 271654 - DNA, 448 bp, Glycine max
gttttaaacaacagataatttggttggacgaggtgggtactcggaagtatacaaaggtgatctttcagatggacgaaccattgctgtgaagaggttggccaaggacaacaaggatcctaacaaggaaaaagagttccttatggaattgggtgttattggacacgtctgccatcctaatactgcaactttagtgggctgctgcattgaaaatgggctttatctgattttcaattactctcaaaatggaaatttggcaactgcactgcatggtaaagctggagatccactagactggccaatcagatacaaaattgccattggtgttgcaaggggccttcattatcttcataaatgttgcaaacaccgaaataattcaccgtgacatcaaagcttttaatgttcttctgggtcctgattatgaaccacaagataacgattttgggcttgc

SEQ ID NO: 271655 - DNA, 394 bp, Glycine max
ctggcccggtcacacgcctgatgttattttgattggaactggttctgagttggaaattgctgctgctgctgctgaggatctaaggaaggaaggaaaagctgttagagttgtttcttttgttagctgggaactttttgatgagcagtcagatgaatacaaagagagtgttcttcctgcttcggtaacagttagagttagcattgaggcaggatcaacatttggttggcaaaagattgttggaagccaaggaaaggccataggcattgatcgatttggagcaagtgctccagcaggaaaaatatacaaagagtttggtatcatcaaggaagctgttattgcttcttgccaaagaactttcgtagatctatatgttgactttcttttaaagtttatc

SEQ ID NO: 271656 - DNA, 431 bp, Glycine max
attccccaaaattttctctgaagaagaagcaacaatgtctggtcgcggaaagggaggcaagggtttgggaaagggtggagcaaagaggcatcgcaaggtgctccgcgacaacatccagggaatcacgaaacccgcgattcggaggctagccagaagaggcggcgtgaaaagaatcagcggcttgatctacgaggaaaccaggggtgtgctcaagatcttcctcgagaacgtcattcgcgacgccgtcacctacaccgagcacgctaggagaaagaccgtcacggccattgacgtcgtttacgcgctcaagaggcatggaaggaccttctacggtttctgaggctgagggcttgggctttttttgggctcggttttgtttttctttggcttaataatgttttttggatattttgtttcttttaattgttttg

SEQ ID NO: 271657 - DNA, 445 bp, Glycine max
agaaaggcacttctatgatggcatggaaatccaaagagcggatgggtttgttgtccaaactggtgatcctgaaggacctgctgagggttttattgatccaagtacagagaaaatcaggacaataccattagaaattacggtgaatggagaaaaggcacctgtttatggatcaactttagaggagcttggtctatacaaggctcaaacaaagcttccctttaatgctttcggtacaatggcaatggcaagagatgaatttgaggacaactctgcctccagccagatattttggctattgaaagaaagtgagctaactcccagtaatgccaatatattggatggtcgatatgcagtctttggctatgtaacagaaaatgaggattacttggcagacctcaaagttggtgatgtcatagaattcattaaagtagtttctgggctggat

SEQ ID NO: 271658 - DNA, 385 bp, Glycine max
cgagcgaagatgtcgggtcgtggaaagggaggcaagggtttgggaaagggaggagccaagaggcacaggaaggtgcttcgtgacaacatccagggtatcaccaaacccgcaattcggcgtttggctcgcataggtggtgttaagagaatcagtggtctcatctacgaggagacacgtggcgtcctcaagatattcctcgagaacgttattcgcgacgctggtacctacaccgagcacgctagaagaaagaccgttaccgctatggatgttgcttatgctctcaagaggcagggcaggactctctacggtttcggaggttaatttctagggtttgcatcggcgtagcaactgcttattggttatcgttgtaaatggttgcttttta

SEQ ID NO: 271659 - DNA, 418 bp, Glycine max
actgggagtagaataccgtgttggcaagttcccgttcatggctaatagcagagctaagggaatcgacaatgctgaaggactggcgaagatattggctgaaaaggagacagacaagatattgggagtgcacattatggcacccaatgcatgagagcttattcatgaagcagcaatagcactacagtatgatgcatctagagaagacattgcacgtgcgtgccatgcacatccaaccatgatcgaggctgtgcaagaagcctcaatggccacttatgacaagcccattcacatgtaaaaagagcccactgctacttcttggtatcattatggtccaagaatgttacaatgactcggagatgatacatgctgtgataaatttagattcaggcttttaaatgcaaatgagccccttgtttac

SEQ ID NO: 271660 - DNA, 418 bp, Glycine max
aacacacagcacaaagcaaagctcatccttgagttaaaaaatggcagcagcttcttccatggctctctcatccccatccttggctggcaaggccgtgaagctgggcccatcagccccagaagtgggaagggtgagcatgaggaagaccgtcaccaagcaggtctcctcaggaagcccatggtacggcccagaccgagtcaagtacttgggcccattctctggcgagcccccgtcctacctaaccggtgagttcccaggcgactacggctgggacactgctgggctttccgcagacccagaaaccttcgccaagaaccgtgaactcgaagtgatccactccaggtgggccatgctcggagcctagggctgcgtcttcccggagttgctgtcccgcaacggggtgaagttcggagaagcc

SEQ ID NO: 271661 - DNA, 324 bp, Glycine max
cttgttccttttgaacgttagaagtgctacagtacacacaaaggctgctcctcaggacgatgtgaagcctttgggtattgagggaagcccatttgtgtgcagggtccagattgtccttaagttgaagggagttgaatacaaatttcttgaagaaactttgggcaacaagagtgatttgcttctcaaatacaaccctgatcacaagaaggttccagtgttcgttcacaatgagcagcccataacagagtctcttgagattgctggatacattgatgcgacatggaagaacaaccccatcttaccttttgatccttaccaaaaagc

SEQ ID NO: 271662 - DNA, 447 bp, Glycine max
attcattcaagattcagcaagtgcgttttggaagcagagaccgaaatacttcgagatggcccgtacaaagcaaactgctcgtaagtcaactggaggaaaagctcccaggaagcagcttgcaaccaaggctgcacgtaagtctgcaccaacaactggtggtgtgaagaagcctcatcgttatcgccctggaactgttgctcttcgtgagattaggaaataccagaagagcactgagctcctaatcaggaagcttcctttccagaggttggttcgtgaaattgcccaggatttcaagactgatctgcgttttcagagccatgctgtgcttgcattgcaagaggctgctgaggcataccttgttgggctctttgaggacactaacttgtgtgccattcacgccaagcgtgtgactattatgcccaaggatattcagctggcaagaaggat

SEQ ID NO: 271663 - DNA, 387 bp, Glycine max
gtggaatgggccactccatggtcaagaacagctgagaactttgccaatgccactggtgagcaaggctacccaggaggcaaattctttgaccctttgagctttgctggcactatcaaggatggagtttacattccggatacagagaagctggaaagattgaaattggctgagattaagcatgccaggattgctatgttggccatgctgattttctactttgaggctggacaagggaagaccccccttggtgctctaggcttgtaaattaaacatttcatgtagataattgaattgagaggctagacagttgcaaatcaacctttgtttgtcccgtctgtgttacttcatgacaaattcaaattctatgatctaaaattggatgcattc

SEQ ID NO: 271664 - DNA, 319 bp, Glycine max
cagaggctggcggctatgactggcgtgagccgttcatgcaccagggttgactgaaccgcatgagcttgaccgaaaaacgcgcctgctgaaaagttctaacttacacgcagccgagcagtgcggccgggtagtatcaagttggctgacgtgatgaggatccgacccgtgcgagctgcgcatgagcgcatatcggagaaggtggaggcgagcataaagaacgcgcaggaagcgtgcgccggctatgcgaccagcagcgagtgcttggaagcgtcggacgagtttgaggatcttagcgcggctgccagccacgccagggaca

SEQ ID NO: 271665 - DNA, 358 bp, Glycine max
gtgggctaagattggatcaaaattgagttaaaataatcctgtttaattcgaattaaacatttaaagtccaagtcttacatttcaggtgaccaaactaacccaaccttttttctattttgctgccccaaatatttaaattaaattttatatagtacataaaatctttgtttggtttaattaaataaatcccaaaatgaatatattcaataagaagtcatttgtttttcttggttttggttattgcaaaatttaaaatttactggcagccaacctatcaagtgattcagccaatcaacggtgacccattcattggaagcctggaaaccccagttacatccagccctttgatcgcatggta

SEQ ID NO: 271666 - DNA, 433 bp, Glycine max
cccacgcgtccgcccacgcgtccgcccacgcgtccgcccacgcgtccgcccacgcgtccgggccaccgtcacttctgcagccgttgctattccctcattcactggcctcaaggcaagcgcaggcaaagtgagtgccgcagttaaagtctcagctccccaagccacaaggttgggcatcaaggcttcgctgaaagacgttggagtcgctgttgtgtccactgccgcgagtgcagtgctggctagcaacgccatggccattgaagtgttgctgggtggtgatgacgggtctctggctttcgttcccaacaatttctccgtggcctctggggagaagatcgtgttcaagaacaacgcatgtttcccccacaacgttgtgttcgacgaggacgagattcctagctgcgtggatgcatggaaaatcttcatgagcgat

SEQ ID NO: 271667 - DNA, 394 bp, Glycine max
cccacgcgtgcgcccacgcgtccgcccacgcgtccgcccacgcgtccgcccacgcgtccgggccaccgtcacttctgcagccgttgctattccctcattcactggcctcaaggcaagcgcaggcaaagtgagtgccgcagttaaagtctcagctccccaagccacaaggttgggcatcaaggcttcgctgaaagacgttggagtcgctgttgtgtccactgccgcgagtgcagtgctggctagcaacgccatggccattgaagtgttgctgcgtggtgatgacgggtctctggcttttgtttccaacaattgctccgtggtctatggggagaagatcgtgttcaagaacaacgcatgtttgccacacaacgttgtgttcgacgaggacgagatt

SEQ ID NO: 271668 - DNA, 328 bp, Glycine max
gctaaccaagaaggaactagggttttacataatacaagctctctctctctctctcgtcggttttcgtcaatcaaatccaatccaatatcaaatatgagtcgtcatcccgaggttaagtgggctcagaggcttgacaaggtctatatcacggtgcaattggctgattcaaaaaatgcaaaagtggatcttacgccagatggtatttttaccttctccggtagtgctggtgctgaagaccatcagtatgagctaaaactggagctctttgataaggttaacgttgaggagagcaaaattaatgtatgagagcgaagcatattcattgtag

SEQ ID NO: 271669 - DNA, 218 bp, Glycine max
cccacgcgtccgatcttgaacaggccaaccattagcaggagattcatgcctgagaaagggtgctgctgagtatgctgctttggctaagaaccctgagaaggagtttttgaaaactattactggcaagaaggagaccctcaatgaccttacaattatagaaattctggcaaggcacgcatctgatgagttctaccttggggagagagatggtggttact

SEQ ID NO: 271670 - DNA, 357 bp, Glycine max
cccacgcgtccgcacggaggttcacgaacctgatcagccacttatcaacgttgaagttgttgctcatgttacacgacctgagctactgaatagtgaggtatcaaatactttccatttcactttcactgtccgaccagaagccaaggcgatgaaaaatggattcaaacttcgcaatgtagtaccagcaacagaagaagaagcatggcgtatattagagcgcatagatgctgacaacttgaatgaattcttcagaacataagatgaaaaacaacatttagctcgtaaagtatttaaaatatccaccactaattatgtgagcagaagttcaaagattagcttttatataataaatttttc

SEQ ID NO: 271671 - DNA, 357 bp, Glycine max
cagagaatggcaactatgactggtgtgagcctttcatgccccagggttttcttcaacgcatcagcctcaccgcaaaacgcgcatgctgtaaagttctcacttccacccagccaagcagtgcgaccgggtagtatcaagttgggtcgcgtgatgaggatccgacccgttcgcgctgcgcctgagcgcatatcggagaaggtggaggagagcataaagaacgcgcaggaggcgtgcgccggcgatccgacgagcggcgagtgcgtggcggcgtgggacgaggtggaggagctgagcgcggcggcgagccacgccagggacaagcaaaaggaaaaggactccgacccgctcgagaattac

SEQ ID NO: 271672 - DNA, 435 bp, Glycine max
tcaaaatatggtttttggggatggaatttgtggcgtcaacctatgggtttcattgtttttctaatctcgtccctagcagaatgtgaaagattaccttttgatttaccggaagcggaagaagaactagtagcgggttatcaaaccgaatactcgggtatcaaatttggtttattttatgttgcttcctatttaaacctattcatttcttccttatttgtaacagttctttactttggtggttcaaatatctctattccatacatattcgtttctgacttttttgaaataaatcaaacatatggagtttttgtaacgataattggtatctttattacactagctaaaaactatttattcttattcctttctatcgcaacaagatggacttttgctaggctaagaattgatcaattattaaatcttgggtggaaattc

SEQ ID NO: 271673 - DNA, 376 bp, Glycine max
agaccgcagacgaacactcgtacacagaccctttacttcggtcagatgctgagacagtggttcgactacactaaatccgtccagctcgaggacttcatggatgggcagatactgcaacttcagcagctttaggatgagaacaaccctgactttgtggtcgaagacgtgtttatcttctatgaagatattgaaaggcttctcaaagatctcacctttgccctagatcagaatggcgttgacttcaaaaacgttgatgctgatgtgcaccaggtaaagggtagcacttcaagcataggtgcacaaagggtgaaaaatgcctgcatagctttacggaacttctgtgaggagcataacacagatgcttgcgtcagatgtc

SEQ ID NO: 271674 - DNA, 263 bp, Glycine max
attatttaagtttaaataatcatccgaatgtagcgagaatttgcatacaaaaaaaaaagaggtaataaaaaaaaaaaaaaaaaaaaaaaaaaaaaaaaaaaaaaaaaaaaaaaaaaaaaaaaaaaaaaaaaaaaaaaaaaaaaaaaaaaaaaaaaaaaaggaatgaaaaaaaataaaaaatataaaaaaataaataatatatggggggggttcttattataatatatattaatttgaatcttttttattttttaatttttttt

SEQ ID NO: 271675 - DNA, 365 bp, Glycine max
cccacgcgtccgcccacgcgttcgcccacgcgtccggtaggactgaaagtgactgccctatggaaaatggctatgcccgtccagttgagggaatccatgtacttgttgacatgcaaaatatggttgttcttgaatttgaagatcgtaaacttgtcccccttccacctgctgatccactaagaaattatacttctggtgaaacccaaggaggagttgaccgaagtgatgtgaaacccttgcagattattcagcctgaaggtccaagttttcgtgttaatgggcacttcattgaatggcagaagtggaattttcgtattggattcactcctagggagggttttgttattcattcagtagcctatatt

SEQ ID NO: 271676 - DNA, 321 bp, Glycine max
cccacgcgtccgctcatcttcctctttttctcaaccaaaaggggttcaattctagctagggctattacatcgtccgcgaccatgaacatggcgatcgtgcttctgttcatggttttcgcagtttcatcagctttagacatgtcaataatatcacatgacaacgctcatgcggatagggccacgaggcgcaccgacgacgaggtgatgtcaatgttcgaggagtggctggtgaaacacgacaaggtgtacaacgcgctcggtgagaaggagaagaggtttcaaatcttcaagaacaatctgcgctttatcgatgaacgaaac

SEQ ID NO: 271677 - DNA, 386 bp, Glycine max
caacactcatatccttatcctgtttctttcaatggaagtcatttctgcttctagcttgaatcccaacgctccgatgttcgtgccactcgcctatcggacggtggaggatttctccgaccagtggtgggacctcgttcactcctccccctggttccgcgactactggctccgcgagtgcttccaagatccccagttccaaaacgacgacgctttcgacttcgactttgacctagatctccaagatgaagatgaaagggaacgaaaggaagggaaggaggtggtgtcgttggggctgctgaaatggcgaagctgtggaggaggatggtcccaggcgccgaggtatgtggaaaaggctctcaggtttgtgaagcccaaggtgagcccac

SEQ ID NO: 271678 - DNA, 337 bp, Glycine max
cggggaagatgaccccaagccaatacaccagtcatggcgcataagtagcggtgcactaagtgcagcaatgtctccacgagacaactatgcatcattgagacgcgaaaaccgtgagcttaaacttgaattggctcgactaagaatgagactaaatgatctggagagggagcatgtttgcatgaagagggatatggccaagtctggatcacgtaaatttatgagttctttctccaaaaaaaattggtaaacttagtctttttggacataattcttcaagagggatcaagtctccatccaagaaactctaaagaacagattcaaaggtgattgagagaac

SEQ ID NO: 271679 - DNA, 379 bp, Glycine max
  unsure (1)..(379): unsure at all n locations
ggaggtaaaacaaatggtagtggccactctagccgaatctggcatgaatctttcagatgatgtgatcgaaagtattattgacaagacatttgaggaagctgataccaaacatgatgggaagattgacaaggaagaatggcgaaaccttgtcttacagcatccatcccttctgaaaaatatgactcttcagtatctcaaagatatcactactacatttcccagttttggttttcactcacaagttgatgatacttgaggcaaaccacagcatccatgtcagtttcagtgttcttgactgggaatgtcttagattgactcgtgaatgatgaggttctatgtgaaggattcngtaaggggtgatatggagttatttatattt

SEQ ID NO: 271680 - DNA, 261 bp, Glycine max
agcaagggtgcgtccgtcctcgagctgcttcccggcgaagatcagcctctgctggtctggggggattccctccttgtcctgaatcttagccttgacgttggcgatggtgtccgagctttcgacttctagggtaatagtcttcgtggtggtatgcagattttcgtgaagactcttacgggtaagactattaccctcgaggtggagagctctgacaccattgacaatgtgaaggccaagattcaggacaaggaaggcatccca

SEQ ID NO: 271681 - DNA, 418 bp, Glycine max
tgttgatcgagataactagaaacagtgtgatgaaaatgaaggtccttgttttcttcgttgctacaattttggtagcatggcaatgccatgcgtacgatatgttccctctccgaatgaacactggctatggtgcccgtactccggaggtgaaatgcgcaagttggaggcttgctgtggaagcacacaacatctttggctttgagaccattcctgaagagtgcgttgaagcaacaaaggaatacatccatggcgaacaatatagatcagactccaaaacagttaaccaacaagcttacttttatgccagagacctcgaagtccatcccaaggacacatttgtgttcagtatagatggcaccgtactctctaatattccatactacaaaaaacatggatatggcgtggagaaatttaactc

SEQ ID NO: 271682 - DNA, 387 bp, Glycine max
gagctgttgaagtaaggattatcagtgttgatataaagacagtacttgttttacatcgtgggtccaattttcatagcaaggaagggccctgcgcccgatgtgttacatcttcgaatgaacactggctgtggtgccccgtctactcaggtgaaaagcgcaagtagattgcttgttgtgtgagcacacactatctcttgctttgagaccatacctaaagagtgcgtagaggcatcaaatgaatatattcatggcgaacaatatttatcagacttcaaaacaggcaatcaacatgcttacttttatgccatagacctctaaattcatcccaaggacacatttgtgttccatataatatggaccggactctctaatattccatactacaaa

SEQ ID NO: 271683 - DNA, 317 bp, Glycine max
aaataacgtagggagttggatctgtggtttggttgcgatgcggcgtgttgcgaatcactgtccaatcccgatcgcttgatccagacagtgaatcagaatcagaatcataatcagaatcagagagaaacgatgagggcagtaagtgcgttaatggtggctcggatgttgacgcgggaccactcgctccctgtccttggcaacgaaagcatacccttcggatcggtgtggtggttcgcctatgccggcgtctcctgtttcctcgtcctcttcgctggcatcatgtcccggcctcaccctcggactcatgtctctgggcc

SEQ ID NO: 271684 - DNA, 401 bp, Glycine max
cccacgcgtccgcccacgcgtccgaaaagggtcaaggcttacagagtcaccaaataatatgctcgttaaagacttcaggctaatttctattctttgccaaacagtcgttctttcacgttatgagattatacacttctggacttctaaaatgtggcggaggttttctttagaatgagtaatgtgatttttgtttacttaaaaaaaaaaaaaaaaaaaaaaaaaaaggaaaaaaaaataaaaaataaaaaaaaaaaaaaaaaaaaaaaaaaaaaacaaaaaaaaaaaaaaaaaaactaacactccaaataaaaaaactcaaactttcaaacataaaaacccaactaatttaactccttgttaacacctaaaaacattaaatttttaaaaagggggcgcccctt

SEQ ID NO: 271685 - DNA, 415 bp, Glycine max
  unsure (1)..(415): unsure at all n locations
cccacgcgtccgctttttttcttcttcttgaaatggctctccaggctgcttctcttgttcctgcttctttctcggttcttaaagagggaaagagtggtgtgtctctcaaggactccaccttgttcggtctttcattttcagaacctatcaaagctaacttcagctcttctgcattgaggtgcaagagggaattcgaacaaaagctctgtgctgtgagggccgaaacagtggctacagcctctccagcagttaccaagtctacaccagaaggcaagaaaacattgaggaagggcagtgttgtgataactggggcttcatctggactaggcctggccactgctaaggctttggctgagacgggaaaatggcatgtaataatggcctgcagggattacctcanagctgcaagagctgc

SEQ ID NO: 271686 - DNA, 355 bp, Glycine max
gagctgttggagtaaggtttatgggtgttgatctgaatacaattatgtttaacttggaaagcatcaaagacttggaagagttgaaggaatttgtcttggaccaatcagaggcatatgagatcaaaatgggggatcaattttttcgaagatctggagatccacctcttgatgaagttattgagaagtacaatagtgagaaagccaaagcagataatgctgattcagaggaaattgatccgaatgttaaaacagagttgtaattaaacggtatatagacataaactatgtttggttttgcgtcagttttaggaaaattgtgtcaaatttccatgttaacagtgaagcaacttcatat

SEQ ID NO: 271687 - DNA, 423 bp, Glycine max
acacccacaagtcatcaaacttcaattgagtttcaaagagatcagtggtagctagtgtggtgcaattgtgttgatcaaggatggaacaaaagaagtttgtggcactattaatggtggttgtggtaatggcttcttctatgtggaaagggtccaaaggtcttagtctctgtaacatggatgaaggtggattggaggcttgcaagctctcagtgactcagccaaacccagttgatccatcccctgattgctgcaaggctttggctggtgctgacttgaaatgcctttgctcttacaagaactcatcagagttgccttttcttggaattgatcgaactcttgctacttcacttcctgcaaagtgcaatctcactcccccagataattgctcataattaagcttctttgaactattatttgtgctct

SEQ ID NO: 271688 - DNA, 373 bp, Glycine max
gttttctgtgtcaccgaaactcgtttttttcaaaacacataaaacatctcgaacgcgctgtttacggctgcgggggtaaagtgcatcaatggcaggtcgcggcaaaaccttaggatctagcgccgccgagaaggcttcttcaaggagcagcaaagccggccttcaattccccgtcggccgaatcgcccgtttcctcaaggccggaaaatactcttagcgtgtcggcacttgctcccctggttacctcgccgccgtactttaatcgctcgtggctgatgaccttgaattggctggaaactcttttagagacatcttgttgacttcgttttgtgccgcgccacattcaattgtctgtgaggaacgactagtattt

SEQ ID NO: 271689 - DNA, 425 bp, Glycine max
cccacgcgtccgcgtttatcaaactctatgtgtgagtagcatgttccaacaactcagctttttcagaacagccattactaccactgttcgctatgaaagatgacaaacaggctccagttcctgcttctacaaccgaaggacaacctatacgatgtaaagcggcggtttctagaagagctggtgagccgttggttattgaggacatcattgtggcgccgccaaagcctcgtgaggctcggattcgtattatttgttcctctctctgccacagcgacatcacacttcggaaccttcaggaccctcctgccattttcccaaggattctaggtcatgaggcaactggggttgtggaaagtgttgggaaggatgtaactgaagttacaaaaggtgatgtggtaattccagttatcctaccagaatgtggg

SEQ ID NO: 271690 - DNA, 397 bp, Glycine max
cccacgcgtccggtagttgagaactaagtaggagaagcaaatggcttcctcaatgatctttttcccagctgttaccactgtcaaccgtgcctgtgccggcatggttgctccattcactggcctcaagtccatggctggctttcccaccaggaagaccaacaatgacattaccttcatcgctagcaacggtggaagtgcgcaatgcatgcatgtgtggccaccagttggcaagaagaagtttgagactctttcctacctgccagacctagatgatgcacaattggcaaaggatgtagaataccttcttaggaagggaaggatttctcgcttgcaattcgagttggagcacggtttcgcgtaccgagagcacaacaggtcaccacgatactactatgga

SEQ ID NO: 271691 - DNA, 425 bp, Glycine max
aaggctttcatcctctcgacgctcccacagtcgaagcgaatgtcccatcatgctcccggcgtcaaaacgcgcctgaggggtgtcgttttcgacatggacggcaccctcaccgtcccggtgatcgattttccggcgatgtacagggcggttctgggcgacgaggagtacctgcggctcaaagcggaaaacccttccggcatcgacattttgggccacatcgaagggtggccgcctcacaaacagcgcaaggcctacgacgccattgctgaggtcgagcgtcagggtcttgaacgccttcaaatcatgcctggttgtgcagagctttgtgccatgctcgattctaagaaaataaggaggggtttgatcactaggaacacgaagtcagcagttgatttattccatgaacggtttgggattacattttc

SEQ ID NO: 271692 - DNA, 361 bp, Glycine max
ggcttcttgtgagggcttcagacgagcctgcagcggcggcacccgcaaccaccacccctccagctgaagctgaagcaaagccaaaaccaccacctattggccccaagagaggtgctaaggtgaagattcttaggaaggaatcctactggtacaaaggcactggttcagtggttgctgttgatcaggaccccaacactcgctaccctgttgtggttcgattcaacaaagtcaactatgccaatgtatcaacaaacaactatgctttggatgagatcgtggaagtggaatgagtccaatttatttgtaattttgattctggtcatgctatcgcagttactagcctaagtttttttcatgcgac

SEQ ID NO: 271693 - DNA, 240 bp, Glycine max
cttggtttcggtgttccaagttagttagaggcattgttgcttgcatagatctctgatctgaaaatgagtgcgtcgaggttcattaagtgcgtcaccgtcggcgacggtgctgtcggcaaaacctgcttgttgatttgctacaccagcaacactttttccacggactatgtgcccaccggttttgacaattttagcgcttatgtcgtggggggtggaagcaccggaaacctaagattgggg

SEQ ID NO: 271694 - DNA, 429 bp, Glycine max
cggacgcgtgggaaaatttaaagaaatcaacacacacaaacacaacaacatatggaggtgctaagggtgcaaaccatagcttccaaatccaaagatgctgccatcccagccatgtttgttagggcagagacagagcaaccaggcatcacaaccgttcaaggggtgaaccttgaggtgccaattattgattttagtgacccagatgaagggaaagtggtgcatgagattttggaggcaagtagggactggggcatgttccaaattgtgaaccatgacatacctagtgatgttataagaaagttgcaaagtgttgggaaaatgttctttgagttgccacaagaggaaaaagagttgattgctaagcctgctgggtctgattctattgaagggtatggcacatagcttcagaaagaggggaatggcaagaaa

SEQ ID NO: 271695 - DNA, 331 bp, Glycine max
ctcttaggcactttcttgttttctctcttaccctcatatccatcatcttccacacccatggagcgttctctgagcaatcaataatcaagttacccacagaccaaccaagggtagagaaactgacccacttgcattttttctaccacgacatcttagagggcaagaacatcacggtggtgaaaatcatcgagccatcatcgagcgaggttcgtgaagcaactgggtttggaaccactttcatgatggacaatgttttgaccgagggttcagagctgagctcgaagcacgttgggagggcttaggggctgtttggcttgtcctttttggagga

SEQ ID NO: 271696 - DNA, 424 bp, Glycine max
gaagcattagcaaaagcaagaagaactagtctaagcagaaatggcctcttcagtgatggcatctgtggccctcaaacctgcccctttcactgttgagaagtcctcagttagaggccttccctccctctcaaggaactcctcttcattcagagttgtggccagtggtggcaagaagatcaagactgacaagccttatggaattaatggtggcatggctttgagggaaggagttgatgcatctggcaggaaaggaaagggaaagggcgtttaccagtttgtagacaaatacggtgctaatgtcgatggttacagtcctatctacgacaccaaggactggtctccaaccggtgatgtctacgctggcggtacgactggcttggctatctgggctgtgactctacttggtcttcttgctggtggtgca

SEQ ID NO: 271697 - DNA, 396 bp, Glycine max
tcggatcgtctcaatcaggtgcttcggtggttccttgggttcaattgagatctttctaagcaggcattgtcccttgtggtatggctacaatgggaagttgaagcctctgatgaggcttgcttatattaacaccattgtctacccgtttacctcaatcccattgattgcttactgtacgcttcctgcattttgtcttctcacaaataaatttattattcctgagataagcaactttgccagtatgtggttcattcttctcttagtctccattttttaccacttcaattcttgagcttatgtggagtggggtcagtatagaagactggtggagaaattaacagttctgggttatcggtgggacatctgcgcatctctttgctgtgttccaagggcttc

SEQ ID NO: 271698 - DNA, 398 bp, Glycine max
cccacgcgttcgcccacgcgtccgcccacgcgtccggcccccaggcttctaagtcattgaaaaatttgcaaagcatctgtagccaccccactttgtttgttgtacttaaactacattcccatttgtttttgctttatgagatttcatcatcctgtatttttggtttctgttttcggacttcaatggaaattaatggatgagaactaatgaataaaaaaaaaacaaaaaagaattgacagacaaaaagaaaaaggaaaagaaaaaatacaattgaaacccaaaaaaacttacaaaaaaaaataaaggaatgaaaactacataaaaaaaaaaaggggcggccgttttaaaggatccaggtttacgtaccctggcttgcgacacaatactttttttttggg

SEQ ID NO: 271699 - DNA, 338 bp, Glycine max
  unsure (1)..(338): unsure at all n locations
cacaaacaactcttgagaaagaaagaatggctgccaacacattgatgagttctgccatctcagccttcccatctctcctttcctcctcaaaatccagatctgccgcagcagttcctctttccagctttgttgtcaccaatgcctcttcttctcgcttttccatgagtgctgattggatgcctggccagcctagacccccctaccttgatggttcagcacctggtgactttggattcgaccctcttcgtcttggtgaagtaccagagaatcttgagaggttcaaagagtcagaactcattcactgcagatgggccatgcttgctgntccagggattttg

SEQ ID NO: 271700 - DNA, 351 bp, Glycine max
  unsure (1)..(351): unsure at all n locations
gaggtgcatgtntnaanattcttaggatggaatcctactggtacaaaggcactggttcagtggttgctgttgatcaggaccccaacactcgctaccctgttgtggttcgattcaacaaagtcaactatgccaatgtatcaacaaacaactatgctttggatgagatcgtggaagtggaatgagtccaatttatttgtaattttgattctggtcatgctatcgcagttactagcctaagtttttttcatgcgacaaaaaaaaaaaagaatctgtatcatattctctctgatatctatccccttgatttctattctctnaaannnnnnnnnntnnttnntttnttttataaat

SEQ ID NO: 271701 - DNA, 356 bp, Glycine max
ctcagatctgatctcttgatccttatattcatggctgaaaaggtgaccatcatgaaactcaaggttgaccttgagtgtgagaaatgctacaagaaggttaagaaactttttggcaagtaccctcaaaaattcgggaccagaagttcgatgagaaggaaaacattgtgttcatcacagtggtgtgttgtagccccgagaagataagagacaagctttgctacaaaggtggaggctctatcaagagcattgagatactggaactgcttaagcccaaggccgagaagcctaaagcagactcttccatagctgagaagcctaaggccgagcccggtttatttactttttcattcatcggg

SEQ ID NO: 271702 - DNA, 380 bp, Glycine max
atatgctcatctacttactgttggaggggcctataatgatgctccacataaaactcagatatcatgccgcactgatcgtgctggacttattgatgctgctccttggataagaattccatatccctttcaatggggagcaccttcatttgatgcaggtgaagcctttgccatgatgatggcatcttttgtttctcttgtagagtccagtggagctttcattgctgtatataggtatgcaagtgcaacaccattgccaccatctattctcagtcggggtattggttggcagggagttggcattctgttatcaggattattgggaacagtcaatggatcctctgtatctgtacaaaatgcatgtcttttggttttgacacgtg

SEQ ID NO: 271703 - DNA, 390 bp, Glycine max
gtttctacgccaagtagacagtgttgctgtttttcacaatgcaagcaccagatttagtgatggggcacgatttggactgggcgcagaggttggaattagtacgagcaggattcatgctcgaggtccagtaggtgttgagggattgttaacaacaagatggatactaaaaggaagtggacaagtagtagatggtgataaagggattgtctatacccacaaagaccttgcagcttaatttgaatggtctaactgctttactttcttttgtagcctttttcatttgttttgacagttgagaacggtataaaattgtacaatttaataaaatagggtcatttgtatcaaataaaaaaaaaaaaagggtggtcggttttagaggatccaagctta

SEQ ID NO: 271704 - DNA, 431 bp, Glycine max
cccacgcgtccgcccacgcgtccgtggaattggaagccaccgccgctacttccccaccttctcgcgttctcctcatctccgccggtgccagccacaccgttgcccttctctctgggaatgttgtgtgttcgtggggtcgcggagaggacggacagttaggccatggtgacaccgatgataggcccttacccacgcagctcagtgcattggatgcccaacacattgattctattgcctgtggagctgatcatacccttgcgtattccgaatcacgcaatgaactctatagttggggatggggtgattttggaaggttgggtcatggcaattctagtgatttgctcattcctcagcctattatagcattgcaaggtctaaggataaagcaaattgcctgtggggatagccactgtttggcagttaccatggaa

SEQ ID NO: 271705 - DNA, 322 bp, Glycine max
cccacgcgtccgatttgagcttaaaccctatccgctcttctcttcattcttcactttggaaacaatcataatggcgttctgtaataaggttggaaatgtcttgaggcatggtgctgctcgcagcacacatgcccctgttgcgtccatgcttaattacatccgctgcatgtcttcaagcaagctttttattggaggcctttcatatggagtagatgaccagcctcttaaggatgcattttctggcttatggagatgttgctgatgcacaagttatacctgatacatactgtggaagatcaaggtgattttggatggtcaactc

SEQ ID NO: 271706 - DNA, 432 bp, Glycine max
gtgtctctaagcttgccaacacagatcttagctgataactacttgtactcatcacctccaccagcagtacaccctccttacactccccacccagtttatcactctccttcaccacctcctaccaacaagccttacatctatgcgtcacctccccctccttaccactattagctagcatagctctatggatatgaagaatatgtgcaacgaataaaagaaagcgatagaataggaagaagaagcgcttcgcgatgcacgaaagagaagaattggaagcaaagtttcggcgttttgtcttttataaaaaaaatgttaaatcattataattttctatgatagggattggtttcttgtctttattcttttgtttatgaatatcggtgtattttaacagttgtaaagcactgcgccctcgctgcatgatcatgtagt

SEQ ID NO: 271707 - DNA, 334 bp, Glycine max
  unsure (1)..(334): unsure at all n locations
caattgaaattttaaaaatgactgggataaacttaagaattcaattattgaaattgaataagtaaacaatttaattggattggtcgaatggtatcaaaaaaatggagtactaactcccatttcttatttattattgaattaaccgatcaacttgctttgttatcgaacatttctttttgatttcaaaaattttccggaaaaaatttgaatctatttttatatgcgaatcaatcctactacttctggtcctgaggtttctgcgcttgtttntttttttttttttttttttttctttttttttaatgggcggccgttttagaggatccaagcttac

SEQ ID NO: 271708 - DNA, 421 bp, Glycine max
cccacgcgtccgcccacgcgtccggatgacgtggagtctatgattaaaactgcagttgatgcttggggaacagttgatgtattaataaacaatgcaggaataactagagatggtttattaatgagaatgaagaaatctcaatggcaggatgttattgatctaaatctcactggtgtttttctttgcacccaggctgctgctaagattatgatgaagaaaagaaagggaagaattgtcaatattgcatcagttgttggtttggttggcaatgttggacaagccaattatagtgctgcgaaagcaggagtaattggcctgacaaaaactgttgcaaaggaatatgctagcagaaacatcactgttaatgcagttgctccagggtttattgcatccgacatgactgccaagctaggacaagaca

SEQ ID NO: 271709 - DNA, 436 bp, Glycine max
atgattggaagaattatcatataatgtgtaaaacaataatgtcacatgttttctttaaaaaaaaaaaaaaaaaaaaaaaaaaaaaaaaaaaaaaaaaaaaaaaaaaaaaaaaaaaaaaaaaaaaaaaaaaaaaaaaaaacaaaaaaaaaaaaaaaaaaaaaaaaaaaaaaaaaaaaaaaaaaaaaaaaaaaaaaaaaaaaaaaaaaaaaaaaaaaattttttgaaaaaaaaaaaaaaggggggggggctttttaaaagaaaaaatttttctcaccgggggggggggggtaatattttttttttgggggcccaaaaaaaaaaatcaggggccgggtttaaaatacctggggaggggaaaaacccgggggttcccaaaaaaaaacccctggaaaaaaaacccttttttcgcggggggggataaaaaaaaagacccccc

SEQ ID NO: 271710 - DNA, 361 bp, Glycine max
ggcttcttgtgagggcttcagacgagcctgcagcggcggcacccgcaaccaccacccctccagctgaagctgaagcaaagccaaaaccaccacctattggccccaagagaggtgctaaggtgaagattcttaggaaggaatcctactggtacaaaggcactggttcagtggttgctgttgatcaggaccccaacactcgctaccctgttgtggttcgattcaacaaagtcaactatgccaatgtatcaacaaacaactatgctttggatgagatcgtggaagtggaatgagtccaatttatttgtaattttgattctggtcatgctatcgcagatactagcctaagtttttttcatgcgac

SEQ ID NO: 271711 - DNA, 426 bp, Glycine max
tggaatcgagttcgcagagaaacctgattgtgctgaatcctccaaatgggtggcgtttgtggacaatgaaatccacaaggcatgtgtgggtattggtggtcctgaaggtcatcctggtcaaaacatttagtggcacatttagcattcagaaatataaatttggatacaaacttgtgttctgtatcactggctcaggcacttgtttagatattggaaggtttgatgccaaaaatggtgagggaggaagacgtttgaatctcactgagcatgaggccttcgacattgttttcatagaagcttctaaggttgatggaattatcaagtccgtagtttgaatcaaatcaaataatgtcaagggtagctagatagtgttgagttaatgcttaatcatatgtttgtcgctgtgatatgcattaagtactctgc

SEQ ID NO: 271712 - DNA, 423 bp, Glycine max
gtacaattggtaaaggaagtagattacctttttaggaagggatggattccttgcttggaattcgagttggagcacggtttcttgtaccgtgtgcacaacaggtcaccaggatactacgatggacgctactggaccatgtggaagctgcctatgtttggttgcactgatgcttctcatgtgttgaaggagcttcaagaggctaagactgcataccccaacggcttcattcgtatcatcggattcgacaacgttcgccaagtgcagtgcatcagcttcatcggctacaagcccccaggcttctaagtgtgaaaaatttgcaaagcatttgtagccgccaccccactttgtttgtttgtacttaaactacattcccatttgtttttgctttttgagaatccatcatcctgtatatttggtttctgt

SEQ ID NO: 271713 - DNA, 395 bp, Glycine max
gaccttggccgattacaacatccagaaggaatcaacccttcaccttgtcctcaggcttcgtggtggcatcatcgagccttccctcatggctttggctcgcaaatacaaccaggacaagatgatttgccgcaaatgctatgctcgtctgcaccctagggctgtgaactgccgtaagaagaagtgcggtcatagtaaccagttgaggcctaagaagaagatcaagtaaattctgggtgggatattgttggtctctactttcgttttgtttgtcttagaacagtgacttgtttggtatttatccgttctgcgtttgattaatgttaattggtttgagacaatagttttgaactagtcaattatatttctatgatgccatttttggccttagtcaatta

SEQ ID NO: 271714 - DNA, 389 bp, Glycine max
cagcaatcttggaaggtgataatttttctacaaactcgttttactattatgcatactacattggagcaaatgcctcctggattgtaatacccttgatcattgccatccgctgctggaggaagatctgtgcagcatttcgagttcaaggtggccagacaaaaaagcctaaagttcgttgaaggaaacattttcaggttattggtcttagagatcctgagctaataatgatgttttggggtagttgagataggagagattgttgtaagaattgtgacattgattctcttaaactgcatatctcagggagaaaaaaaaaatcccagtgtcatttgagaaggtgatgtttttaattttaagttttgaataagtattttcctatcattgatttg

SEQ ID NO: 271715 - DNA, 419 bp, Glycine max
caacattcatccatcactacttccagcttttggaggcaagggattctatggcatgaaagtgcgcaaagcattaattgcttgtggagcaaggtttacttctattgaaatatctgaagcatgttttttcagtgaaacattgatgtagttggttcttgattaataatcactagttttatttttatatgatggttagggtttaaggtcctaccatacattttgttgatgaacactatgatacagggcgtatatcttgcacaacgtgttgacactgtgcttgccaatgatactgaaaaagagctggctgcaagggttctcaaagaggagcaccaattatatgtggaggtggtggaggctttatgcgaagaacgcgtggtttggaggcaagatggcgttcctctcatccaaagcaaagaaaaccc

SEQ ID NO: 271716 - DNA, 63 bp, Glycine max
aaaaaaaaaaaaaaaaaaaaaaaaaaaaaaaaaaaaaaaaaaaaaaaaaaaaaaaaaaaaaaa

SEQ ID NO: 271717 - DNA, 390 bp, Glycine max
aacatgaaagtgagaggtggaaggggattttctcttgaagaactcaaggcagcagggattcccaaaaagcttgcaccaaccataggtattgctgttgatcatcgtcgcaagaaccgttctttggaaagtctgcaagctaatgtgcagaggctgaaaacatacaaggccaaattggttgtgttcccaagacgggcacacaaggttaaggctggtgattctactcccgaggagcttgcaaatgcaacacaagtccagggtgctttcttgcctattgtgagggagaagccaactgttgaacttgtaaaggttacagatgacatgaaggcatttaaagcttattacaagcttcgtcttgaacgcacaaacaaacgccatcatggtgccagactg

SEQ ID NO: 271718 - DNA, 282 bp, Glycine max
gtagattgctttttgggtgatgtttagcaaaagataaaaactttgaatgtgaatatattacaaacatccgtgtttcattagtttgcaaaaaaaaaaaaaaaaaaaaaaaaaaaaaaaaaaaaaaaaaaaaaaaaaaaaaaaaaaaaaaaaaaaaaaaaaaaaaaaaaaaaaaaaaaaaaaaaaaaaaaaaaaaaaaaaaaaaaaaaaaaaaaaaaaaaaaaaaaaaaaaaaagggggggctttcttaaagaatacccagttatacgaggggggccttcaaag

SEQ ID NO: 271719 - DNA, 392 bp, Glycine max
actgcctcttcctctcagattcagcaattttctattttctcctctcatggcttcagattccaaaaaggatttccctgctgatgacaaagctggaacagaagagagtaaaacatccaaagatgagacttcatctaaagattctccagcagaacaaagagcgacagctacttttggacctagacctggacctgctgggcctccaggcaacccttttgatctctcagcaatgtctggtctgctcaatgatccaagtatcaaggaattggctgaacagatagcaaaagatccatcgttcaatcagatggctgagcagcttcagaaaacttttcaaggagctccacaagatgctatccctagcttcgataatcaacaatatttttcaaccatgcaac

SEQ ID NO: 271720 - DNA, 407 bp, Glycine max
ccgacacgttcgtcgtggtcgtcgacgacaccaagctcgtggacggcctcggcgggggcgggctggccatgccggtggaggtggtccagttctgctggaagtacaatctgcatcggcttcaggagcttttcaaggaagaaggtgtggaagcaaaattgagattggaggagagtgggaaaccctacgtcaccgataattccaattacatcgtggatttgtacttcaagactccaattagggatgcattggccgtaggcgctgaaatttccgctctggaaggcgtcgtcgagcatggcttgttcctcaacatggccacttctgtcatcatcgctggcaaatctggcgttgaagtcaaggccaagtgagactctgaaataattcgtttcttcttcttcttctcattcttg

SEQ ID NO: 271721 - DNA, 420 bp, Glycine max
atccactttcactggaatcacaatcctgaaacaaaatcatcttagcatttaacataggactaggcaacatgaccaccacattggtaagaggtttctcggaagagcaagaagctctgttggtgaagtcatggaatgtcatgaagaagaattctggagagtagggtctcaagcttttcttgaaaatatttgagattgcttcatcagctcagaaattgttctcattcttgagagattcaacggtttctttggagcaaaatcccaatctcaagccccatgccgcgtctgtctttgtaatggctagctaaaattaaatacttatccaaatttcagttgaaccatttttaccatttattatataatccatgttttcttaattgggaatatcaaattaattttggttttggccttttataacttttt

SEQ ID NO: 271722 - DNA, 270 bp, Glycine max
aacttctgctacccactctcttcttccaagtccaaccacgcttttctctacagtcatgggcaaggtcaagatcggaatcaacggatttggaagaattggccgtttggttgccagagtcgctctgcaaagagaccatgtgggacctcggtggccgttaccgaccttttattaccaaccgttaacatgccttcattgttaaattccaacgtggttaacgacccctgaagcattaagatgtcaacctttaaggccagaaaacacctctttttt

SEQ ID NO: 271723 - DNA, 410 bp, Glycine max
cccacgcgtccgatggccacccacgcggctcttgcttctacaaggatcccttcaaacacaaggttcccatccaaggcctctcactctttcccaacccaatgcgccttaaagagacttgaggtgacagaattctctgggcttagatccacttcatgtgtcacatatgctaacagtgctagagaatcttccttttttgatcttgtagcttcccaactcactcccaagcagaccaatggatcaactcctgtgaggggagagacagtggccaagttgaaggtggcaatcaatggtttcggacgcattggtagaaacttccttcgctgctggcacggccgaaaagactcaccccttgaagtcgttgttgtcaacgacagtggtggtgtcaagaatgcttcgcacctgctgaaata

SEQ ID NO: 271724 - DNA, 394 bp, Glycine max
tctcggtgttgttggattggaattggacagaaaacagaaacagaaaatggagagcggtccactaatttacccgatctgcccctctcgacattcttcctttcttctctctcaccaatctcccttcctatgcgaaccttctctctctctcaagcttcgaaagcagtttcctctcacttcgcagaatgttctggaagccgcctctcctctcaggccttccgccactctgtcttctgatccctacagtgagacgattgaattagctgatatagaatgggacaaccttgggtttgggcttcaacccactgattatatgtatatcatgaaatgcacacgaggtggaaccttttccaaaggtgaactgcagcgttttgggaacatcgagttgaaccccttc

SEQ ID NO: 271725 - DNA, 397 bp, Glycine max
aaaacagcagagagaagagaagggctacacaaacacaatctctaatggcactcacggggtgggcttcttccactgccaatgcactcaaactctcttctgtctccagacctcatctcttgcctcctttttctttctccagatgcttatcttccgtcttggatggacttaagtacgctgattcacatgaatgggtcaagcacgaaggctcagtcgccaccattggtatcactgaccatgcccaggaccatcttggagaggtcgtgtatgtggagctgccagaaccaggtggcacagtttccaagaagtctggcttcggagccgttgaaagtgttaaagcaacacgtgatataaactctccaatctcggtggagatcgttgaggttaacaaaaagctcac

SEQ ID NO: 271726 - DNA, 417 bp, Glycine max
tctcatgctcccggccgtcatggcacgcggattcgagcggccgcccgggcaggtgttcggcttcatgcaaacctcattgttcttggtatacatggcttgcatgtgctatggattctttctcatgctcgggactgtgggtttccgcgcagccctattttttgtccgtcacatataccggtcaatcaagtgcgagtaggatgctggtgggatggtcttctgttttacagaatcctttacagatctggtattcaagaagaccatgtaggatggtaggatgtcttgagaagaagcatgaattatcttacgcccgaaattttaaaaactttttgccattttcatttacagctcaacagtttatatcgattagtataattagagctttctcaattcataattttataccttcccacacaatta

SEQ ID NO: 271727 - DNA, 469 bp, Glycine max
tctcatgctcccggtcgacatggccgctggatttcgagcggccgcccgtgcaggtgctccccttcccccacatacactggctcttgggggtttatgttctcttttccccctctaattttggtaaaaatctcactagctttttgcaaagattgttccccaacataatctccaaaatagaaagccttgcgcaccactcaacagaaattaggtcaaccccattttcttacacatccatctctttatattttggcttattctgtgaagtgggtaattcttgaaaatattgatgagtatatatattcaaaatggttaaagagaaaattcacatcaagaaaattgataatgcttcagcaaggcacgtcactttattatagagaagaagagggcttttcaagatatctgaagaaccttcatttctatgtgatgctgatgatgctctcaacattttctttactactggaaaactctt

SEQ ID NO: 271728 - DNA, 348 bp, Glycine max
gttggttccacccttgcatacttcatttcaactgcctcaggtgacattctgccaatgaagaatggaccacaactcccaccaaagctcgatcctcgtggcaagatctaatttgatttgtatcagaactccatctattgagttcctttttaattatttcttttctggttagcataatgtgtacgtatacttacagactactattcaaagatgcttctttcccgtctaaaaaaaaatatattaatataactatattaattatttttcctttaaataattttataaaatttagggcggcctctttataggatccaatcttacttacgcgttcattctacttcataccttttt

SEQ ID NO: 271729 - DNA, 399 bp, Glycine max
aattcccgcgcgagccagcgtccgggcacccgtaccgcacttgagattcaaacgctgtgttcttgaagtgtttggggtcgtggcactctatgcatcttcctgtactgcatcaagactcaagcaacgcaatggattgggcttttgtgcataaaacctgtgataagtgggcttctacgaacattggttattctggtcattcgttaaaagctgctttgcttattaattatgacccgactggaccatctagattattatctaccattgctgatcaagaagggatgagagccaatcccattgaattgagtcactttgtggacttcatcaaacaaaatatactccatacagaactctttcattattgggttcaatcagtacttgatcacgtcaattcatgagaac

SEQ ID NO: 271730 - DNA, 417 bp, Glycine max
gcgcacacactaaaccaaagtaagaggtatagtgttctaagagtgagcaacttgtgagaaatggcttccacggctgcacttctcttgtgtctcaatcatctctttttcactgtggttagttccacatatgtgccatgtcatccaccccccaaaactcccaaacacccacctgtcccaaagccaccatccccaaagcaagcaagctgccccaaagacactattaagttcgttgtgtctgctgatgtgttaggattgattaatgtgcaacttgggaagccaccaaagaccccatgctgcaacctaattcatggtcttgctgatcttgaagctgcagtgtgcctttgcactgctctcaaggctaatgagtcgggcatcaacctcaatgttccagtgaacttgagcttgcttctaaactac

SEQ ID NO: 271731 - DNA, 351 bp, Glycine max
tctctctccaatggccaaagacctcgtaacggacattcaaagtgggttgcctcacagtgactgccacgacccacgctccgccccattctacgaccccgccgagctccgaaagtggtccttcttccgagccctcatcgccgagttcgtcgccaccctcctcttcctctacgtcaccatcctcaccgtcatcggctacaaccaccagacagccaccgccgccgagccctgcagcggcgtcggcgtcctcggcatcgcttgggcctttggaggcatgatttttgtcctcgtctattgcaccgccggcatatcagggggacacataaacccggcggtgacgttcgggttgttttt

SEQ ID NO: 271732 - DNA, 388 bp, Glycine max
cccacgcgtccgcttttcggtcgaagcttatcctgtgttttctacccgtttttctgtgggtaaacattataatgagccaattctaaggcttcgttaaaaaaaaaaaaaaaaaaaaaaaaaaaaaaaaaaaaaaaaaaaaaaaaaaaaaaaaaaaaaaaaaaaaaaaaaaaaaaaaaaaaaaaaaaaaaaaaaaaaaaaaaaaaaaaaaaaaaaaaaaataaataaaaaaaaacaaaataaaataaaatgacactataaataaaaaaaaaaaaaatgggataaacttttaaattacccaaattaattccccttgtataaaatacccactttcctctgatgttgtaatataaaaaaatcttttaccgatcgatttttaaaacagttgcgt

SEQ ID NO: 271733 - DNA, 307 bp, Glycine max
tcccaattacatttaattttaccttcacctcgttaatatctatctgggccgttacacctatctacgagtaagctcaaattgtgaaagcaccattcatgatgaatcatgttctatctttcatcataggaattatggcaagctctattttgatccaagttaaacatttattttcctgtcttatttctttgaataaaagactgtaatgttttatatctatgctacattgtttatgattcagatcatgttgattcaatttgattcattgccattttgcacgtcctgtacttatcttgttcaatttacttac

SEQ ID NO: 271734 - DNA, 360 bp, Glycine max
cccactcgtccgcccacgcgtccgagcgctttaagatgatacagatatccaaggggtgcgggaaacctagcttgtttctgttgcttttacaattgcttatgttgtcgaatgggacacccagttgttagtggcactggtttctcctttctgatgtttgatacatcttgttgtattcaagttctttatgttcgtcttatgttattagctcataacaatgttcttactgcttttgctaatcaacatgatctcctatttgcacaatattttatgcttacttattattgttatttttcttatttcctttaattttttttattttcttttttattatctaatattttattttatttcttttctttt

SEQ ID NO: 271735 - DNA, 405 bp, Glycine max
cccacgcgtccggctaaatccctagttagccgccatggtgaagtactcaagggagcgtgacaatccaaccaagtcttgcaaggctagaggcgccgaccttagggttcattttaagaacactagggaaactgcctttgcaatcaggaagttgcccttggttaaagctaaaaggtacttggaagatgttcttgcgcacaagcaggccattccgttcagacgtttctgtcgtggtgttggaaggacagctcaagcaaagaatagacactctaatggccaaggaaggtggcctgtcaagtcagcaaaattcatccttgatttgctcaaaaatgctgagagcaatgctgaagtgaaaggtttggatgttgatgcgctttacatttctcatatccaagtcaatcaagcaca

SEQ ID NO: 271736 - DNA, 317 bp, Glycine max
taaatccctattttgcccacatggtgaattactcatctaagccgtacatgtcaaccaagtgttgcaaggctagaacgcaccacaccttaagttacattttaagaacactagtgaaactgcctttgcaatcaggaagttgcccttggttaaagctaaaaggtacttggaagatgttcttagcgcacaactcatagccatatcccgttcatacgctttctgtcttggtgttataaggacagctcaagctaagaatatacactctaatggccaaagaatgcgacccttcaagttagcattaattcattcttgatttgctc

SEQ ID NO: 271737 - DNA, 411 bp, Glycine max
aatcccgatattcttccagatctcgaaaactatgtcaacgaccaggtttgggcgcaaacttatagcctggacgcgaatctctgccttcttcgcctctaccagtttgaacctgagaaaatgagttcccagattgtggcccgcatattggtcaaggctctcatggcaatgccggcgccagatttcagcctttgtctctttttgattccagaacgcgtgcaaatggaggagcaattcaagactttgattgttctgtctcactatttggagacaggaagatttcggcagttctgggatgaagccgcacaaagtcgtcacatagttgaagctgtgccaggatttgagcaggcaatccaagggtatgcaatccatgtcctttccttgacttaccaaaggattcctagaactgtgctt

SEQ ID NO: 271738 - DNA, 448 bp, Glycine max
cccacgcgtccgcccacgcgtccggaaaggatctcgaagacccaccaacgcacgaaagccgggatctttcagaaaatggattcctattcgaagggtgcataaccgcatggataagctcacactaacccgtcaatttgggatccaattcggttccttaggaggtatcgggaaggaattttggaatgtaataatatcgattcatacagatacagaagaaagggttctctattgattcaaacgctctacctacgagatagggatagagaaagaggaaaaaaccgaggatttcacatagtacttttggtcgaaaaatcgatctgatttttttcgtacttttcgctcaatgatgaaatgggtcagattctacaggaccaaaccttgtgggagttaaggaatgatggaagaaaagaaataaaaaaaagtaaataaaaatgcagtagaagagtcc

SEQ ID NO: 271739 - DNA, 440 bp, Glycine max
cccacgcgtccgcccacgcgtccgcacacataaacttgtatgtatttgtgttccgacctgaggctctatataaaccctattcttgtagcactttactctccaagcaactaagcaagatatcatcacattgcagagaaaatacacattacattactaagtctgtgttcatttgagtagtagtgatggctagcctcaaggttgcatgtgtggttgctgtgatgtgcatggatgtggtggccatgagtgctgcacccatggcacaggccgcaatcacgtgcgggcaggtcgccggcgacatgtctccgtgcttcagttatcttcgaagcggcggaaaaccgtcgcacgcctgctgcaacggagtgaagtccctcagcagcgcggcgaagaccaccgcggaccgtcagggggcgtgcagttgcctgaaaaaccttgccaattat

SEQ ID NO: 271740 - DNA, 402 bp, Glycine max
tcattctcatatcctcaatcaccccccctcgcactcgctcttcccttcctctggtggcgacaatgtcgactcctgctaggaagaggctgatgagagacttcaagaggctgcaacaagacccgcctgcagggatcagtggtgccccccaagataacaacataatgctgtggaatgctgtcatatttggtcctgatgatactccatgggatggaagcacgttcaagttgacactccaatttactgaggactatccaaataaaccaccgactgtacgatttgggtctcgcatggttcatccaaatatttatgctgatggaagtatttgcttggatatattacaaaatcagtggagtcctatttatgatgtggctgctatactcacatctatccagtcattgcttt

SEQ ID NO: 271741 - DNA, 401 bp, Glycine max
tcattctcataacctcaatcacccccccttttactcgctctttccttcctctggtggcgggaatgtctactcctgctaggaagaggctgatgagagacttcaagaggctgcaacatgacccgcctgcttggatcaatggtgccccccacgataacaacataatgctgaggaatgctgtcatatttggtcctgatgatactccattgtatggaggcacgttcaaattgacactccaatttactgaggactattcaaatataccacccactgttcgaatttgatgtctcgtcatgttttattccataaaattaagcctgatgggaagaattgttagggatattatttcaaaattcaaggggagtcctatctatttatgtggctggtatacttacaattattca

SEQ ID NO: 271742 - DNA, 445 bp, Glycine max
gcgcccacgcgtccgaaagcattgaattcaaaaactaagttcatttcttgtgctttgctttattgctcaaggccaaacatgtcgaacacatgcggcaactgtgactgcgctgacaagactaactgcaccaagggaaacagctatggtgttatagtagagactgagaagagctacatcgagactgttgacatggatgttccagcagctgagcatgatgggaagtgcaagtgtggcactaactgcacttgcacggactgcacttgtggccattaaggaatatgtatgaaaatgtaattgccatgtgtttggcaatacatatctccaaataatgtaatcttcgtatgaataaatgtgtgctgatatcctacttcatggtctgtgtagtcatgcagtctgaatcatgtccagttcctgtcatagttattaacagccatggttgtggcat

SEQ ID NO: 271743 - DNA, 421 bp, Glycine max
tccacgcgtccgcccacgcgtgcgaccacccgtccgcccacgcgtgcggtcacaggaaggtgcttcgcgacaacatgcagggcatcacgaaacctgcgattcgtaagctagcgagaagaggtggcgtgaagaggatcagtggtttgatctacgaggaaaccataggagttctgaagatattcttggagaacgtgattcgcgatgctgtgacctacactgagcacgctaggaggaagactgttactgctatggatgttgtgtatgctcttaagaggcaaggaaggaccctctatggttttggaggctaaaaagttcttagcgttataggattctattgcagccaaaaaataccttgtcttttgaatcggcgtgaagttttcgtttaagtttggtctgtaggatatgaaagttattctggtct

SEQ ID NO: 271744 - DNA, 444 bp, Glycine max
cccacgcgtccgcccacgcgtccgcccacgcgtccgtccacgcgtccgggcttgttcagtctttcttggaactttgttactctcacacatgtctcgctccgtgcctttggtttcaaccatttttgtcttgcttctgcttctggtgtcacactgagatgatggtgccaacaatggtggcagaagcacgaacttgtgagtctcagagccaccgtttcaaggggccatgtttgagtgacaccaactgtggctctgtttgcctaaccgaacgtttcactggaggacactgccgcggcttacgtcgcagatgcttctgcaccaaacattggtaattttaaaaaattaattaagagtgctctgatagaagatgatagatctatcatctttctactcgcgttgctaattaaccactttgtgtttgagaataatggttacccattctactat

SEQ ID NO: 271745 - DNA, 430 bp, Glycine max
cccacgcgtccgggtgaggtagaacccttccacggtggtgactgcgcgatgggtgcctacaagtatgggtcagagctatggcgcaagaagcagtctgatgtcatgcgcttcttgcaacgggtgaggtgctgggagtataggcagcaaccttccattgttcgcttgacaaggtcgacccgacctgacaaggctcgtcgcttgggcttcaaggcttagcagggctatgtgatataccgtgttcgtgttaggaggggtggccgaaagaggccagtttccaaaggtattgtttatgggaagcccacaaaccagggtgttacccaactgaaatatcagcgtagcaagaggtcagttgctgaggagcgagctggacggaagctgggtggacttagggtcctcaattcttactgggtgaatgaggactttacttata

SEQ ID NO: 271746 - DNA, 344 bp, Glycine max
ctcacgcgtccgtgtgaggtagaacccttgcacggtggtgactgcacgatgggtgcctacaagtatgtgtcatagctatagctcatagatgcaatctgatgtcatgcgcttcttacatcagatgaggcgctgggagtattggcagtaaccttccattgctcgcttgacaaggttcacccatatttactaggctcgtcacttgggacttatggctaatctggcctatgctatataccatgttctagttaggaggtgtggtagatagaggccatgtatctaaaggtattgtttatgggaagcctacaaaccatggtgttacctaactgaaatttcaacgtatcaag

SEQ ID NO: 271747 - DNA, 427 bp, Glycine max
gtggttggccaggcattttcaagctttatgatcaaatcctgaaagaagaaaaaaacataggacaattttgtctgttcatctaatttaatatgagaaggaacacttttactacagatgagaatctgcctcctatttcagtaaagttcttattcaactgattttggaatcagaaatgtgtgctacaaaacaaattatgtacatatgattctaataacttggtatatatcttatctcctatgttattgccaaaaaaaaaatatatttataatttactataaataaatattaaaaaatataaaaaatttatctttattattaattataaaatatattttatctatatattttatatcttaaatatataaaaagggggggctctttttaaattctcaatttttacttacccttcttttcgattaaaatatct

SEQ ID NO: 271748 - DNA, 150 bp, Glycine max
tgggccaagtcctattgcactcagctgcatcacctacaagctttcagcataataaatcatggcaaaagctgcaaggcatctctagccaccccacagcgtttgtagaacttaaactacattcccatatgtaagtgctctatgagatttcat

SEQ ID NO: 271749 - DNA, 448 bp, Glycine max
cccacgcgtccgcccacgcgtccgcccacgcccgcccacgcgtccggtcaacaccttttctgctgaaggccgtttatttcaggttgaatatgcaatcgaagccatcaagctgggatcaactgcgattggattgaagacgaaagagggtgttgtccttgcagttgaaaagcgcatcacttcaccactgctggagccaagtagtgttgagaaaattatggaaattgatgagcacataggatgtgcaatgagtggattgattgctgatgctcgaacacttgttgagcatgcacgggttgaaactcagaatcataggttctcctatggtgaaccaatgactgttgagtccacaacccaagctctttgtgatctagctttgcgttttggtgaacgtgatgaagaatccatgtctcgaccatttggagtatctcttctcattgctggccatgat

SEQ ID NO: 271750 - DNA, 286 bp, Glycine max
gttttgtatgtcttcaaggtggtatttgtctttcaagcatggggcgacctgtctcgtacgaaagagtgtgttgcttggaaggtgctgaatgaagaagagaatgctcattgtatgtgctttatgtttatgaactggtcttttgtttgacattttgttctgagtacagtagtgcttattgtaatctaaagtgttagataaagatttactcgacacttgagctttaaaaaaagatttatttacaaataatttaaactacgcaatagaaaatagattattgtagtatatt

SEQ ID NO: 271751 - DNA, 439 bp, Glycine max
gcttcgacggcagcgttcctggctcggctctcggcgcataaggcgagggttcgggtcctggaccgtcgtgccctcaaagacactctcaactgggccgtacattgccacctcttctacgacgacgcttcaaacctacgctaaaggttcgaggagaacagacacgtggaagaccctgataccattgacaggctcatagcacgatgctgaatcttcctacatcaagtggcgccatcctgatccttatattgatccttgatctcgtggtggttgcaagtatactcgcaactcaacttcacctcaagggattgagatagtatataattatggccgacaagattatgactgacatctgattttctcttgcatgcttacactgcataatgattgaggagtgcatccctgcttatgatgctgaaaaattttatcacctgcgaaccag

SEQ ID NO: 271752 - DNA, 440 bp, Glycine max
ggcagaagtcctaggagtgtaaaacagagacgcaaaatgaagacgatcttgtcgtctgagaccatgaatattcccgacggcgtgagcatcaaggttcacgctaaggttatcgaggttgagggccctcgtggaaaactcgtgcgagacttccaccatctgaacttggacttccaacttattaccgacgatggcggtaaaaggaagctcaagattgattcttggtttggttctcgtaaaacctccgccgccatccgcaccgtcctcagccacgttgagaatttgatcaccggcgtcaccaagggataccgatacaaaatgagattcgtgtacgcacattttccgatcaacgctagcattggcaacaacagcaagtccatcgagatcagaaatttcctcggcgagaagaacgtgaggaaagtggacatgcttgagggcgtgtc

SEQ ID NO: 271753 - DNA, 443 bp, Glycine max
cccacgcgtccggataactagaaacagtgtgatgaaaatgaaggtccttgttttcttcgttgctacaattttggtagcatggcaatgccatgcgtacgatatgttccctctccgaatgaacactggctatggtgcccgtactccggaggtgaaatgcgcaagttggaggcttgctgtggaagcacacaacatctttggctttgagaccattcctgaagagtgcgttgaagcaacaaaggaatacatccatggcgaacaatatagatcagactccaaaacagttaaccaacaagcttacttttatgccagagacctcgaagtccatcccaaggacacatttgtgttcagtatagatggcaccgtactctctaatattccatactacaaaaaacatggatatggggtggagaaatttaactcgaccttgtatgatgaatgggtta

SEQ ID NO: 271754 - DNA, 442 bp, Glycine max
cttagtcgcaaaatatgggtgcttctgacgacaacaacaacaactttctccaagttgtcttcaataactttgatgttcttgcactgcccttggttacgcttgtataccctttatatgcttcaattaaggccatcgagaccaagtctactactgacgatcaacaatggctcacgtattggattctgtattccattctcacaatctttgagctcacatttgtcaaagttcttgaactgcttcccatttggctttttgccaacttgatattcaattgctggttggttctgccttacttcaatggggctgctgttgtttataggaattacatcacaccattttatatgaacccccaaataccaattccacaaggctctgaaatctggtattatccgcaaaagaagtctatattcaatgagccatacgatgttctaagtgctgctga

SEQ ID NO: 271755 - DNA, 360 bp, Glycine max
gtcaaccatggaggtgttctcttcaaggcttatatagttggtgatgctataaaggttgcagggcggttttcgttacctgatgttagcaactgggaactctccaaagatgctggtatatatcgctttccaagggtttcttgtactgcaacttttacggatgatgcagatttagatcctactggttgcaaaccttcctcaaaaacttttcttgaaaaacttgcttaagaactttgatggccaatgggtcttttcctatttaatctggattttaatccttagttttgaaccagggattacttttaccttaatgaccttaactaacttcctgtggattgggaaatgtcaaaatttgaacaccta

SEQ ID NO: 271756 - DNA, 443 bp, Glycine max
atagcatagaagaagcagaaagagaagcattagcaaaagcaagaagaactagtctaagcagaaatggcctcttcagtgatggcatctgtggccctcaaacctgcccctttcactgttgagaagtcctcagttagaggccttccctccctctcaaggaactcctcttcattcagagttgtggccagtggtggcaagaagatcaagactgacaagccttatggaattaatggtggcatggctttgagggaaggagttgatgcatctggcaggaaaggaaagggaaagggcgtttaccagtttgtagacaaatacggtgctaatgtcgatggttacagtcctatctacgacaccaaggactggtctccaaccggtgatgtctacgctggcggtacgactggcttggctatctgggctgtgactctacttggtcttcttgctggtgg

SEQ ID NO: 271757 - DNA, 437 bp, Glycine max
atagcatctattatgcagcaagtttatcattagcacattcaagatcaactagggggagcaggaatggcctcttcagtgatggcatctgtggccctcaaacctgcccctttcactgttgagaagtcctcatttataggccttccctccctctcaaggaactcctcttcattcatagttgtggccagtgattgcaataatatcaagactgacaagccttatggaattaatggtggcatggctttgatgtaatgagttgatgcatctggcatgaaaggaaaggtaaagggcctttaccagtttgtagacaaatactgtgctaatgtcgatggttacagccctatctacgacaccaatgactggtcttcaaccggtgatgtctacgcttgcctttctactggcttggctatctgggctgtgactctactttgtctttttgc

SEQ ID NO: 271758 - DNA, 441 bp, Glycine max
cccacgcgtccgctcctaagaagccatactactatcattctccaccacctccagtccacccgcacccttacccccatcctcacccccacccacaccctcatcctccttacgtttaccactctcctcctgcaccccctaagaagccctacaagtacccttcaccctcaccaccagttcaccctccctacattccacacccagtttaccactctcctccaccaccaccttacaagaagccttacatctatgcatcacctccccctccttaccactattagcatacctcttatcgatatgaagaatatgtgcaacgaataaaagaaagcgatggaaagcgcttcgcgatgcacgaaagagaagaaatggaagcaaagtttccgcgttttgtctttcataaaaaaaatgttaaattattattttctatgataggattggtttctt

SEQ ID NO: 271759 - DNA, 299 bp, Glycine max
tcttacaaggctctactctactgcttcaacttctggtctaaaaaaatcaatgggggatcatggcttcgggtactctctctggagccaaaccagcccttcaagcaaatgggaaaagcttctctgaattctctggccttcgcagctcatcaagcttccttcccttttctagaaaatcttcagaggatttccattctgtcattgccttccagacctatgcagttggaagcagtggaggatacaagaagggtgtgacagaagcaaaactgaaagttgccataaacggatttggaaagattgga

SEQ ID NO: 271760 - DNA, 450 bp, Glycine max
ccactagtaaccgccggcagtcgtgctggaattcgcccttagcgtggtcgctgccgttttaccattggagccctcaaaagagattctggacaatttataatcattatgaatgtggcattacaagactgcataatggtataatagctcatgacaagccataaacttctttgctcaaaactcttttaccgactcgattttcaaattttgtgatatggatctttctttggcatcatcagtagaaattcgctttcaccttcttgtataattctgtagtaacaaaatcaatcatggattctaatgaaccttcacaaaattttttcttgccttcaatggctttctgttcacataacctaattgtatacttcatgatttcagcttgcatctagttacgtttaactgaaaactcatcaaagatttttgaaagatctttccatgtaaaacgtataaatc

SEQ ID NO: 271761 - DNA, 447 bp, Glycine max
cactgaatgagaaaagtgacatctacagttttggaattgttctactggaattactcacaggtcgccctgcaatattaaaaggcaacggaataatgcacatacttgagtggataagacctgagcttgaaagacaagatttgagtaaaattatagatccaaggctacaaggaaaatttgatgctagttctggctggaaagctttaggaatagcaatggcatgctctacatcaacctccactcagagacctacaatgagtgttgtgatagctgagctgaaacagtgcctgaaattggaatcccctagtgatacttctgaaaaatttgtggcccctccaaaacaagtctacggcgaattttatagttcatctgaagcattttcctatgatagtcaatctatgacctatcctttcccaagatagtgcaagtatatacatgattccaccatcg

SEQ ID NO: 271762 - DNA, 426 bp, Glycine max
cagaagaacaagtagttgagaactaagaaggagaagcaaatggcttcctcaatgatctcttggccagctgttaccactgtcaaccgtgccggtgccggcatggttgctccattcactggcctcaagtccatggctggcttccccaccagaaagaccaacaatgacattacctccattgctagcaacggtggaagagtgcaatgcatgcaggtgtggccaccagttggcaagaagaagtttgagactctttcctacctgccagaccttgatgatgcacaattggcaaaggaagtagaataccttcttaggaagggatggattccttgcttggaattcgagttggagcacggtttcgtgtaccgggagcacaacaggtcaccaggatactacgatggacgctactggaccatgtggaagctgcctatg

SEQ ID NO: 271763 - DNA, 275 bp, Glycine max
aaaaaaaacaagtagtatgaaaactaagaaagataaacaaaatactataataatagatctattggaaaaatgctaccaatgttaagggatcagatgtcaatatggctgcttcatacactatcactaagatcatgggttgcttaactaccataatgtccaatattgttattacctttattactagcaacggtagaatattacaatgcatgctagtgttgccactagtcagcaagaagaactatgatactctgtactacctgccacaccttgatgat

SEQ ID NO: 271764 - DNA, 378 bp, Glycine max
cccacgcgtccgagcagagaaacaaagttacaagtaaagtacattaagacgatcattaatggctactcttgcaaccttagctgctgttcaaccagctgcgctcaatggccttgctggaagttccctctgtggaactaagctctctttcaagccctctcgccacactgtcaaatccaagaacttcaggagtggtgccgtggtagcaaagtatggcgacaagagtgtgtactttgatttggaggatctgggcaacactacggggcagtgggacttgtatggctcagatgcaccttgaccctacaaccctcttcatagcaagttcttcgagacatttgctgctccattcacaaagaggggatcggtactcaagcttctgat

SEQ ID NO: 271765 - DNA, 244 bp, Glycine max
ccagtagtaagtactctatggttcggggctttggcgggtctcttgatagagatcaatcgttggtttccagatgcattgatattcggcttttttttcattctagttattgacacggaaaggggtgaagaagattatagatccaattaagtattaaatatatgtaattaatatgtaattaatctcctcttctttatttcgtcttttatttcttctttattttacaattgtaatagaataagttagg

SEQ ID NO: 271766 - DNA, 450 bp, Glycine max
ggccatgccatggcgcaagctaccaaaggttccctctacgaatgaatactggctatggtgagcgttcttcggaggtaaaatgcgcaagttttaggcttgctgtggaagcacacaacatccgagcctttaaaaccattcctgaagagtgcgttgaaccaacgaaggactacattaatggcgaacaatttagatcagactctaaaacagttaaccaacaagctttcttttatgctaatgaacgcgaagtccatcacaacgacatatttatattcggcatagataacaccgtactctctaatatcccatactatgaaaaacatggatatggagtggaggaatttaatgaaaccttatatgatgaatgggttaacaagggcgacgcaccggcattgccagagactcttaataattacaacaagctgttggctcttggcttcaagattgtattct

SEQ ID NO: 271767 - DNA, 462 bp, Glycine max
gttcggattgcggcgacgtgagcggttcgctgcccgcgacgttgtgagaagtccactgaacgttatcatttagaggaaggggaaagtagttcatgttggtattcttgattctttgagacgggtgaaggagattgttaaagaggtaaatgccggtctcgagtgtggacttgggttagaagactttgatgattgggaagagggtgacattcttgaagccttcaacacatttcagaagaagaggacccttgaagaggcctcagcctcaatggcatctgccgtggagggagtaggagttgcattgtagaatgaacaatgatgtgttccactatgagattgattcctatcttgtgtttgaacacagtgcaaatgcattccaagttccagttgaaaaaaacatagtatttctctccagttggtattattacattggagagaggtaccaattccctcatcatttatatt

SEQ ID NO: 271768 - DNA, 313 bp, Glycine max
ctgagctgagaagagggagaagatgatcatccccggtcgatgttttacctgtggaaaggtaattggaaacaaatgggatacctatttggaccttctccaggcagattacagtgaaggagatgcactggatgcattgggactggttcggtattgatgtaggcgcatgcttatgacccacgttgatctcattgagaagttgctcaattacaatactttggacaagtctgatctcaattaagaagaaggctagaggaataacagatgaccaagatgcttctgttgcattccatgccctatggcaatgcatcaattt

SEQ ID NO: 271769 - DNA, 370 bp, Glycine max
  unsure (1)..(370): unsure at all n locations
cagaaaaacaagtagttgagaactaagaagaaggaaatggcttcctcaatgatctcctccccagctgttaccaccgtcaaccgtgccggtgccggcatggttgctccattcaccggcctcaaatccatggctggcttccccacgaggaagaccaacaatgacattacctccattgctagcaacggtggaagagtacaatgcatgcaggtgtggccaccaattggcaagaagaagttcgagactctttcctacttgccagacctcgatgatgcccaattggcaaaggaagtcgaataccttctaaggaaaggatggattcctggcttggaantcgagttggagcacgggttcgtgtaccgtgagcacaaca

SEQ ID NO: 271770 - DNA, 369 bp, Glycine max
cccacgcgtccgcggacgcgtgggtttcactggaatcacaatcctgaaacaaaaacatcttagcatttaacatactactagacagcatgaccaccacattggaaagaggtttctcggaagagcaagaagctctggtggtgaagtcatggaatgtcatgaagaagaattctggagagttgggtctcaagtttttcttgaaaatatttgagattgctccatcagctcagaaattgttctcattcttgagagattcaacggttcctttggagcaaaatcccaagctcaagccccatgccgtgtctgtctttggtatgacctgtgattcagcagttcagctgcggaaggccgggaaagtcactgtcagagaat

SEQ ID NO: 271771 - DNA, 381 bp, Glycine max
ctcaggtgaagcacgcacttgttgtcaaagttatgggtcgtactggatccagaggacaagtgacccaggttagagtgaagtttttggatgatcagaaccgtcacatcatgaggaatgtgaaaggacctgtgagagaaggagacattctcaccctactcgagtctgaaagggaagcaagaagattgcgctagatggtctcttttttttggcttgcctccaaattcgaacaaaagcaatatttttcttgatatttatggtagttagtcggtgctaaaggggttatagcaccctatcttattgttttggatctattttcattcgaattattgcttgaattttgtatgtttaaacttcgagaatgaggtatgctttggttaatat

SEQ ID NO: 271772 - DNA, 347 bp, Glycine max
caattttctagggtttatacaattttcgatggcttcttcagatgttgagtaccgttgctttgtcggtgggctcgcttgggccactgacgaccaagctctcgagagagccttctctcagtacggcgaaatcgttgaaacgaagattatcaacgatcgtgagactggaagatccaggggttttggatttgtgaccttcgcctcggagcagtccatgaaagacgccatcgaagggatgaacggccaaaaccttgacggccgtaacatcactgttaacgaagctcagtcccgtggtggcggtggcggcggaggcggtggaagtggtggatattggtggggtcgcggtggtg

SEQ ID NO: 271773 - DNA, 360 bp, Glycine max
cacaaagcaaagctcatccttgagttaaaaaatggcagcagcttcttccatggctctctcatccccatccttggctggcaaggccgtgaagctgggcccatcagccccagaagtgggaagggtgagcatgaggaagaccgtcaccaagcaggtctcctcaggaagcccatggtacggcccagaccgagtcaagtacttgggcccattctctggcgagcccccgtcctacctaaccggtgagttcccaggcgactacggctgggacactgctgggctttccgcagacccagaaaccttcgccaagaaccgtgaactcggcgtgatccactccaggtgggccatgctcggagcccttggctg

SEQ ID NO: 271774 - DNA, 196 bp, Glycine max
aaaaaaaaaaaaaaaaagggagaaaaaaaaattaaaaaaaaaaaaaaaaaaaaaaaaaaacggggaaaaaacaaaaaaaacaaagaaaaaaaaaaaaaacacaaaaaccaaaaaaaaaaaaaaaaaaaaacatgaagcaccaccctcacgcacccaagactcctcaagcaagcccatcgtacacaccaccaccgag

SEQ ID NO: 271775 - DNA, 243 bp, Glycine max
cccacgcgtccggggaagaaaaacttagctactaaggaaggatcaaagagaatggctcaagcaatggcatcaatggctggcttgcgtggttcctctcaggctgtgttggaaggtagccttcacgtgagtggctccacacgcttgaatgtggggagtggaagcagggtggcctcagtcacacgtgcagggttcacagttagagcacaacaacaacaagtgaatggtgaggtacaaagcagccgt

SEQ ID NO: 271776 - DNA, 461 bp, Glycine max
gaaggtgtagacaaacacaatctctaatggcactcaggatgtgggcttcttccactgccaatgcactcaaagtctcttctacctccagacctcatctcttgcatcctttttctttctccagatgcttgtcttccgtcttggatggacttaagtatgcagattcacacgaatgggtcaagcacgaaggctcagtcgccaccattggtatcactgaccatgcccaggaccatcttggagaggttgtgtatgtggagctgccagaatcaggtggcacagttacccagaagtctggcttcggagccgttgaaagtgttaaagcaacaagtgacataaactctccaatctcgggggagattgttgaggttaacaaaaagctcacagagacacctggcctggtcaactcaagcccatacgaagatggatggatgatcaaagtaaagccaagtgatccatctgaatta

SEQ ID NO: 271777 - DNA, 326 bp, Glycine max
  unsure (1)..(326): unsure at all n locations
gaanggcaggacttggtgggaatcgcgatgttacaagaaggcagaacagctgaaatatcgaggctctagctcgcttagctagggaagaacacaacaaagaacagaatgcccttttggagtttgaaaaggtggtaactgctaaacatcgagaggatgcgagagaccatgtacaccatcacttaggaggcaaaagatggtgggcaaaagaaggcttatgaagcctaagattgggagaagtcatggttgaactttgaggaagtgcaagtaggctaagctagtggctaaaacacctgtatagtctactgcttaatcatgttgctgaacag

SEQ ID NO: 271778 - DNA, 369 bp, Glycine max
gaaaattttaaataggacttgttattacaaaatacaattgcattgctccttcggcgaattgggactggtctctttgccgaacttcagcgttttggtttgggagggaaaattctaaaacctaaaaaatttcaatctcaatcaactcaacgtctgtgatcccaatcgatcacatttaataccacccttcaggattaggtagtaattccgttcccttgaataaataacatgagcaccacagtgcaaagaactccaagatccagcaggcattctttatttttccaggatttggcttcacctgtttctgcccgtagaggaaaattttcgagtccaggtcaagcagctgcagtatcttcactatggcgtgagaac

SEQ ID NO: 271779 - DNA, 433 bp, Glycine max
  unsure (1)..(433): unsure at all n locations
ctaagatggcttcctttgtatccttcctagtgctgcttcttgcagcccttatcctcatgccgcaagggcttgctacttactacaaaccaattaagaagccaccagtgtacaagcctccagtgtacaagccaccagtgtacaaaccaccggtttataagccaaaaccaccggtttacaagccgaaaccaccggtttacaagccaccatataagaagccaccatacaagaaaccaccttatggaaagtaccctccagtagaggacaacacccatgcctaaagcaagcaatgaggtctattatctacttaataaataagaggaactgctttgtgttttctagcattgtgatttacaacttcgtagcaatgcatattctngactcttgcatgcacttcaatccttcgtagcattaatgatgtggccaagtcatcatg

SEQ ID NO: 271780 - DNA, 365 bp, Glycine max
cccacgcgttcggccatacgctaggttatctagaggagaacatgaaggcgaatgtattctttggtgctgcagtagtattggtggcgtggccatgccatgacgcatgctaccaaaggttccctctccgaatgaaaactggctatggtgagcgatcttcggaggtaaaatgcgcaagttttaagcttgctgtggaagcacacaacatccgagcctttaaaaccattcctgaagagtgcgttgaaccaacaaaggactacattcatggcgaacaatttacatcagactctagaacagttaaccaacaagctgactatcatgctactgaacgcgatgtccatcacaacgacatatgtatattcggcata

SEQ ID NO: 271781 - DNA, 396 bp, Glycine max
cccacgcgtccggcaattgaagttgaagtcttgcccttctgtcttcaactccaaacacaagggatcatcatccatggctgcctccgtctccactgtcggagctgtcaacagagctcttttgaacctgaatgggtctggacctggggtttcagctcccagttcatccttctttgggagcagcttgaagaaggttattggctcaagggtccccaacacaaagatttcctctggaagcttcaagattgttgctgtagaagagaagaaagagattgaagagacccagcagaccgacaaggacagatggaagggtcttgcctatgatatctcagacgaccaacaggacatcacaagaagaaagggtttggttgactcccttttccaagctcacaagatgct

SEQ ID NO: 271782 - DNA, 455 bp, Glycine max
gccgctcctttggcagtgaaccgtcctctgcttggtcttgacgagaatgtaccattagctgtggctcatccccaattcctaccgttcaaatggccacccaactgcaaactcccctccgtcgtccgaattcgatgctactcctcccctttcaacgacaaagccctcatttccatgacacctaacacttcccacctcaatcccaaccctctcgcttgtcgctttcacgcttcccagtttggagaacaggagagcaacaaatacgtggaagcctatgctgtacgacgaaatattcgtatgtctgctaataaagctcggacagtgatcgatcagattcgcggacgtaaatatgacgaaacacttatggtattagaactcatgccttatcgagcctgtgaagccattctcaaaatagcgctttcggctggagctaatgctagcaataatctgggtttaag

SEQ ID NO: 271783 - DNA, 431 bp, Glycine max
ctgaggatgaagtccgtcatgcgggtgacctgggaaacatagttgctaatgcagagggggttgcagaggctacaattgtggataatcagataccactctctggccccaattcagtagttggaagagccttggtggtccatgagcttgaggatgaccttgaaaagggtgggcatgaactcagtttgacaactggaaatgctggtggaagattagcatgtggtgtggttggtttgactccagcataatcagtgcagcgaattttttgtagcagtcgtgttatgttatcagatattatgttctctgtgaagcatgatgactcactgttttcttcagttaccaatgtaaactgtaaagcataatgtccttctaaagatgagtgtgcaaatgaatcatgaaaacatgttgttagtcctttactggagattcatcgt

SEQ ID NO: 271784 - DNA, 359 bp, Glycine max
ctaagctaaacaatttcatcaagcctgccatggcttcctcgtgtgcttgctctgccattgcagctgttgccatctccacaccaagttcccagaagaatggatcactcttgggaagcacaaaagcttcttttcttagtgggaggaaactgaaggtgaacagttttacagcaccagttggagcacgatccagcactacagcgtgtgcagatgctgagcctgataggcctctgtggttcccaggcagcacccctgctccgtggctagatggcagattgccaggagattttggctttgatcccctaggtcttggatcagatcctgagagcctgagatggaatgtccaagcagagcttgtgcac

SEQ ID NO: 271785 - DNA, 369 bp, Glycine max
cccacgcgtccgcccacgcgtccggcgggtgaggtagaacccttccacggtggtgactgcgcgatgggtgcctacaagtatgtgtgagagctatggcgcaagaagcagtctgatgtcatgcgcttcttgcagcgggtgaggtgctgggagtataggcagcaaccttccattgttcgcttgacaaggtcgacccgccctgacaaggctcgtcgcttgggcttcaaggctaagcagggctatgtgatataccgtgttcgtgttaggaggggtggccgaaagaggccagttcccataggtattgtttatgggaagcccacaaaccagggtgttacccaactgaaattcagcgtacaagaaggtcagtgctga

SEQ ID NO: 271786 - DNA, 366 bp, Glycine max
ccacgcgtccgttctaagttaaatagtcgctcattgtttcatttaatctacaatggctgcttcaacaatggctgtctcttcatcatcattggctggccaagctatcaagcttgccccctccacccctcagcttggtgttggaagggttagcatgaggaaaacagcctccaagactgtttcttctggaagcccatggtacggcccagaccgtgtcaagtacttgggcccattctctggtgagcccccatcctacctcactggtgaattcccaggtgactatggttgggacactgctgggctttctgctgacccagagacctatgccaagaaccgtgaacttgaagtcatgcacttcagatggcccat

SEQ ID NO: 271787 - DNA, 455 bp, Glycine max
cccacgcgtccgatcccaaaccagcaaaaacctttcttcacaaaatggcctcaacaactctaacaaccctcaccctccgcacgctatcttatcctacaccctcctcttcttaccctacgcacctctccgccaaaccctcctccctccaattccccaatctctcccaccgcgccgccaccacgcgccgcccccgtgtcgtcgtctccgccgttgaggcgccggagaaaatcaccaagctcggcgacgaaatcgccggactcacgctcgaggaggccaagaacctcgtcgacttcctccaggacaagctcggcgtctccgcggcggcgttcgcccctgtggcagtcgccgcgggtgccggcggcgctgtggcggacgcgccggcggtggttgaggagaagacggagttcgacgtggtgatcgaggaggtgccgagcaacgctcgaatcgcggtgatt

SEQ ID NO: 271788 - DNA, 459 bp, Glycine max
  unsure (1)..(459): unsure at all n locations
cggacgcgtgggctttcttccatcttcttcccttttcacgtcattatcctaaaaacttgcaggttttcacatcccaaacaacatgaagggaaggttcatgtttctgtcggtgctcctttgtgccacttttcatgtctccttctctattatcgacggtttagttgccaacggcaactttgagttgggtccaaagccctccgccctaaaaggaacagtggtggtgggcgggagccactcgatcccagaatgggagatctccggctttgtggagtacataaaatccggccaaaagcaaggggacatgttgctcgtcgtcccagagggtgcctacgcggtgcgcctagggaacgaggcctncatcaagcaaagaatcaaggtgatcaagggcatgtactactccatcaccttcatggtggctcgcacgtgtgcacaaaangagaggctcaacattttccgcac

SEQ ID NO: 271789 - DNA, 306 bp, Glycine max
  unsure (1)..(306): unsure at all n locations
accaggctgcacaaaagggggccaactacactaacaacactctccctacggaacctgtcgtggcctacaccctactccggtgctaaccctacccacctctccggcaacccctactacctgcaaatacncaacttctcccaccagcccaccgccaagcgccaagcccgcgtccacgaactcaccgccacaacggcaccggctaaaatcaccaaactaggcgacgaaatcgcgggacttacactcgaggaagccaagaacctcgtcgacttcctccaggacaagctctgcgacttcacggcagcgttc

SEQ ID NO: 271790 - DNA, 384 bp, Glycine max
ctcacgcgttcgtccacgcgtccggaaacggttaggatgagaagtccttgaaggatttgaagctcaaggaagtgaagaatggaaggttggctatgttggcaatcttgggttactttgttcaagctcttgtcacaggtgttggcccataccaaaacctcctagatcatttggctgacctcgtgcacaacaacatcttgaccagtctcaagttccactgaatgtattatatgttattttacatattctttacgttgccaaaactcaactacctttctacctttctatatcatgtggacattatgttccttgatgtggcgctgtaagaaatgacatgtaaaacaactagaaacattcgacatctttcttgagtgatctctttgctcg

SEQ ID NO: 271791 - DNA, 381 bp, Glycine max
agcaagcttgttctttcgccgccgtcgctcacaactcgcaaaccacaatgcctaagcagatccacgagattaaggatttccttctgacggcacggaggaaggatgcgaggtcggtgaaaatcaagaggagcagggatgtcgttaagtttaaggttcgatgctccaagtatttgtacacgctttgtgtctttgatcctgagaaagccgataaattgaagcaatctcttcctcccggtttgagtgttcaagacctgtagaggtgctgagtgcggcagcgtgcgtttgtttatctctgtgatgcctcatgctctagattatgtggcttgcttttaatatttggaaattgtatgaggatatgctggtttttacttgcctatgaaa

SEQ ID NO: 271792 - DNA, 377 bp, Glycine max
atcatcatcattaaacatgggtggcagtgttagcaagagtaggaggatgagttctgagaaatatgtgatgaatttgaaggagaaagtgaggctcttgcaagaggagataaaggagatgatgtatgagagggagaaggagacaaggagatatgagagggacataatggtgttcactttcaaggaggcagattcgaagcaagaggggaagaggctgagagaggaagtgaagcaattgaggagtttggtggaagagaaagatgagaagataagagagattgaaggtggaaatgatggagaagaacagtgagacagagtgggaattgatgggaactaagctcttgggtgagcagatgaaaggagagagagcagggagagat

SEQ ID NO: 271793 - DNA, 404 bp, Glycine max
  unsure (1)..(404): unsure at all n locations
ccctttcactctcgtagacatcacaaaccttccctccattcatcccacgcatggctgccatggactctagcgtattggcctgtagctatgccatatcaggtgcagcgtgttcggagctcaatgggaaggtcacttccgtggcctatgttgcatgctctggctacaagttgccattgatcaaagctgaggccagagttcctaaagccaaagaatctgaaggaggaaggagaggtgcccttgttctcttggcagctacccttttcacctctgcagcttccaattcttctgccaatgctgggatcattgaagattaccttgagaggagcaaggccaacaaggaattgaatgacaagaagaggttagctactactgggagcaaactttgcangagcttacaccgtgga

SEQ ID NO: 271794 - DNA, 436 bp, Glycine max
ccactctggtgtggtgcagctgcacaacgtggaggacgtgcagaagctcatagaggaccacgggctggatcacaagctcatcgtgctcgatgtgggtctcaaacattgtgggccctgcgttaaggtttatcctacagtggttaagctctcgaggcagatggactcggtggtgttcgctcggatgaacggggacgagaacgagagctgcatgcagttcttgaaggacatggaagtcatccaggtccctacctttctcttcatcagagatggcaacattgaaggcaggtacgttggttctggcaaaggggagctcattggggaaattctcaggtaccaaggtgttcgtgtcactgattaattttcttactacacatacttatttctacttctattaagttcagctcaacaaacacatgtttactaaaccttctgagaa

SEQ ID NO: 271795 - DNA, 357 bp, Glycine max
ctttaataaattatgcgccgttgttccatactttgaaaaaaaaaaaaaaaaaagaaaaaaaggggaaagaaaaaaaaaaaagaaaagaaaaaaaaaaaaaaaaaaaaaaaaaaaaaaagaaaaaaaaaaaagaaaaaagagaaaaaaaaaaaaaaaaaggggggacattataaaggagcaaagctaacgaaccatgatatggaacagaataacgtttcaatgggggcaccaaaatgaaattaaagggccgtggtttaaaaacgtcgggacgggaaaaacctgggggtaaccaaactaaatccctttggaaaaaagacccttttcccaagggggcgaaaaggcaaagaggccgaaaca

SEQ ID NO: 271796 - DNA, 291 bp, Glycine max
cccacgcgtccgatcccaaaccagcaaaaacctttcttcacaaaatggcctcaacaactctaggaaccctcaccctccgcacgcgatcttatcctacaccctcctcttcttaccctacgcacctctccgccaaaccctcctccctccaattccccaatctctcccaccgcgccgccaccacgcgccgcccccgtgtcgtcgtctccgccgttgaagcgccggagaaaatcaccaagctcggcgacgaaatcgccggactcacgctcgaggaggccaagaacctcgtcgact

SEQ ID NO: 271797 - DNA, 386 bp, Glycine max
cacgcgtccggaaaattttaaataggacttgttattacaaaatacaattgcattgctccttcggcgaattggcactggtctctttgccgaactgcagcgttttggtttgggagggaaaattctaaaacctaaaaaatttcaatctcaatcaactcaacgtctgtgatcccaatcgatcacatttaataccacccttcaggattaggtagtaattccgttcccttgaataaataacatgagcaccacagtgcaaagaactccaagatccagcaggcattctttatttttccaggatttggcttcacctgtttctgcccgtagaggaaaattttcgagtccaggtcaagcagctgcagtatcttcactatggcgtgagaactttggag

SEQ ID NO: 271798 - DNA, 361 bp, Glycine max
accacgcgttcgggagtattattatttgatacgaaatacagagctcttcaaaacccaaacagcgaccgtactgcacaacttcaccactgagcaatggccgacgaggaacctgtcgatcagaagagatatctcgaagagtcttgcaaaccaaaatgtgtaaaaccattactagaataccaagcgtgcattaaaaggatacatggtgatgaatctgggcagaaacactgtactggacaatattgtaatgattggccttgtattgacaaacgtgttgcaccgaagctattcaccaaactgaagtaaatcgggaaggattcgatggctatcattgcattctgtgctgttttcattcccaaataac

SEQ ID NO: 271799 - DNA, 267 bp, Glycine max
aaaaaaaaaaaaaaaaaaaaaaaaaaaaaaaaaaaaaaaagaaaaaaaaaaaaaaaaaaaaaagaaaaaaaaaaaaaaaaaaaaagaaaaaaaaaaaaaaaaaaaaaaaaaaaataaaaaaaaaaaaaaaaaaaaaaaaaaaaagaaggagcaaatttaaaaaaatataagtagaataaagtagaattccgaatcattaaataaataaaaggagaaccacacatgaaaaaaactccagagatctaaaaggcattctttatttttcca

SEQ ID NO: 271800 - DNA, 439 bp, Glycine max
ctcttttgctttaccaaatgccaatttccaattcagaaccctaactccgttcgaagcaccaagatcgtgatggcaccaaaggcagagaagaagccagcagagaagaagcccgcggaggagaagaaatcgacggtgggagacaaggctccggcggagaagaagccaaaggccggaaagaagcttccgaaggagggaggcgccggcggagaagggaagaagaagaagagaaacaagaagagcgtggagacatacaagatctacatcttcaaggttctgaagcaggttcaccctgacattggtatctcaagcaaggccatgggaatcatgaacagcttcatcaacgacatcttcgagaagcttgcccaggaatcttctagacttgcccgctacaacaagaaacccaccatcacttcgagggaaattcagaccgcggtcaggc

SEQ ID NO: 271801 - DNA, 404 bp, Glycine max
gctaagcagtccaaagggcacaacacaacagagaaagaaaagagtaagagtatgggaggctcatggtcatggcagctcacatgtgccctcttgctactcttctccgccgtagtcaccgccactgaccacattgtgggtgcgaatcgtggctggaaccctggctttaactacactctttgggccaacaaccacactttctatgttggcgatcttatctcattcaggtaccaaaagaaccaatacaatgtgtttgaggtgaaccaaactgggtatgacaactgcactacagaaggggcagtggggaattggagcagtgggaaggatttcataccccttaacaaggccaagagatattacttcatttgtggcaatgggcaatgcttcagtggaatgaaggtttccgt

SEQ ID NO: 271802 - DNA, 324 bp, Glycine max
  unsure (1)..(324): unsure at all n locations
cgccccacgcgtccgcccacgcgtccggttgagaactaagaaggagaagcaaatggcttcctcaatgatctcttccgcagctgttaccactgtcaaccgtgccggtgccggcatggttgctccattcactggcctcaagtccatggctggcttccccaccaggaagaccaacaatgacattacctccattgctagcaacggtggaagagtgcaatgcatgcaggtgtggccaccagttggcaagaagaagtttgagactctntcctacctgccagaccttgatgatgcacaattggcaaaggaagtagaatactttcttaggag

SEQ ID NO: 271803 - DNA, 382 bp, Glycine max
gaaattgctaccgtgaagggactcctagagaactttggactcacaagtccactgcctacaggggcccttgcagtaacagcactggtgggtgtcttgacggctggttttatcttgcagtcagcctcaaagaactaatcacatattccgactgcttgtgttgggtgtaaatactcgatgctcagagatttaattttgggagattaattatatcatcctctatctgaaatatttgtttcgatgaaaagaattggcaatgaagcctgaaaaatcaaagtaactacgtgttaaatatagtatgacctgaggttaccctgttgacttaaacaaagatattgattgagttgttgtaaataagggcggtcgttctaaaggatccaagctt

SEQ ID NO: 271804 - DNA, 391 bp, Glycine max
gcgaacgaatcattcaagagacaacaagtgcgaattgttagcacagggggaaatactacgagataggccggacaaagcaaactgagcgtaagtcaactgaaggaaaagctcccaggaagcagctggcaacacaaggctgcacgtaagattgcaccaacaactggtgagtgagaagaagcctcattggtatggtcctgaaactgttgctcttcgtgagattaggaaataccacaagagcactgagctgctaataaggaagctttctttccagacgtcgagaagtgaaattgagcattatttcaagactgatctagcgattcagagccatactgcgcttgcattgcaaaaagctgctgagacataccatgctgaactctatgaagacactaac

SEQ ID NO: 271805 - DNA, 426 bp, Glycine max
  unsure (1)..(426): unsure at all n locations
tttctttgcacgtcgggtctggaggacagaatccagaaaaaccagctcagagcagacgacgtcgtatcacgccccgccagaataaaacttatcacaacgtcgcgcagaaactccggtgaggtattctctgttctgatgaaacgtgatagtaaatcttcatctccgatttggtccttggattccaatctggaccgtatgattgaatcagcaaattggtgaacggtggtgattgattctctgagcctccgttctgatccaaagttgaacagcttctttattttccacacaaccggtaaaatgctcatgaacctccctgagctcagaaccgcggcgtcctcgaaggcgcgcatgaactcgccgncagctgtgccgtcgccgncgagacaagcggngtccacattgaacgctagcttgcacacgttatcg

SEQ ID NO: 271806 - DNA, 312 bp, Glycine max
gttcaatacttaagattccttttcccatgcttgtatctactggaaaagaaaaaaaaaaaagtgttgttataaacaaaactgaataatatttgatctggaaggatttgttggacttagaaaaaaaaaaaaaaaaaaaaaaaaaaaaaaaaaaaaaaaaaaaaaaaaaaaaaaacaaaaaaaaaaaaggatccaaagcctaaaataacaaaccatgcaaagtgatagcttttatctagtgtaacctaacataaattaactggccgtcgatttacaacacaacgactgaaataaccataccgttacctaacttaa

SEQ ID NO: 271807 - DNA, 250 bp, Glycine max
aaaactgaactatgcctattcaaacgtgccaatatctacgggggaaagggcatcaaatttattcctggtgattctcaagttttcctgattgccaacttaaaatgtaagccgtatttccacaaccaccttaatccctcaaagcttaccttaactgctatgtacacaaatcaacacaataaggacattgctcaataacctgttaataacaccaaactcacttccaaaaagccttactctatgtcccattttt

SEQ ID NO: 271808 - DNA, 415 bp, Glycine max
  unsure (1)..(415): unsure at all n locations
gagagatgacgngaggactaaaaccgcggatttttcgccaattttgcagtttgaacaagagggcgttcacatcctggatgcactgctgccactgtatttgaacagccaggttctgagggcattgcacgagtccttggcgagtgaactctccggcagaatgagtgccatgagcaatgccacagataatgctattgacttgaagaagaacttgtccattgtgtacaatacggagcgccaggctaacatcactggtgaaattctggaaattgtggctggtgccaatgccttgcaatagtgcaatttgtaagtatcgtttacttattataatgatgggtggagggtgccctattcattttctaaatgtcgttatctaagacacttgtgcaatttttacgcttctgacgaaacttgaatg

SEQ ID NO: 271809 - DNA, 381 bp, Glycine max
gcgaaacggggtggcctcaacaattccgtgtgtgtctcttctcttctctttgacatagactctttcttccgcgctccatggcgggtggcttccccgctcagcttcgaaaaccaaaaccgcatctctctccaaatgccatcgcatttgggtcaccaaagcttctgttgccgttgagcaacaaactaaggtcgctctcatcagaattggtaccagaggaagtccactagctctagcacaagcatatgagaccagagacaaactcatggcatcacaccctgacttagccgaagagggggctattgagattgtgattataaagacaacaggggacaaaatccttacacaaccacttgcagacataggtgggaggggcttgttcac

SEQ ID NO: 271810 - DNA, 415 bp, Glycine max
cttttgtgatagagctttctctgtctctcgctcttatcgaagaagcagcagaaaatgggttgcgcgatgcaatgctgaagctatggcacttgtatttctatttgtgtccctcatcgattcccccaaacccctctatcttttcacgttccagcttatcactggaaccgattcaagagtgcgcgaaagaatcagaggatgatggttctttgtagcgtggacgaccggagcaacaacctaggttcccagaggaaaagaaaaattgtggaacacgtttgtctcctcaaagcaaagcaggatttatctgaagacgaagagaacgacatgcttgattacttgtacacaacgcagtaccaaatgggtggtgttgttgcaatttcattagggcgcatttctgctccaaatcctgagcgctaca

SEQ ID NO: 271811 - DNA, 395 bp, Glycine max
gaacatcgagtgaggtataaaaataaaagggttgcattgtctgtttttcgtaaaaaaaaaaagaaaaaaaaaaaagggaggaaagaaaaaaaaaaaaaaaaaaaaaaaaaaaaaaaaaaaaaaaaaaaaaaaaaaaaaaaaaaaaagggccgcccgtttaaaaggaccaaattttactaccccggccatccaacaaaaaacctttttaaaagggcacccaaaataaaattaatggcccgccttttaaaaacgcctgaattggaaaaaccttgcgttacccaaattaaaccccttggaaaaaaatccccttttgccaagttgcctaaaaaccaaaaaggccctacccaaccgcctttccaaaaatttcccaaccctaaatggcaatgggacccccc

SEQ ID NO: 271812 - DNA, 310 bp, Glycine max
  unsure (1)..(310): unsure at all n locations
tacccanaaacctgcaccataaaccatgagttctaantcatccactccacntnnnccaggctcaaatcctagggctgcgtcttccccnaactattgtccctcaacggggtcaactttggataatctgtgtccttcaaggccaaatcccacatcttcaactatttttgtctggactacttgggcaacccaagccttgtccacgcccagagcatcctcgccatctgggccacccaagttatcctaatgcgtgctgtttatggttatcgtattgcttgtgtgcccctcggtgatgtcactgacccaatctacc

SEQ ID NO: 271813 - DNA, 409 bp, Glycine max
cccacgcgtccggccacgcttccgataagaactaagaagtgaaattagccaaactaaagcaagggtatgataatgcggcatctggagggtttgttcctgattatagtcaaggataccaaaaagttgtggatgaagatacaagcaatacatcaagctcagggtcagctgtctctaactcagagagctgtgctcaatttggtgggactgatgttagtgatttgacaggtcctgctcagtcagtggtctgggatgccatggtgccttccaaaaagaggacatgtgcaggtcgtccgaagccctcatctgttgagaagctcacaagagacctgtgcactattcttcatgaacaacagtcttatttttctgcatcttctgaagaggatcttcttttttaaagtgatacaccaat

SEQ ID NO: 271814 - DNA, 360 bp, Glycine max
gcgattgaacacacacatagaaacccaacaacaagaatgtagaagatgattctaaccctcttcttcaataggattttatctctccggtccctctcccacgccttcgtggtggatttctgcgtagcagactacacaggccccaatggccccgcagggtactcatgcaagagcccagcaaaggtcacggtggacgacttcgtctactccggccttggcaccgccggcaacacctcaaacatcatcaaagccgcggtgacgccggcgttcgacgcgcaattccccggcgtcaacgggcttggaatctccattgcacgcctagacctagcagccggtggagtcattcctctttacacgcaccct

SEQ ID NO: 271815 - DNA, 399 bp, Glycine max
gaaaatggccagttacattcccttcacaagattctcacaaacaactcttgagaaagaaagaatggctgccggcacattgatgacttctgcctgggagccttcccatctctcctttcctcctcaaaatccagatttgccgcagcagttcctctttccagctttgttgtcaccaatgcctcttcttctcgcttttccatgaatgctgattggatgcctggccagcctatacccccctaccttgatgggtcaacacctggtgactttggattccaccctcttcgtcttggtgaagtaccagagaatcttgagaggttcaaagagtcagaactcattcacttcagatgggccatgcttgctgttccagggattttggttccagaggcattgggcttaggcaac

SEQ ID NO: 271816 - DNA, 320 bp, Glycine max
cgaggagagggtggtgcaggtcatgttgggtatcaaggtcgtcaagggagggaaacagctgaggttccgcgccgtcggcgtcgtcggctacaagaagggtcaggtgggagtcggagttggcaaggccaaggaagtcattgccgtggttcagaagtccgccgtcaatgccaggaggaacatcatcaaggtgcccatgactaagtactccactttcccccatagagctgatggagattatggagcggcaaatgtgatgcttagacctgcttctcccggtactgtggttattgcaggtgggtttgtgagaattgttcttgaaa

SEQ ID NO: 271817 - DNA, 446 bp, Glycine max
agccctaactacgcacgcattcgtgagaaaactcaatatttttcgctcatggcactctcttctcgtctctgttccaaatccaaattgatctatggcaggcaaatacttctacaaaaggagcatgctattccagttcgtcactttgctaaagagtctgcccctcctgcccttaagggagacgagatgctgaagaacatttttgtggaggtgaagaacaaatttgagaccgccataggaatattaaagaaggagaaaatcaccattgacccagaagatccagctgctgcttctcattatgcaaaggtcatgaaaacaattatagagaaggcaagcttattgtcggagtcccaagacatactatccaccattgaaattgggacacaggatattccagatgctcggacctaacttttgacttgaaggaaataagagtcaagagaggtctt

SEQ ID NO: 271818 - DNA, 286 bp, Glycine max
cttactcaccgattgctagaatggtttttttatgctcagtcatctcttttaccatgctctggtctcttgctcttgcaggagagagccatgtccatgcatcgctacctgaggaagattattgggaagctgtttggccaaacactcccattcccactgcactgcgagagcttctaaagcctttccctgcaggtgttgaaaacgatgaactccctaagcaaattgatgatacacattacccaaaaacatgtcttctataaagaaaaaccttcattcaggcaaaacaatg

SEQ ID NO: 271819 - DNA, 417 bp, Glycine max
  unsure (1)..(417): unsure at all n locations
ngcgcacaaacaagntagatctttcgccgacgtcgttcacaactcggaaaccacaattccgaagcagatccacgagatttaggatgtccttctgacggcacggaagaaggatgcgagggcggtgaaaatcaataggagcagggatgtccttaacgtttaaggatggatgctccaagtatttgtacacgctttgtgtgtttgatcctgagaaagccgatcaattgaagcactctcttactcccggtttgagtgttctatacctgtaaaggcgctgcgtgcggccagcagcgcatgtttatctatgtggagcctcatgctctatatagtgcagcttgcttttatatcttggtcattgttatgaggatatgcttgtcttctatttgctaagaaaatgctggggttttattttgagcacga

SEQ ID NO: 271820 - DNA, 429 bp, Glycine max
aggaactagaaaatccatacaatcttcaccaccaaaaagaaaataatggcaatggccagtgcaacaactctagccacaatcactgttgtggcggctagccccagtgttggcagcagaaggagtgggaagaggaatgtgaacttcatcagagggttgaattcttttggagggttgaaggctcagaacaatgtgacattactaggccttcctgtgtgcactgagcagtgctttgcaaaggtggtgagctcattgaaatatccatcatcatcatcacgtaaggggagaggtggaggtgctgccttttcaacatgcaatgctgctggtgagattttccagattgcagccatcatgaatggccttgtgcttgttggggtggcaatagggtttgtccttcttcgagtcgaagcgtttgtggaagagtctgaatga

SEQ ID NO: 271821 - DNA, 432 bp, Glycine max
gtttgttgtgagctataagctagtttatcgtgaggagaatatgaagttgtttgttggcttggttgctgcagtagtttgggtagcatggccatgccatggcgcaggctaccaaaggttccctctccgaatgaaaactggctatggtgagcgttcttcggaggtaaaatgcgcaagttttaggcttgctgtggaagcacacaacatccgagcctttaaaaccattcctgaagagtgcgttgaaccaacaaaggactacattaatggcgaacaatttacatcagactctaaaacagttaaccaacaagctttcttttatgctagtgaacgcgaagtccatcacaacgacatatttatattcggcatagataacaccctactctctaatatcccatactatgaaaaacatggatatggggtggaggaatttaatga

SEQ ID NO: 271822 - DNA, 363 bp, Glycine max
ggtatatctataggcatagtcactttcattgcagctccagcaagtctaacacttgaatttgaaggcaatggtggccatgcgggtgctgtccttatgcctaacagaaatgatgctggtctggctgcttctgaattagccctggctgtagagaggcatgtgttggattctggttcaattgatactgttggcactgttggtatcctggaactgcatcctggagcaatcaacagcatccccagcaaatctcacctagaatatgacacacgagacattgacgaggaaaagaaaaaataaagtggttgagaaaattcaccaatcagcaattaaaataaccaaaaacacgaggtgtcaagctctcttgat

SEQ ID NO: 271823 - DNA, 432 bp, Glycine max
  unsure (1)..(432): unsure at all n locations
cgcagacgccgngactagacactcatctcactcgcgccatcttagggtttctccttttgcggcgcaacatggttgccgctaagaaaactaataagacccatgagagcatcaacaacaggctcgctcttgtcatgaagagtggcaaattcaccctcggttacaagaccgttctcaaatctcttaggaactccaaaggaaaattgattatcattgctaacaactgcccccctttgagaaagtcagagattgaatactatgctatgttggcaaaagttggagttcatcattacaatgggaacaatgtggatttgggcactgcatgtggaaaatattacagagtgtgctgccttagcattattgatcctggtgattctgatatcatcaagacactggctggcgaccagtaaagtagtattgaagttccttgcttga

SEQ ID NO: 271824 - DNA, 425 bp, Glycine max
  unsure (1)..(425): unsure at all n locations
gttagaacgcctaattgttaaccgtcctcatccctggggtctcctcattacttttattgagctgatcaagaatcctaggtacaatttctggaaccggagtttcataagatgtgcaccggagattgaaaaactttttgaatcagtgtcaagatcttgtggaggtccaaaaccagtggatgatagcatggtttcgggttgggtctgatttcccgtagtcttttgtggttgttagtcctgtgtaggttagccaaccatgttagttaggactatttatactgttgttaatctagcagtgttgtttttacattgtaaattatgttttagtgaaactctcttctttcagatgttatgaccatgtacttgtttatattgcagcatgagtcttaattccaaannanaaaaannaaannaaaaaaatataaaaa

SEQ ID NO: 271825 - DNA, 438 bp, Glycine max
cacactcctcaacacctgctccctcactcactcatctatggcatcaacaatatcagcaacggccatgatcaacgccaaatgcgggaacccaaaggtccccaaccccaccaagctcgcaccatcaaaaccttccctttacgtcaaccttccaaagggcctaatagcctcacccgaaaacaccaaactttccactgcgacagcaatcgcaggagcaatattcacaaccctcggaacctgcgacgccgctttcgccgttcaacaaatagccgacatagcagaaggcgacaaccgcgggctgacactgttgctgcccataattcctgcaataggatggcctctgtacaacattctgaaaccggcgctggaccaactgaaccgcatgcgcaacaccaaaggcgtgatcattgagcttgggcttggcggcttggctgtcttggt

SEQ ID NO: 271826 - DNA, 278 bp, Glycine max
ggcaacaatcatcgccggcaccctatctactttattcactcgcacaagacatttgcggaagcgacctgtgggggccggggccggtaccgatcttggattgccagcaatggtcaaggcggggagagtgaggtgctccatggaggaaaagccatcaagcagctcaaacctagggatgggggcattcttgatagcagctgcagcgtgccgcaaccattgcaagcccaacagccatggcctttgttgatgagagacttagcacttaaggaactgtgctttcc

SEQ ID NO: 271827 - DNA, 436 bp, Glycine max
acgcgtccgcccacgcgtccgcccacgcgtccgttcactcgtccgcccacgcgtccgagcagagggaggagcggcattaaaaatgcagatcttcgtgaaaaccctaacggggaagaccataaccctcgaggtcgaaagcagcgacaccattgacaatgtcaaggctaagattcaagacaaggaaggcatccctccgcatcagcagcgtttgattttcgccggaaagcaacttgaagatggaaggaccttggccgattacaacatccagaaggaatcaacccttcaccttgtcctcaggcttcgtggtggcatcatcgagcctttcctcatggctgtggctcgcaaatacaaccaggacaagatgatttgccgcaaatgctatgctcgtctgcaccctagggctgtgaactgccgtaagaagaaatgcggtcatagt

SEQ ID NO: 271828 - DNA, 437 bp, Glycine max
cacgcagcgaggtagcgtcttcttcttccgtttctctgcatcggtgtgaacaatggctacagacgctgcgatgaagcccacagagcccgggttggaggagtcccaagaacagatccacaagataaggatcaccctttcctccaagcacgtcaaaaacctcgagaaggtttgtgcggatttggttcgcggtgcaacggataagagactcagggtgaagggacctgttaggatgcccactaaggttcttcacatcactaccaggaaatcaccctgtggtgaaggtaccaacacatgggacagatttgaacttacggtgcacaagagagtgattgacctctacagttccccagatgtggttaagcagattacctctatcacgatcgaacctggtgtggaggttgaagtgaccattgcagatgcttgatcttgatccaaat

SEQ ID NO: 271829 - DNA, 224 bp, Glycine max
aattcacagagcaacacatcgaaccaactatgtgcgttgcctcagccgcaatcacagccgcggcacgggcaagcagcgctggggcaggtgcagtgcttcggtcgcaagaagaccgtcctgtccgtaacctactgcaagcgcgggcgcggtctcataaagatcaacggctgtcccattgagcttgtggagccggagatccttcgctttaaggccttcgagcctat

SEQ ID NO: 271830 - DNA, 429 bp, Glycine max
  unsure (1)..(429): unsure at all n locations
cccacgcgtncggttggttacgcggaataagaaggttagactgcattagaagaaaaggactactccaaatttgcagctctcatgaatcgaaattttgacctgcgaaggttaatgtttggagatgatgccctcggtgatttgaacctaaaaatggtagaggttgccagaaaggttggagctgcgtcaaaatttaccggtagcggaggagctgttgttgcattttgtcctgaggggacttctcaagtgaagcttctcgaggacgaatgtcaaaaagaaggatttgtgatactacctattgaacctcttccttctcgtctaaatgaaattgacttgaaaaccttgcaaataaagtaatctatattgagggtttgaaaaatagttctcaacaaaataaaaatttccatttactcaagaacgcgggtttaaagc

SEQ ID NO: 271831 - DNA, 424 bp, Glycine max
ctgggactgattatagtgaaagggccatcaaccttgctcaaagccttgctaatcgtgatggattttccaatgtcaaatttttggttgatgatgtccttgagacaaagttggaacaagagtttcgacttgtcatggataaagggacgctagatgctattggattgcatcctgatggtcctgtcaagagaatgatgtattgggattctgtttcgaagttggttgctcctggtggaatacttgtggtcacatcatgtaacagtacaaaggatgagttggtacaagaagtggaaagtttcaaccaacgaaaaattgctactgcacaggaacttgaggcactgaagggtgaggagccatgcagagagcccccatttcagtatgtaagtcatgtccgcacatatccaacattcatgtttggtggatccgt

SEQ ID NO: 271832 - DNA, 433 bp, Glycine max
gtcgaagcgtggtcgtggtggttcggcggggaacaagttccgcatgtcgctgggtcttccagtggcggcgacggtgaactgcgccgacaacacgggggcgaagaacctctacatcatttcggtgaaagggatcaaaggccgtttgaaccgtcttccctcggcctgcgttggcgacatggtgatggccaccgtgaagaagggaaaacccgatctgaggaagaaggtcttgccagctgtcatcgttcgccagcgcaagccatggcgccgaaaggacggcgtctacatgtacttcgaagataatgctggtgttattgtcaatcccaagggagaaatgaaaggttctgctatcactggtcccattggaaaagagtgtgctgatttgtggcctaggattgcaagtgcagctaacgccatcgtttgagtggaatttctt

SEQ ID NO: 271833 - DNA, 428 bp, Glycine max
cccatttttcacaccaccaagccaacagaagatgtttctccacattgttttcctcctttcccttctctcatccacttcccatgccactgtccaagacttctgtgtggcagaccttaagggtgcagacaccccttcaggctacccctgcaagccacctgcaaatgtaacttcagatgactttgtgtacacaggcttagctgaagctgcaaatgtcacaaacataatcaatgctgctgtgaccccagcttttgttgctcaattcccacgtctcaatggccttgacctctctgcagcaagattagaccttggtcctggtggtgttatcccactacacactcacctctgtgccaatgaactactcattgttctccaaggtcacatccttgctggattcatatcttcaggtaacatactttatcagaaggtgc

SEQ ID NO: 271834 - DNA, 429 bp, Glycine max
cccacgcgtccgcccacgcgtccgttcacgcgtccgcccacgcgtccgtccgcgggcatggcgacgagggcagcagtggcggcgccgcgcgtttttcggcggtttttctgcacaaactcagcctctccttctttccccttcgttcctacgccgcctcctggcgccacccccactccaactcgacccacggcggagcccaaccccaacctcttcgtctctggtcttagcaaacgtactactacagaaaggcttcgagaggagtttgcaaagcttggtgaagttgttcatgcaagggttgtaactgatcgagtctcggttactctaacggttttggttttgttcaatatgctacaatagaagaggctgcaaagggcattgaaagcatggatggcatgtttttggactgttgggttatatttgcagagtatg

SEQ ID NO: 271835 - DNA, 361 bp, Glycine max
gcaccgaaggggttgggaagcaggcagagaagatccatggtgcacgtttccttctgccgaaactatgggaaaaccttcaagaagcctcgtcgtccgtacgagaaggagcgtttggacgccgagttgaagctggtcggtgagtacggacttcgctgcaagagggagttgtggagggttcagtacgctctcagccgcatccgtaacaacgccagaaatcttttgaccctcgacgagaagaacccgcgccgtatcttcgagggagaagcccttctccgaagaatgttccgttacggacttctcgatgagactcagaacaagcttgattacgtgttggctctcaccgtcgagaactttctcgaac

SEQ ID NO: 271836 - DNA, 243 bp, Glycine max
  unsure (1)..(243): unsure at all n locations
ttcaagaatagagaactgcgtagcgacccattagagaagatcgcgatcttctgaaacatgtgtggggaagaggaagaaaacgccgcagagctcaaaattggagacgagtttttgaaggcaaagtgcttaatgaactgtgaagttgcattgattcttgagcacaagtatgagcagcttcaacagacatncgatgatcccatgaatcaagtttctcaggtatttgaaaagtcactgcagtatgtg

SEQ ID NO: 271837 - DNA, 409 bp, Glycine max
cccacgcgtccggttgacatgaacaaaagggctggtgagttgactgctgctgagttggatagtgtgatgactgtggtggcgaaccctaggcagttcaagatcccagactggtttttgaacagaaagaaggattacaaggatggcaaatactctcaagttgtgtctaatgctcttgatatgaagctcagggatgatcttgagagactcaagaaaatcagaaaccaccgtggtttgaggcattactggggccttcgtgtccgtggtcagcacaccaagactactggccgtaggggaaagactgttggtgtctctaagaagcgttaagctattatgtttggcttggagattagattttgttgagaaggaaagtttgaagtacactagacatgttttgcatcataccaacttt

SEQ ID NO: 271838 - DNA, 422 bp, Glycine max
agcatcctggtggtgaacatacaggagaaaaagatagaacctttgaaacatcgtttatcagagaacaatgggctttgcaacagctgagaaggaacgagcaacaatcttggaggcctcagaggggcctgcctgagaaatctgtctcggttctacgtgcatggatgttccaaaactttcttcacccgtacccaaaagacaacgaaaagcatttgctagccattcaaagtggattgacgagaagccaggtgtccaactggtttataaatgcgagagttcgcctctggaaaccattgatagaggaaatgtactcggaggtaaacaaaaagaatcgtccaatagaaggatcaggctgcgatagcaggaactatgcaagcattgggaatcaaagaattcagatgaattgaattactgaaatattctta

SEQ ID NO: 271839 - DNA, 303 bp, Glycine max
cttcacctccttagtttcgaaagcatggcttccctggcggcttccaccgcggctatgtcagaaatccttggaaaccccgttaacctcagatgcgcaaccaggtctgctccatcaccaactacacctgccaccttcaagaccgtcgcacttttctccaagaagaagccagctccacctccaaagaaaaagcctgccgctgtatcccccgccaatgaggaactcgccaagtggtatggtcctgacagaaggatcttcttgcctgagggtctcttggaccgatctgagatccccgagtacttgacc

SEQ ID NO: 271840 - DNA, 405 bp, Glycine max
caagtagttgataactaagaagaaggaaatggcttgctcaatgatctcctccccagctgttaccaccgtcaaccgtgccggtgccggcatggttgctccattcaccggccttaaatacatggctggcttccccacgaggaagaccaacaatgacattacctgcattgctagcaacggtggaagagtacaatgcatgcaggtgtggccaccaattggcaagaagaagttcgagactcttttctacttgccagacctcgatgatgcccaattggcaaaggaagtcgaataccttctaacgaaaggatggattccttgcttggaattcgagttggagcacgggttcgtgtaccgtgagcacaacacgtcacctggatactatgatggacgctacttgaccatgtggaa

SEQ ID NO: 271841 - DNA, 451 bp, Glycine max
cccacgcgtccgaattcctacaatgctttctcaatgtgctttgggaatgaagctttgctagcggtattcccgttcaaacaagccctgcattcatcaaaggttgtttagtggtttggataacatatactgtgtcttcctgggtggcctgcacaaccttagcatgctcaacaagcagtatgggctatcaaagggaacaaatgaggccatgtttatcactgaagcatatcgaactcttcgtgacaggggtccataccccgctgatcaagtcctgaaagaacttgaaggcagctttggatttgtgatctatgacaacaaggatggaacagtttttgttgcatctggttctaatggccagattgggctctacatgggtgttgcagctgatcgttacatagttatttctgaacatctggagcttataaaagcaagctgtgctaaatcatttgcacca

SEQ ID NO: 271842 - DNA, 289 bp, Glycine max
aaaaaagaagataagaaaaaatactacttaaaagatacaattgaaaattggagattcatcaataaattattacagacgaataaaaagagaaatagaatgacataatttagaaataaattcatcatctgtgacatctactcatcctgtgattccaaatcaacagacttattaatcaactcatgaattgagtaaactaatctaatgataatgaaaatctttcgtattattttatatattattctagaatagaattctatttctattagaaagaaaaatgaatattaaaaca

SEQ ID NO: 271843 - DNA, 484 bp, Glycine max
ctctattatcatatggacagcttgggctctccatgcaactgttaattttgggcaatacccttatggaggttatatcgtgaaccgtccaactctagccagaaggtttatcccagaagaaggaaccaaagaatatgatgagatggtgaaggatcctcaaaaggcatatctgagaacaatcacacccaagttcgagacccttattgacatttcagtgatagagatattgtcaaggcatgcttctgatgacgtctaccttggccaaagggataatccaaattggactacggattcaaaggcattggaagctttcaaaaagtttggaaacaaactggcagaaattgagggaaaaatcacacagaggaacaatgatccaagtctgaaaagccgacatgggccagttcagcttccatacacattgctccatcgttcaagtgaggaagggatgagtttcaaaggaattgccaacagtatctccatctaaaat

SEQ ID NO: 271844 - DNA, 353 bp, Glycine max
cccacgcgtccggtggtgaccttggcaaacttgattatcgcttccacaaaacctgtggttcgagtctgcaccagttcccgttcccccacaccaaaactccccattcttcaaatttcactccccaaagccccaaccttgaaactgaaactgccaatttcaaagccccagatgctgtacctcctgggagggatagcaccactggtcttggccaaaccctccctatcataagaatctgagaaagcagcactctttgacttcaacctcaccctgcccataataatggtggagtttctgctgctgatgcttgccttggacaagatatggatcaccccacttgggaaattcatggacga

SEQ ID NO: 271845 - DNA, 478 bp, Glycine max
ttccaaactccgccatggccactgccaccgtcgccgccgccacgtcatactttgtcggcacccgtctaaacaacgttaacacgacaaccttaaacaacggaagattccacgcgctcttgaacttcggcaaaaagaagacggcgccgcagccgccgccgaagaaaaaggaagtgaaagtgaaaccctccggagaccggctggtgtggttcccgaatgcggagccgccggagtggctcgatggaagcatgatcggcgaccgcgggttcgacccgttcgggttcgcgaagcccgcggagtacctgcagttcgacctggactcgctggaccagaacctcgcgaagaacatcgccggcgatgtgatcggaaccagggtggacgtcgccgaagttaagccgacgccgtttcagccctactcggaggttttcgggattcagaggttccgtgagtgcgaactcattcatggaacgtgggcaatgct

SEQ ID NO: 271846 - DNA, 482 bp, Glycine max
gcttcttccgccactcagcacttcgctccctctgtgcttcaccaaccatggccgaaatcgaagcgtaccgttgcagatccctctcaaatcgacgtcaaacttttcaaccgctggagcttcgacgacgttgaggttactgatatgtctctggctgattacattggagtgtccccgtcaaagcatgctacatatgttcctcacactgctggtaggtactcagtgaagaggttcaggaaggcgcagtgccccattgttgagagactcaccaactctctcatgatgcacggaaggaacaatggaaagaagctcatggctgtcaggattatcaagcatgcaatggaaattattcacttgctcactgacctgaacccaattcaggtcattgttgatgccgtcatcaatagtggtccacgtgaagatgcaactagaattggttctgctggagtggtgaggagacaggcccgttgatatctcacccctta

SEQ ID NO: 271847 - DNA, 351 bp, Glycine max
aaaacaataaatccaaagaaccccatctcggcatttcggattgcacaacaatacagtcacagaaacagagaaaaaacaaagaaaatggatgcagaaacggagtctccggcgccggaaacatcgccggcggtgatccacccggcagtggcaccaatctcctaccttctgggcacatggagaggccaaggagaaggaggcttccccactatcaattccttctcctatggcgaagagcttcacttctcacattcccccaacaagcccgtgatagggtacactcagaagacatggaaactcagctctggagagcctatgcatgctgagagtggatactggcgtcctaaacctgat

SEQ ID NO: 271848 - DNA, 289 bp, Glycine max
cccacgcgtccggcagggacgagtcgaaatggctgaagcagagagtgtgcagattcctcacgtcaaacttggaactcaaggccttgtggtttcaaagttagggttggggtgtatgacccttagtggacgctataatgatccacttcctgaagaggaaggcatatctgttattaagcatgctttcagccaaggaatcactttttttgacacatctgatgtttatgggctcgaccatgctaacgaatttttgttcggaaaagctttgaagcagttacttaaagaaaagatc

SEQ ID NO: 271849 - DNA, 434 bp, Glycine max
cccacgcgtccgagttcggtgaagtgagtagtgagtgctgaatcgaatcgaatggattctcggaacatggcggcgagcgatcgcacagtgttgcaattctcttcatcatcttcttcttcttcgcacatcttgtccgcgaaggtccaccctctggtcatcttcaacatctgcgattgctatgttcgacgccctgaccaagccgaccgcgtcatcggaaccctactcggctccgtccttcccgacggaaccgtcgatatccgaaattcctatgctgttcctcacaacgagtctatcgaacaggttgcattggatatagagtaccaccacaatatgttaatatcccaccaaaaagtgaatccaaaggaaatcatagtaggatggtattcaaccggtcttggagtaactggtggtagtgcattaatccacgagtttta

SEQ ID NO: 271850 - DNA, 408 bp, Glycine max
tggacttaagcttgtcaagcttagaggagaggccatgcaggatgcttcagatgctgctagtagtgccatggttagtattataggattggattcagagaaggttcaattgttgtgcgatgcagcaaatgatgaagtagacgagaaagacagagttcagattgcaaactttctttgtccaggaaattatgctgtctctgggggtgtgaaaggagtggaagcagtagagtccaaggcaaagtcatttaaggctcgaatgactgtgcgtctatcagttgctggtgctttccacaccagctttatggaaccggctgtctcgagattggaagctgcactagcggcaacagatgtaagaacgcccaggttaccagttatatccaacgtggatgcacgaccgcacacagatcccga

SEQ ID NO: 271851 - DNA, 321 bp, Glycine max
ggcaaggcaagtgctctcattcagcatgagtggaggcccaagtcttttgtgactatctctgcggaagtagacactaaagccattgaaaagagttccaaggttgggttggctttggttctcaagccttgatgggattgttgtccttagtacttccatttcagatgttgattcaaatatgacgtggacttctttttgtctcacttgagaaatcctgaggatctgttagctttgttttaatgttcggatcctgaggatctggtagctctgatttaatgttccgtaagaataattctgctcggcaattggaaccctgagttttcg

SEQ ID NO: 271852 - DNA, 424 bp, Glycine max
cccacgcgtccgcttttgctttaccaaattccaatttccaattcaaaaccctaactccgttcgaagcaccaaatcgtgatggcaccaaaggcagagaagaagccagcagagaagaagcccgcggaggagaagaaatcgacggtgggagacaaggctccggcggagaagaagccaaaggccggaaagaagcttccgaaggagggaggcgccggcggagaagggaagaagaagaagagaaacaagaagagcgtggagacatacaagatctacatcttcaaggttctgaagcacgttcaccctgacattggtatctcaagcaaggccatgggaatcatgaacagcttcatcaacgacatcttcgagaagcttgcccaggaatcttctagacttgcccgctacaacaagaaacccaccatcacttcga

SEQ ID NO: 271853 - DNA, 337 bp, Glycine max
gatgttcaatgcctatgttctttaaggcttttttaagtggaaaggaagataggggtatgtgggacgtgccaggggtggaaaacagcaagatgaaattgctaacgcatgtttcatttgtggattgcccgggacatgatattcttatggctacaatgctacatggagcagcaataatagatggaccattgctactcatacatgctaataaaagttcccaaaacccacaaacatttaaccttttacttctttacaaaatcttccgtttacagccaataatattccttcaaaccaaggtaaacttgattaaaaaaattgtggcattaaataacattgaggc

SEQ ID NO: 271854 - DNA, 380 bp, Glycine max
agtagttgagaactaagaaggagaagcaaatggcttcctcaatgatctcttccccagctgtgaccactgtcaaccgtgccggtgccggcatggttgctccattcactggcctcaagtccatggctggcttccccaccaggaagaccaacaatgacattacctccattgctagcaacggtggaagagtgcaatgcatgcacgtgtggccaccagttggcaagaagaagtttgagactctttcctacctgccagaccttgatgatgcacaattggcaaaggaagtagaataccttcttaggaagggatggattccttgcttggaattcgagttggagcacggcttcgtgtaccgtgagcacaacacgtcaccaggatactac

SEQ ID NO: 271855 - DNA, 287 bp, Glycine max
aagaaaccctagccactctcccggcgtcacgatgcacatcttcgtgaaaaccctaacgggtaaaacgatcacgttggaggtggagtcttcggacaccatcgacaacgtgaaggccaagatccaggacaaggaaggcatccctccggaccagcagcgcctcatcttcgccgggaagcagctggaggacggccgcaccctcgccgactacaacatgcagaaggagtccacgcttcacctcgtcctccgcctccgtggcggcgccaagaagcgcatgaagaagacctaca

SEQ ID NO: 271856 - DNA, 445 bp, Glycine max
cgcgcgcgcgacggctgaatcgtcaccattggtatcattgaccatgttcaggaccatcttggagaggttgtgtatgtggagctgccagaaccaggtggcacactttccaagaagtctggcttcggagccgttgaaagtgttaaagcaacaagtgatataaactctccaatctcgggggagatcgttgaggttaacataaagctcacagaaacgcctggcctggtcaactcacgcccatacgaagatggatggatgatcaaagtaaagccaagcgatccatctgaattagattccttgatgggtgcaaaggagtacacaaacttttgtgaggaagaagatgcacgtcattaaagcttgaattgaattggctcctagaagtatgtgtgggactgactggtcttcatatgtttatgagcttattaccttcttgacagctttttaatat

SEQ ID NO: 271857 - DNA, 370 bp, Glycine max
aaaaattattttattaatggacaaatcctattctaagggttatggcaaaaaaaaaaaaaaaggaaaaaaaaaaaaaaaaaaaaaaaaaaaaaaaaaaaaaaaaaaaaaaaaaaaaaaaaaaaaaaaaaaaaaaaaaaaaaaaaaaaaaaaaaaaaaaaagttaactgttttaaagaataaaaactaatataaactcgtaaaacaacaacatttccatttattaaaaactaaaaaattacttccatttccccagctattacaatatcccaaagggaaaaaccctgccttcctccaaaataattgccctctaacaaaattcccttttgcccagttttcttaatttcaaaaaggccaaaacctcttgtatttt

SEQ ID NO: 271858 - DNA, 322 bp, Glycine max
ggaagcgctttgtgaccatcgggggagttcccggcaaagagaacacttggttcaagatccagaaaacaggcaagtatgcatacaagctggtgtactgcccaagtgacgagaatgcctgcagcgatttaggcatttactacgacaaggaggccgggaagaggtggcttgctttgagcgactcgccattggaggttatgttcgtcaaacactgatcgtcactactcaacttcaaccctgcctgaactgtttgagcttggcttttgtgttaaatttgtatgcaacctttatgtatgaataaagtgggtgaggatcctttgtagcc

SEQ ID NO: 271859 - DNA, 345 bp, Glycine max
cctctgcagaaatgtcagctgccgagctagcccccgccccagcccctgccaaggtgaccaagcgctaaggcgccaaagaagacctccgctccaaagaagcctgcagcccatcctccctacatcgagatgatcagcgaggcgatttccacgctgaaagagcgtggtgggtcgagccagtatgcaatctccaagtttattgaagacaagcataaggctcacctcaccggaaacttcaagaagctccttctcgtccagctcaggaagtccacagctgccggcaagctgactaaggttaaaaactcttacaaagtggctgtgaaaccagctgctgcaaagaagcctact

SEQ ID NO: 271860 - DNA, 346 bp, Glycine max
tgttcctcgacatgtgtgtctggcggtgaggaatgatgaggagcttgggaggttgttgggtggggttactattgctcatggtggagttttacccagcatcaaccctgtcctgctgccgaagaagactggcaaggagggggtggagcccaagagtccgaagaaggcggctaagtccccaaagaaggcttaaatctgtgctctgggactgttagccgtagaagtcttaaagttgtgctcttaggctgttagctgtagatatatggcgtggatcagctggtctatgcattgtggtttctggtatttgactgtattccatgtttctatggtttagtgttaacatatgttt

SEQ ID NO: 271861 - DNA, 278 bp, Glycine max
cacaggcgcagacgcaaacgcaaacgcaaacgcaaacgcaaacgcagagcgtgatccattgacgaagatggtgcagcgtctcacctaccgcaagcggcacagctatgccaccaagtccaaccaacacagggtcggcaaaacccctggtgggaaacttcgttattaaaattccaaaaaaaagggccagggaccccaagggccccgtaattggaaaaagaattaagggaattccacactggagcctgcagagtacaagaagtcaagggtacccaaaaacc

SEQ ID NO: 271862 - DNA, 356 bp, Glycine max
cccacgcgtacgctttcttctcataactctgtcgccggaacaggcccaaatccaatggctggagagaagaaactttcgaacccaatgagggagataaaggtgcataagctcgtgctcaatatatacggtggcgagagtggacatcgtcttaccagagccgctaacgcgttggaacagctgagtggccaagcccctgtgttttgcaaatgaaggtacacggatcgttcctttgggattagaagaaatgagaacattgcatgctatgtcactgtcagacgtgacaaggcaatgcaacttttggagagtggtttgaacgtgaaggaatatgaacttctcagaaggaacttcagtgatac

SEQ ID NO: 271863 - DNA, 312 bp, Glycine max
caaacacaaagaaaaaaataacccttagccattacaaccattatggacacctctgctattcagcaatcagcagtcactggtcaaactgctctgaagcatctcaatgagttcgttcgcaagaccggtggcgccggcaaaggtcgcactaacatgcgccgcaccttcaagagtgctcctcatagcatgcggtatggccctgaccgtcccaagtacttgagtgcatgctcggagcaaattacatcatacctgaccggagaatttcctggtgactacggatgggacactgctggattatcagctgacccggaaacc

SEQ ID NO: 271864 - DNA, 344 bp, Glycine max
cccactcgtacatagaatggtagctagaatttttgcccatcgcaagtcatattaaatgtatgctacaattatgaaccggtattaacttataaataatagttacattctttaaaaaaaaaaaaaaacaaaaaaaaaaaaaaaaaaaaaaaaaaaagaaaaaataaaaaaaaaaaaaaaaaaaaaaacagaaaaaaaagaaaccaaaactaaaaaaaaaaaaaaaaggggcgggccctttaaaaaaaaaaaatttcaaccccattattagaagaaattaatttttttatttggggcaaaaaaaaaaaaaaaaagggggcgggtttaaaaacctcatgattggaaaa

SEQ ID NO: 271865 - DNA, 373 bp, Glycine max
cggacgcgtgggcgggtcccatatcttcagcgagggtgggctggactacttgggcaacccaagccttgtccacgcccagagcatcctcgccatctgggccacccaagttatcctaatgggtgctgttgagggttatcgtattgctggtgggcccctcggtgaggtcactgacccaatctaccctggtggcagctttgacccattgggccttgctgatgacccagaggcttttgctgagcttaaggtgaaggaactcaagaacgggagattggccatgttctctatgtttgggttctttgttcaagccattgtcaccggtaagggtccattggagaaccttgctgatcaccttgcggacccagtcaacaacaat

SEQ ID NO: 271866 - DNA, 434 bp, Glycine max
  unsure (1)..(434): unsure at all n locations
ccactctctcttaattaaattaaaacaaaaaatgtgcgctgccatatccgaagtggaacaagaagagttgctcgaaaaattggaggtgttcaagatcaaaggcagggacaagcatggccgcaagatccttcgcattatcgccaaattcttcccagcacggttggtgagtgttgaggttctgaaaaagtacctggaggagagggttttcccgaagctgatggggaagaggaaattcgcggtgctgtacgtgcacaccggcgtccagaggagcgagaattttcccggaatctccggtctccggtggatctacgacgcgattccggcgaacgtgaaggagaatctcgaagccgtttattttattcacccgggcttgcaggcccgccttttcctcgctacattcngccgcttcctctttaacgctgggctgtatggaa

SEQ ID NO: 271867 - DNA, 393 bp, Glycine max
  unsure (1)..(393): unsure at all n locations
ctattctcacttcaaacttgccaaacatggcttcagaactgtcatcatctaccaattgcgtggcaagcgcaggcacatgtttggcagcctttgccgccctccttctcctcttcctccgcggactacgccgccgacgatacaacctccccccaggcccaaagccctgagccatcataggcaacctaaacttaattgggtgccttccacatcggtcgatccacacgcttggcaaaaaatacgggcccatcatgcacgtatggttcggatcaagctccagggtggtgggctctgccgttgaaattgccaatgccgtnctcaaaacccacgacgccaccctcgtcggcaggccgaagatcgtggtgggcaaatacacaacctacaactactcggaca

SEQ ID NO: 271868 - DNA, 254 bp, Glycine max
cccacgcgtccggcaaatggcttcctcaatgttctcttcctcagctgttaccactgtcaaccgtgccggtgccggcatggttgctccattcactggcctcaagtacatggctggcttccccaccaggaagaccaacaatgacattacctccattgctagcaacggtggaagagtgcaatgcatgcaggtgtggccaccagttggcaagaagaagtttgagactctttgctacctgccagaccttgatgatgcac

SEQ ID NO: 271869 - DNA, 289 bp, Glycine max
cagaaacgccgcgttatttgttatcgctcattgcttcaccttttccgcatatgctgcaaggtttgaaatcacaaaccgatgcacatacactgtatgggctgcgtctgtgcctgttggaggtggcgtgcaattaaacccgggccagtcatggtgcgtggacgtgcctgcaggaacgaaaggggcccgcgtttgggcccgaaccggctgcaacttcgacagttcgggccgcggtggatgccagaccggtgactgcggaggtgtactcgacttgaaaacttacggtgcgcct

SEQ ID NO: 271870 - DNA, 362 bp, Glycine max
cactctctcactcacaatcgtttactgacttttataacctttaaagacagaggcatggacgggcgaaccttcatcatgatcaagacacatggcgttcaatgaggccttattggcgagattattagcagatttgaaaggaagggtttttacttgacagggtctgaaactcgttactggggacgcgccttttgctgagaaccactatgctgatttgtctgcaaagcctttctttagtggtttggtggattacattgtctctggccctgttgctgccatgatctgggagggtaagaatgccgttacaactggacgaaagattatcggatccccaaacccacctcaatgtgagcctggaactattc

SEQ ID NO: 271871 - DNA, 389 bp, Glycine max
cagagacttcagggaatttgtttccaccactttatatactcataacacaaagggtccattggagaagatgccgagcagaaacagtcccatcagaaggcctgaagaggcaactcaccccgacacgttgaaggcggctttggctgaattcatctcaaccttcatctacgtgttcaccggatcacgctccggcatcgcctacaacaagctcaccgacaacggcgctgccacccctgccggcctcatcttcgccttcatcgcccatgcattcgccctcttcgtcgccgactacgacagcgccaacatctgcggcggacacgtcaaccccgacgtaaacttaggtgccttcgtcggcggaaacataaccttcctccgcggcatccgctacgtca

SEQ ID NO: 271872 - DNA, 358 bp, Glycine max
gtggaagctgcctatgtttggttgcactgatgcttctcacgtgttgaaggagcttcaagagggtaagactgcataccccaacggcttcatccgtatcatcggattcgacaacgttcgccaagtgcagtgcatcagcttcatcgcctacaagcccccaggcttctaagtgaaaaaaatttgcaaagcatttgtagccgccaccccactttgtttgtttgtacttaaactacattcccatttgtttttgctttttgagatttcatcatcctgtatttttggtttctgttttcggacttcaatggaaattaatggatgagaactaatgaataagctattgcgttgtgttgctttgtttcaa

SEQ ID NO: 271873 - DNA, 363 bp, Glycine max
ttccatcgtcccttgctataccgcgatcgacacagatgaggttaacatcgacggatacaacggcagctctcgtgcaaccgcaacttcaggccatcagaaccggaaaatccgacacatccgacaatggtcttcgattctcacgaatcttcctaccgttacctgtcttcgtcaccgaacgaatactccgtttagctcctccggcgtgagagcacaggttgctactctggaggaagcaggaaccggagcaactcagaaagtggaagcgccggttgcagtggtgaccggagcttccagaggcattggcaaagcgattgcactgtcattacgtaaagcacgttgcaaggttctggtcaactatgcaag

SEQ ID NO: 271874 - DNA, 397 bp, Glycine max
cccacgcgtccgatctccgcagcaatggtgaacgttccgaagacaaagaagacctactgcaagagcaaggagtgcaggaagcacacgctccacaaggtcacccaatacaagaagggcaaggacagcatcgccgctcagggaaaacgccgttatgaccgcaaacagtccggttacggtggccagactaagcctgttttccacaaaaaggccaaaaccaccaagaaaattgtgttgaggctccagtgtcagggatgcaagcatgtctcgcagcacgctatcaagaggtgcaagcattttgagatcggtggtgacaagaagggaaaaggaacctctctgttctagatggaatattagaatttgccatttcacacactctctctacctctctcacgtttta

SEQ ID NO: 271875 - DNA, 452 bp, Glycine max
atcgagataactagaaacagtgtgatgaaaatgaacgtccttgtgttcttcggtgctacaatggtggtagcatggcaatgccatgcgtacaatatgtcccctctccgaatgaacactggctatggcgcccgtactccggaggtgaaatgcgcacgttggaggcttgctgtgcaagcacacaacatatttggctttgaaaccattcctgaagagtgcgtggaagcaacaaacgaatacatccatggggaacaatatatatcagacttcaaaacaggtaaccaacaagcttacttttatgccagagacctctaagtacatcccaaggacacatttgtgttcagtatagatggcaccgaactctataatattccatactacaaaaaacatgcatatggggcggagaaatgaaactcgaccttgtatgatgaatggcttaacaagggcaatgcacc

SEQ ID NO: 271876 - DNA, 446 bp, Glycine max
cccacgcgtacggctagctaccacaaccaactcatacttggtcattggattggttccctttgggttgtggctttggttattttttttactttaacgtttggttaagggttaatgttccgaaataataaaggaaggttgttaaataaactggttaattggttggaaaattaaaataatatactaggttgttgttgtttcttcttgaagtgaagtatcattatatgaaagaagatcaagaataatgcattataatgtttacaagacagttagcatgttttctatatggatattgagtgggcagaacattgagtgatgtataaaaataaaattgttgcattgtctttttttcgtattagccaattaatacacttttatgaataagtatgtgtgtgttctatgtaaaaaaaaaacaacaccttttatgataaatgggtaaacagggataa

SEQ ID NO: 271877 - DNA, 368 bp, Glycine max
  unsure (1)..(368): unsure at all n locations
cgacccacacgtncgnccacgcttacggntagctacttcaaccaatttatactcgcacattgcatagcttccctttggctgctgcctttgcttatctctgtacctctacgtcttgttcaagctttatgctccgtaatgattaacgaatcctctttaattaacttgataattagttagaagactaaaataatatactaggctgctgctgcttcttcttgacctgaactgtcatcatatgaaagaagataaacaatcatgcatttcaatcgttacaagacagtatgcatgtttactctctggatatcgagtacgcacaacatcgagtgatgcataaaaataaaactgttgcattgactttttatcgtatt

SEQ ID NO: 271878 - DNA, 264 bp, Glycine max
atcacgcgtacgggtctatacaaatcatcacatctcgacaatatacgacaatagcactgcatgggcttcatggcctacaagacggtagtctgctaaatgtgaatgatccgccaagaaaaggccgcctacagaagaacccgcacattagtacttaacctacatgcgaatacgcctttgctttccgagatctcatcatacataaatatagatatatagatatagacatcaatagaaattaatggattatatctacttaattataga

SEQ ID NO: 271879 - DNA, 378 bp, Glycine max
cccacgcgtccggcgattttggatcggaacctcttctgcggcgtagcaatgggacactccggcgtttggaattctcacccaaaaaactacggtcctggttctcgcacttgccgagtgtgtgggaatccacatggattgatcaggaagtatggccttatgtgctgcaggcagtgcttccgtagcaatgccaaggaaattggcttcatcaagtatcgctaaaagagctgttgtcacctacggaccaatattatgttctggcactaggatgttttgaagatgttatgtttgaagaaacttgagacttgcttttttcatctattttattatcagacataatgtgtggaacgaagaatacttttatataaattggtttgcact

SEQ ID NO: 271880 - DNA, 436 bp, Glycine max
cccacgcgttcggcggccaaaccctagctacctcttccttaatccctaatctctatttcgggctctctctttttctctgcaaaacaaaaatgtctcacttcggacgttcgggtcccccagacatttccgacacttactctcttctcgttctgaacatcaccttccgtaccaccgccgacgacctattccctctcttcgacaagtatgggaaggtcgtcgacatcttcatccccaaggatcgaaggactggcgaatcgaggggttttgcgttcgtgcgttacaagtatgctgatgaggctcataaggccgttgagaggctcgacgggagaatggttgatggtcgcgaaataacggtccagtttgcgaaatatgggcctaatgctgaaaggattcacaaaggaaggattattgaaacatccccaagatcaaggcgatc

SEQ ID NO: 271881 - DNA, 260 bp, Glycine max
agcaattcgaattcccaatccaaaaccctaataccttcaaagaacctagtagtgaatcagtgatggcacctaaggcagagaagaagccagcggagaagaagccggtggaggagaagaagtcgacggtgggagacaaggctccggcggagaagaagccgaaggccggaaagaagcttccgaaggagggaggagccggcggagaaggggggaagaagaaaaagaggaacaagaagagcgtggagacatacaagatattcata

SEQ ID NO: 271882 - DNA, 393 bp, Glycine max
cccacgcgtccgcccacgcgtccgcccacgcgtccggaagaagagaatcataagaaagcaagaaagaaaatgggagtggagaagcagttgttgaggcctggcaccggtcccaagccaattcccggtcagaacgtcaccgttcactgcactggtttcgggaagaacggtgacctttctcagaaattctggagcaccaaggatcctggccaggaccctttcactttcaaaatcggccaaggttctgttatcaaaggatgggatgaaggtgtgcttggcatgcaaattggtgaagttgctcgtctccggtgctctccggattatgcttatggtgctggtggctttccttcttgggggatacagcccaactctgtcttggaaatttgaatcgaagtc

SEQ ID NO: 271883 - DNA, 441 bp, Glycine max
ggtggcactgtggcagaagtcttaggagtgtaaaacagagacgcaaaatgaagacgattctatcgtccgagaccatgaatattcccgacggcgtgagcatcaaggttcacgctaaggttatcgaggttgagggccctcgtggaaaactcgtgcgagacttccaccatctgaacttggacttccaacttattaccgacgatggcggtaaaaggaagctcaagattgattcttggtttggttctcgtaaaacctccgccgccatccgcaccgccctcagccacgttgagaatttgatcaccggcgtcaccaagggataccgatacaaaatgagattcgtgtacgctcattttccgatcaacgctagcattggcaacaacagcaagtccatcgagatcagaaatttcctcggcgagaagaaggtgaggaaagtagacatgcttg

SEQ ID NO: 271884 - DNA, 436 bp, Glycine max
  unsure (1)..(436): unsure at all n locations
gagaaacaccactataagggaagaaccttaaatgggaccatacatgttgtagctggtggtggtggagcaagcctttcagcatttacttccctcaaaaccaaatggagcatctttaaagactatgactatgggtttgtaaaactaactgcttttgatcattcaaatttgttgtttgagtacaagaagagcagagatggaaaggtttatgactccttcaaaatatcacgggattatagagacatcttggcctgcaccatggatagttgcccaagtataacaatggcatcttgattgatgaaatgatgaaagcttcaatgtatccagccgtgttgaagcagtgagttatgagtagacttagatgttgtatgcggcagcaagctgtcaccttgttcaacatggcttangtagaatgcacactcaatttaagctgcgagca

SEQ ID NO: 271885 - DNA, 455 bp, Glycine max
cagaagcgtattactggtttagctttttcaaccaatcttaacatactggtttcatctggtgctgatgctcatctttgtgtgtggagtatagatacatgggagaaaagaaaagcaattccaatacaactacccgcaggaaagtcacctgtttggtgatacacgcgtacagttccattccgatcaacttcgcttattggtagttcatgagactcaattggcaatatatgatgcctctaagatggaacgcattcggcagtgggttccccaagatgttctgtctgcccccatatcatatgcagcttattcctgcaacagtcagttaatatatgctacattttgtgatgccaacattggtgtttttgatgctgatagcttgaggctcagatgtcgtattgctccatcaatatgcttgtcaccggcagctttaagtggaagtcaaggtgtgtatcctcttg

SEQ ID NO: 271886 - DNA, 406 bp, Glycine max
cccacgcgtccgcccacgcgtccgcaacactttccacttgtctccgaattagttatcttgagaaacattattcccattgctatatattatggctagcatgaaggttacatgggtggttgtgatcatgtgcatggccgtggtgggtgcaccgatgatggcgcaagccatgacatgcaatgatgtgacggtgaacatggcacagtgcctatcctacctgatgcagggaggaacaccttcaacactttgctgcagcggagtcaagaacattcttggctctgctgtcaccaccgttgacaaacaaactgtgtgcaactgtctcaaggcggatgctgctaggtacaacatcaatgaccagtatgctcaggcactccctggtttctgcaaggtcaatgtcccttacaagatc

SEQ ID NO: 271887 - DNA, 437 bp, Glycine max
cccacgcgtccgcccacgcgtccgcccacgcgtccgcaagtagttgagaactaagaagaaggaaatggcttcctcaatgatctcctccccagctgttaccaccgtcaaccgtgccggtgccggcatggttgctccattcaccggcctcaaatccatggctggcttccccacgaggaagaccaacaatgacattacctccattgctagcaacggtggaagagtacaatgcatgcaggtgtggccaccaattggcaagaagaagttcgagactctttcctacttgccagacctcgatgatgcccaattggcaaaggaagtcgaataccttctaaggaaaggatggattccttgcttggaattcgagttggagcacggtttcgtgtaccgtgagcacaacaagtcacctggatactatgatggacgctactggaccatgt

SEQ ID NO: 271888 - DNA, 417 bp, Glycine max
atcatcatggccacctctgctattcagcattcagcattcgcaggtcaaactgctctgaaggagctcaatgagttggtccgcatgaccggtggctccggcaaaggtcgcaccaacatgcgccgtaccgtcaagagtgctcctcagagcatttggtatggccctgatcgttccaagtacctgggtccattctcagagcagatttcgtcatacctgaccggagaattccccggtgactacggatgggacactgctggactatcagctgacccggaaaccttcgccaggaaccgggagctggaggtgattcacagcaaattggccatgcttggtgcacttggctgcaccttcccagagatccttgagaagaatggcgtgaaattcggcgaggccgcgtggttcaaagctggttcacagatc

SEQ ID NO: 271889 - DNA, 449 bp, Glycine max
gcgagtagttgagaactaagaaggagttgcaaatggcttcctcaatgatctcttcccgagctggtaccactgtcaaccgtgccggtgccggcatggttgctccattcactggcctcaagtccatggctggcttccccaccaggaagaccaacaatgacattacctccattgctagcaacggtggaagagtgcaatgcatgcaggtgtggccaccacttggcaagaagaagtttgagactctttcctacctgccagaccttgatgatgcacaattggcaaaggaagtagaataccttcttaggaagggatggattccttgcttggaattcgagttggagcacggtttcgtgtaccgtgagcacaacaggtcaccaggatactacgatggacgctactggaccatgtggtaacttgcctatgtttggttgcactgatgcttttcaggggtt

SEQ ID NO: 271890 - DNA, 441 bp, Glycine max
cccacgcgtccggtaatggcagcgtcactacaagcagcagctactttcatgcaagccaccgagttgagcaggagcaacactttgcagcaaaagtctactcagtccatttccaaggcttttggtttggaacctgttggagctaaaaaggtcacatgctcccttcaggctgatcttaaggacttggctcacaagtgtgttgatgctaccaaaattgcaggattcgcccttgccacctctgccctcgttgtctctggggcaagtgctgaaggtgttccaaagaggctaaccttcgacgaaatccagagcaagacctacttggaagtgaaggggacaggaacagcaaaccagtgcccaacaattgatggtggattggactcatttgccttcaagccggggaaatacaatgccaagaagttatgccttgagccaacttcattcaca

SEQ ID NO: 271891 - DNA, 195 bp, Glycine max
tacaactactcgattgtaaattttcattaatcaacttgtcttctactccagggccgggtatatagagaagacggcatagaatctcaactatcactggcgcgagcctttcatgccccatggttcttcttcaacgcatcagcctcacattataacgcgcatgctataaagttcttacttacacccagcctaacagtg

SEQ ID NO: 271892 - DNA, 439 bp, Glycine max
caaaaaggaaagctttgaggtttgttggacattttagagtggtgagaggatggtgggtgttatttcgttggtaacaggaatggctggtccaagtgggtttggatcagcttcaactgcagaacaggttactgaaggagttgatgccagcaacctcactgcaattatcacaggaggagcaagtggtataggattggagacagcacgagtgttggctcttcgaaaggtccatgtcatcattgcagtacgaaacatggtgtctgcaaaagaggctaaacaacaaatactagaggagaatgagtctgcacgagtggacataatgaagctcgacctttgctcagtgaattctattagatcatttgtggacaacttcatagctcttgatcttcctctcaacattttaataaacaatgcttgagtgatgttcttgccattcaagctc

SEQ ID NO: 271893 - DNA, 432 bp, Glycine max
aaaatctagaacagcatcagaatcaatcagcatattctgtcttcttcttctgaaaacaaggatgcctcgcggtggtggcggtagctccggtggcggaagatctgctcattcagctcgaagtcatgcttcacggccagttaaccatgctccacctccagctcctgctcagagtgacaatcgtggatctctctttgggactgtagctgaaggattggcttttggttctggaagtgctgtggcacacagggctgtggattctgtattcggtcctcgaactattcaacatgaagtagcagctactgggcctcctcctgcttctgctgctaataagctgggcggtgatgcatgcaatgttcacgcaaaggctttccaagattgcctgaacagctatgagagtgacattagcaagtgccagttttacataaacatgct

SEQ ID NO: 271894 - DNA, 427 bp, Glycine max
cccacgcgtccgaccaaatccactaatggctgccaccgcttccttacaccgtctttctcggcttcgattcatcgccaaaccccaacctttcctatctcctcattcaacaccatcccatttttctctcacccccaaaaccaagaaaccgaatcgattccgattccgattcctctcaatggctgcggaacccaaggaatcgccttccaacaaccccggtcttcacactacccctgacgaagccaccaagggttacatcatgcaacaaactatgttcagaatcaaggaccccaaagtgagccttgatttttattctcgcgtcttgggcatgtctttgcttaagagattggattttccggagatgaagttcagcctgtacttcatgggctatgaggatacaacaaaagctccaagtaatccaattgataaa

SEQ ID NO: 271895 - DNA, 391 bp, Glycine max
gcgaaatcactctcatccaacttcatttctctctttccccagttgccacatctgaaggacaccgtcactcttgcgatgtaattactgagtacttgaggatggctccttttgcttttgcaacattgccctcttctcacatctgccgcctcccaaagcccacaaacttgaagtttcgagttcgctgccctactgccgcgtcttctccttcttcggtttccactacatcaaaagctgctggctttgatttgaagacatactgggccaacctaatggtgcagatcaatcagaagctggacgaaactatcccggttcagtttcctccgcagatatatgaagctatgaggtattcagtccttgccaaaggtgccaagcgagccccacctgttatgtg

SEQ ID NO: 271896 - DNA, 449 bp, Glycine max
  unsure (1)..(449): unsure at all n locations
cccacgcgtccgaattctctcatttttcatttttcaaccaagaaaagcancaacgatgtcgggtcgcggaaagggtgggaagggtttatgaaagggaggagcaaagaggcatcgcaaggtgctccgcgacaatatccagggaatcacgaagcccgcgattcggagactggcgagaagagaatcagtggtttgatctacgaagagaccagtggcgtgctcaagatctttctcgagaacgtgattcgcgatgccgtgacgtacacggagcacgctaggagaaagacagtgacggccatggatgtcgtttacgctctcaaaaggcaaggaaggactctctatggtttccgaggctgagggtttggccttctttggtggcttttggtttgtgtaaatggaaagaatttgtgttttgtagtgattatatatgtaccttggattatcttctgctc

SEQ ID NO: 271897 - DNA, 434 bp, Glycine max
gaacgatttgatggtttggaatgcatttcccaagcaacgagtcttcggttcgaaaccagcagagagagagaagaatcagagaatggcaactatgactggtgtgagcctttcatgccccagggttttcttcaacgcatcagcctcaccgcaaaacgcgcatgctgtaaagttctcacttccacccagccaagcagtgcgaccgggtagtatcaagttgggtcgcgtgatgaggatccgacccgttcgcgctgcgcctgagcgcatatcggagaaggtggaggagagcataaagaacgcgcatgaggcgtgcgccggcgatccgactagcggcgagtgcgtggcggcgtgggacgaggtggaggagctgagcgcggctgcgaaccacgccagggacaagcaaaaggaaaaggactccgacccgctcgagaattact

SEQ ID NO: 271898 - DNA, 421 bp, Glycine max
tcgcccactcgttctttagataactttatacagtttgatgaaaatgaatgtccttgggttctgggttgctacaattttggtagcatgtcaatgccatgcgtactatatgttccctttccgaatgaacactggctatggtgcccgtactccggaggtgaaatgctcaagttggatgcttgctgtggaagcacacaacatctttggctttgagaccattcctgaagagtgcgttgaagcaacatatgaatacattcatggcgaacaatatatatcagactccaaaacagttaaccaacaagcttacttttatgccagagacctctaagtccatctcaaggacacatttgtgtttaatatatattgcaccgtactctctaatattccatacttacaaaaacaatgatattgggtggaaaaattt

SEQ ID NO: 271899 - DNA, 450 bp, Glycine max
gtgaaatggctggttcaattggaagcggagggaacacaagcacgggtgtggagtggcacgtgcgacctccaaaccctaagaatcccatcgtcttcttcgatgtcaccatcggtaacattcccgccggtcgaatcaagatggaactcttcgccgatattgcccccaaaactgccgagaatttcaggcagttctgcactggggaatacaggaaagcaggactgcctgttggttacaagggttgtcaatttcatagagttattaaggattttatgattcaggctggtgattttgtaaagggagatggtagtggatgtgtttccatctatggactcaagtttgatgatgaaaactttacggccaaacacactggtcctggccttctgtcgatggcaaatagcggacaaaataccaatggctgtcagttctttataacatgtgcaaaatgtgact

SEQ ID NO: 271900 - DNA, 429 bp, Glycine max
cccacgcgtccggattgttgtgactcgttcttcttcgtcgttatcttcttcttttgttgtgtgtgtgtttgttttttctctcacctgaaaatgtcttgctgcggtggtaactgtggttgcggaagcgcctgcaagtgcggcaacggctgcggaggctgcaagatgtacccagacttgagctacaccgagtcaaccaccaccgagaccttggtcatgggagtggcaccagttaaggctcaattcgagagtgctgaaatgggtgttcccgctgagaacgatggctgcaaatgtggagctaactgcacctgcaacccctgcacttgcaagtgaggtgttggagagctaaagcttcaagcagagatggcccttataaataatgataaaaactatatgtagtttcaaaacttcaaaattatttagtatgtatta

SEQ ID NO: 271901 - DNA, 347 bp, Glycine max
aaaaaaaaaaataaaaatacaaataataaattttcaaatttcttaataaataaaaaaaataaaaaaatggtgccacttaaaaaaagagccagttccaacatttccttctccatttattgtcacttattccttttcttatctctccccaccattattactatctatgtcatttcttccttttcttacaacaattctatattcctttgcatccatctttatcctccacttctttttaattaaatcttttattctctttcttcctccataccttttttaatctcccattgttattaaaatatatcttcctttttttaatatgtttatttcctttcctttttataattttt

SEQ ID NO: 271902 - DNA, 429 bp, Glycine max
caaatatggaatctgaagcactgatatggggtgacaaactcatactgaagggattgtcagggcatgggtttcatggagcactaccggaagaaaggaagctaggccagaagttcgtggtagatgttgatgcatggatggatctgaaagcagctggcaaatctgatcacttatcagatacaattagttacacagatatatatgatatagctaaggaaattcttgaagggtcacctcaaaaccttctggagtcagtggcacaaaaaattgcagtgactactctgacaaatcataagcaaatatctgctgttcgagtgaatgttgaaaagcctcatgtggcagttcaaggtccacttgattacttaagcgttgagatacttatacgcagaatcgatttggtagaatagaaatttcataggtttgttctctctg

SEQ ID NO: 271903 - DNA, 383 bp, Glycine max
cttcagtgtagtctgtaatcatgtcaggcaagtatatcatttctgctattcttggatcatgtggagttgcatgggtttgtgattattatgtttcacacaaaaagctatttggaggttctacccctggaactattacaaacaatgagtgggcagaagagactgacaaaaaattgcatgcatggcctcctactgccggtccaccagtggtcatgaatcccataagtcgccaaaatttcattgtcaagtctctgcgctgagtaataatttttgttgattgattttgagttaattggtgcttgctcatgccatatgcttccataaatgatgataatgcttgaggtaaaactcttacagttcaattagtgctttgaactttaaacatg

SEQ ID NO: 271904 - DNA, 400 bp, Glycine max
gccacgcgtacgagaagaacaagtagtggtgaactaataaggagaagcatatggcttgctcaatgatctcttgcccagctggtaccactgtcaaccgtgccggtgccggcctggttgctccattcactggcctcatgttcatggctggcttccccaccaggaagaccaacagtgacattacctacattgctagcaacggtggaagagtgcaatgcatgcatgtgtggccaccaattggcaagaagaagtttgagactctttcctacctgccagaccttgatgatgcacaattggcacaggaagtagaataccttcttacgaagggatggattccttgcttggaattcgagatggagcacggtttcttgtaccgtgagcacaacagggcaccagtatacta

SEQ ID NO: 271905 - DNA, 395 bp, Glycine max
ctgcatctgcactaaaatatactattttgttgatttgtttttctgtttctgtcaatccttgcgaaagtctgcagaaaaaatgtcaaaagcaaacgcaaagaacaaatccccctccaccgagctccaccctccttacttcgagatgattgcggatgcgatatcgtccttgaaagaccgcacgggttcgagccagccagcgatagccaagttcatcgaggacaagcacagcaaagtgctccctcccaacttccggaaacttctctccgttcagttgaagaaactcgtcaaatcggagaagctttacaaggtcaaaaactcttacaaactttcttccgccacggacaaagagacccagaagaataccgaaaccgagcccaaacagaaggttgaaaaga

SEQ ID NO: 271906 - DNA, 443 bp, Glycine max
agaacaagtagttgagaactaagaaggagaagcaaatggcttcctcaatgatctcttccggagctggtaccactgtcaaccgtgccggtgccggcatggttgctccattcactggcctcaagtccatggctggcttccccaccaggaagaccaacaatgacattacctccattgctagcaacggtggaagagtgcaatgcatgcaggtgtggccaccagttggcaagaagaagtttgagactctttcctacctgccagaccttgatgatgcacaattggcaaaggaagtagaataccttcttaggaagggatggattccttgcttggaattcgagttggagcacggtttcgtgtaccgtgagcacaacaggtcaccaggatactacgatggacgctactggaccatgtggaagctgcctatgttttgttgcactgatgcttct

SEQ ID NO: 271907 - DNA, 432 bp, Glycine max
gatcgagataactagaaacagtgtgatgaaaatgaaggtccttgttttcttcgttgctacggttttggtagcatggcaatgccatgcgtacgatatgttccctctccgaatgaacactggctatggtgcccgtactccggaggtgaaatgcgcaagttggaggcttgctgtggaagcacacaacatctttggctttgagaccattcctgaagagtgcgttgaagcaacaaaggaatacatccatggcgaacaatatagatcagactccaaaacagttaaccaacaagcttacttttatgccagagacctcgaagtccatcccaaggacacatttgtgttcagtatagatggcaccgtactctctaatattccatactacaaaaaacatggatatggggtggagaaatttaactcgaccttgtatgatgaatg

SEQ ID NO: 271908 - DNA, 412 bp, Glycine max
cccacgcgtccgcccacgcgtccggagagagaaaaaatggcagagggtctcgttgtccgcggaaccatgcgcgcccacaccgacgtcgtgacggcgattgccactcccatcgacaactccgacatgatcgtgacggcgtcgcgcgacaaatccatcattctctggcacctcaccaaggaggacaagacctacggtgtcccccgccgccgcctcaccggacattctcacttcgtccaggacgtcgtcctctcatccgacggtcagttcgccctctccggctcctgggacggcgagctccgcctctgggacctcgcggctggcacctctgcccgccgcttcgttggccacaccaaagacgtgctctccgtggcgttctccatcgacaaccgtcagatcgtgtcggcctctcgtg

SEQ ID NO: 271909 - DNA, 356 bp, Glycine max
gcgcagaaagagaagcattagcaaaagcaagaattactagtctaagcagaaatggcctcttcagtgatggggtgtgtggccctcaaacctgcccctttcactgttgagaagtcctcatttagaggccttcccttcctctcaaggaactcctcttcattcagagttgttgccagtggtggcaagaagatcaagactgacaagccttatggaatttatggtggcatggctttgagggaaggagttgatgcatctggcaagaaaggaaagggaaagggcgtttaccattttgtatacaaatacggtgctaatgtctatggttacagtcctatctactacaccaatgactggtcttcaac

SEQ ID NO: 271910 - DNA, 400 bp, Glycine max
gtgaaagccgccggagcgttggggatggtgctgtccaacaccgccgttaacggacatgagctaacggcggatgctcatttattaccgggcacctcagttgtgctgaatgccggtgacgctattaaaaagtatttggtttgagatgcgaaaccaacggtgaagattttttttgagggaaccaaagtggggattcatacatcggcggtggttgctgcgtttagctcaagaggtgccaacttgatcacgcctcagatcctgaagccagatctcatcgcgccacgtgtcaacatgctaacggggtggtctaaagccgtgtggtccaccgtgttgtccgtagataacaggcgcgtggatattaacatcatctgtggcacctacatgtcgtgccctcacgtgagcg

SEQ ID NO: 271911 - DNA, 448 bp, Glycine max
gcataatcaaatcaaccatggctaccctcattgctcccatcaccttttcgcctggtttagatgcagaagctcttagaaaagctttccaaggatgggggactgatgagaagaccgttatagcaatattgggtcacagaaatgttcatcagaggcaacaaatcagaaagatttatgaggaaatttaccaagaggacctcatcaaacgcctagagtctgagctctctggtgactttgagagagctgtgtaccgttggatgctggaacctgcagatcgtgatgctgttttggccaatgttgccatcaagaatggcagcaaaggttaccacgtgattgtggaaattgcttgtgtgctttcagctgaagaggtcttggcagtgaagcgtgcctatcacaaccgttacaagagatctttggaagaagatgtagctactaataccacttgtgacat

SEQ ID NO: 271912 - DNA, 222 bp, Glycine max
cccacgcgtccgggtttttatttggatgagaaaagaaaatagaaaagggaaatgggttacgtcctatttttaagtgaaaaaaaaaaaaaaaaaaaaaaaaaaaaaaaaaaaaaaaaaaaaaaaaaaaaaaaaaaaataaaaaaaaaaaaatgggcgtaatatataatatatttatattttcgcataaataaattaatctttatttaatttaataaaaattta

SEQ ID NO: 271913 - DNA, 460 bp, Glycine max
cccacgcgtccgggaaatgaacggtgagtttctgaaaaagatgtttgagaagattgattgggaggcttttgttgatgcatcacgagcaatgggatacaccgagctacctgaggaggccgactcttccatgctggattctgatgaatttctgaacaggtttcaccatgctctcttggaactccaccttgaagaaggtgtccttgtttgccctgagaccggacgtcgctttccagtcagtaagggcattccaaatatgcttcttcacgaggacgaagtctgagttttgtttttaatcatcaccttcacctatttagtggcactaggtttattgacactctatttaagaatgctggtaagggaactgcaatcaaaatttatagttgttgtgggcgtcaatattatcttccttttgtcgacaaatgttgtatcctttggctgggatatgctggcataatttttg

SEQ ID NO: 271914 - DNA, 438 bp, Glycine max
gcagcagtaatttgattggtaaagggcattttggagagaggggagggagaaagatattcggatcgaggccttcttataaaaacacgagtaaaacgatatgtcgggtaagggtttgaactaaattgtgagaaacaacagagaaagtaagcaagaaaccgaagagaagaaaaaatgccgtgcctcaacctcaacaccaacgtgtccctcgacggcgtcgacacctcttccatcctcgccgaagccacctcctgcgttgccaacatcatcggcaaacccgcggcctatgtgatgattgtactgaaaggatcagtacccatagcttttggtgggaatgaacagccagcagcttatggagaattggtgtccattggtggtcttaaccctagtgtaaacaaggaacttagtgctgcaattgcttcaattctggaaaccaaattg

SEQ ID NO: 271915 - DNA, 279 bp, Glycine max
gtaattgagtttaaactatttgacatttgatcaaatttctcttaattgcgcgtacatttgatgaaacgttggagaagacactgataagtatcaaaaggattactaattatcaatatctcttatattggctgacctttgggaacaacttgatctttcagccacatgtaaataggaaccaacacataccatgtcgctgccaaggcacccaaaacgaagcgcagtgcaaagacaaaaggattaacgggcttttcaacatcttcttcctttggaccaagctgc

SEQ ID NO: 271916 - DNA, 427 bp, Glycine max
ccacgcgtccgtccacgcgtccgcccacgcgtccgcactgcacctggaccccacattagaggaaatacattgagggcatactccataggtgacaagcaagttgatcttttacttcctggtactgcaaggttgagagtgcaattaggagtaaacatgccagctcaagcaacacgcaaacttcaggaggataaggtggaagaatcagaagtagagctttttgaggtttatgatgtggtcctatacatgggcataattgatatattgcaagaatacacagtgaaaaagaaacttgagcatgcctgcaaatcactgcaatatgaccctatgactatttcagtggtggaaccaaagacatatgctgaacgtttcatcaatttcatggagaaaaaagttttccctgagccagaaacttcttgaatatggatat

SEQ ID NO: 271917 - DNA, 328 bp, Glycine max
cgcgtccgctttttgttaagattccaaatcatggcttctcttgctttatccactgctgctacttccctgggcatgggataaatgctaatagaccccatcaacctcattgtttccacaaggccatcttcatcttcctctagccctgcctccttcaagactgtggctcttttctccaaaaagaaagctgcaccttcaaaaaaagctgcagcttctgctcctgccaatgatgagcttgccaagtggtatggtcctgacagaaggatcttcttgcctgaaggtcttttggacccatcttatatcccttattacttttacccgaaaattcccc

SEQ ID NO: 271918 - DNA, 339 bp, Glycine max
cccacgcgtccgcaattccaatcaccaattcaaaacccttcttcccttggaacaaattgagagatcgtgatggcaccaaaggcggagaagaagcccgcagaggagaagaagtccacggtgggagacaaggctccggcggagaagaagccaaaggccggaaagaagcttccgaaggagggaggcgccggcggagaagggaagaagaagaagaggaacaagaagagcgtggagacatacaagatctacatcttcaaggttctgaagcaggttcaccctgacattggtatctcaagcaaggccatgggaatcatgaacagcttcatcaacgacatcttcgag

SEQ ID NO: 271919 - DNA, 249 bp, Glycine max
gaaggcgtcttcataaacgcctttcttctccgtttccgtttcctcgttcgaattcgctttttgatctgcgaaaatgagagagtgcatctcgatccacattggtcaggctggtatccaggtcggaaatgcttgctgggagctctactgcctcgagcacggcatcgggcccgatgggcaaatgccaagtgacaagacagttggcggtggtgatgatgctttcaatactttcttcaacgagactggtgcttg

SEQ ID NO: 271920 - DNA, 385 bp, Glycine max
ggagaagcaaatggcttcctcaatgatctcttccccagctgttaccactgtcaaccgtgccggtgccggcatggttgctccattcactggcctcaagtccatggctggcttccccaccaggaagaccaacaatgacattacctccattgctagcaacggtggaagagtgcaatgcatgcaggtgtggccaccagttggcaagaagaagtttgagactctttcctacctgccagaccttgatgatgcacaattggcaaaggaagtagaataccttcttaggaagggatggattccttgcttggaattcgagttggagcacggtttcgtgtaccgtgagcacaacaagtcaccaagatactacgatggacgctactggaccatgtgg

SEQ ID NO: 271921 - DNA, 406 bp, Glycine max
gggtcttctccaatccgaattagatcgccaacattctctctctcgtcgatactatttccgcgccttcctcctcggcttcttccttctcttctctctcttctctctcatcctctggtgtgccagccgacccatgaagcccaaaatcctcatcaagagtataaaatttgaccatctcagagttcaagctggttccgattccagcggagtagccaccgacatgatcaccatgaattccaccgtcaaattcacttatcgcaacactggaacattctttggggtccatgtcacatccacacctttcgatctctcctattcagatattgtaattgctacgggaaatgtaagtatatacacacaaattgatcacattattaatttaattatttgatttgacttgaattgatgt

SEQ ID NO: 271922 - DNA, 402 bp, Glycine max
attcatttccatgatctccctctgtctgaccctttttctgttccacacttgcactggcctaccatttgtggacctcaatttccatgaagtggatgttatgaccaaaagggtttgcaccaagagcattggggagtgcttgagcttgacagagccggagatggattcggagaccaacagaagagttctggcaatgcagaaaaagtacattagctatgacacactcaagagagacatggttccctgtgatagggctggagcttcttactacaattgtcatgcaatacgagcaaatccttataatagaggctgtgaggtaattactgcttgtgcaagaggtcaagacatcaaaacttgatggaggaaagtcttctcccttctcttttgcccttcccctttctcttt

SEQ ID NO: 271923 - DNA, 367 bp, Glycine max
tccacgcgtccgaacacgaaagcatagccaaaaccttttttcgaagtctctgattttcctaatggctccggcaaaggcagagaagaagccggcggagaagaagccagtggcggagaaggcaccggcggagaagaagccgaaggcggagaagaagatctcgaaggaaggagggagcgagaagaagaagaagcgcacgaagaagagcgtggagacctacaagatctacatcttcaaggtcctcaagcaggttcaccccgacattggtattttcagcaaggccatgggcatcatgaacagcttcatcaacgacatcttcgagaagctcgcccaggaagcgtcgcgtttggctcgctacaacaagaagccc

SEQ ID NO: 271924 - DNA, 314 bp, Glycine max
agataattacagagtactatcctcatggtagtaggggtccggttgtggctctccgtctggctcccagacacgctgtgctgttgcctgaccttattactcacgttgacgaatatgcaccaccggtgataaatccgaaggctgctaataagatctctaatgaaggagggagcgagaataataaaaagcgcacgaagaagagcgtggagacctacaatatctacattttttaggtcctcaagcatgttcaccccgacatttgtgttttcagtctggccgtggtctttattaacagcttcatcaacgacattttttag

SEQ ID NO: 271925 - DNA, 408 bp, Glycine max
aggcgacgcgtcaggcgtcctgtagctggtattacaacaccagattccgtgatgggtacctgcgcatagctcaaatgcgggcgcgccacggtgccatctttaacttaaactgtatcgagatgcgcgatcacaagcagacgcactaggccctttgtgcacctgagaagctggggaagcaagtggctctggcaacgcagaaggcacaggttccacttgcctgggaaaacgcgctgacacggtacgacgagtatgcacatgagcagatcataaaggcatcacaaatggatgttgatggtgagtctggggatagagagatgtgtgcacttacatacctgaggatgaatccgcatttgttttgaaccaaataactggaggaaagttgttggggtttgtgaaaaagatgaaaag

SEQ ID NO: 271926 - DNA, 335 bp, Glycine max
gagcgagcgagcagtttcaaagagaggatttgggattgggaaggcgagggattgcgctgcgtctcttcctcttctctttcgattcatccctcattcataatcttccaatccaacaacctcagcctcacactcacacatacacacatctgaacgcgtatcgtccctcccatggcttcaaagcgcatcctcaaggagctcaaggacttgcagaaagacccaccaacttcttgcagcgctggtccagtagctgaggacatgttccattggcaagcaacgattatgggtcctgctgatagtccttatgctggaggtgtattcctagtcactattcactt

SEQ ID NO: 271927 - DNA, 425 bp, Glycine max
tccacgcgttcgcccacgcgtccgctgcagggtattacaacacccgattccgtgatggctacctccccattgctcaaatgctggcgcgccacggtgccatctttaacttcacctgtatcgagatgcgcgatcacgagcagccacaagaggccctttgtgcacctgagaagctggtgaagcaagtggctctggcaacgcagaatgcacaggttccacttgcctgcgaaaacgcgctgccacggtacgacgagtatgcacatgagcagatcataagggcatcacaattggatgttgatggtgagtctggtgatagagagatgtgtgccttcacatacctgaggatgaatccgcatttgtttgaaccaaataactggaggaagtttgtggggtttgtgaagaagatgaaagaaggggagagtgcacac

SEQ ID NO: 271928 - DNA, 433 bp, Glycine max
acgcgtccgacataaccctggtctctgtctactcttcaattattcccaacctctcaccttttcatctgggtcttccttacctttgaccagagacagagcatctctcacattcacaacgaacgtttgctattcatcatgacatggtgaaagcaatcagagttcacgaactcggtggccctcaagttctgaagtgggaggatgtggaaattggagatccaaaagaaggcgaggtccgtgtgaggaacaaagccattggggttaatttcattgatgtctactttcgcaaaggagtttacaaagcccctgcttttcccttcactccaggtatggaagctgttggggttgtgacagctgttggtgctggactcactgctaggcaagttggagatcttgtagcttatgcaggtcaaccaatgggttcatatgctgaaga

SEQ ID NO: 271929 - DNA, 348 bp, Glycine max
attctcaaggatccacaagatccttccactccaaatgcagtttcatacaaaacagcagcgagagagaaactgattaggcagggatacaacattgttgggatcattggagaccaatggagcgatctcctcggaggccacagaggcgaaagcaggacctttaagcttcctaatcccctgtactacattcagtagttccttcacctctcaacaatctagcttgctcctatctatctatatgtaataagatgcgttcaaataggggcactagcttcactttatgttgtttcagctgtgtgtcaacaagtcatgtaagagacttcactatgttgttttctctttcgtggcttt

SEQ ID NO: 271930 - DNA, 397 bp, Glycine max
ccagaatcctggtctctgtctactcttcaattattcccaacctctcacctattcatcttcttcttccttacctttgaccagagacagagcagcactcacattcacaacgaacgtttcctattcatcagacatggtgaaggcaatcagagttcacgaactcggtggccctcaagttctgaagtgggaggatgtggaaattggagatccaaaagaaggcgaggtccgtgtgaggaacaaagccattggggttaatctcattgatgtctactttcgcaaaggagtgtacaaagcccgttcttttcccttcactccaagtatggaagctgctggcgttgtgacagctgcgggtgctggactcactgctaggcaggttggagatcttgtagcttatgcaagt

SEQ ID NO: 271931 - DNA, 301 bp, Glycine max
aggccacgcgtacgaatagctgcacatcatgtgaatacagaaaaaacatggtatgtcagtgatgctacagacaaagttcttggaagactagcatcgaccattgctattgacattcgagggaaaaacttggcaacctacacacccagtgtggacatggatgcatccgtcatcgcggtaaatgcatacaaggttgctgtatctggcaaaaagaggacccaaaagctttacaggacgcaactctggacaacctgttggtatgaccgtggagacatttgcccagctgcaaaaaagaattcctgaa

SEQ ID NO: 271932 - DNA, 387 bp, Glycine max
cccacgcgtccgcaatttttctctcaaccggcccaatttagcataagcccagcatggccaccgcaacagcagcagccacctcgtccttcatggggacgcgcctcctggaggcccattccggggcggggcgggtgcaggcccggttcgggtttggcaagaagaaagccgccgccccgaagaaagtttccagggggtcgggctctagctccgataggcccctgtggtatccgggcgccaaggcgcccgagtacctggatgggagccttgtctgagactacgggttcgacccatttgggctagggaagcccgccgagtacctgcagttcgagttggactcgctggaccagaaccttgcgaagaacgtggctggggacatcattgggacca

SEQ ID NO: 271933 - DNA, 327 bp, Glycine max
gctctatcttcccaaaatcatataattctctttcatctgaattttccctttcaaatctcttcctttgaagttttcgtagttctctgcatcatggatatggaacgcgtcttcgagtttcctcacactcacatggatcggcgcccgagaaagagagcgagattgggctgggacatccctgatgtccccaaggctcaagtaggattgttttgtggacaagatgttgggactatttcaagctttgctccttcaaggggtccctcagaaaataccactagttctctatttgttaagccagttgctcgaaatggttctccccctttggcgaga

SEQ ID NO: 271934 - DNA, 402 bp, Glycine max
  unsure (1)..(402): unsure at all n locations
cccacgcgtccgcacaatccgaaggtggatggagacactgaaaacaatgttgcggagttactgtcagaagaactaactctacgggaaactgaagctttgaaaaatcagcatcgtgctgacatggctctgctggagtccaagaagattgcatcccagtatcaaaaagaagcagacaagtgtaattcaggaatggaaacatgcgaggaagccagggaaaaggccgagatggcactagtggcacacaagaagctcactgcattgtgggaactaagagcttgtcagaaaggatggaacgaagggcttgccaaatctaaaaaacagtctaaagggaaagtacagactgcttatacttggtgtgacctccatctaantattgcatagtagtttcagcggaatgatatt

SEQ ID NO: 271935 - DNA, 375 bp, Glycine max
cccacgcgtccgcaatttttctctcaaccggcccaatttagcataagcccagcatggccagcgtaacagcagcagccacctcgtccttcatggggacgcgcctcctggaggcccattccggggcggggcgggtgcaggcccggttcgggtttggcaagaagaaagccgccgccccgaagaaagtttccagggggtcgggctctagctccgataggcccctgtggtatccggtcgccaaggcgcccgagtacctggatgggagccttgtccgaaactacggattcgacccattttggctagggaagcccggcgaataccttcatttcgagttgtactcgctggaccagaacctttcgaagaacgtggctggggaca

SEQ ID NO: 271936 - DNA, 216 bp, Glycine max
ttctatcgcacgtggctacatactatgatagagatggaaagacttttcataccacagtagggggcatgaaatatcccgtgactatcaacctatggcaaccagattaaaatgctattgaatcggctacatgtttgcaagcccatcacacagaggatgcatttcgtgttaattattggacaccaaacttcctaataagagtagctagttattccacat

SEQ ID NO: 271937 - DNA, 238 bp, Glycine max
gggaaaaaccttgtttgcagggtactacaaacgtgaagacctcactaaagaggttctgattgatgaatggttccatacaggggatattggagagtggcaacctaatggaagcatgaaaattattgatcggaagaagaatatatttaagctttcacaaggagaatatgttgctgtcgaaaacctggagaatatttacggtcaagtttttttctattgaatctattttggtttatggaaa

SEQ ID NO: 271938 - DNA, 209 bp, Glycine max
cccattctttggcgagcccccgtcctacctcactggcgagttcccaggtgactaccgctgggacactgctgggcttttggccgacccataaaccttcgccagaaaccgtgagctctaattgatccactccatgtgggccatgctcggggccttgggctgcgtcttccccgaactattggcccgcaacggggtcaagtttggagaagctg

SEQ ID NO: 271939 - DNA, 408 bp, Glycine max
gtgatttcagtgagtgatcggtgttcacttgatctcatcataatcgtcagcgtcaattgaagaagatgccgatcagaaacatcgccgtcggaaggcctgaagaggcgactcaccccgacacgttgaaggcggctttggctgagttcatctcaaccttcatcttcgtgttcgccggctcaggctccggcatcgcctacaacaagctcaccgacaacggcgctgccacccctgccggcctcatatccgcctacatctcccatgcattcgccctcttcgtcgccgtctccgtcggcgccaacatctacggcggccacgtctaccccgccgtcaccttcggcgccttcgtctgcggcaacatcaccttcctccgcggcatcgtctacgtgatcgcccagctcctcggctcca

SEQ ID NO: 271940 - DNA, 351 bp, Glycine max
cgtgacgcgtgggcgccgatcacctaccgcgtgccgatggcctccgcacaggtgaagtccgccgtgctgctcgccggccttaacacgcccggcatcacgacggtcatcgagccgatcatgacgcgcgatcatacggaaaagatgctgcatggctttggcgccaaccttaccgtctagacggatgcggacggcgtgcgcaccatccgtctggaaggccgcggcaagctcaccggccaagtcatcgacgtgccgggcgacccgtcctcgacggccttcccgctggttgcggacctgcttgtttcgggctccgacgtcaccatcctcaacgtgctgatgaaccccacccgcacc

SEQ ID NO: 271941 - DNA, 384 bp, Glycine max
cggacgcgtgggcgccgatcacctaccgcgtgccgatggcctccgcacaggtgaagtccgccgtgctgctcgccggcctcaacacgcccggcatcacgacggtcatcgagccgatcatgacgcgcgatcatacggaaaagatgctgcagggctttggcgccaaccttaccgtcgagacggatgcggacggcgtgcgcaccatccgcctggaaggccgcggcaagctcaccggccaagtcatcgacgtgccgggcgacccgtcctcgacggccttcccgctggttgcggccctgcttgttccgggctccgacgtcaccatcctcaacgtgctgatgaaccccacccgcaccggcctcatactgacgctgcatgaaatgggcgccg

SEQ ID NO: 271942 - DNA, 233 bp, Glycine max
gatcacctaccgtgtgccgattgcctccgcacatgtgaagtccggcgtgcttctctccgtccttaacactcccggcattacgacggtcattgagcccatcatgacgcgcgatcattcggaaaagatgctgcatggctttggcgccaaccttaccgtctagactgatgccgacggcgtgcgcaccattctccttgaaagtccgcgttagctcacctggcaatgtattgactttc

SEQ ID NO: 271943 - DNA, 187 bp, Glycine max
ctgacacgtgcgtatgactgatgtgagcctttcatgccgcacggttttatttaacgcatgaggcgctcctcaaaacgcgcatgctgtaaagttcttactcttacccagacaatctgtgcgaccgggtagtatcaagttgggtcgcgtgatgaggatccgacccgttctcgctgcgcctgatcgcata

SEQ ID NO: 271944 - DNA, 378 bp, Glycine max
gctaatcgagagatggttatggatttctgaaagatcaccttcccagccgtatccagggtggacctgaccagtgccggcgtggttgctccatgcaccggcctcaaatccatggctggcttccccactaggaagaccaacagtgtcattaccttcattgctagcaacggtggaagagtacaatgcatgcaggtgtggccaccaattggcaagaagaagttcgagactcttttctacttgccagacctcgatgatgcccaattggcaaaggaaggcgtataccttctaaggaaaggatggattccttgcttggaattcgaattggaacacgggtttcgtgttccgtgagcacaacaggtcacctggatactttgatggacg

SEQ ID NO: 271945 - DNA, 425 bp, Glycine max
gttgagaactaagaagaaggaaatggcttcctcaatgatctcctccccagctgttaccaccgtcaaccgtgccggtgccggcatggttgctccattcaccggcctcaaatccatggctggcttccccacgaggaagaccaacaatgacattacctccattgctagcaacggtggaagagtacaatgcatgcaggtgtggccaccaattggcaagaagaagttcgagactctttcctacttgccagacctcgatgatgcccaattggcaaaggaagtcgaataccttctaaggaaaggatggattccttgcttggaattcgagttggagcacggtttcgtgtaccgtgagcacaacaggtcacctggatactatgatggacgctactggaccatgtggaagctgcctatgtttggctgcactgatg

SEQ ID NO: 271946 - DNA, 338 bp, Glycine max
cccacgcgttcgcagctcttgacccaaattcaacggagatacatcataaaattacaattagagctagaaccaagaaatttcatagaagagtctatgaacgcagaggcagtacaaggtgttcagatttaagtgagggaccaccatgcactgggtttgtggaaggtatggctccggttttctctcgatctgcctggtactgtacttggcatcttatacagaatgaccttgtccatggatggggagtggatatgaagctaggatattgtgcacagggagatcgaactaaaaaggtgggagttgttgacagcgaatatgtttttcaccagggaatacaaact

SEQ ID NO: 271947 - DNA, 253 bp, Glycine max
cttccgcttctcttctctgtctaaggggtgcccttagatcacattgaacaatggttaaggctgtggccggtcttggcatcagtgagggtgtcacatggaactattcacttcgctcaggagggaagtggtccaaccaccttttactggatctcttgctggtcttaagcctggtcttcatggttaccatgtccatgccttgggggacactaccaatggttgccttttaactggatcacattttaatcctattttc

SEQ ID NO: 271948 - DNA, 245 bp, Glycine max
gaacgtcgtgatgcgaaggggcttcctcaatgatctgatgccgaaatgctaccagcgcggtcccggccggggccagcatggttgctccattcaccggcctcaaatacattgctgtgctccccacgaggaacaccatacttgactttgcctacattgctagcaacggttgaagagctcaatgcatgcatgtgtggccaccaattggcaagaagaaggtcgagactctttcctacttgccagacctt

SEQ ID NO: 271949 - DNA, 345 bp, Glycine max
cggacgcgtgggcaggtggtggtggaggaggagtagtagctgtggcctcctctgtcttcttgtgccctggtagcttctccttaatcttgtcgaggagaagaaaggcttattagaaaagatgaaagagaagcttcctggttatcactccctgacagaggaggaaaaggaaacggaaaaggagagtggtgctcattgatatttaagattgagacaaggcttttttgttggttggagatgcatgactgtggtgtgctttgttttcatttcatcatatgacagccttgtgggtttctttggtgtttcttgatgcatacttaatacactccattattgtggatgtatctc

SEQ ID NO: 271950 - DNA, 430 bp, Glycine max
cgccacttttgaatctattgaatcaacaatcatgtcggacgaagagcaccatttcgagtgcaaggccgacgcctgagcctccaaaacctaccctcagcaagccggtaccatccgcaagaacggctacatcgtcatcaaaggccgcccctgcaaggttgtggaagtttcgacttccaaaactggaaagcacggtcacgctaagtgtcactttgttggaattgatattctcactgccaagaaacttgaggatattgtgccctcttctcacaactgcgatgttcctcatgtgaatcgtactgattaccagctcattgatattgctgaggatggatttttgagtctgcttactgaaaatggtaacactaaagatgacctcaagctttccactgatgagagtctgctcactcagacttaagatggatttgctgag

SEQ ID NO: 271951 - DNA, 288 bp, Glycine max
  unsure (1)..(288): unsure at all n locations
cccacgcgttcggggagtgaccaggaatttctaccctggcgaccaacttccattatggcacgaggaaatggagccccacaactccttgctagacattcttggtgccccagagccgatgagcatgtgatgtgaagaagttgccgcgtttcagaaatgtttcctgatagattatatcttgtcttctctcttttatgaactagctaacgatttgtgtagtcaattactttgtttggttggatatttttgatgggtgagttatatccctcttgttaaaaatattattnttta

SEQ ID NO: 271952 - DNA, 368 bp, Glycine max
tcatctacacgttcgctagttttagatgagcgagctctgtgcctcacacttgcactgtcctggcatttgtggacctcaatttccatgaagtggatgttatgaccaaaagggtttgcaccaagagcattggggagtgcttgagcttgacagatccggagatggattctgagaccaacagaagagttctggcaatgcagaaaaagtacattagctatgacacactcaagagagacatggttccctgtgatagggctggagcttcttactacaattgtcatgcaatacgagcaaatccttataatagaggctgtgaggtaattactgcttgtgcaagaggtcaagacatcaaaacttgatggaggaaaagt

SEQ ID NO: 271953 - DNA, 300 bp, Glycine max
cccacgcgttcgtccacgcgttcgcaaaaactaagttcatttcttgtgctttgctttattcctcaaaaccaaacatgtcgaacacatgcggcaactgtgactgcgctgacaagactaactgcaccaagggaaacagctatggtgttatagtagagactgagaagagctacatcgagactgttgacatggatgttccagcagctgagcatgatgggaagtgcaagtgtggcactaactgcacttgcacggactgcactttgggccattaaggaatatgtatgaaaatgtaattgccatgtg

SEQ ID NO: 271954 - DNA, 195 bp, Glycine max
ctacgcccttgcgtaaacaatcaaccactcttcccttcacgcgcccgagcaagctcagggtagaggtttaaaaaacggagcagcctcctgcatggcttacctcttcctcatccctggctggcaaggccgggaatctgggtccatcaacccccgaagtcgggagggtcaacattaggaagaccgtcaccaatcctg

SEQ ID NO: 271955 - DNA, 431 bp, Glycine max
cccacgcgtccgcccacgcgtccggcttttttcatttgggcacacatggggttaaaaagttaatgggtctttaaatctttttatattattttttatttctacatataaaaaaaaaaatataaaaattgttgtattggactgcccataactttatgtcacgggctacttatatattactttcactctctctcctattatgagtcaaagctcatgaaaaaattgttgtttttttacaggaggggcttgtggatatggaaatttgtacagccaagggtatggcactaacactgcagcactcagcactgctctattcaacaatggcatgagttgcgggtcttgctatgagatgaaatgtgacactgaccccaaatggtgcctccccggtagcataatcgttactgccacaaacttttgcccccctaactttgcat

SEQ ID NO: 271956 - DNA, 426 bp, Glycine max
attctcctcatcttcctctttttctcaaccaaaaggggttcaattctagctagttctattacatcgtccgcgaccatgaacatggcgatcgtgcttctgttcatggttttcgcagtttcatcagctttagacatgtcaataatatcacatgacaacgctcatgcggatagggccacgaggcgcaccgacgacgaggtgatgtcaatgttcgaggagtggctggtgaaacacgacaaggtgtacaacgcgctcggtgagaaggagaagaggtttcaaatcttcaagaacaatctgcgctttatcgatgaacgaaactctctgaaccgaacctacaagttgggactcaacgtgttcgctgatctcaccaatgcggagtacagagccatgtacctgcgaacctgggacgacggtccgaggttggacttg

SEQ ID NO: 271957 - DNA, 422 bp, Glycine max
  unsure (1)..(422): unsure at all n locations
gaaacaatggccaatgtttcaattccactcccacgaaacggtttctccaaacccaattactcgacaaaacgcccatgtttcaccccttcagcttcaacactcagaatttcttgctctggagtggctgagtttgatggatctcatcagaaaaaaggaggtttgtttaatttcaatggaatcaagggcgtggcttgtggtattcttgcagcttgtgctgttacttctgctgcatttcctgttactgctgctactcagaggcttcccccattgtcaactgagcccaatcgctgtgagcgtgcatttgttggcaacacaattggtcaggcaaatggtgtatatgataaaccattagatctccggcaatgtgatttcacaaatgagaaaaccaaccttaangggaagtccctgtctgctgcactcat

SEQ ID NO: 271958 - DNA, 150 bp, Glycine max
aaggagaagcaaatggcttcctcaaagaccgcttccccaactgcaaccactggcaaccacgccagggccggacaccttaacttaaacactgacaatatcttgctctggggctaccccaccagaaagaccaacaaagacatgacctccatt

SEQ ID NO: 271959 - DNA, 380 bp, Glycine max
caggaataaaaatgagggctatttcgttgcttctgaacttttgaagaagatatgttcaactcgggtaggccttgagacaatattcaagtcccctgccctgctaaaacgattgcacagtcttgttgaggaccttacacggaagggaatttactagaaaagaaattctaaggctcctaggcctattaaagaaaacagagagagaagattgaaggaggctgctgagattctgaagctgataacaagcgcttgaaacttttttttccccccatcaagttctgatgtgcgattgtagaatatatatgcaaggaggtcaaagtttgtgcgcttctaatttacattctttcctcatctcgtggatttggaatgagcatttttttttt

SEQ ID NO: 271960 - DNA, 341 bp, Glycine max
cccacgcgtccggtttggctgtagctcagagctcgctctcctcgccgtttctctcatcgctagtttcaagtgtccttgtgacaatggtgagggttagtgtgttgaatgatgctctgaagagcatgtacaacgccgagaaacgggggaagcgccaagtcatgattaggccgtcctcgaaggtcattataaaattattctgggtgatgcaaaagcttgggtacattagtgagttcgagtatggtgatgaccacagggctgggaaaatcgggggtgaattgaatggcatgctgaatacgcgtggggttataagcccctcgctttgataaaaaaagggcgggccc

SEQ ID NO: 271961 - DNA, 364 bp, Glycine max
actctcctccacaacttcacaactcacttcccttccttccctcccttcttcctcctctccactttctcgcaaatttcccctcactttccgggaaaaaaacagaactccaatcacacctcacaagctccctttttcagcaaggcctaccaccaccagagtggtgttggtgaagtctcaggccacagcacctgcttcttctgaggctgtggcagtgacacctgtgtcttctgagatgaaggcatgggtctatggggaatatgggggtgtggatgttctgaagctggactccaatgttactgtgcctgatgtgaaggaagatcaagttctaatcaaagttgttgctgctgctcttaaccctggtgat

SEQ ID NO: 271962 - DNA, 405 bp, Glycine max
caaaccaacacctttcaaaatgcaaacatccttaacctttgctgcccccaacgttgtgcctttggcacaaacaaagagtttctcccatgttgccatcttccctaccaatttgaaagccccacgctcttgacctcgttactctccgatcagggttgcaatcgtggagcctgacacttcaactgtggactacaactctgcgttctcagtgtttccagcggaagcatgcgaaactgttggaggggaagcctgcatggcagaaatgtaccctgaagtgaagctacagccagaagctaagacaccacgagttgttacagagaacgttgagagagagtatcttgaatacgatgatcctaaaacggtatttagaggagaggcttgtgatgatcttggaggaactttttgtga

SEQ ID NO: 271963 - DNA, 425 bp, Glycine max
caagatgtttctccacattgtgttcctccttttccttctctcatccacttcccatgccactgtccaagacttctgtgtggcagacctcaaaggtgcagacacccctgcaggctacccctgcaagccacctgctaatgtcacttcagatgactttgtgtacactggcttagctgaagctgcaaatgtcacaaacataatcaatgctgctgtgaccccagcttttgttgctcaattcccaggtctcaatggccttgaactatctgcagcaaggttggaccttggtcctagtggtgttatcccactccacactcatcccggtgccaatgaactactcattgtgcttcaaggtcacatccttgctggattcatatcttcaggtaacatattttatcagaaggtgctgaaaaagggagagctcatggttt

SEQ ID NO: 271964 - DNA, 425 bp, Glycine max
cccacgcgtccggaggttcaaagagtcagaactcattcactgcagatgggccatgcttgctgttccagggattttggttccagaggcattgggcttaggcaactgggtaaaggctcaggaatgggcagcagttcctgggggccaagcaacctacctaggcaatccagttccatggggcaccctacccaccattctggccattgaattccttgctatttcctttgtggagcaccaaaggagcatggagaaggacccagagaagaagaaataccctggtggtgcttttgatcctttgggatactctaaggaccctaaaacattccatgaatacaaagtcaaagaacttaagaatggacgtcttgctttgttggcttttgtgggattctgtgttcaacaatcagcttatcccggcactggacctttgg

SEQ ID NO: 271965 - DNA, 419 bp, Glycine max
tttcaaaatgcaaacatccttaacctttgctgcccccaacgttgtgcctttggcacaaacaaagagtttctcccatgttgccatcttccctaccaatttgaaagccccacgctcttcacctcgttactctccgatcagggttgcaatcgtggagcctgacacttcaactgtggactacaactctgcgttctcagtgtttccagcggaagcatgcgaaactgttggaggggaagcctgcatggcagaaatgtaccctgaagtgaagctacagccagaagctaagacaccacgagttgttacagagaacgttgagagagagtatcttgaatacgatgatcctaaaacggtatttagaggagaggcttgtgatgatcttggaggaactttttgtgagaccgagtatcagaagggtgtctact

SEQ ID NO: 271966 - DNA, 410 bp, Glycine max
  unsure (1)..(410): unsure at all n locations
gatatattaaaccatagtttcacatcaatgaggtgacatgtcttttcaagcaggaatttagaacataaattggtggggttatgttgaaagtaaaaattctttgaatttttgtgtttgtctttgtgctggattgtatttacatttaatgttctggaaggtcgtgtgttttgttgctttccgttgactttgccttcctcttgcctcacagctgaactgaagaagaaacagtccaaaccaaagaggccaaccatcaagtcacttttcgaaacaccagaggcgtccgatacgtctgcaaatgatcaacctgctcaaggaagctttttgaagctcttgccaccccagttagaggtatctcctcatcgcgacaagaatctttctnccacgtcctaacaggccccaaccacatgatc

SEQ ID NO: 271967 - DNA, 389 bp, Glycine max
ctctaatcactctagctgttgcaaatttctactatttttcaatggcttctgcagatgttgagttccgttgctttgttggtgggcttgcttgggtcaccggcaacgatgccctcgagaaagccttttcaatctacggcgacatcgttgaatcgaaggttatcaacgaccgtgagactggaaggtccagaggattcggatttgtgaccttcgcctcagagcagtcaatgaaagatgcgatcgcaggaatgaacggccaggaccttgacggccgtaacatcactgtcaacgaagctcagacccgcgccagccgtggtggtggtggaggcggtggtttcggaagtggtggtggatacaaccgcggtagcggtggatatggtggtgggtgtggc

SEQ ID NO: 271968 - DNA, 191 bp, Glycine max
gccacgcgtccggcccgccgtccgtatgctgaccagcagtagggggcctcggccccccaaaggcacgtgccgttggtgaccctcgtgaggcggataatccctacgagacgccgtgaaacgcaaatcctatcgagcggcgtgtagaatcttttgcagactaaataaagtgacatgggctgaatttgaatgga

SEQ ID NO: 271969 - DNA, 173 bp, Glycine max
cccacgcgttcgtgaaaaaggagagagcatttattggaggacgatcgatgggcactacagtgtgcgcagttgctgagcctgacagacctttatggtttccaagcagcacccctccttcatggcttgatggcactctacctggatactttcgcttttaccctcttggtcttgga

SEQ ID NO: 271970 - DNA, 433 bp, Glycine max
tcgcccacgcgttcggagaaagggtgtgagaatggagagcaaagaggaagatgtaagggttggagcaactaagttctcagaaaggcaaccaattggtacagcagctcagggtgacaaggactacaaagaaccacccccagcacctttgtttgagcctggtgagctaaagtcatggtccttctacagagctggaattgctgagtttgtggccactttcttggtcctctacattaccatcttaactggcatgggtgtcaacaggtcacccttcaagtgggcctttgttggcattcaaggcattgcttgggcctttggtggcatgatctttgcccttgtctactgcacttgctggaatttcaggggggacacaattaaccccagctgtgactctttggtttttttttggcaaggtaacctgtccctcacatgggcg

SEQ ID NO: 271971 - DNA, 307 bp, Glycine max
gatatattaaaccatagtttcacatcaatgaggtgacatgtcttttcaagcaggaatttagaacataaattggtggggttatgttgaaagtaaaaattctttgaatttttgcgtttgtttttggctttttgtttttcttttttgtttgttttctttttttttttttttttttttttttttttcttttttttgcttttttttttttttttttttcttgttttctttttttttttttttttttttttttttttttctttctcttttttttgtttttttttttttcttgtttttttattttttttgtttt

SEQ ID NO: 271972 - DNA, 339 bp, Glycine max
  unsure (1)..(339): unsure at all n locations
ggaaacgacattgaacttgtttctaggtcatgtgctctcattaaccaaatgtcatgttaagaacaaggatatccggaagtttcttgatggtatttatgtcagcgagaagggaacaatattggaagagtagaggatgaaaacatttgtattggtttttggtttggagacccttttttggtaacttgtcaaacttttccttttgggattattttttgttaattttttatttctatatatgctttggtattgaatattctctggaattagtaatctttcatgcatttctatcanaaaaaaaatttaaaaaatattaaaattaaattataattatattattat

SEQ ID NO: 271973 - DNA, 337 bp, Glycine max
ggaaacgacattgaacttgtttctaggtcactgtgctctcattaaccaaatgtcatgtgaagaacaaggatatccggaagtttcttgatggtatttatgtcagcgagaagggaacaatattggaagagtagaggatgaaaacatttgtattggtttttggtttggagacccttttttggtaacttgtcaaactttttcttttgggattattttttgttaattttttatttctatatatgctttgcgtttgaatattctctggaattagttattctttcatgcatttctatcttataaaagttttttttttttttttttttctgtttgtttttttatt

SEQ ID NO: 271974 - DNA, 386 bp, Glycine max
atttccgggttggaccaagccgtccgaaccaatggaggtggttggcatgaagctaggaatggacatgcatattctgcttgttcggatgatggaggggttaaatgcaagtgtcctgcaggctttaaaggtgatggtgtcaaaaattgtgaagacattgacgaatgcaaagagaagaaagcttgtcagtgccctgaatgtagctgcaagaatacttggggaagctatgactgcacttgcagtggggatcttttgtatataagggaccacgacacttgcataagtaaaactgccagtcaagagggaagatcagcttgggctgctttttgggttattttaattggcttagttgtggctgctgcaagggcataccttgtgtacaaatatag

SEQ ID NO: 271975 - DNA, 307 bp, Glycine max
  unsure (1)..(307): unsure at all n locations
ctttctccctgtcttatttgttttgcgctgagttaagttcaatcggattttgcatacagctatataattatgctttagttnaaaaaaaaaaatataaaaaaaaaaaaaaaaaaaaaaaaaaaaaaaaaaaaaaaaaaaaaaaaaaaaaaaagtttcaaaaaaaaaaaaaaaaaaaaaaaaaaaaaaagggggggccgttttaaagaatcaaagtttatttacgcgggcatggaacgtaataacttttttaaaggggaacctaaatttaatttatgggccgctgttttaaaaaggtgtgtcgggaaaa

SEQ ID NO: 271976 - DNA, 119 bp, Glycine max
  unsure (1)..(119): unsure at all n locations
ggtggagcgatttaggtggctnatgtcctataacgaacgtgacctcaacctgctaaatagctttgtggaggtaaccctccacggcctggttcttagacggactatggccgcttaggcca

SEQ ID NO: 271977 - DNA, 417 bp, Glycine max
cccacgcgtccgcgcaccttcaacttaacctattccacttgtaatcgtaaacgctttgctagaagaagagacaaagtgtgtctgtgtgtgtgagagagagagcaatggctggctcgtgggcacgccgttctctgattgttctagccatcatttccttcggatgtctatttgcgatttccattgctaaggaggaagccaccaagttagggacggtcatcggcattgatcttggaacaacctattcatgtgtcggtgtttacaagaatggccatgttgaaatcatagccaacgaccaaggtaaccgtatcaccccatcgtgggttgctttcaccgacagtgagagactcattggggaagctgtcaagaatcaggcagctgtcaacccagaaaggaccatctttgatgtcaagagactta

SEQ ID NO: 271978 - DNA, 300 bp, Glycine max
  unsure (1)..(300): unsure at all n locations
acccacgcgaccggncgaacttttctattccctcaccaacggaccgagggtcaatttcaatttcaaggggctgggcagccattgccatggtctttcacggctcaagtgagaagaagagggaaagggaaagtggtaatgagcatggaggcaggcattggagagaagggcaccaagttgggtatgatgagctatttcgaatccgacggagaggttgttcctgaaactgtcgtgggtttcaaagaaggcaacatcggcacccagatcaaaactgaggccaccgatggatacgacgccgtacag

SEQ ID NO: 271979 - DNA, 428 bp, Glycine max
  unsure (1)..(428): unsure at all n locations
tcttgagtttggtcgtctgggatcagatctgctctctccgtttggattcaattcgacactttcctcgcctcaaagattaagcgaacaacatggttgtccttgctgcatccattgtgagcaaatctgggaaagtgctagtttctagacagtttgtggatatgactcgcataagaattgaaagtcttctagcagcatttcccaagttggtagggactggaaaacaacacacatatgttgagactgagaatgtgcgctatgtttaccagccaatagaggcactgtacctgcttctcgtaacaaacaaaaacaggcacatacttgaagattttgaaactctgagacttctctctaaacntgtacctgaatattcttactcccttgatgaaaaaggtgtttgcaaacatgcctttgagttgatttttgcattt

SEQ ID NO: 271980 - DNA, 256 bp, Glycine max
  unsure (1)..(256): unsure at all n locations
gcgagcgccgccctttngggttttttttttttttttttttttcttttttttttttttttggttgggttttttttttttttggtttgttttttttctgggtcttggtttttttcttcccagatcaaaggttggtcatcactacttcttaaaggaggggggacaggatgaacatgaaaccccctttattttgccatgcggcaccaaaacgagcctgtcctatatatgtccccccctcctgacgaaaaaaaaatggggg

SEQ ID NO: 271981 - DNA, 321 bp, Glycine max
gcgtccgctcaccctcattaccaacacgaaagcatagccaaaaccttttttcgaagtctctgattttcctaatggctccggcaaaggcagagaagaagccggcggagaagaagccagcggcggagaaggcaccggcggagaagaagccgaaggcggagaagaagatctcgaaagaaggagggagcgagaagaagaagaagcgcacgaagaagagcgtggagacctacaagatctacatcttcaaggtcctcaagcaggttcaccccgacattggtattttcagcaaggccatgggcatcatgaacagcttcatcaacgaca

SEQ ID NO: 271982 - DNA, 236 bp, Glycine max
cccacgcgtccggtcgctccgcaccagttttaccgcacgaatatcttgttgtttggagcgatccgagaaaaactctgtaaacatgttggtttaccaggacctccttacaggtgatgagcttctctctgactccttccgttacaaggaaattgagaatggaatgctgtgggaagttgaggggaagtgggttgttaaaggagcagttgatgtaaacattgttgcaaacccttttgctt

SEQ ID NO: 271983 - DNA, 421 bp, Glycine max
cccacgcgtccgcccacgcgtccggccagacctcgatgatgcccaattggcaaaggaagtcgaataccttctaaggaaaggatggattccttgcttggaattcgagttggagcacggtttcgtgtaccgtgagcacaacaggtcacctggatactatgatggacgctactggaccatgtggaagctgcctatgtttggctgcactgatgcttctcaggtgttgaaggagcttcaagaagctaagactgcataccccaatggcttcatccgtatcattggacttgacaacgttcgccaagggcagtgcatcagcttcatcggctacaagcccccaggcttttaagtcattgaaaaatttgcaaagcatctgtagccaccccactttgtttgttgtacttaaactacatttcccatttgtttt

SEQ ID NO: 271984 - DNA, 385 bp, Glycine max
  unsure (1)..(385): unsure at all n locations
ctttcttattctcttcctctctctctactctgagacacaaaggaaaattataagaaattatggctggttattcaaaagcttcagctctttggatcctttttcttctctttggcttctctgtagctaaggaaattttggttggaggtaagactgatgcatggaaggtttcagcctctgaatcagattcactcaaccaatgggcagaaaagtctcgtttccaagttggagactatcttgtttggaaatatgatggtggaaaagactcagtgttgcaagtgagcaaagagaactatgtgaattgcagcatctcaaaccccataaaggagtacaatgatgataccacaaaggttcagcttgagcatncagggccattctacttcatcag

SEQ ID NO: 271985 - DNA, 439 bp, Glycine max
gacgccgccacgcgtcccgcgcaatgcgatacttggtgtgacacccaggcaggcgtgccctcggcctaatggcttcgggcgcaacttgcgttcaaagactcgatggttcacgggattctgcacccacgcgtccgcccacgcgttcgcccacgcgttcggcagcgacgagaccacagtccacaagacccagaagcaccaccgcgaccggcgaatccagccaccgtgtgcggcttcgaattgagtccgagaacgcagttagacaggctttatattgaaacttgagacttgaagggaagctgttataattggtcaggctttggatgtttaaacaattctgatcaagatccaagtttgccttctaattttgtcatagatttttcgttacagtcttcccatggcgtatcccttctcagatttcaagtactcagatggcctcact

SEQ ID NO: 271986 - DNA, 405 bp, Glycine max
cccacgcgtccgctcacgcgtccgcccacgtttccgaaaaatttcttagccaacacaaccgtcatgttcacggctgctattgagcaatcagcattcactggtcaaactgctctgaagcagctcaatgagttcgtccgcaagaccggtggcgccggcaaaggtcgcactaacatgcgccgcaccgtcaagagtgctcctcagagcatttggtatggccctgaccgtcccaagtacttgggtccattctcggagcagattccatcatacctgaccggagaattccctggtgactacggatgggacactgctggattatcagctgacccggaaaccttcgccaggaaccgggagctggaagtgattcacaacagaatggcaatgcttggtgcccttggctgcaccttt

SEQ ID NO: 271987 - DNA, 396 bp, Glycine max
actgtttctacttaccttttctcttaatccttttacgacggcagccatggcaaccacaaggctctcttcaaaccccaaactgtcattcttcaacggaaagcccgtcacatattcttcccgcgtcgcgcccaccaccaaattatcctcatccaaacaaggcacaatttccatgtccctaaccccacccccctacgacctccagtccttcaaattccagcccatcaaagaatccatcgtgtcacgggaaatgacgcgccgctacatgaccgacatgataacctacgccgacaccgacgtcgtaatcgtcggagccggttcggccgggctctcctgcgcgtacgagctcatcaagaaccccgtcgtgagcgtggccatagtcgagcagtcagtgagccc

SEQ ID NO: 271988 - DNA, 352 bp, Glycine max
cccacgcgtccggagagagagagagaggagaatgttgagtctttcagttgcttctccttcttcttcaaccatgtcctttctccgagagccattgaatggcattcagctccgtcgcactgccacatgctccatcccacccacgaagcgcagctcatttgtgccggtggtggtgatgtctaagaggacggaggaattgaaggaaattagacaaatgactacggaacgaattaacgaagaggttgtcgaccttaagggcgagcttgtcatgcttcgccttcagaaatcggctcgcaacgagttcaagtccagcgatttcggtcgcatgcgcaagaggattgctcgcatgcttact

SEQ ID NO: 271989 - DNA, 439 bp, Glycine max
accacgcgttcgcttcattcatagacatggtttttcgacacttctgcaggcgatgctattcgctcattcactggcctcaaggggagcgcacgcaaagtgagtgccgcagttaaagtctcagctccccaagccacaaggttgggcatcaaggcttcgctgaaagacgttggagtcgctgatgtggccactgccgcgagtgcagtgctggctagcaacgccatggccattgaagtgttgctgggtggtgatgacgggtctctggctttcgttcccaacaatttctccgtggcctctgtggagaagatcgtgttcaagaacaacgcatgtttcccccacaacgttgtgttcgacgaggacgagattcctagcggcgtggatgcagggaaaatctccatgagcgatgaagaccttcttaatgcgcctggtgagacttacagcg

SEQ ID NO: 271990 - DNA, 282 bp, Glycine max
  unsure (1)..(282): unsure at all n locations
cccacgcgtccgcagacgcatagatgccaatttattattgattgntaaataaagtgaactaattcatattatgaaaaattaaagaaaaattaagaaaaaaaaaagaaaaaaaaaaaaaaaaaaaaaaaaaaaaaaaaaaaaaaaaaaaaaaaaaaaaaaaaaaaaataaaaaaaaaaaaaaaacataaatatataaaaaaaaaaaaataaaaccactaaaaataaccaaacttaacaaacctatcataacaatataaaaactataaaaacagaaccccaaaa

SEQ ID NO: 271991 - DNA, 363 bp, Glycine max
cccacgcgtccgaacatgcaacacgaaagtttctgaagctgctgcatctggctattggtgggagggatgccggattaattatgaagagtgtagggtaagacacataatggtctcaaagatctctgatacaagaggtgaagcctgggtttcagcctttaatgaacaagcagagaaaattgttgcatgctcagctgatgaacttgataaactcaagtcggagcaaggggatattgatggataccaaaaaaagttgaaggaagcaacttgcgttcctcatcttttcaaagtcagtgttactcataatgagtataacaatgagaagcggcaaaggataacagtaaggacctgttgctccaatcaact

SEQ ID NO: 271992 - DNA, 457 bp, Glycine max
acccacgcgtccgagctgatcgagataactttaaacaggctgtttaaaatgaatgtccttgggatctacgctgctacaattttggtagcatggggatgccatgcgtacgatatgttccctctccgaatgaacactggctatggtgcccgtactccggaagtgaaatgcgcaagttggaggcttgctgtggaagcacacaacatctatggctttgagaccattcctgaagagtgcgttgaagcaacaaaggaatacatccatggcgaacaatatagatcagactccaaaacagttaaccaacaagcttacttttatgccagagacctcgaagtccatcccaaggacacatttgtgttcagtatatatggcaccgtactctctaatattccatactacaaataacatggatatggggtggagaaatttaactcgaccttgtatgatgaatggtttaaca

SEQ ID NO: 271993 - DNA, 332 bp, Glycine max
caaaaaaaataaaaatacaaaaaaaaaaaaaataaaaaatcaaaacaatacaaaacaaaataaaacataataaaaacatcaaaagatcaaaaaaaaaacataaaaaaccaaacaaaaaaaaaaaaaataaataaaaaaacaaaaaactaaaaaaaatacaaaataaaacaaataaaaaaatcaaaaacaaaacaaaaaaaaaaaaaaaaaaaaaaaaacaaaaaaaaaaaataacaaaataaacataaaaaaataataataaaaaaaacaaaaacaaaaaaaaaaaataaataaaaatacaaaaaataaatcaaaaaaaaacaaaataaaaa

SEQ ID NO: 271994 - DNA, 309 bp, Glycine max
cgctccgccagcgcgtccttcgtcgcgggccattccgcgatgttttggccgcgtccgacgcggacgacatcgggatccttcaggtggtgccagatgttggcgaagccgaagaggaggacaacctgctgaacgccgagcaccacttcgcgagcttcaaggccaagttcgccaagacctacgccaccaaggaggagcacgatcatcgcttcggcgtcttcaagtccaacctccgcagagccaggctgcacgccaagctcgacccctccgccgtccacggcgtcaccaaattctccgatctaactcccgccg

SEQ ID NO: 271995 - DNA, 304 bp, Glycine max
gcatggcaaggccatgcgtacgatatgtaccctctccgaatgaacactgctatgggcccgactccgatgtaaatgccagttggaggcttgctgtggaagcacacagcatacttggctttgagaccattcctgaagagtgcgtagaagcaacaaaggaatacatccatggtcaacaatatatatcagactccaaaacagttaaccaacaagcttacttttattgccagagacctcgaagttcatcccaaggacacatttgatgttcagtatagatggcaccgtacttctttaatattccatacta

SEQ ID NO: 271996 - DNA, 292 bp, Glycine max
tgacggtggtcaactgaccgaggcagttcggcgtcgaccctacactgttgtactctttgatgagattgagaaagcccatcctgatgtattcaacacgaaagcatagccaaaaccttacttcgaagtctctgattttcctaatggctccgagtcccgatgccggagcggcgggatccgtttcgagctacgacgccatgatcggagcttcggttgtgctgtcattgatggctatcttgaagcattgaattccataatttcgttgggtttgtacaaaattgattccattcatata

SEQ ID NO: 271997 - DNA, 351 bp, Glycine max
cgtccgaatggaaagaaatcaacatacacaaacactttaacatatggatttgctaagggtgcaaacgatagctttcagggccaaatatgctgccatcccagccatgcttgttagggcagagacagagcaaccaggcatcacaaccgttcaaggggtgaaccttgaggtgccaattattgattttagtgacccagatgaagggaaagtggtgcatgagattttggaggcaagtagggactggggcatgttccaaattgtgaaccatgacatacctagtgatgttataagaaagttgcaaagtgttgggaaaatgttctttgagttgccacaagaagaaaaagagtgaatgct

SEQ ID NO: 271998 - DNA, 419 bp, Glycine max
cgcgtccgcccacgcgtccgcccacgcgtccgcaaaatttgcatcattcactatgacagcttccatccgtggcgttccaggcgtcaccaagcggttggcagtggcaacgcagaggagatcactcgtagtgaatgctgccaaagctgttgaagcggaaaaggtcagttatgacattgttcttggatgttagcaatggaatgaggtacttgatgttcgccgcggcggctgcggctgctgtttgctctgttgctgggatggcagtggcagatgagccaaaaccaggaaccccagcagtcaagaaaaagtatgctccgatttgtgtcaccatgccaactgctatgatttgtcgcaattgagggactcggattttattttaactttgatgatcggaaatgtgcatttgggttgtaataatgttt

SEQ ID NO: 271999 - DNA, 370 bp, Glycine max
  unsure (1)..(370): unsure at all n locations
cgcgtccgattagagaaaaatggttgatttagttgatagtaataaatnngttttaaatnnataatnnntgaaaaattatcgttgtcattagtactcatgtggcttctaatggtttgtcaatacattctctttctttttttaatgaaaaatatttctaatataaaaataattaatataaaaaatattataaaaaaataaacgtcatttcaaactaggatctcattaatatgaatatggatggatggagtgattgttaaaagaaaaattatcttcaatcatctttctttcttgaagagacgtctccaatcatcttacttccttctccattacactgccattgattttcataaagaacatgacttcattcatt

SEQ ID NO: 272000 - DNA, 388 bp, Glycine max
cccacgcgttcgttcacgcgtccgtccacgcgtccgattaatcccttagccaacacatccatcggggccacctctgctattcagcggtcagcattcactggtcaaactgctctgaagcagctcaatgagttcgtccgcaagaccggtggctccggcaaaggtcgcactaacatgcgccgcaccgtcaagagtgctcctcagagcatttggtatggtcctgaccgttccaagtacttgggtccattctcggagcagatttcatcatacctgaccggagaattccctggtgactacggatgggacactgctggattatcagctgacccggaaacctttgtcagaaccggtagctggaagttgattacagcacatgggcaatgcttggtgc

SEQ ID NO: 272001 - DNA, 461 bp, Glycine max
ctccaattagggtttttgtgatctgcagctactatgggtaagggaacggggagtttcggtaagaggaggaacaagacccacaccctctgtgtgaggtgtggccgccgcagcttccacctccagaagagtcgttgctctgcgtgcgcttaccccgctgcgcgcaccaggaaatataactggagcgtgaaggccattaggagaaagaccaccggaactggaaggatgaggtacttgcgtaacgtgcctcgcagattcaagagcggcttcagagagggtaccgaagctgcacccatgaagagaggagctgctgcctctgcctaagctttgaatgaatgacagcaattcttgctgggtcagtgaattataggagttaatgcttctgtgttggtgccaaactctttggaacacattttctttctggcgttttaatttcatttaatatgtagtggctttggatttcg

SEQ ID NO: 272002 - DNA, 380 bp, Glycine max
actttttctacttaccttttctcttaatccatttacgatggcagccatggcaaccacaaccctgtcttcaaaccccaaactctcagtcttcaacggaaagcccgtcacatattcttcccgcgtcgcgcccaccaccaaattatcctcatccaaacaaggcacaatttccatgtccctaaccccacccccctacgaccttcagtccttcaaattccagcccatcaaagaatccatcgcgtcacgggaaatgacgcgccgctacatgaccgacatgataacctacgccgacaccgacgtcgtaatcgtcggagccggttcggccgggctctcctgcgcgtacgagctcagcaagaaccccgtcgtgagcgtggccatagtcg

SEQ ID NO: 272003 - DNA, 386 bp, Glycine max
gagagagagagagaggagaatgttgagtctctcagttgcttcaccttcttcttcaaccatttcgtttctgccaaagccattcaatggcattcagctccgtcgcactgccacatgctccatcccacccacgaagcgcagctcatttgtgccggtggtggtgatgtctaagaggacggaggaattgaaggaaattagacaaatgactactgaacgaattaacgaagaggttgtcgaccttaagggcgagcttgtcatgcttcgccttcagaaatcggctcgcaacgagttcaagtccagcgatttcggtcgcatgcgcaagaggattgctcgcatgcttactgtgaagcgggaaagagaaattgaagagggtatcaataagaggttgt

SEQ ID NO: 272004 - DNA, 437 bp, Glycine max
tccacgcgtccgcttcatccatagacatggccaccgtcacttctgcagccgttgctattccctgattcactggcctcaaggcaagcgcaggcaaagtgagtgccgcagttaaagtctcagctccccaagccacaaggttgggcatcaaggcttcgctgaaagacgttggagtcgctgttgtggccactgccgcgagtgcagtgctggctagcaacgccatggccattgaagtgttgctgggtggtgatgacgggtctctggctttcgttcccaacaatttctccgtggcctctggggagaagatcgtgttcaagaacaacgcaggtttcccccacaacgttgtgttcgacgaggacgagattcctagcggcgtggatgcaaggaaaatcttcatgagcgatgaagaccttctcaatgcgcctggtgagacttacagc

SEQ ID NO: 272005 - DNA, 377 bp, Glycine max
gacaaaagttgcgtatcaatagcatactcttactctgattcgttagtgaagaaaaatggcaacgatcatcgccggctccccaactacatcaatcactcgcacaggtcatgtgctcaaacgacctgttggggcctcatcctctaccgttcttggattgccagcaatggccaaggcggtgagagtgaggtgctccatggaggaaaagccttcaagcagctcaaacctagggatgggggcatccttgttagcagctgcagctgccgcaaccatgtcaagcccagcagtcatggctttggttgatgagagactcatcactgaaggaactgggcttccctttgggcttatcaacaaccttcttggttggatcccgtttggtg

SEQ ID NO: 272006 - DNA, 420 bp, Glycine max
cccacgcgttcgcccacgcgttcgcccacgcgttcgcccacgcgttcgcccacgcgttcgcccacgcgtccgcccacgcgtccggaacaagtagttgagaactaagaaggagaagcaaatggcttcctcaatgatctcttccccagctgttaccactgtcaaccgtgccggtgccggcatggttgctccattcactggcctcaagtccatggctggcttccccaccagaaagaccaacaatgacattacctccattgctagcaacggtggaagagtgcaatgcatgcaggtgtggccaccagttggcaagaagaagtttgagactctttcctacctgccagaccttgatgatgcacaattggcaaaggaagtagaataccttcttaggaagggatggattccttgcttggaattcgagtt

SEQ ID NO: 272007 - DNA, 342 bp, Glycine max
tgttgatcgagataactagaatcagtgtgattttaatgaaggtccttgttttcttcggtgctacaattttggtagcatggcaatgccatgcgtacgatatgttccctctccgaatgaacactggctatggtgcccgtacttctgaggtgaaattcgcaagttggaggcttgctgtggaagcacacaacatctttggctttgagaccatttctgaagagtgcgtttaatcaactaatgaatacattcatggcgaacaatttatatcatactccaaatcagttaaccaacatgcttacttttattccttagacctctaattccattccaaggtcactatttgtg

SEQ ID NO: 272008 - DNA, 453 bp, Glycine max
  unsure (1)..(453): unsure at all n locations
ggccatataattttttttttatttgaaataatgtccgggatcatccacaagattgaggagacgctccatgtgggagggcacaagagagaggagcacaaaggagaacaccatggtgagcacaaaggtgaacacaaaggagaacaccatggtgagcacaaaggtgaacacaaaggagaacaacaccatggggagcacaaggagggacttgtggataagatcaaggacaagatccatggtgatggccatgacaagggtgagaaaaagaagaagaaggacaagaagaagaaggagcatggacatgaccatcatggtcatagcagcagcagtgacagtgattagatcttatatgttaagcacgtgtacggtacgatggtagtgaggagccagaatccctcttnctgctttatgatantaataaaataaaatagcgattccggaaatcatgtctgtagc

SEQ ID NO: 272009 - DNA, 311 bp, Glycine max
cccacgcgtccgcttcgccgccgtggccaccgtcgcgattgcggtggccgcgttcgacgccggggacatgctgatccgtcaggtggtgccagatgttggcgaagccgaagaggaggacaacctgctgaacgccgagcaccacttcgcgagcttcaaggccaagttcgccaagacctacgccaccaaggaggagcacgatcatcgcttcggcgtcttcaagtccaaccttcgcagagccaggctgcacgccaagctcgacccctccgtcgtccacggcgtcaccaaattctccgatctaacttcgggcgagt

SEQ ID NO: 272010 - DNA, 404 bp, Glycine max
tctcccacgcgtccggatcgagataacttgaaacagtgtgttgaaaatgaaggtccttgttttcttcgttgctacaattttggtagcatggctatgccatgcgtacgatatgttccctctccgaatgaacactggctatggtgcccgtactccggatgtgaaatgcgcaagttggaggcttgctgtggaatcacacaacatctttggctttgagaccattcctgaagagtgcgttgaagcaacataggaatacatccatggcgaacaatatagatcatactccaaaacagtttaccaacatgcttacttttattccatagacctcgtagtccatcccaaggtcacatttgtgatcagtatatattgcaccgtactctctaatattccatactacataaaaacat

SEQ ID NO: 272011 - DNA, 390 bp, Glycine max
aatttaaagaaatcaacacacacaaacacatctacatatggaggtgctaagggtgcaaaccagagcttgcaaatccaaagatgctggcatcccagccatgtttgttagggcagagacagagcaaccaggcatcacaaccgttcaaggggtgaaccttgaggtgccaattattgattttagtgacccagatgaagggaaagtggtgcatgagattttggaggcaagtatggactggggcatgttccaaattgtgaaccatgacatacctagtgatgttataagaaagttgcaaagtgttgggaaaatgttctttgagttgccacaagaggaaaaagagttgattgctaaacctgctggggctgattctattgaagggtattgcacaaagct

SEQ ID NO: 272012 - DNA, 386 bp, Glycine max
aagacgcagacagtcccgtgctaaagctgaatcagaaaaaaaggctgcaaggaatcggaagccatacttgcatgaatctcgacatttgcatgcactgagaagagcaagaggatgtggaggtcggtttttgaattcaaagaaagatgagaatcaacaggatgaggttgcatcaactgacgaatcacagtccactatcaatctcaattctgataaaaatgagcttgcaccatcagatagaacatcctaaaactacagaaatggtgatgctgtagattgcagggatctgttgtgtatatctatattgggagatgaatctccaaccaacagtatcctcagatatctccctattattcattctgtcgtacaacgccataggtataagtata

SEQ ID NO: 272013 - DNA, 344 bp, Glycine max
cctgcagatagcagccatttgtcaagaagctggaatgcatgctgttcgcaagaatagatatgtcatactgccgaaggacttcgagaagggttacaggacaaacgtgaagaagcctgatactgactttgaattttacaagtgatgatgttgtagctttgagattggtgtgtgtactcgcgaagttaaatatacagtgaagggggtacatttctagaggaatcacgatcatgagaaatgatgcaatgtttctgtttcttgttgacctttcatcttattttgtaatttagattatttaatttactaaatatattaattgtggaagctaaatgttgaagtcgtactgc

SEQ ID NO: 272014 - DNA, 426 bp, Glycine max
attcatgaaaggaaaacctgaggagccgaagtgtggcttcagtcgcaaagtggttgagattctcaagcaagaggaagttcagttcgagagttttgacattctctccgacgacgaagtccgacagggcctcaaggttttctcaaactggtcgagctatccgcagctctacatcaaaggggagctgattggagggtccgatatcgtgttggagatgcagaagagtggagagctgaagagcgttttaaccgagaaagggattgttccgaaggaaaccctcgaggacaagttgaggaaactgatctcctcggaacctgtgatgctcttcatgaagggtataccggatgctcctcgttgcggttttagttcgaaggttgttgacgccctcaggaaagatgggattggctttgggtcttttgatattttgag

SEQ ID NO: 272015 - DNA, 423 bp, Glycine max
ctgacattgcttctcctccacacacgctcagagacacacacttttgcagtcacattgagaatggggcgtgttcgcacgaagacggtgaagaaatcctcgcggcaagtgatagagaggtactactcccgcatgacgctggacttccacacgaacaagaaggttctggaagaggtggccatcattccctccaagaggctccgcaacaagatcgcggggttctccacccatctcatgaagcggatccagaagggtcccgtgcgtggaatctccctgaagctgcaggaggaggaacgcgagcgtcgcatggacttcgtccccgatgtctacgccatcaggaccgaccagatcgaggtcgacaaggagacgctcgacatgctcggcagcctcgggatgtccgaggttcctggcatcgttcaagtggat

SEQ ID NO: 272016 - DNA, 386 bp, Glycine max
cccacgcgtccgccaaggacaagaaggtcactgctctcaaggagaccaagaagcgggtggaggagaggttcaagaccggcaagaataggtggttctttaccaaactcagattctgatctcgcaatcgtgaggttttattattagggcttttggaatgttgccttttttttaatattgtattcttgttttgcaaatcttatcaaaactattattctgctcttaagatttgtcgtcatcgtcttcttcttttgttaattaatgcatttgccttcttttaatttacggggaaaaaaaaataacaaaattaaaatttcatttatttattttattcttttcaaaatttaattttataaattaaatttaatatttcaattataaaataaaaa

SEQ ID NO: 272017 - DNA, 390 bp, Glycine max
cccacgcgtccgcctacgcgtccggtgatctccaagggcaagttgtcgaagctggaaggtgttagtgtgaagattgaagtgttgtggctcaaaatcgtggagctaactcgcgacggcgatgacctccaattctcggtgggtgttgcctctgctggcttcagcgtcgacagcttctccgagagcccccagtgtggctgtggattcgcttgcgacaatttcaatcaaaatggtgatgtttcttctctttagaattcggatctgttactatgtttcttccgtccttaattaattattgaacagcatcatcatgttgttttcctttgcgtaaattatgactatggtagacaccatacaaattgatgtaagacaactagcattggctgcatcctc

SEQ ID NO: 272018 - DNA, 357 bp, Glycine max
cccacgcgtccggctagctcggatctctctcgatccttggccatgacgaagcgcaccaagaaggctgggattgttggcaaatatggtactagatatggtgccagtttgcgaaagcaaattaagaagatggaagtgtcccagcatgcgaagtatttctgtgagttttgtggaaagtattctgtgaaaagaaaggcagtagggatttggggttgcaaagactgcgggaaggtgaaggctgggggtgcttatactctcaacactgcaagtgctgtcactgtgaggagcaccatccgtcgtctgagagaacaaactgaaagttgatcaagagaagcaactatatcagtgtccctagtttta

SEQ ID NO: 272019 - DNA, 349 bp, Glycine max
cccacgcgtccggcaacaacaacaatataagtcaaagaatctctgcgttgtcatcacgcttcgctagatccagccccatcatggcttcagagaagcaagcggctcttgccgtcactccctctgatgctgatgctcctaccatatttgacaagatcatcaataaggagattccttctactgtggtttatgaggatgacaaggtgcttgccttcagggacataactcctcaagctcctacacatattcttatcattcctaaattcaaagacgggttaaggggcctatccaaggctgaggaaaggcacttggaaaatcttggccgccttctgtacactgccaagctggttgc

SEQ ID NO: 272020 - DNA, 421 bp, Glycine max
catactcttactctgattcgttagtgaagaaaaatggcaacaatcatcgccggcaccccaactacatcaatcactcgcacaggtcatgtgctcaaacgacctgttggggcctcatcctctaccgttcttggattgccagcaatggccaaggcggggagagtgaggtgctccatggaggaaaagccttcaagcagctcaaacctagggatgggggcatccttgttagcagctgcagctgccgcaaccatgtcaagcccagcagccatggctttggttgatgagagactcagcactgaaggaactgggcttccctttgggcttagcaacaaccttcttggttggatcctgtttggtgtctttggtctcatatgggctctcttctttgtctacactttcacccttgaagaggatgaagagtctg

SEQ ID NO: 272021 - DNA, 371 bp, Glycine max
catactcttactctgattcgtttgtgattaaaaatggcaacaatcatcgtcgggacggcaactacatcaatcactcgcacaggtcatgtgctcaaacgacctgttggggcctcattctctaccgttcttggattgccatcaatggtcaacgccctgagagtgaggtgctccatggaggaaaagccttcatgcagctcaaacctagggatgggggcatccttgttagcagctgcagttgccacaaccatgtcatgcccagcagtcatggctttggttgatgagagactcagcactgaatgaactggacttccatttgggcttatcaacaaccttcatggttggatcctgattggagtcattggtctcataat

SEQ ID NO: 272022 - DNA, 379 bp, Glycine max
atttcgttttcgtggatgctgattatgtcaatgactcgaactaccacacgagggtacgtggagcttgtgaagattgcaggactgatcggttacgataacaccatatgggctggatctgtcgctgtaccacccgatgcaccattgatggattacattaagcctcatcgcaggcatgtgatggagctaaacaagtatctggctcaagattcgagcgatcgagattcgccagctcgtcgtgggtgatgggattaccctgtgacgacgcatcatctgatcattaactcttcatctagatcttacatgacagatattagtattattaaaacaggttgcgtgaatggagcagatctcaaatgttctactgtgttttctagatctt

SEQ ID NO: 272023 - DNA, 182 bp, Glycine max
tcgcccacgcgtccgcccacgcgtccgaaaaaaaaaaaaaaaaaaaaaaaaaaaaaaaagagaaaaagaaaaaaaaaaaaggggaaaaaaaataaaaaaaaaaaaaaaaaaaaaataaaaaaaaaaaaaattaaaaaaaaaaaaaaaaaaaaaaaaaggccaatcatttaaaagttccaaaa

SEQ ID NO: 272024 - DNA, 425 bp, Glycine max
gtggaatcaactgtgaggccttacttaatggatgtcatttactgttggtcaaagggggcaacatttgcagaagtaatggaaatgacggatatcttcgagggaagcgttatacgacttgccagaaggctggatgagtttttgaatcagttgcgcggtgctgcccatgctgttggagaggtggatcttgagaagaagtttgaaaagagctgtgaaagcctccggcgaggcataatgttcgcaaactccctgtacttgtgatgaggtgctgggcgcccgtctttgtgcttgtctcataccatccaaataggtgttacattttgttggaaatggtgctctgtacattgtatttgtgggattaactttgacattttgtcgaatgtgtcgccaacttgcatgaaaactatgttgagcgcttaaaaattgaa

SEQ ID NO: 272025 - DNA, 262 bp, Glycine max
ttaatttccattgaagtccgaaaacagaaaccaaaaatacaggatgatgaaatctcataaagcaaaaacaaatgggaatgtagtttaagtacaacaaacaaagtggggtggctacagatgctttgcaaatttttcaatgacttagaagcctgggggcttgtaggcgatgaagctgatgcactgcacttggcgaacgttgtcaaatccaatgatacggatgagaactaatgaataagctattgtgttgtgttgctttgtttcc

SEQ ID NO: 272026 - DNA, 425 bp, Glycine max
cttcttcttccttcccttctctcattcaagacaggcctgtctttgctgcccctgcccccatcatcaccccaactgtgagagaggatatggcaaaggaatacgagcaagctattgaagaactccagaaattgttgagggagaagagtgaactcaaagccacagctgctgagaaagtggagcagataacagcttctctgggaacatcatcatctgatggcatcccatcatcagaagcctcagacaggatcaaagctggtttcattcacttcaagaaggagaaatatgacaagaatccagctttgtatggtgaacttgccaaaggccagagccccaagtttatggtgtttgcttgctcagactcaagggtgtgcccatctcatgtgctagatttccaaccaggagaggcctttgtggtcagaaatgtt

SEQ ID NO: 272027 - DNA, 422 bp, Glycine max
cccacgcgtccggttttcctcttctgaatccaccgccaccgcagcgtggacggaatgagagtgcagccatagcagcagcagcagcagttattgaagtgctgctctagtttgaggcacaatgagattggagaaatgctggttttgctcttcaaccgtataccccggacatggaatccagtttgttcgtaatgatgcaaagatttttcggttttgtagatcaaaatgccacaagaactttaaaatgaagagaaatcctcgtaaggtaaagtggaccaaggcatatcgtcgagtgcatggaaaggatatgactcaggactcaacctttgagtttgagagaaaacgaaacaggcctgaaagatatgacaggaatcttgcggagaatgtcctgaaggccattcctaagattgataaaatcagagtca

SEQ ID NO: 272028 - DNA, 391 bp, Glycine max
ctcactcgtcatgcatagacatggccattgttacttctgcagccggtgctcttacctgattcactggcctaaatgcaagcgcaggcaatgtgagtgccgtagataaagtctcagctcaccaagccacaaggatgggcatcaaggcttgactgaaagacgctggagtcgttgatgaggccactgccgcaagtgcacagctggctagcaacgccatggccattgaagcgttgctggcttgagatgacaggtctatggctttcatgaccaacaatttatgcgatgctctctggggacaagatcatgttcaagaacatcgcatgttttccaaacaacggagcgttcgacgaagacgagattcctatcagcgtggacgcaccgaaaatctacatga

SEQ ID NO: 272029 - DNA, 413 bp, Glycine max
ctcgatgatgcccaattggcaaatgatgtcgaataccttctaaggaaaggatggatggcttgcttggaattcgagttggagcacggtttcgtgtaccgtgagcacaacaggtcacctggatactatgatggacgctactggaccatgtggaagctgcctatgtttggctgcactgatgcttctcaggtgttgaaggagcttcaagaggctaagactgcataccccaatggcttcatccgtatcattggatttgacaacgttcgccaagtgcagtgcatcagcttcatcgcctacaagcccccaggcttctaagtcattgaaaaatttgcaaagcatctgtagccaccccactttgtttgttgtacttaaactacattcccatttgtttttgctttatgagatttcatcatcct

SEQ ID NO: 272030 - DNA, 419 bp, Glycine max
gaaattgggagtccgtccaccaaaaggagtgctcttatatggtccccctggaactgggaagacactaatggcccgtgcatgtgctgcacaaactaatgcaactttcctgaagcttgcaggtccccagcttgtccagatgttcattggtgatggagcaaaactagtccgcgatgcctttcagcttgcaagggaaaaatctccctgcattatatttatcgacgagattgatgctattgggaccaaaagatttgatagtgaagtaagtggggatagggaagtacagcgcacaatgcttgagttgcttaatcagcttgacggcttcagcagtgatgaccaaataaaggtgattgcagcaactaatcgtgcagacatcttggatcccgctctcatgcgatcaagtagattggatcgaaagattg

SEQ ID NO: 272031 - DNA, 330 bp, Glycine max
cccacgcgtccggagaacttgaggtggtacgttcaagccgagcttgtgaatggacgtggggccatgttgggtgttgcaggaatgttgcttcctgaggttttcaccaagtttggaatcatcaatgcccctcaatggtatgatgctggaaaatcagagtactttgcatcttcctaaacctttttcgtgatcgagttcattttgttcaactacgtcaaaatccgaaaatggcaggacatcaaaaaccttggctgtgtaaaccaaaaccccattttcaagcattacagctttgccccaacataagtgtggataccttgtaagtgtgttcaaccc

SEQ ID NO: 272032 - DNA, 417 bp, Glycine max
cccacgcgtccgagaaacttgaggatattgtgccctcttctcacaactgcgaggtggctcatgtgaatcgtactgattaccagctcattgatattgctgaggatggatttttgagtctgcttactgaaaatggtaacactaaggatgacctcaagcttcccactgatgagagtctgctcactcagataaaggatggatttgctgagggcaaggatcttgttgtgtctgtcatgtctgctatgggtgaggaacagatttgtgccctcaaggatattgggccaaagaactagcttttggtgcttgttgcttgttatttctattttctatttaagcaaagatatttttgtaagccttttatattggtttgttcaagacctggcgtatagattctagtcagactagtcttaacaatggttt

SEQ ID NO: 272033 - DNA, 368 bp, Glycine max
tgatgatccactgttcaagctggtttcaaagttgtatgaagttgttccacccatgcgtattgaattggggaaggtcaagaacccatggcccaatgttgatgctcacagcggagtcgtgctgaatcattttggtttaacagaagccaagtattttactgttctgtttggtgttgcgaggagcatcggtgtaggcccccagctcatattggaccgaattcttggtttacctcttgaaaggccgaagagtgtcaccatggcatggctagaagagtactgcaaaaatgctgcaaaatgagctttctgtgttaggactggaaatttcagactaataatggaaataccttttgagagatcagccatatgtgatc

SEQ ID NO: 272034 - DNA, 418 bp, Glycine max
  unsure (1)..(418): unsure at all n locations
aaacaaagaagagagcaaaatgaagagtgcgatttgtgggagaatcctctctcccaagcacgtcttcaaaccaggggacacacattcaatttgtaaaggaccatactccaatctttgtgtacccatggttgtattggcaacagggcctggtataggaggtggggtgctggaaaagccagttattgaaaaagtcaaccctggccgtgagtctgaaattgatttaaagaaatcacggaaaatcggacccgccctaatcgngtaatattgcacaacgacaactttaataaacgggaatacgtggtccaagtgctgatgaaggtcatccctggaatgacccttgataatgcagttaatatcatgcaggaagcacactacaatggattgtcagtggtgatcatctgtgaccaaaccgatgctg

SEQ ID NO: 272035 - DNA, 385 bp, Glycine max
gtgatttttctttttttctcatttgctttgcaaattgcaatggcttccaacaaggttgttgccaccatcatggtgctggctgtccttgcctactcaacatcattcaccaatgcatgtggcacatgccacccaaaacctaccccttctcctcctcctccatcatgaaagtgccctaaggacacattgaagctaggggtgtgtgcagatattctacgtcttgttactgttgttgttggttcccctgtctccagcaagtgttgtgcattgcttgaaagtttggctgatttggatgctgcactttgcctttgcactgctattaaagccaatgttcttggaatcaacttgaatgtgcctatcacactcattgtgctactcattgcttgcc

SEQ ID NO: 272036 - DNA, 250 bp, Glycine max
gaacgaaaaggaattccaatggctggggtcctcttgacgatggtgccgcttcttcattgcttcctcttcctctcacctcgttcgcgcttccgatgactccgacgacgccgtaatttcgatactattgttgttgtcgtcatgtcgtgatgcatctctgattctacaatgcttgtgtccttcacatcttctacgaatcgttcgacgaggattttgatctaccgtggattgtatccgacaactatgattacaa

SEQ ID NO: 272037 - DNA, 365 bp, Glycine max
ttttgtttttgttttatggattatctagttgtggttaagttatatgtttggatggattttggtcaatgttttgatgaattgctgagatatattctatggtgtttttggatgttttaaagtagttgaagttaaaaaaaaaaaaaaaaaaaaaaaaaaaaaaaaaaaaaaaaaaaaaaaaaaaaaaaaaaaaaaaaaaaaaaaaaaaaaaaaaaaaaaaaaaaaaaaaaaaaaaaaaaaaaaaaaaatttaattaaaaaaaatttttttcataaaataaaaaataaaatatcatattaaaaaaaaaaggggggccctttatggaacccctttttttatttcccttttttgtaaattatttacttttt

SEQ ID NO: 272038 - DNA, 296 bp, Glycine max
cggacgcgtgggtgagaggtgtaggattagtgggagctggaaacagcgaaagtgaagtaccactacttttaacgttattttacttattccgtgaatcggaagcggggcactgcccctctttttggacccaactcgtctgagaagtgaggccgaggcttgaggaatatgttgctactctatttgatttatctttgttgttttttatttatttttaatttgtatgttttgattgtgttctgtgaacggtttttgttagctttatatcaaacttgaaattttgcatacaatatctaact

SEQ ID NO: 272039 - DNA, 400 bp, Glycine max
accacgcgtacggacgctcacacagaatcatgatccctaagagcagcagcctctagggtcagctcaaatgggctcttcagtgacagcatctgtggccctaaaacctgtccctaacactgttgagaagtccttagtgacaggccttacctatctctcaaggaactcttcttcattcacagctgaggccagtgtcaagaagatcaagactgactaaccttaaggaactaaacgtggcatggctttgaacgatggaactgatgcatctggcacgaactgaaaaggaaagggtgtttaccacattgtagactaatactgggctaatgtctatggttacagtcctatctacgacaccaaggactgggctgcaaccgatgatgcctacgctggtactactactggc

SEQ ID NO: 272040 - DNA, 412 bp, Glycine max
cccacgcgtccgagaaacttgaggatattgtgccctcttctcacaactgcgatgttcctcatgtgaatcgtactgattaccagctcattgatattgctgaggatggatttttgagtctgcttactgaaaatggtaacactaaggatgacctcaagcttcccactgatgagagtctgctcactcagataaaggatggatttgctgagggcaaggatcttgttgtgtctgtcatgtctgctatgggtgaggaacagatttgtgccctcaaggatattgggccaaagaactagcttttggtgcttgttgcttgttatttctattttctatttaagcaaagatatttttgtaagccttttatattggtttgttcaagacctggcgtatagattctagtcagactagtcttaacaat

SEQ ID NO: 272041 - DNA, 259 bp, Glycine max
gttaacttgacttagtagttctttttcaatatatggtaccgtttcgtccattttgtggcaaaaaaaaaaaaaaaaaaaaaaaaaaaaaaaaaaaaaaaaaaaaaaaaaaaaaaaaaaaaaaaaaaaaaaaaaaaaaaaaaaaaaaaaaaaaaaaaaaaaaaaaaaaaaaaaaaaaaaaaaaaaaaaaaaaaaaaaaaaaaaaaaaaaaaaaaaggggggcccctttaaaaaaaccaaattttctaacccctggtttgca

SEQ ID NO: 272042 - DNA, 340 bp, Glycine max
atgggcctcactaacttcaccacaggctaaggcaaggttaatttggttgactccaatgttcgtcctttggaggttttcatgtgcagtattgtccgcaagatggggtatggtgaaggctttcagtggctctctcagtacattaaatagagaacaagtgtttgctctttattatcctcatgctaatgtagtctccacattagcgtatctctgctcatgtaaattggatatactttaatggtggttttactttttctttgttatgaatgagacatactagtttctatattttttggtgtcagttgccagcttgtgttgcagttctatatatattggttattaa

SEQ ID NO: 272043 - DNA, 420 bp, Glycine max
cccacacacaccttgttttcctttctatagagacacacagagagagcaataaagcaccgttcaatggctaccactaccactaaagtttacattgtttactattctatgtacggacatgttgagaagctagctgaagagattaaaaaaggagctgcttctgttgaaggagtagaagcaaagctatggcaggtacctgaaacactgcctcaagaggtccttgggaaaatgggagcacctccaaagagtgatgtaccaattattacacccaatgagctacctgaggctgatggcttattgcttggtttccccacaagatttggactgatggctgctcaattcaaagctttcctggatgcaactggaggtctatggcgcacacaggcactagctggaaagcctgcaggaatctttacagcactg

SEQ ID NO: 272044 - DNA, 432 bp, Glycine max
ggtccttgtgtctccggtgctcatagcactatagttacagcaagggctggaaaggatctagttgccagtctcgtatcaggattgcttacaattggtcctcgatttggtggagcaatcgatgatgctgctcgatacttcaaggacgcacatgacaggggtctatctccttatgagtttgtggaaggtatgaaaaagaaaggaattcgagtaccagggattggacacaggatcaaaagccgagacaaccgagacaagagagtgcagttgctgcaacaatatgctcatgctcacttccctgcggtaaaatacatggaatatgctgttcaagttgagacctatactctcacaaaggcaaacaacctggttctaaatgttgatggtgcgattgggtctcttttcttggatctccttgcgggcagcggaatgttcaac

SEQ ID NO: 272045 - DNA, 313 bp, Glycine max
gtcccgatttagttatttcttttctagataaaaaaaaaaaaaaaaaaaaaaaaaaaagaaaaagaaaaaaaaaaaaaaaaaaaaaaaaaaaaaaaaaaaaaaaaaaaaaaaaaaaaaaaaaaaaaaaaaaaaaaaaaaaaaaaaaaaaaaaaaaaaaaaaaaaaaaaaaaaaaaaaaaaaaaaaaaaaaaaaaaaaaaaaaaaaaaaaaaaaaaaaaaaaaaaaaaaggggggaaaaaaaaaaacctgaagttacaaaaattataataataaaaagaaaaccccctttagcgagttcaaaaaaaaacaaaaag

SEQ ID NO: 272046 - DNA, 353 bp, Glycine max
cacatttttctcattctgaattttcttgcttttccacttcagtataaaaaatcatggcaggaggactgacagatgatcagattgctgaattccatgaagcctttagcctcattgacaaggattctgatggattcattactgtggatgaattgacaaccattatccgatcattagaagggaatccaacgaaagaagaaatccaaaacatgattagtgaggtcgatattgatgggaatgggagtatagattttgaagagttcttgaatattatgggaagaaaaatgaaggaaactttagctgaagagctgaaagaagcattcaaagtatttgatagagatcaaaatggatacata

SEQ ID NO: 272047 - DNA, 434 bp, Glycine max
  unsure (1)..(434): unsure at all n locations
cccacgcgtccgcacaaggcagaaagcaagctcatcctagagttttaaaaatggcagcagcctcctccatggctctctcttccccatccttggctggcaaggccgtgaagctgggcccatcagcccccgaagtcgggagggtcagcatgaggaagaccgtcaccaagcaggcctcctccggaagcccatggtacggcccagaccgcgtcaagtacttgggcccattctctggcgagcccccgtcctacctcactggcgagttcccaggtgactacggctgggacactgctgggctttcggccgacccagaaaccttcgccagaaaccgtgagctcgaagtgatccactccaggtgggccatgctncgggcctngngctgcgtcttccccgaactattgtcccgcaaaacgggtcaaagttggagaagctgtgtg

SEQ ID NO: 272048 - DNA, 336 bp, Glycine max
ttcccatttttcacaccaccaacacaagatgtttctccacattgtgttcctccttttccttctgtcatccacttcccatgccactgtccaagacttctgtgtggcagacctcaaaggtgcagacacccctgcaggctacccctgcaagccacctgctaatgtcacttcagatgactttgtgtacactggcttagctgaagctgcaaatgtcacaaacataatcaatgctgctgtgaccccagcttttgttgctcaattcccaggtctcaatggccttgaactatctgcagcaaggttggaccttggtcctagtggtgttatcccactccacactca

SEQ ID NO: 272049 - DNA, 397 bp, Glycine max
ttcccgtttttcacaccactaacacacgatgttactccacattgtgttcctccttttccttcggtcatgcacttcccatgccacggtccaagacttctgtgtggcagacctcaaaggtgcagacacccctgcaggctacccctgcaagccacctgctaatgtcacttcagatgactttgtgtacactgtcttacctgaagctgcaaatgtcacaaacataatcaatgctgctgtgaccccagcttttgttgctcaattcccaggtctcaatggccttgaactatctgcagcaaggttggacctttgtcctagtgttgttatcccactccacactcatcccggtgccaatgaactactcattgtgcttcaaggtcacattcttgctggattcatatct

SEQ ID NO: 272050 - DNA, 382 bp, Glycine max
  unsure (1)..(382): unsure at all n locations
cccacgcgtccggtcagttatgacaacaatgatagcaatggaaggaggaacttgatgttcgctgtggctgctgctgctgttttctctgttgctgggatggcagtggcagatgagcctaaaccaggaacctcagaagccaagaaaaagtatgccccggtttgtgtcaccaatcctacagctaggatttgtcgcaattgaggatctcctgtttcattttacctctgatgatcggaaatgtacgttggggatgtagtaatgtttttgatttaatatgatcctcattgtactagatgttcataaaactatncacttttgcttgtctatttgtgtctncaagttaatgggtaacccaggaaatgatggcgcttaaaaaaaaaaaaaa

SEQ ID NO: 272051 - DNA, 339 bp, Glycine max
gccacgcgtccgcaaaaacacacacacacacaaattctcaaacccaaatcccaagtctgctaaaaccctaattcgcagtgaaaatgagagaaatcttgcacatccagggagggcaatgcggtaaccagatcggagcgaagttctgggaggtgatatgcgacgagcacggcatcgaccacaccggaaagtacagcggcgactccgagctccaattggagcgcatcaatgtttattacaatgaaagccagcgcggaaggtacgttccacgcgccgttctcatggatctggagcccggcaccatggactccgtcagatccggcccttacgggcagaactttc

SEQ ID NO: 272052 - DNA, 351 bp, Glycine max
ctctttcttcctcttcctcagtagtgcgattttcgattctcttctctgcaactatgcctaaccctaaggtcttcttcgacatgaccatcggcggtcaacctgccggccgcatcgtgatggagctctatgccgacgtgactcccagcaccgccgagaacttccgcgcgctctgcaccggcgagaagggcgccgggcggagcggcaagcccctccactacaaaggctcgtccttccaccgcgtgatcccgaacttcatgtgccagggcggcgacttcaccgccggaaacggcaccggaggcgagtcgatctacggcgccaagttcggcgacgagaacttcttgaaaaacacac

SEQ ID NO: 272053 - DNA, 294 bp, Glycine max
cccacgcgtccgcccacgcgtccgagtactactacaagggaagaaaaacttagctactaaggagaggatcaaagagaatggctcaagcaatggcatcaatggctggcttgcgtggttcctctcaggctgtgttggaaggtagccttcacgtgagtggctccacacgcttgaatgtggggagtggaagcagggtggcctcagtcacacgtgcagggttcacagttagagcacaacaacaacaagtgagtggtgaggtacaaagcagccgtagggcagtgcttacacttgttgctg

SEQ ID NO: 272054 - DNA, 433 bp, Glycine max
caatttagcataagcccagcatggccaccgcaacagcagcagccacctcgtccttcatggggacgcgcctcctggaggcccattccggggcggggcgggtgcaggcccggttcgggtttggcaagaagaaagccgccgccccgaagaaagtttccagggggtcgggctctagctccgataggcccctgtggtatccgggcgccaaggcgcccgagtacctggatgggagccttgtcggagactacgggttcgacccatttgggctagggaagcccgccgagtacctgcagttcgagttggactcgctggaccagaaccttgcgaagaacgtggctggggacatcattgggaccaggaccgagctcgcggacgtgaagtccacgccgttccagccctacagcgaggtgttcgggctggaaaggttccgcgagtg

SEQ ID NO: 272055 - DNA, 343 bp, Glycine max
  unsure (1)..(343): unsure at all n locations
cccacgcgtccgcccacgcgtccgcccacgcgtccgatttttagaagaacagcaagaaaagggaagggaggagaggggagagaaaatgccaatattagaaggttgtagatggaattagtgaacatacccgctcaaagcgacacccaaattacacgcacaaccacacctttaaattctccgcagaaggaaaaaaaggaaaaaagataaagaagccaaaagtccctcgttccatttccccctttcctccgcccggcgagaaaatgagagaaatcctncacatccagggcggccaatgcggcaaccagatcggagccaagttctgggaagtaatctgcgacgagca

SEQ ID NO: 272056 - DNA, 418 bp, Glycine max
cccacgcgtccgcccagattaaggtggagacagagggagaggagaaaataaacaacagctatcagagcatatataaacagttcattgaaattctaaattcacttggagttgaaccagtggagacagttggaacaccctttgatccattgctacatgaagcaattatgcgcgaggattctgatgaatttgaggatggcatcataattcaagaattcagaaagggttttaaacttggtgagcgtctcttgcgtccatcaatggtgaaggtattaacttggtcaagaactctgaaggcttgaccaggaggcacggaaggaggaccacggaaccattgaatttctgaagaccggtaaccaaaccagggccggacaaaaaccgaatcttgaaagggcaaaacttttggctgaattcaagtttg

SEQ ID NO: 272057 - DNA, 463 bp, Glycine max
catcttaagtgccgcagcaactcattctgtttcttcagtttggtataactttagccgaggtcaggaggagcactagctaagttcacaatttcaaaatggctaggggactaaagaagcatttgaaaaggctcaatgctcctaagcattggatgcttgacaaactgggtggtgcatttgcgcctaaaccctcatctggaccacacaaatcgagggagtgccttccccctaatccttattctgcaaaaccggctgaagtatgctctgacataccgtgaaatcattgctattcttaatccgcgccatggtcttggtgatggccaagtcaggactgacaagacttaccctgctggtttcatggatggtggttcaatcccaaaaaccaatgaaaactttcgcctgctctatgacactaaaggccgattccgtcttcattccatcaaggatgatgaagcaaagttcaagc

SEQ ID NO: 272058 - DNA, 382 bp, Glycine max
ctcggctccatcgtcgcctacctcctcctggtcttcgtcaccgcctccactgttccagcattgggactctccgctggagttggagttggcaacgccttggtgtttgagatcgtgatgaccttcggtctggtgtacacggtctacgcaactgccattgaccccaagaagggcaatatggcaattattgctcccatcgtcattggtttcattgtcagcgctaacattatgttgactggggccttctctggagcgggcatgaaccccgatgtgacatttgtgcctgctgacgtgagctggacctggaccaaccactggatctactgtgccggtcctctcatcagtggaggaatcgctggccgtgtttacgaggatgtctttatca

SEQ ID NO: 272059 - DNA, 266 bp, Glycine max
tgaacacacacatagaaacccaacaacaagttttaagatgatgattctaaccctcttcttcaggatcatgttatctctcctctggctctcccacgcctccgtggtggacttctgcgtatcagactacacaggccccaatggccccgcaaggtactcatgcaagagcccagcaaaggtcacggtggacgacttcgtctactccggccttggcaccgtcggcaacacctcacacatcatcaaagccgcggtgacgcccgcgttcgact

SEQ ID NO: 272060 - DNA, 406 bp, Glycine max
caagaatggcacaaattaacaacatggcacaagggatacaaacccttaatcccaattccaatgtccataaaccccaagttcctaaatcttcaagttttcttgtttttggatctaaaaaactgaaaaattcagcaaattctatgttggttttgaaaaaagattcaatttttatgcaaaagttttgttcctttaggatttcagcatcagtggctacagcctgcatgcttcacggtgcaagcagccggcccgcaaccgcccgcaaatcctctggcctttccggaaccgtccgcattcccggcgacaagtcgatctcccaccggtccttcatgttccgcggtctcgcgagcggtgaaacgcgcatcaccggccttctggaaggcgaggacgtcatcaatacgggcaaggc

SEQ ID NO: 272061 - DNA, 388 bp, Glycine max
gccgcactggcgaagtactcaagggagcctgacaatccaactaagtcttgcaaggctagaggcgccgaccttagggatcattttaagaacacaaggcaaactgcctttgcaatcaggaagatgcccttggtcaaggctaaaaggtacttggaagatgcacttgctcacaagcaggcaattgcattcagacattgttgtcgaggagttggaaggacagtccacgctaagaatagacactctaatggccaaggacggaggactgtcaagtcagcataattcattcttgattagctcaaaaatgcttaaaagcaatgctgaagtgaaaggtttggatgttgatgcactgtacatttcgcatatccaaagtcatcaagcacagaagcaaaga

SEQ ID NO: 272062 - DNA, 455 bp, Glycine max
caggcttctaagtgtgaaatctcaaaaagcataaacaaatgggaatgtagtttaagtacaaacaaacaaagtggggtggcggctacaaatgctttgcaaatttttcacacttagaagcctgggggcttgtaggcgatgaagctgatgcactgcacttggcgaacgttgtcgaatccgatgatacggatgaagccgttggggtatgcagtcttagcctcttgaagctccttcaacacctgagaagcatcagtgcaaccaaacataggcagcttccacatggtccagtagcgtccatcgtagtatcctggtgacctgttgtgctcacggtacacgaaaccgtgctccaactcgaattccaagcaaggaatccatcccttcctaagaaggtattctacttcctttgccaattgtgcatcatcaaggtctggcaggtaggaaagagtctcaaacttctt

SEQ ID NO: 272063 - DNA, 386 bp, Glycine max
cccacgcgtccgagttgagaactaagaaggagaagcaaatggcttcctcaatgatctgttccgcagctgttaccactgtcaaccgtgccggtgccggcatggttgctccattcactggcctcaagtccatggctggcttccccaccagaaagaccaacaatgacattacctccattgctagcaacggtggaagagtgcaatgcatgcaggtgtggccaccagttggcaagaagaagtttgagactctgtcctacctgccagaccttgatgatgcacaattggcaaaggatgtagaataccttcttaggaagggatggattccttgcttggaattcgagttggagcacggtttcgtgtaccgtgagcacaacaagtcaccaggatac

SEQ ID NO: 272064 - DNA, 404 bp, Glycine max
  unsure (1)..(404): unsure at all n locations
cccacgcgtccgcttctcttcacagaagcgtttaaacataaggcttgactagagaaagagagagagagagcttcgaatcgaaactcagaagtagaaagaaacacaaatcacaatcgctatggctaggtacgaccgagcaatcaccgtgttctcccctgacggccatctcttccaggtcgagtacgccctcgaagccgtccgcaagggcaacgccgtcgtcggcgtccgcggcaccgacaatgttgtcctcggcgtcgagaagaaatccaccgccaaactccaagactccaggtcggtgaggaagatagtgaatctggacgaccacattgcgctggcctgcgcggngctgaaagccgacgcacgcgtgctcatatacagggcacgtgtggagtgccagagtcaca

SEQ ID NO: 272065 - DNA, 463 bp, Glycine max
  unsure (1)..(463): unsure at all n locations
gcatgattgtcaccggcatggaggtggcagatattgatggctccccaaggatgggtccgacggttggggcgatgatgatatcagggcagaaggcggctcatttggcgttgaaggcgttggggaggaacaatgcaattgatggaacgtgtggagttggaagggaagaaccccagcttattttcgcttctgcagacactgaggaaattgttgatgcttaaacttactttcaaattagctagatatatagctnttcttttcttttctttctgtttggtccctacttaattatgattttaattttggaataaatgaacaacatgtgaattatgaaggagacaatacttggtggtacattgtatttggacagcacgtgccacgtatagcggaagaaaccatatattatcaaggatgggagagatagacgccacttaattnttttcatctattctcaatcgatgaaaag

SEQ ID NO: 272066 - DNA, 460 bp, Glycine max
aaacccactaagatggcttcctttgtatccttcctagtgctgcttcttgcagcccttatcctgatgcctcaagggcttgctacttactacaaaccaattaagaagccaccagtgtacaagcctccagtgtacaagccaccagtgtacaaaccaccggtttataagccaaaaccaccggtttacaagccgaaaccaccggtttacaagccaccatataagaagccaccatacaagataccaccttatggaaagtaccctccagtagaggacaacacccatgcctaaagcaagcaatgaggtctattatctacttaataaataagaggaactgctttgtgttttctagcattgtgatttacaacttcgtagcaatgcatattcttgactcttgcatgcacttcaatccttcgtagcattaatgatgtggccaagtcatcatgagcatcatacttatttcttt

SEQ ID NO: 272067 - DNA, 361 bp, Glycine max
  unsure (1)..(361): unsure at all n locations
cccacgcgtccggaagcgagcgaagatgtcgggtcgtggaaagggaggcaagggtttgggaaagggaggagccaagaggcacaggaaggtgcttcgtgacaacatccagggtatcaccaaacccgcaattcggcgtttggctcgcagaggtggtgttaagagaatcagtggtctcatctacgaggagacacgtggcgtcctcaagatattcctcgagaacgttattcgcgacgctgttacctacaccgagcacgctataagaaaggaccgntaccgctatggatggtgnttatgctcctaaggaggcagggaaggactctttacggtttcggtggtaaatttctagggtttccatcggcgt

SEQ ID NO: 272068 - DNA, 269 bp, Glycine max
cccacgcgtccggcttgggatctagcagagtgcatgaaaggaggcacagtatctaaggctggggttccacatgatcgaccgcaacggcgacgggagaataacgaagaaggagctgaacgactcgctggagaacctgggcatcttcatctctgacagggacctgagcctaatgatccagacgatcgacgtcaaccgtgacagttgctaggacatggacgaggtagcggagctgaatcagaccatcatggaccaacaccacagtgacgagg

SEQ ID NO: 272069 - DNA, 361 bp, Glycine max
gtgcgcagaataaaatttctcatcgacgatgtcgaataccttacaacgcgcccttcgcgccaccatggcccggccgttctccaccggcgcattggccgaaattaagcgaggcgagatcggaatggtttctggaattcctgaagaacaccttcgtaggagggttctaatttactctcctgctagaactgcatctcaacaaggatctggaaaggttggaagatggaagatcaacttcttatcaacccaaaagtgggaaaatccactgatgggctggacattcactggggacccctactctcatgttggtgaatctggcttgacttttgattgccaacaagccgcaaaagcatttgcagagaaa

SEQ ID NO: 272070 - DNA, 346 bp, Glycine max
  unsure (1)..(346): unsure at all n locations
cccacgcgtccgcccacgcgtccgcccacgcgtccgattgttttcttcatatcttccttgtcactgcccgtgtgtcgccgccatggccaccgtcaccacccaagcctccgccgcaattttccggccatgtacctcgaaatcgaggtttttgaccggctcttccggtaaacttaaccgggaagtgactatgcggccaatggggtgccctccttctgcctctttcaaggttgaagccaagaagggagagtggttacctggcttggcctncccaacttacctcaatggcactcttcctggtgacaatgganttgaccctctngggctagctgaggacccagagaacttg

SEQ ID NO: 272071 - DNA, 313 bp, Glycine max
acaacaatgggttctatgtgcttatgctagttgggatagtggttagcactatggttgctacctgtgctggtagcttctaccaagactttgatctaacatggggtggtgaccgtgctaagatattcaatggtggccagcttctatcactttccctagacaaagtctctggctctggcttcaaatcaaagaaagaatacctatttgggaggattgatatgcagctcaagctcgttgccggcaactctgctggcactgtcactgcttactacttgtcatcccaaggccaacacatgatgagattgatttcgagttt

SEQ ID NO: 272072 - DNA, 258 bp, Glycine max
aattttcattattcaaccttgatctttatatagcccgcaacaccgagagagatgacaaaaagaaaaaaaaaaaaaaaaaaaaaaaaaaaaaaaaaaaaaaaaaaaaaaaaaaaaaaaaaaaaaaaaaaaaaaaaaaaaaaaaaaaaaatttaaagaaaaaaaaaattattacactttcatgggagttaaaattttttttttgggaaaaactaaatataattaaattgtaataggttttaaaataaatttactgttaaa

SEQ ID NO: 272073 - DNA, 417 bp, Glycine max
cccacgcgtccgcccacgcgtccggaacatgtagttgagaactaagaaggagaagcaaatggcttcctcaatgatctcttccgcagctgttaccactgtcaaccgtgccggtgccggcatggttgctccattcactggcctcaagtccatggctggcttccccaccagaaagaccaacaatgacattacctccattgctagcaacggtggaagagtgcaatgcatgcaggtgtggccaccagttggcaagaagaagtttgagactctttcctacctgccagaccttgatgatgcacaattggcaaagggaagtagaataccttcttaggaagggatggattccttgcttggaattcgagttggagcacggtttcgtgtaccgtgagcacaacaggtcaccaggatactacgatggac

SEQ ID NO: 272074 - DNA, 358 bp, Glycine max
tcgaatttttcctacattctccgttacttatgtttacttgattgtgtcatgttctttatttccaataaaggttattgtaggccccatgtgttgttgaactactatactgtgcgaatggtgcatgcttgctggaccagtatgtatgcctcagtgcgttttgtgatgtgcggttctaatgtaattttgcttttggttgttgatgattatgttatatgttgtcttgataatataatagtagtactgcttttctgttgtgtctaaaaaaaaaaaatcgtaagccttatcaagattcttcaaaagaagaaagagcagtctttaccgggaacaaagaaagttgaggaacaatctttgtctggat

SEQ ID NO: 272075 - DNA, 479 bp, Glycine max
  unsure (1)..(479): unsure at all n locations
cccacgcgtccggctcatttacacacctctccaacctttcactttcagctttatttgaatccctctctctcctttccaaatggccagcgttgaggttgcacatcaaacaccaacaacagttccagaaaatgaaacaaccgaggtaatcaagacccaggaaacaaccccggaaccagtaccagccactgaggctcctgcaacagaacaagcagcagctgaggttcctgctcaagaagaacaacaagcaactgaggttcctgccccagaatcaaccaccgaagcaccaaaggaagaaaccaccgaagcaccaacaacagaaacagtagaaacaacaactacagaagaagccaagccagaggagcctaaagaagttgcagttgagaccgangaggtggtgacaaaggagacagaggaagagaagccagcagcagaagagaaatcagaggagaaaactgaagaagtgaaagaagaagcagaag

SEQ ID NO: 272076 - DNA, 456 bp, Glycine max
gctcttcccaccacctctgcttcaagagcaaacgtgattctgcccccgaagcccttgaatggagttcgaatctcgacacccaaaaggaggactgagtcggtgattgtctccgccgccgcggaggacgcgagttcggctgtggagggtgggtcgccgccgcctcctccggcggagagcgagaaagagagcggcgcctccgtggagaagcttccgttggagtcgaaggtgaaggagagagaggagcaaaagctgaggatgaagctggcgaagaagataaggttgaggcggaaaaggcttcttcggaaacgcaagttgagaaagagggtagatggccaccttctaagatgaagaagttgaagaatgtatgattggcaatttcaatgtgccttttttttttttgcaggtttatttaagcttcattggtcattttctcattttattttcaaattaatgtgt

SEQ ID NO: 272077 - DNA, 338 bp, Glycine max
gccacgcgtccgcggaaccatggtgagcacctccttcatgaggaagcaacctatgacgaccgagagcctaaagacattccccaacgctctttttggtctgaaaggtggacgaggtggtcgtgtaacttgcatggcctcgtacaaggtgaagctcataaccccagaaggagaagtggagtttgaatgcccagatgatgttgtcattgttgacaaggctgaagaagaaggcattgaacttacctactcgtgcagggctggttcttgcgtttcatgtgttgggaaactcgtgaaaggtgacgtggaccagtcagatggtagctttcttgatgatgaacaaa

SEQ ID NO: 272078 - DNA, 381 bp, Glycine max
ctttgttttactctgctgtgtatcagtcaaaatacgctggaactggggcagcagttgagtatgctgttttgcatcttaaggtgtctgagattgtggtcattggacacagtgcttgtggtggtattaaggggcttctgtctttcccatatgatggaacctactctactgattttattgaggagtgggtcaaaattggcttgcctgcaaaggcaaaggtgaagacacaacatggggatgcaccttttgctgagttgtgctcacactgtgagaaggaagctgtgaatgtttcccttggaaaccttctaacatacccatttgttagagatggcttggtgaacaagacattgtcactaaaaggaggatactattacctttgttaag

SEQ ID NO: 272079 - DNA, 325 bp, Glycine max
cccacgcgtccggtcacccacagtgtatgcaatacgctgcttatctttattgatgaatgacatggcacaagaagctcttggggatgcaatgcaagcccaagtggtatctccagagtggcctactgctttgtatcttcatgcagcttgtcttttcagcctcggaatggaaaatgatgcacaagagactctcaaagatgggactaacatggaaggcagaaaaaacaaaaactgaaaattttgtatagatttttccttgtcttttgttgtcttaagcattatttaatttcatgccctttaaagtctttgttaggctttgcctccaaaa

SEQ ID NO: 272080 - DNA, 243 bp, Glycine max
ctagactcttctttttctctaagtctaaggggtgccctgagatcactttgagcaatggtgaaggctgtggcagttcttggcagcagcgagggtgtcactggaactattttcttcactcaggagggaaatggtccaaccaccgtaactggatctcttgctggtcttaagcctggtctccatggcttccatgtccatgccttgggggacactaccaatggttgcctgtcaactggagcgcatttc

SEQ ID NO: 272081 - DNA, 188 bp, Glycine max
cccacgcgtccggcagtcgttacagagactccataacccgaaaatgcctttcaagaggtacgttgagattggaagggttgctcagatcaactatggcaaagagtatgggaggctcgtggttattgtcgatgtcattgaccagaatagggctcttgttgatgctcctgacatggtgaggtcccaaagtg

SEQ ID NO: 272082 - DNA, 476 bp, Glycine max
atcaaagccatgtccacctccaacttttctattgatctctccgtctccctatccttgtttttgttgctacttaccaaggcacactctaccgataccgtttctttcaccttcaacaagttcaacccagtccaaccaaacattatgctccaaaaagatgctagtatttcatcctctggggtgttacaactcaccaaagttggcagcaacggcgtgcccacctcgggatctctcggtcgtgccctttacgctgccccaatccagatttgggacagcgaaaccggcaaggtagccagctgggctacatcctttaaattcaacattttcgcacccaacaaatcaaactcagctgacgggcttgccttcttcttggcacccgtcgggtctcagccccaatccgacgatggatttcttggtcttttcaacagtcccttaaaggacaagtctctccataccgtggcgattgagttcgatacttt

SEQ ID NO: 272083 - DNA, 346 bp, Glycine max
gatcccggtggccttttccctctctttctctggaaaattcccccgattttctcgagaaagtgagacggaattatgagctttcaggacatcgaggctgggcggcccttcggttcgaggcgcgggttgatgaacgggaagcaagacccgacgcaagcggtggctgccggaatattccagatcaacaccgccgtctccaccttccagagactcgtcaacaccctcggaacccccaaagacacccccgacctccgcgaaaaactccacaagacaagactacatattgggcaattggtgaaagatacatcagctaaacttaagcaagccagtgacattgatcaccatgctg

SEQ ID NO: 272084 - DNA, 362 bp, Glycine max
ctcagaaatcaaaagcctacttcaagagatatcaagtcaagttcaagagaagaagagagggaaaaaccgattaccgtgccaggattcggttgattaatcaggacaagaacaaatataacactccgaaataccgatttgttgttcgctttagcaacaaggacattgttgcacaaataatatctgctagcattgctggcgatattgttcttgctgcagcatatgcacatgagctgccacgatatggtcttgaagtagggcttacaaattatgctgcagcttattgcactggtctcctgttggcccgaagagtcctcaaaacacttgaaatggatgaggagtatgaaggaaatgttgaggctact

SEQ ID NO: 272085 - DNA, 318 bp, Glycine max
tctccctctgcgcatgaattgggaacattcgacaggtagagtttcttcaatggctcctaaagttgataagaagaacgacccagaggcacaggccttgaaaactgctaaggcagataagtctggtgctacctttaagaagaaggcacagaagatccgaacttgtgtcactttccacagaccgaggacattgaagaaggataggaaccccaagtactctagcattagcgcgccttcaagaaataagcttgatcattatcagatcctgaaatactctttgaccactgaatcctgcatgaagaagattgaggacaacaacac

SEQ ID NO: 272086 - DNA, 352 bp, Glycine max
caaaaatggcatcattcaccatgacagcttccatccttggcagcccagccgtcaccaaccggtcggcagtagcaacgcagaggagatcactcgtagtgaatgctgccaaagctgttgaagcagaaaaggtcagttatgacaatgacatggatggtagcaatggaaggaggaacttgatgttcgccgcggcggcggctgctggttgctctggtgctgggatggcagtggcagatgagccttaaccaggaaccccagaagccaagaaaaagtatgctccgatttgtgtcaccatgccaactgctaggatttgtcgcaattgagggactcttggttttattttacttctgatgat

SEQ ID NO: 272087 - DNA, 406 bp, Glycine max
cccacgcgtccgcccacgcgtgcgatggactgaaatgaattgaagaaaagttctcttgctaataccatactgatactatggcctacaaaccaattatccattcttctgattttaatttattggcaaaatgtaatattcccgtaaatggactacattgtttaaaattaccataatgaagggaagctacgctcttcaaattcaatattatttcatttcaagtgtcaatgatgtatcttacataaatattatataccatcaatagctaatacacatttctaagctataagctgctccattcacaaagaggggattgttactcaagtttctgatattgggaagtggttccacccttgcatacttcagtgcaacagcctcaggtgacattctaccaatcaagaaaggacca

SEQ ID NO: 272088 - DNA, 364 bp, Glycine max
gcctagtcatactctgtatcatattatttcgataatcatccatagttactgaagaaaatggcaaccatctccgctgctatcacaaccccatcgatcacccgcgcatgtctagtgcaaaaacgttctcttgggttctcatctcccgttcttggtttgccagcaatgggtaaggtgggaagagtgagttgctccatggaggaaaagccttcttctgtgaaggaaagcagctcaagcatgttggggatgggggcatctttgatggcagcggccagcgccgcagccatgtcaggcccagccatggccttggtggatgagagacttagcactgaaggaaccgggctacccttcggcctcagcaacaacc

SEQ ID NO: 272089 - DNA, 416 bp, Glycine max
  unsure (1)..(416): unsure at all n locations
ttaagaagatcattaatggcttctcttgcaaccttagctgctgttcaaccagctgcgctcaatggccttgctggaagttccctctctggaactaagctctctttcaagccctctcgccacactgtcaaatccaagaacttcaggagtggtgccgtggtagcaaagtatggtgacaagagtgtgtactttgatttggaggatctgggcaacactacggggcagtgggacttgtatggctcagatgcaccttcaccctacaaccctcttcagagcaagttcttcgagacatttgctgctccattcacaaagaggggattgttactcaagtttctgatattgngaggtggttccacccttgcatacttcagtgcaacagcctcaggtgacattctaccaatcaagaaaggaccacaact

SEQ ID NO: 272090 - DNA, 198 bp, Glycine max
  unsure (1)..(198): unsure at all n locations
cccacgcgtccgaaggaaatggcctacatacccttagatgaggataccaaggtcaagggaaaggcagccattgatgttgtgtgcaacccattggggaaatctggaggagctctgattcagcagttcatgatcttaactnttggttcactagctaactcaaccccatacctaagaagggtccttctggtgattggtctt

SEQ ID NO: 272091 - DNA, 315 bp, Glycine max
acgatctcatgagaggcaacactagcagagctgcactgtagccaaccagctgcgctaaaggtgcgcgctcgaaggatgcgtatctgggaactaagctgtctctcaaggcgatatctccacactgtgagatccacgaacttcaggattgacgccgtggtagcaaagtctggtgacaagagtgtgtactacgattcggaggatctgggtaacactactgggcaatgcgacttgtatggctcacatgcaacttcacgctacaaccggtcttagagcaaggtctgcgcgacatttgctgctccattgacaaacagggga

SEQ ID NO: 272092 - DNA, 347 bp, Glycine max
cccaaacgttgaaatccctcactggtacgcctacggaggaggaccactctctccgttcatctgttcttcttccaatgctgacacgtgctcattattattctcctccgaccatttccgaatgttccagttcaaggtccgcatctgtccacgtggcaggtcccacgattggacggagtgtccctacgcccaccctgccgagaaggctcgtcgccgtgacccccgcaagtaccactactacggcaccgtctgccccgattaccagaatgcgaactgcaagaggggcgacacttgtcaattctcgcacagcgtcttcgaatgctggctccatacttctcgataccggaccc

SEQ ID NO: 272093 - DNA, 410 bp, Glycine max
tagcataagcccagcatggtcaccgcttcagctttaggcacctcgtccttcatggggaggcgccgtctggaggcccattcgggggcggcgcgggtgcaggcccggttcgggtttggcaagaagaaagccgccggcccgaagaaagtttccagggggtcgggctctagctgcgataggcccctgtggtatccgggcgccaaggcgcccgagtacctggatgggagccttgtcggagactacgggttcgacccatttgggctagggaagcccgccgagtacctgcagttcgagttggactcgctggaccagaaccttgcgaagaacgtggctggggacatcattgggaccaggaccgagctcgcgtacgtgaagtccacgccgttccagccctacagcgaggtgttcgggct

SEQ ID NO: 272094 - DNA, 299 bp, Glycine max
tttagcataagcccagcatggtcaccgtttcagcattagccacctcgtccttcatggaggggcaccgtctggaggcccattggggggcggcgcgggtgcacgcccggttcgggtttggcaagaagaaagccgccggcccgaagaaagtttccagggggtcgggctctagctgcgataggcccctgtggtatccgggcgccaaagcgcccgaatacctggatgggagccttgtcggatactacgggttctacccatttgtgctaaggaagcccgtcgagtacctgcagttctagttggac

SEQ ID NO: 272095 - DNA, 435 bp, Glycine max
  unsure (1)..(435): unsure at all n locations
ctccgagcctcaacagcagcaaagcaaattcgcagttggtaagagaaaatggccgacgatagcacagctacctgcatcgacatcctccttgccatcatccttcctcctcttggtgtcttcctcaagtatggctgcaaggtagaattctggatctgtttggtgcttaccctttttggctacattcctggaattatctatgctgtctatgctatcaccaagtgatagatcatattcatcattttaattttgggtggacaatgaataatttgtcaaattaaaggacgacggctatgcatgttcctcatcaactccaatattgatattcctgtataatcctttgatctcagatggacaaatgtgattctttnttgttttctgtctatcggtctcaatattcctttttcatggttgtgtttttaataatcgttataatta

SEQ ID NO: 272096 - DNA, 473 bp, Glycine max
cccacgcgtacgaacttggatatcgtatcgtttagctatgcctatggtctcccaggagcgatggttagtggaagcggcgctccgagttgggaacacctttctcttcggacctgacggcgccactcagatgacttgatccttatatgtatatatcatgtattcttatcctttgcttttctaattctatctatatctcggatttttcattttcgttattattgatttttcatttttgttactcatattgttttgattacttttgttatatttttgataactatttttatttttgtacttttatttattatttattattctttttttttttctttttttattctttattttttattttttgttttctgttatttcttttttttttttttttttatttttttttttatttttttgtttttttttttatattttttctttttttttttctttatttttttttttatttcttttttttt

SEQ ID NO: 272097 - DNA, 394 bp, Glycine max
ccacgcgtacgaaaaaaaaaaaaacagcaaatttaaaagaaaataaaaaaataaaaggagaaggaaatagaaaaaacaaaataattgaaataataaaataattaattaaatgtaataaataaaaaaaaaatgaaaggtaaaatgtgtggatcttttaggtgcttaagcttttcgtactacgtttttcgacttatatatgcttgctatgctatctgtaaatgatatatcatatccataattttaattttgagtacccagtgaatcctgtgttaacttaactgacatccgttatgcatgttcctcattaactccgatattgatattcctgaatgatcctttgatctcacattgacaaatgtgaatgtttcttgatttctgtctattggtctcaata

SEQ ID NO: 272098 - DNA, 325 bp, Glycine max
acgcccacgcgtacggtcagatggtagcttccttgatgatgagcaaatagatagtggctgggttgtcacctgtgttgctcaacctaggtcagacgttgtcattgagacacacaatgagggagagatcgaatgatcaatatatatatatatgatgtaatcttatccattgctgttctaattctatctatatcttggatctactatttagttatagtgatttggcatatttgtgacaaatagtgagtttattacttttgtcatatttgtgaaaacaagtgaaattgttgcaccttaattcattaaaaaaaaaaaacaataaataaaa

SEQ ID NO: 272099 - DNA, 476 bp, Glycine max
ccggaaatcgttcctatcatcacttctcaaatctcgaaccctctcgttcgtgccgatcactaggtcacacttcatcaatggcgggtagaggcaaaaccctaggatccagcgccgctaagaaggccacctcaaggagcagcaaagccggcctccaattccccgtcggtcgtatcgccaggttcctcaaggccggaaagtacgccgagcgcgtcggcgccggagcccccgtctacctcgccgccgttctcgaatatctcgctgctgaggttttggaattggctggaaacgctgcgagagataacaagaagactcgaattgttccacgccacatccaattggcggtgaggaacgacgaagagttgagcaagcttctaggagatgttaccattgctaacggcggtgttatgcctaacattcacaaccttcttcttcccaagaaggctgggggctcatccaagggtgctgctgctgacgat

SEQ ID NO: 272100 - DNA, 397 bp, Glycine max
cgcgtgcatagcagagtcagagacagagacgcagccatggggcggagacctgcgaggtgttataggcaaattaagaacaagccataccccaagtcacgtttctgccgtggtgttcctgatcccaagatcaggatttatgatgttggtatgaagaagaagggtgttgatgagtttcctttctgtgtccatctggttagttgggagaaggaaaatgtttcaagtgaggccctggaagctgctcgcattgcttgcaacaagtacatggccaaatttgctggaaaggatgctttccacttgagagtcagggtgcacccattccatgttcttaggatcaacaagatgctttcgtgtgctggtgctgataggctccaaactggaatgagaggtgcttttggaa

SEQ ID NO: 272101 - DNA, 331 bp, Glycine max
cccacgcgtccgcccacgcgtccggctttgtgttttctagcattgtgatttacaacttcgtagcaatgcatattcttgactcttgcatgcacttcaatccttcgtagcattaatgatgtggccaagtcatcatgagcatcatacttatttctttgtgaatgtaaatcaaaattataagagagaaaatggtgcttttgtactacagattactataaataaaaaacttttatggttttcaaaaaaaaaaaaaaaaacaaaaaaatataaaaaaaaaaaaaaaaaaataaaaaaaaaaattaataaaataaaaaatatatacatataatactat

SEQ ID NO: 272102 - DNA, 441 bp, Glycine max
cccacgcgtccgcccacgcgtccggccagcgtaagaagaatggcttctcaaagtttgagtttaccaccaacacatattccttacaataggataattgggaagcttgattccaagtttttgttgtggccttcttgtgctcatatcaaacccagaagaatttctacctcaattcgagcaatgggttcctccgcttcttcccactcccagtcacaatatgcagacagcgttgaatctgaagcaggagctgatactattgactataaatctttaaccgatgaagagtggaagaagcggctcacaaatgaacagttctatattactcgtcagaagggaactgaaagagctttcactggggagtactggaatactaaaaccccggggatttaccattgcatatgttgcgacacacctttattcgaatcatctactaagttcaatagt

SEQ ID NO: 272103 - DNA, 400 bp, Glycine max
cccacgcgtccgcccacgcgtccgcccacgcgtccgcttctctcggcgtcgccatggacgaagaagaggtgcgcaagatcttcagcaagttcgacaagaacggcgacggcaagatctcgtgcgcggagctgaaggagatgatggcggcgctgggatccaaaacgacgtcggacgaggtgaagcgcatgatggcggagctggaccggaacggcgacggctacattgacttgaaggagttcggcgagttccactgcggcggcggtggcgacgggagggagctccgggaggcgttcgagctgtacgatctggacaagaacgggctgatctcggcgaaggagctgcactccgtgatgcggatgttgggggagaagtgctccctcagcgactgccggaggatgat

SEQ ID NO: 272104 - DNA, 351 bp, Glycine max
cccacgcgtccgaccacgcgtccgctcacgcgtccgcttctctcggcgtcgccatggacgaagaagaggtgcgcaagatcttcagcaagttcgacaagaacggcgacggcaagatctcgtgcgcggagctgaaggagatgatggcggcgctgggatccaaaacgacgtcggacgaggtgaagcgcatgatggcggagctggaccggaacggcgactgctacattgacttgaaggagttcggcgagttccactgcggcggcggtggctacgggagggagctccgggaggcgttcgagctgtacgatctggacaagaacgggctgatctctgcgaatgagctgcactccgtga

SEQ ID NO: 272105 - DNA, 456 bp, Glycine max
catttcctttcgaattgaggaagggtaaggtgtcttggatggccaagtcatctttgttagctgtcacgttgatctgcgccgtcacggtattggtggcgatgagtcggtggccgacagccgtgggcggcggggaccaccacttgggaatgggatgggtttccagcacgtgcaaggggaccattgctgagtgcctggtatgggaggagtacgagttggattcggagatcaaccggcgcatcttagccaccaacaagtacatcagctacgttgcgctgcataggaacactgctacctgctctcgacgcggagcctgctactacaattgccgacccggagcacaggccaatacttacagccgtggctgcagcgccattacgaggaatggagactgaaggtttgtcttctcaataaaatgaagttcgatctaataatatctaatacacatactaattaaaa

SEQ ID NO: 272106 - DNA, 216 bp, Glycine max
acgacccgccgctctttgggaattgctctctcaattcttctcataaggctaatcctcctggcgagagtcaccaactacacgggcctttggtattcctattccctctactgctgatcgtcaaacatacttctttctcactcttctcttctatcccttattcttacttatattctttcattcataatccaactcactttatcttttctctactgtctt

SEQ ID NO: 272107 - DNA, 456 bp, Glycine max
cgcaactgcaaatccttccaacggttttccatctgctccaccacctccttctcctcgtccaggcgctccatcactactggctccgccaccaggtggaccacctccctcacctcctcccccaggaagcctatcaagaggtggaatggacggtgacaaagttcaccgagctccacagctcgttgaattttatcaaacattgatgaaaaggtatgcaaagacggattcttcatcactattagatacttctgcacgtaatgcatctgatgctaggagcaacatgattggcgaaattgagaatagatcatcattcctcttagctgtgatagctgatgtagaaacacatggtgattttgtcatgtccttggcagctgaagttcgagcatcctacttctcagatattaatgactaggtggcctttgtgaactggctagatgaggatactcccatcttggttga

SEQ ID NO: 272108 - DNA, 375 bp, Glycine max
gtgaatgaagtatccattacagacatataccctcgctaaaggattgttttcatgttttctttgaccaatccaggatatgtttaaatgtgtcaaaccatggtgttgctgttatacaatcctagtgcatatatattgtaaatattaatagttaaaagaattctgtcaaaaaaaaaaaaaaaaaaaaaaaaaaaaaaaaaaaaaaaaaaaaaaaaaaaaaaaaaaaaaaaaaaaaaaaaaaaaaaaaaaaaaaaaaaaaaaaaaaaaaaaaaaaaaccccaaaaaaaaaaaaaaaaaaaaaaaaaaaaaaaaaaaaagggggggcctttttaaggggcccacttttttcaacccgttttttaacacctaatttttttt

SEQ ID NO: 272109 - DNA, 365 bp, Glycine max
aacttaaggtttcaaacctaggaagttggaagtcatggcagcaacattgatggcagcaacaacaagttctggtactcttaaagcaactcctttccttggccaaggcaagggtgccaatgccaatgctcttagggatgttgtctccatgggaactgggaagtacaccatgggcaatgatttgtggtatggaccagacagagtgaaatacttgggacccttctcagctcagaccccttcatacttgaaaggagaattccctggggattatggatgggacactgctggcttatctgctgacccagaagcatttgccaagaacaaggctcttgaggtgatccatgggcgatgggccatgcttggagcac

SEQ ID NO: 272110 - DNA, 399 bp, Glycine max
cccacgcgtccgattaagttcattttcctccctttcactctcgtagacatcacaaaccttccgtccattcatcccacgcatggctgccatgaactctagcgtattggcctgtagctatgccatatcaggtgcagcgtgttcggagctcaatgggaaggtcacttccgtggcctatgttgcatgctctggctacaagttgccattgatcaaagctgaggccagagttcctaaagccaaagaatctgaaggaggaaggagaggtgcccttgttctcttggcagctacccttttcacctctgcagcttccaattcttctgccaatgctgggatcattgaagattaccctgagaggagcaaggccaacaaggaattgaatgacaagaagaggttagctactac

SEQ ID NO: 272111 - DNA, 425 bp, Glycine max
cccacgcgtccgcacacaagacaaagcgcggtgaagctgctcttgcacgactgaaggtgtacgagggcattcctcctccttatgacaagaccaagaggatggttgtccctgatgctctcaaggtgttgaggcttcagaagggacacaaatactgtcatctgggccaattgtcatctgaggttggatggaactactatgataccatcagggaacttgagaagaaaaggaaggagagagcacaattgtgttatgagaggaagaagcagcttgccaaattgagggtgaaagctgagaaggttgcagaggagaagcttggttcccaaattgaaatccttgctcctgttaagtattaagtagtatctagttagtgtttcaaggtttggtttgaggtgtataacgaattgaactacatttcaattttgctg

SEQ ID NO: 272112 - DNA, 440 bp, Glycine max
cccacgcgtccgcccacgcgtccgctcaattccattctcttctctgagtctcaacctaattccccattcatccatctttacgtgtttgttggattccatggccaaaagctccttcaagcttgaacatcccttggaaagaagacaggctgagtctgctcgcattagagacaagtatcctgatagaatacctgtgattgttgagaaagcggaaagaagtgacatcccagacatcgataagaagaagtaccttgtcccagcggatttgactgttggtcagtttgtttatgttgtccgtaaaaggattaaggtcagtgcggagaaggctatttttgtttttatctacaacactctacctccaactgccgctttgatgtcttctatttatgaggaaaataaggacgatgatgggtttctttacatgacatacagtggagagaaca

SEQ ID NO: 272113 - DNA, 446 bp, Glycine max
acgctattattcacccattcgataaatattattcttttcatatgagcactcaacctaattcgagattggatgccatctttatatgggagctaaatttactgacgcaaacactccttcaagcttgaacattatttggaaacataacatgatgagactggtcgcattataaacacgtatcctcgatagaatacctgtgattgacgaaaaagcataaagaagcgacatatcagacattgatcagaagaagtaccttgtaccagcggatttcactgctggtcagttagcttatgttgatcgtaaaaggattaaggtcagtgctgagaaggctatcattgtttttatctacaacactctacctccaactgccgctttgatgtcttctatttatgaagaaaataaggactatgatgggcttctttacatgacatacagtggatagaacactt

SEQ ID NO: 272114 - DNA, 281 bp, Glycine max
aagggctcagaatgcacgtaacatatggaacaggcctcttaagagcgtttatattagtgattgtggggagctgaaagtgacaaagccttccctcacgccttctttgccataatttatttccatgtatgtatatattatccgaggggatttcatgttactggtctatgtaaaatcacactcacatattctttgaaaataaatgatgaataaaaccacaagcaagcaacatgaatgacttttgaagttgaaaaaaaaaacgctatagtctaacaaaaaaataa

SEQ ID NO: 272115 - DNA, 411 bp, Glycine max
  unsure (1)..(411): unsure at all n locations
gcagaaatggcctcttcagtgatggcatctgtggccctcaaacctgcccctttcactgttgagaagtcctcagttagaggccttccctccctctcaaggaactcctcttcattcagagttgtggccagtggtggcaagaagatcaagactgacaagccttatggaattaatggtggcatggctttgagggaaggagttgatgcatctggcangaaaggaaagggaaagggcgtttaccagtttgtagacaaatacggtgctaatgtcgatggttacagtcctatctacgacaccaaggactggtctncaaccggtgatgtctacgctggcggtacgactggcttggctatcntggctgtgactctactnggtcttcttgctcgtggtgcacttcttggctacaacacaagt

SEQ ID NO: 272116 - DNA, 325 bp, Glycine max
gcatagatggcctcttcagtgattttatctgtttccctcaaacctgcccctttcacgcttgagaagtcctcagttagaggccttgcctccctctcaaggaactcctcttcattcatagttgtggccagtggtggcaagaagatcaagactgacaagccttatggaattaatggtgtcatggctttgagggaaggagttgatgcatctgtcatgaaagtgaaagggaaagggcgtttaccagtttgtatacaaatactgtgctaatgtcgatggttacagtcctatttactacacctatgactgttcttcaaccggtgatgtctac

SEQ ID NO: 272117 - DNA, 385 bp, Glycine max
agaaaggtgttgaacaaggtcctcagattgacgtggaacaatttgagaaagtccttaggtacataaggtctggaattgaaagccatgccacccttgaatgtgggggtgatagattgggctcaaaaggcttctttgtccagccaactgtcttctcaaatgttcaggatgacatgttgatagcacaagacgaaatctttggcccagttcagtccatcttgaaattcaaggacattgatgaagtaatacgacgggcaaataaaacacgctatggtctagcagcaggtgtgtttactaagaacgtgagcacagccaacacattgatgcgggcactgagagctggaactgtgtggattaattgctttgatgtttttgatgctgcaattcc

SEQ ID NO: 272118 - DNA, 444 bp, Glycine max
attttatactatacctacattttgataattttctttgtagttgatagccatggctacccgtggaaagcttgaggttgacattgatctcaagtccaacgcagacaagtactggcaaacccttaggaattctactgaaatattccctaaggccttcccacatgattacaaaagcattgaggttcttgagggtgatggcaagtctcctggttctatccgccacataagttatggtgaaggttcaccacttgtgaaatcatcctttgagaagattgaggctgttgatgaggaaaagaaggtagtgtcgtacactatcattgatggggaactcctccagcactacaaaacattcaaaggagacatttcagtgactccaattggcgatggatgcgaggtgaagtggagtgctgcgtacgaaaagggtagcccatgatatttctgatccaa

SEQ ID NO: 272119 - DNA, 313 bp, Glycine max
acggaaaaacacgtagttgagaactccgtagaatgcaatggcttcgttaatcgatctcctggccaggtgataccaccgtcaaccgtgccggtgccggcatggatgctccattcaccggccttaaatccatggctggcttacctacgaggtagacctacaatgacattacctccattggttgcaactgctgaagagtacaatgcatgcaggtgtggccaccaattggctagaagaagtacgagactctgtcctacttgccagacctcgatgatgcctaattgtcataggaagtcgaataccttctaatgaaagg

SEQ ID NO: 272120 - DNA, 266 bp, Glycine max
acgacaaaaacaagtagttgataactaagtttacttgaaatggctaactcaatgatctcctgcccaggtgttaccacctttatccgtgccgactccctcatggttgatccattctaccggacttaaatacatggctggcttcaccacgaggaagaccagcaatgacattccttccatagctagcaacagtcgtagcgtacaatgtatgcatgtgtggacacgactatactagacatagttcaatactctttgctacttgccatacc

SEQ ID NO: 272121 - DNA, 471 bp, Glycine max
tgattgcctccctctgctgccgtccctaatctgaaggctcccgccatctgcgatcggatttcatggctccaaagaaggacaaggctcccccaccttcatccaagcctgccaagtctggcggtggcaagcagaagaagaagaagtggagcaagggtaagcaaaaggaaaaggtgaataacatggtgctcttcgatcagggtacctatgacaagctcctctctgaggcacccaaatacaagctcattactccttccattctctctgaccgtttgaggattaatggatcacttgcaaggaaggctattagggaattgatggctagaggttcaatcaggatggtgtctgcccatgcaagtcagcagatttacactagagctacaaacacctagatgtactggttataatttatgtagtattgatgcacctctgaagtgaaattttggtttttctggttgagacgtacctcatgct

SEQ ID NO: 272122 - DNA, 325 bp, Glycine max
cccacgcgtccgctctctgtgtatttccctacctctcccttcaagatgcagatcttcgtcaagaccctcaccggcaagaccatcacccttgaggtggaaagctctgacaccatcgacaacgtcaaggccaagatccaagacaagggaaggatccccccggaccaacaacgtcttattttcggccgaaaggaacttgaagaccggcggacccttgctgacttccaccttcaaaaagggaggtccttttaacttggtcttcggcttccgggtggccttgcaaactttcgttaaaacattaaccggcagaaccttaaccttagaggtt

SEQ ID NO: 272123 - DNA, 377 bp, Glycine max
tgagaactaagaaggagaagcaaatggcttcctcaatgatctcttccccagctgttaccactgtcaaccgtgccggtgccggcatggttgctccattcactggcctcaagtccatggctggcttccccaccagaaagaccaacaatgacattacctccattgctagcaacggtggaagagtgcaatgcatgcaggtgtggccaccagttggcaagaagaagtttgagactctttcctacctgccagaccttgatgatgcacaattggcaaaggaagtagaataccttcttaggaagggatggattccttgcttgtaattcgagttggagcacggcttcgtgtaccgtgagcactacatgtcaccaagatactacgat

SEQ ID NO: 272124 - DNA, 365 bp, Glycine max
acggccgatgccaaacttgctgtgaataagaagggcgccgtcaccaagactaggaaacccgccggaaaggggaaggcagcgaaagatcctaacacgccaaagaggcctccaagtgctatcttcgatctcatggaggaattcaggaaggtgttcaacattgaacatccagacaacaaagcagtgtctgctgtgggcaaagctgctggagcaaaatggtagacgatgtttgatgctgaaacagcaccttatgtggcaaagtctgagaaaaggaaagtggagtacgagaagaacatgagagcttataacaggaaccatgcgtaaggtacaactggtgaagatgaagaagaatctgacacgtttgcatc

SEQ ID NO: 272125 - DNA, 282 bp, Glycine max
atgggttcttcttctattacaacatcgcccgcaaccatgaccatggctgcgatcgtgctcctgttcacggtctttgccgtttcctacggcctagacatgtcgataatctcgtacgacagcgcccacgcggacaaggccgtcacgttgcgcaccgaggaggagctgatgtccatgtacgagcagtggctcgtgaagcacgggaaggtgtacaacgcgctcggcgagaaggagaagcgcttccagatcttcaaggacaacctgcgattcatcgacgaccacaac

SEQ ID NO: 272126 - DNA, 475 bp, Glycine max
cccacgcgtccggtttcttacaaggctctactctactgcttcaccttctgctctagaaaattcagtggtgatacatggcttcggctactctctctgtagccaaaccagcccttcaggcaaatgggaaaggcttctctgaattctctggcctccgcagctcaggcttccttcccttttctagaaaatcttcagaggatttccattctgtcattgccttccagacctatgcagttggaagcagtggaggatacaagaagggtgtgacagaagcaaaactgaaggttgccataaacggatttggaaggattggaaggaacttcttgaggtgctggcacggtcgcaaagactcccctcttgatgtcattgccatcaacgacaccggtggcgtgaaacaagcctctcaccttctcaagtacgattcgatcctcggaaccttcgatgctgatgtcaagcctgttggcagcgacatcatctc

SEQ ID NO: 272127 - DNA, 340 bp, Glycine max
  unsure (1)..(340): unsure at all n locations
gcgtatcaanatgccatggcntcacctcgcaacttttctctattcgggttctctcccccgtctccctagcnctgggctttattggtgcctacccttagccaagtgcacactttcgaccgattaccggtttcatttcacctttcaacaaggttccaacccaagtccaaccaaccattatgcttccaaaaagatgctagtatttcatcctctggggtgttacaactcaccaaagttggcagcaacggcgtgcccacctggggatctctcggtcgtgccctttacgctgccccaatccagatttgggacagcgaaaccggcaaggtagccagctgggctacat

SEQ ID NO: 272128 - DNA, 269 bp, Glycine max
  unsure (1)..(269): unsure at all n locations
ttttccctctctttctttgaaaattcccccgattntctcgagaaagtgaaactggattatgagctttgaggacatcaagctctgccggcctcttcgtctaagcgcgcgtttataaacaggaaacaagaccccacacaagcggtggctgtccgaatatttcacatctacaccggcgtctccacctttcacagactcttcaacaccctcttaacccccaaagacaccccccacctcctcgaaaaactcctcaagacaagactacatatttt

SEQ ID NO: 272129 - DNA, 361 bp, Glycine max
taccggcccggaagacccacgcggacggaggcgcctgtactctcgaagaagatcttgaagaatagggtgaagaagttcaagagggctcacagggacaggaaaatttctgtcaagacaaactggcgcagaccaaagggtatcgattcccgtgttaggagaaagttcaagggatgcactttgatgccaaacattggttatggttcagacaagaagacccgccactatctccctaatggttttaagaaatttgttgttcacaatgtgaaggacttggaactgctcatgatgcacaacaggacttactgtgctgagattgcccacaatatatccacaagaaagaggaaagatatagttgagagag

SEQ ID NO: 272130 - DNA, 331 bp, Glycine max
caagaatgagggagatattgcacgtgcaaggtgggcaatgcgggaaccaaatcggttccaagttctgggaagtgatatgcgacgaacacggcatcgaccccaccggaaagtacaccggcgacgaggcctccgatctccaactggagaggatcaacgtctactacaatgaggcctccggcggaaggtacgttccccgggccgtcctcatggatctggagcccggcaccatggacagcatcagatccggcccatacggcaagatcttcaggcccgacaacttcgtcttcggccagtccggcgccggcaacaattgggccaaaggccactacac

SEQ ID NO: 272131 - DNA, 407 bp, Glycine max
ccaagggagaacgtggcaaagcaagtgcctgagcagaacggcctcacacactttgaggctggtgatacacgtgccaaggagtatgtcagcctcctcaaatccaatgaccctgttggattcaacattgttgatgtcttggcttggggctccattggccatgttgttgcttactacatcttggccaccactagcaatggctatgaccctgcattctttggctgatttaatttcatcatcatgttgttccaactgtgtttcttgcttactttttagtatgtaatgtaatcaatgtcatgatgtataggttctctctaaagatccaacaagttcagcatatgctaatttgatcactattttcggctgcaatttggtttgctattatgattaatggaaaatgggacttcttt

SEQ ID NO: 272132 - DNA, 395 bp, Glycine max
gcagaaagcaagctcatcctagagttttaaaaatggcagcagcctcctgcatggctcggtcttccccatccttggctggcaaggccgtgaagctgggcccatcagcccccgaagtcgggagggtcagcatgaggaagaccgtcaccaagcaggcctcctccggaagcccatggtacggcccagaccgcgtcaagtacttgggcccattctctggcgagcccccgtcctacctcactggcgagttcccaggtgactacggctgggacactgctgggctttcggccgacccagaaaccttcgccagaaaccgtgagctcgaagtgatccactccaggtgggccatgctcggggccttgggctgcgtcttccccgaactattgtcccgcaacggggtc

SEQ ID NO: 272133 - DNA, 320 bp, Glycine max
ggggtcatcattgttatattcaccaccagagcctctcttcaagaagagcagaacccagggacaacaaatgaatttgtcaccacttaaacggttcattatcggaattgttggcacctctccttaattaattaataccctttcacaaaccaaaaaaaaaaagtcttaatatttatttactgtggtaattaatctttccatgcatgctgctgaactatagtgccttcccctctctatgggtatctcttcatttccaacaacgtgccacattcatttaacatatcttgaagaggcaaggtggaggttcaggaatgagtggtcta

SEQ ID NO: 272134 - DNA, 404 bp, Glycine max
gttttggtcgagaacagtgggagatgcatcaaaaatgacagtgatgaaaaggttcttgcaaatgggactgcttggattcctaatctagtccaaacaatcacagatattgcattgaaccaaagtgagtctattcacgttgacaagaatttgattgaagggccaaatccgaatcagagaggaaaattatggactcctcttgtgtttgctatccaatacttccttatcatgaagccaataaaaggactgatcgagaaggacattgcaaatgagagaaagccaacatgggagagacgtgatgccgctttccggaagagagatttatattagctgcacttctgtgcccatgaaattccatggatgcttagcttcctttgctagcacattcggttacttttgtctgttct

SEQ ID NO: 272135 - DNA, 332 bp, Glycine max
  unsure (1)..(332): unsure at all n locations
gcgtgcgccacgcgtncgnccacgcgtncggaatggagcaaccatgccggcaccggcacggttgacagtgggaacagctggggaagagatcattgaggaagccatttgcttctccttcttagttctcaactacttgttcttctgctgccagatcttgatgatgcacaattggcaaaggaagtagaataccttcttaggaagggatggattccttgcttggaattcgagttggagcacggtttcgtgtaccgtgagcacaacaagtcaccaggatactacgatggacgctactggaccatgtggaagctgcctatgtttggntgcactgatgc

SEQ ID NO: 272136 - DNA, 207 bp, Glycine max
cccacgcgtccgaagcccccaggcttttaagtgtgaaaaatttgcaagagcatttgtggccgccaccccactttgtttgtttgtacttaaactacattcccatttgtttttgctttttgagatttcatcatcctgtatttttggtttctgttttcggacttcaatggaaattaatggatgagaactaatgaataagctattgtgttg

SEQ ID NO: 272137 - DNA, 368 bp, Glycine max
  unsure (1)..(368): unsure at all n locations
caggacattgtcaagcttgttgacaccttccctggccaatccattgatttctttggtgcactgagggccagagtatatgatgatgaagtgaggaagtggatttctggtgttggtgttgacagtgttgggaagaagcttgtgaactcaaaagatggacctccaacctttgagcagcccaagatgactctggagaagctcttgctgtatggtaacatgcttgtccaagaacaagagaatgtcaagagagtccaattggctgacaagtacttgaacgaggctgctcttggaaatgctaacgaggatgctattcagaggggaactttcttccagtcttgaattggaggcaaagcanacttggcaagtaaata

SEQ ID NO: 272138 - DNA, 364 bp, Glycine max
cacgcatccgcaggacattgtcaagctttttgacactttccctggccaatccattgatgtctttagggcactgttggccggagtgtatgatgattaactgaggaagtggatttctggtgttggtgttgacagtgttgggaagaagcttgtgaactcaaaagatggacctccaacctttgagcagcccaagatgactctggagaagctcttgctgtatggtaacatgcttgttcaagaacaagagaatgtcaagagagtccaattggctgacaagtacttgaacgaggctgctcttggaaatgctaacgaggatgctattcaaaagggaactttctttcaatcttgaattggaggcaaagcaaac

SEQ ID NO: 272139 - DNA, 337 bp, Glycine max
gatcgagataactagaaacagcgtgatgaaaatgaatgtccttgttttcttcgttgcgacaatttgggtagcatggcaatgccatgcgtaccatatgttccctctccgaatgaacactggctatggtgcccgtactccggaggtgaaatgcgcaagttggaggcttgctgtggaagcacacaacatctttggctttgagaccattcctgaagagtgcgttgaagcaacaaaggaatacatccatggcgaacaatatagatcagactccaaaacagttaaccaacaagcttacttttatgccagagacctcgaagtccattccaaggacacatttgtg

SEQ ID NO: 272140 - DNA, 390 bp, Glycine max
  unsure (1)..(390): unsure at all n locations
attcagtgaaacactanctagggtattgggagctctcgttgtttcggagttagggacgttactcagccatggccactgctacgaatgccnncntcgccccaccacgccagctcttccagaaggaagctgacatccagatgatgttggccgccgacgtccacctcggcaccaagaactgcgacttccaaatggaacgttacatcttcaagcgccgcaacgacgggatttacattattaaccttgggaagacgtgggagaagcttcagctagcagctagggttatagttgcaattgagaacccccaggatatcattgttcaatctgcaaggccttatgggcaaagagcggttctgaagtttgctcagtacactggtgctcatgctattgctg

SEQ ID NO: 272141 - DNA, 327 bp, Glycine max
  unsure (1)..(327): unsure at all n locations
cccacgcgtncgcggacgcgtgggctctgtccccgctgcgtctctcgtaatcatgcctaagcaaagccacgagattaaggatttccttctcactgccagaaggaaggatgcgaggtcagtgaagatcaagaggagcagagatgtggttaagttcaaggtcagatgctccaagtacctctacacactttgtgtgtttgacccagagaaagctgataaattgaagcaatctcttcctccaggtttgagtgttcaagacctgtaaaggtactgggcgagagatcaagaagaagcaattcattgattcttctgaagtttgattctctgtag

SEQ ID NO: 272142 - DNA, 383 bp, Glycine max
  unsure (1)..(383): unsure at all n locations
ccggctggagccacgcatccgcccactctttctnttccttaccctacttttgacgtatccaaaccttaagttttttagtaggtctgagcagtctggttagaacctttggtcttatatagtcaagctttatgtctggattagaccatcaaattcctactgccttccatccttttgctgatgcaaatgctgatgactcgcttgctggttcaaaggagtatgtgcatattcaccttcaccagcgaaatggtaagaaaagcctgacaaccgttcagggattgaaaaaagaattcatctataacaagatacttaaagacgttaagaaagagtttctttgcaatgtaacagttttttatgacccataactaggacaggttatttaaact

SEQ ID NO: 272143 - DNA, 340 bp, Glycine max
tctctcttacacacccaagcactactactactactttctttctagatatgggttctggtgctgtgcaactgtttctgatcttggggctcttggctagctcatgcttagcccaagccccaggtgctgcaccgtcacaaccacccactacaaccccatcaccaccaccacccagatcagcacctgcaccagcacccaccacaccagcaactccaccaccagcagcaacaccaacaccagcaccagcaccaccaacggctgcacctacacctgcttcctctcctgcagcctctcctccttcaccttctcctacagtgacaccaagccccaccttttctaacac

SEQ ID NO: 272144 - DNA, 307 bp, Glycine max
ccggggcgagccacgcgtccgcaaaagaagagcgtatttttgcttcatgggaaaagatgaagaaacatgatgagaaaggtgaaatagagcggcatgttgaggaagcacaacaatctggtgtggctaatgggacacatactgcaagtaatggtggtccaactgcatcattacgtcaaggacccggtgctcaagaagcagctgctcctaacaatattttgttcatagagaatctgccttatgaaactactgctaggatgcttgaaatgctctttaaacaatacccatgttataacgaagtgcgcttgat

SEQ ID NO: 272145 - DNA, 268 bp, Glycine max
aacaaataaaaaatattcccttagctttttcaaccatcaagaccccctctgctattggccaattaggatccactggtgagactgctctcaaacacctcaatgagttcgtactgaataccgctagcaccggcaaatgacctactaacatgcgccacaccgtcaagagtgctcctcagagcatttcttatggtcctgaccgtcccaagaacttggctccattctctacatcaattccataatacctgacctcagaattctctggtgacta

SEQ ID NO: 272146 - DNA, 204 bp, Glycine max
cccacgcgtccgaaaaaaaaaaaaaattaaaaaaaaaaaaaaaaaaaaaggaaaaaaaggaaaaaaaaaaaggaaaaaaggaaaaaaaaaaaaaaaaaaaaaaaaagaaacaaaaaaaaaaaaaagactataaagacacgaaaaaaagaaaacaaaaatacaaaaaactagcacttggaaaaaaaacacacaaaacttggaaaa

SEQ ID NO: 272147 - DNA, 364 bp, Glycine max
  unsure (1)..(364): unsure at all n locations
cccactcgtccgnaaatttaaaaaaattaaaaaaaaaaaaaaaaaaaaagaaaaaaaagaaaaaaaaaaagaaaaaaaaaaaaaaaaaaaaaaaaaaaaaaaaaaaaaaaaaaaaacccaaaaaaaaaaaaaaaaaaaaaaaaaaaaaaaaaaaaaaaatcccccaaaaaaaaaaaaaaaaaaaaaaaaaaaaataggggcccccccctttaaggacccaaaattttcttccccctttttcccacgtttattttttttttttggcccccaaaaaaaaaataaacccccccttttttaaacccctgtgccttgaaaaacccccgtgtttcccaaattaaatttcttttaaaaaaacccccttttt

SEQ ID NO: 272148 - DNA, 342 bp, Glycine max
  unsure (1)..(342): unsure at all n locations
cccacgcgtccgattccnctctntcgtatttcgatactttgatcagatccacaacacttcttcatgcatgacgcttggttcttcaggatccagtgtcgtggttccaaggaacttcagattgctggaggagcttgagaagggagaaaaaggaataggagatggcacagttagttatggaatggatgatggtgatgacatttacatgcgctcttggactggaaccattattggtccctataatactgtacatgaaggaagaatttatcaattgaagctgttttgtgataaagactaccctgaaaagcccccgagcgtccggtttcattcacggatcaatatgac

SEQ ID NO: 272149 - DNA, 362 bp, Glycine max
gaaactcttgaacttggatttgattaccatgtggccaattcttcatctggtggcaatagaatcctgggcaggccagggaacaatagcaccataacatatctcaggcttggaattgatggcaacattaggttctacacttacttccttgatgtgcgtgatggtgtatggcaagtgacctacactctatttgatagagattctgatgagagtgagtgccaattgcctgagagatgtgggaaatttgggttgtgtgaagataaccaatgtgtggcttgtccattggaaaatggactacttggttggagcaacaattgcactgccaaggctgtgacatcatgcaaggctagtgattttcactacta

SEQ ID NO: 272150 - DNA, 344 bp, Glycine max
ttcagattacattgcataaatggcatcattcaccatgacagcttctatctttggctggccagctggcaccaaacggtcggcagtggctgcccacaggacattactcgtagtgagtgctgccaaagctgaaggggaaaaggtcagttatgacaacaatgatagcaatggaaggaggaacttgatgttcgctgtggctgctgctgctgttttctctgatgctgggatggcagtggcagatgagcctaaaccaggaacctcagaagccaagaaaaagtatgccccgggttgtgtcaccaatcctacagctagcatttgtcgcaattgaggatctcctgtttcatttt

SEQ ID NO: 272151 - DNA, 386 bp, Glycine max
caatagttgcacccaccataacattcatgttctcaggcatgaacgtgaccctgccagaggacaacattctcatacacagcactgcgggcagcaccacatgcttggccatggcttcggctccagataacgtgaactcagtgctcaatgtcatagccaacatgcagcaacaaaaccaccgtgtgctctatgacgtgcccaattcaaggcttggagttgctcgtgaactttgcactaaataaaatggttaacacctaagttgtcatgatactttggtgacaacgatattgtcaaattaattggctattgcaaagtcttttgggtattgatatttcttctatattggtgagtttggatttaggataatggtaatatataataaggtttca

SEQ ID NO: 272152 - DNA, 336 bp, Glycine max
aacaccctcccaaaacaagcccaaattttggctcagaatctaactatcgcacctaaggggacatgggttgcatctacagctttcttagatagagcatatgctttgacatctttacttgtttctagttcgggtaacataaacatagctagagtgagtactaagcactactaaacgcccgagttcgatgtggcgtgccagagttagggttagatctagcttggaaactgcggagtccacaaaaacagtgacacatgtcactgatgataacaaggatacctcctggccgatcgataaagctgccatggataaaaccgttggccttgacatgtacacaca

SEQ ID NO: 272153 - DNA, 385 bp, Glycine max
cgtctgagctgtctgtgcaaatttgcgttgttcttcgcggcacacctgactcactggacggtaagtatggcggacaaggctgttacaatccgaacccgaaagttcatgaccaacaggcttctttccaggaagcagtttgtcgttgatgtccttcatccagggagggcaaatgtttccaaggctgaacttaaggagaagctggctaggatgtatgaagtgaaagaccctaatactgtatttgtcttcaaattccgaacacattttggaggtggcaaatccactggatttggtttgatttatgatacagtggagaatgccaagaagtatgagcccaaatacaggcttatcaagaacggccttgacaccaaagtagaaaagtcaagga

SEQ ID NO: 272154 - DNA, 433 bp, Glycine max
atcggaacctctttttcggcgtagcattgggacacttcaacgtttggaattctcacgcaaaaaacgacagtcctggggctcgcacttgcctagtgtgtgggaatccacatggattgatcaggaagtatcgccttatcgtctttaggcagtgcttatctttttatgcctagggaatacacctacttttttattgctacaggagcatctgatacttattgttatatcatatattaccccacttggatatctactgatcgtttctttaatttctactatatttttgtcttttttatctatttacttttgttccatatttcattgtctttttttgatttctatcttaactttgaaatattttttattttttgtcacatttgctttttttgttattctttattttttttgtcaatttttcctattttttatttttttt

SEQ ID NO: 272155 - DNA, 385 bp, Glycine max
gaaaaacaagtagttgagaactaagattaaggaaatggcttcctcaatgatctcctcgccagctgttaccaccgtcaaccgtgccggtgccggcatggttgctccattcaccggcctcaaatccatggctgacttccccacgaggaagaccaacaatgacattacctccattgctagcaacggtggaagagtacaatgcatgcaggtgtggccaccaattggcaagaagaagttcgagactctttcctacttgccagacctcgatgatgcccaattggcaaaggaagtcgaataccttctaaggaaaggatggattccttgcttggaattcgagttggagcacggtttcgtgtaccgtgagcacaacaggtcaccttgatactat

SEQ ID NO: 272156 - DNA, 395 bp, Glycine max
  unsure (1)..(395): unsure at all n locations
ctcacttccttaaaagtgaaagtgaaagttaggtttttgtatgaaggtgatgcttaggtgtattggacaattacatttggcctgggacatagtggcgtttagtttttgtggtactttgaatacagaacgagcattgttgaagtgttcgttttgattgatgtagtcttttcaacaatttagtatttccctgttaggtttccatttgacatcttaaatgttatggttttatttgatcgtaattattctgctgtttctttgtgnaaaaaaaaaatataaataaaaatttattattatattgataatataaattaaataatatttataatttaaattattaatattttattctatcttatttgattttaatttattttcatttaatggttttttttttt

SEQ ID NO: 272157 - DNA, 376 bp, Glycine max
agaaaatggcggtacctctgctctcgaagaagatcgtgaagaagagggtgaagaagggcaagaggcctcagagtgacaggaaaatttccgtcaagacaaactggcgtagaccaaagggtatagattcccgtgttaggagaaagttcaagggatgcactttgatgccaaacatcggttatggttctgacaagaagacccgccactatctccctaatggttttaagaaatttgttgttcacaatgtgaaagacttggaactgctcatgatgcacaacaggacttactgtgctgagattgctcacaatatatccacaagaaagagaaaagatatagttgagagagctgcgcaacttgatgttgttgtgacaaacaaaac

SEQ ID NO: 272158 - DNA, 239 bp, Glycine max
aagagttcttgcttttaaaaaaaaattataaaaaatataaaaaaaaaaaaaaaatagggaaaaatagaaaaataaaaaagcctacaaaacataaaaaaaaaaattaaaaactataataataaaatcaaaaaatcaaaaaggcccccctttttaaagaatccaattttacttccccgtccttgcaaagaatagttttttttttgggccccctaatttaaattcattgccccccgttttaa

SEQ ID NO: 272159 - DNA, 386 bp, Glycine max
aaaaaaagattctatagatatataactaatattctttagaataatcaagagggaatatgaaattcaaataaattttagatagaaaaaagacttaaaaaggaggatttgaaatgcgagatctaaaaacatatctttccgtggcaccagtagtaagtactctatggttcggggctttggcgggtctcttgatagagatcaatcgtttttttccagatgcattgatattcccttttttttcattctagttattgacacggaaaggggtgaagaagattatagatccaattaagtattaaatatatgtaattaatatgtaattaatctcctcttctttatttcggcttttatttcttcttttttttacaatttgaatagaataagttagg

SEQ ID NO: 272160 - DNA, 355 bp, Glycine max
cacgcgtgcgtttacgcgtccggttttctggttctttaaagaagaaacctttctctttgcgcgtgtggcgttctggtctccaatcctgctccatccccactgtgtgatctgatcctaaaccttatagccatgactaccatggagattaagctatggaatgacaagcgcgaaagagaaatgtatgacaactttggggagctttatgccattatcaaagccactgagaggcttgagaaggcctatgttagagatataatttcaccgcaggaatatgagttggagtgccagaagctcatagctcatttcaaaaccttagctttcacccttaaagacactgtgcctagcattgagcgat

SEQ ID NO: 272161 - DNA, 360 bp, Glycine max
attcagcaagcaagacccctcatttccgtggttaacaaggctgcctctgtatcttcgcgcgtgacagcacccagcgtcggcgttcggtttcggctggacaatttggggccgcaaccgggttcgaggaagagggctaagagaaagggtagaggaatatccgcagggcaaggggcaagttgtggttttgggatgagaggtcagaaatctcgatctggacctggcgttaggaagggtttcgaaggtggccagatgccgctttatcgccgaatccccaaactcagaagaattgcaggaggtatgcatgcgggattgcccaaatatgtccatgtaaatctgagagacatagaagatgcttaattt

SEQ ID NO: 272162 - DNA, 313 bp, Glycine max
cccacgcgtccggttgtttctcagccgtctcggctagggttcggaaacgaagaacggttctgttttcttttcgcgatgagggccaagtggaagaagaagcgtatgaggaggctgaagaggaagcgccgaaagatgagacagagatccaagtagtgcgttaaacctagtttgtttccgttgcttttacaattgcttatgttgtcaaataggacacccagatgttagtggcactggtctttcctttttgatgttttgatacattatgttggattttatttcgtcttatggtcttagctgaaaacaatgctgttac

SEQ ID NO: 272163 - DNA, 323 bp, Glycine max
cccacgcgtccgcccacgcgtccgcccacgcgtccggtgaatcagcacgcgacattcagctgagctttttgtgaggattccaaagcatggcttcccttgcagcatccactgctgctgcttcccttggcatgtcagaaatgcttggaaaccccatcaacctcagtggtgccacaaggccagctccatctgcctctagccctgcctccttcaagactgtggctcttttctccaaaaagaaggctgcacctccaaaaaaagctgcagctgctgctcctgccaatgatgagcttgccaagtggtatggtcctgacagaaggatcttc

SEQ ID NO: 272164 - DNA, 375 bp, Glycine max
tgaagtctgctatgtgttcagtggtgtttgtagcacttcttcttctggcggatgtggggcccatggctgaggctgtgacatgcaccccaacagagttgagtccgtgtcttgcagcaatcacttccggtgctaaaccttccaatgcttgttgcacgaagctgaagcagcaaaaaccatgcttatgtggctacctcaaaaacgctagcttgaagcagtatgttaactctcctaatgcccgaaaaaccggtgcttattgtgggattccctttccaacttgttaattaattaagccttcttataattaaagtgtgggatatatatatatatatatatatatatatatatatataaacagcttaatttatacacactttg

SEQ ID NO: 272165 - DNA, 418 bp, Glycine max
  unsure (1)..(418): unsure at all n locations
cggaagaggaaaaactagaaaagatcccaacagtgagaagccgagcgattttgtttaccttcgaagagatgaagcatttggtcacttgaagtcatcagattttctcgcttatggaatcaaatctgtatcccaagatgtcttgcctgtcttgactgatgcattcgatggaaatattttgagccttgagtttgataattttgctgaagtgcacaaactctatgaaggtggagttacactacctacaaactttcttagcaagatcgcccctataccagtgatcaaggaaatttttcgaactgatggcgaacagttcctcaagtatccaccacctaaagtgatgcangtggataagtctgcatggatgactgatgaagaatttgcaagagaaacgattgctggtttaaatccaatgtcatta

SEQ ID NO: 272166 - DNA, 473 bp, Glycine max
acggtggccaccagttggcaagaagaagtttgagactctttcctacctgccagaccttgatgatgcacaattggcaaaggaagtagaataccttcttaggaagggatggattccttgcttggaattcgagttggagcacggtttcgtgtaccgtgagcacaacaggtcaccaggatactacgatggacgctactggaccatgtggaagctgcctatgtttggttgcactgatgcttctcaggtgtcgaaggagcttcaagaggctaagactgcataccccaacggcttcatccgtatcatcggattcgacaacgttcgccaagtgcagtgcatcagcttcatcgcctacgagcccacaggcttctaagtgtgaaaaatttgcaaagcattcgtagccgacaccccactttgttagattgtacttaaactacatttccatttggttttgctttttgagatttcatcatcctgta

SEQ ID NO: 272167 - DNA, 476 bp, Glycine max
gccccaccgagtttcctgcctcaaatcaatgcgatgaagacaatgcaggggagagtggtgtgctccaccagcgacaagacggtggcagtggaggtggtgcggctggcccctcacccaaagtacaagaggcgcgtgaggaagaagaagaagtaccaggcccacgaccccgataaccaattcaaagtcggcgacatcgtccagctccagaagaccaggcccatcagcaagaccaaggcctttctcgcactccccgttcccaaaaggccctccagcaggcccgaggcccagcccgaggaactttccattcccttcgagtcccagccctaggagactccagagtcacccctcaatttcactctctcacgcctacttttgcattctctttcgtgcttatgtgttgtaatttggatgctgctagtattttgtactgctctatagtgtaccttcactgtatgtgcaattcttatcattctagc

SEQ ID NO: 272168 - DNA, 421 bp, Glycine max
  unsure (1)..(421): unsure at all n locations
aattactactttctctctctttgtaacttgtaagcatggagtcctcaaagatctatgcttacctcttcctttgcatgctcttcctctcctccggcactcccattctcggttgtggctactgtggcaaaccccccaaaaagcacaagcctggtaaaacaccaaagacacccacagtacccgttgttaagccaccagtcacaatccctaccattgttaatccaccagtcacaatccctcccattgctaatccaccagtgacagttccacccgttgtgcttgcaccaatagtgaagcccccgggttttctccctgcaattcttaacccacctggtacaccaacaccgtcgacggggaaaggagggaacactccatgtccaccaccaaagtcntctgcacaggctacatgccccattgacacgct

SEQ ID NO: 272169 - DNA, 401 bp, Glycine max
cccacgcgtccgtaataccttcaaagaacgaagtagtggatcagtgatggcacctaaggcagagaagaagccagcggagaagaagcccgcggaggagaagaagtcgacggtgggagacaaggctccggcggagaagaagccgaaggccggaaagaagcttccgaaagagggaggagccggcggagaaagggggaagaagaaaaagaggaacaagaagagcgtggagacgtacaagatatacatattcaaggtactgaagcaggtccaccctgacattggtatctcaagcaaggccatgggaatcatgaacagcttcatcaacgacatcttcgagaagcttgctcaggaatcttccagacttgcccgctacaacaagaagcccaccatcacttcaagggaaa

SEQ ID NO: 272170 - DNA, 428 bp, Glycine max
ccacgatcaccaccgcaaagcaatgggcgctatactttctgccttaactggcggtgccgcaacggcggcgacgtcttggccggagagttctgcttctagggtccagtctttccactcttcggcgcgctggcagctccacttcaacgagctcaaagaaaccaataagctcgttgtgatagatttctcggcgtcgtggtgcggcccttgcaaattcatagagccagcgattcacgccatgtccgaaaagttcaccgacgttgacttcgtcaagatcgacgtcgatgaattgccggatgtggcgaaggagtttaatgtggaggcgatgccgacgttcgtgttgtgtaagaaagggaaggaagtcgacaaggttgtgggcgccaagaatgacgagctcgaaaagaagattgagaaacatcgatcgcaatctt

SEQ ID NO: 272171 - DNA, 310 bp, Glycine max
gcttcttccgccactcagcacttcgctccctctgtgcttcaccaaccatggccgaaatcgaagctaccgttccagatccctctcaaatcgacgtcaaacttttcaaccgctggagcttcgacgacgttgaggttactgatatgtctctggctgattacattggagtgtccccgtcaaagcatgctacatatgttcctcacactgctggtaggtactcagtgaagaggttcaggaaggcgcagtgccccatgttgagagactcaccaactctctcatgatgcacgggaagaacaatgggaagaagctcatg

SEQ ID NO: 272172 - DNA, 320 bp, Glycine max
aaaaaagattctaaagaaatataactaatattctatagaataatcaaaaagaatgttaaattcaaataaattttagatagaaaaaagacttaaaaaggaggatttgaaatgcgagatctaaaaacatatctttccgtggcaccagtagtaagtactctatggttcggagcttcggcgggtctcttgatagagatcaatcgtctttttccagatgcattgatattcccttctttttcattctagttattgacacggaaaggggtgaagaagattatagatccaattaagtattaaatatatgtaattaatatgtaattaat

SEQ ID NO: 272173 - DNA, 348 bp, Glycine max
cggacgcgtgggttctcaacagcaggagcaattacagcagcagagtaacagacaaagaaaatctggagctgccaatagcactggtactggtaacactgctgctccgtccgctacttcatcaccatcaacacatacacctggtgatggattaaatacagcaagcagcttacagcatgttaacagtgtccaaaagagcatgatgatgtatggtacagagacaacaggaggccttgcatcatcgtcgaatttgctggacgacatggatcgatttggagatgttgatgctttaaatgataatgtcgaatcctttctatcaaatgatggcgtaaatggtggaaaactctattg

SEQ ID NO: 272174 - DNA, 398 bp, Glycine max
tcgaccacgcgtccgggaaatcaaagttgtctctgaccgcaaccctgccaaccttccttggaatgatttggggatagacttggtgattgaagcaactggggtgtttgtagacagagaaggtgcagggaaacacattcaagcaggagctaagaaggtgctcattactgctcctggtaaaggagacatccccacatatgtggttggtgtcaatgagtatgattacagccctgatgaacccatcatcagcaatgcatcttgcaccactaactaccttgacaaagggtgcaaggctgataaacattgtttccgtgatcatcctcatcactctcacccatggctgcctcatccaccatcaacaacttcctctctttcttcttacgcacaaaaccaccaccacc

SEQ ID NO: 272175 - DNA, 293 bp, Glycine max
cccacgcgtccgaaaaaaaaaaaaaaaaaaaataaaaaaaaaaaaaaaattaaaaaaaaaaaaaaaaaaaaaaaaaaaaaggaaaaaaaaaaaaaaaaaaaaaaaaaaaaaaaaaaaaaaaaaaaaaaaaaaaaaaaaaaaaaaaaaaaaaaaaaaaaaaaaaaaaaaaaaaaaaaaaaaaaaaaaaaaggggcgacctctaaaaaaacaaaaatataatcacccaaagttataaacataaaaccctttataaagaagacaaaaaacaaattaacaggggccgcatataaaaa

SEQ ID NO: 272176 - DNA, 409 bp, Glycine max
  unsure (1)..(409): unsure at all n locations
attcccttcacaagattctcacaaacaactcttgagaaagaaagaatggctgccaacacattgatgagttctgccatctcagccttcccatctctcctttcctcctcaaaatccagatttgccgcagcagttcctctttccagctttgttgtcaccaatgcctcttcttctcgcttttccatgagtgctgattggatgcctggccagcctagacccccctaccttgatggttcagcacctggtgactttggattcgaccctcttcgtcttggtgaagtaccagagaatcttgagaggttcaaagagtcagaactcattcactgcagatgggccatgcttgctgtttccagggattttggttccagaggcattgggcctaggcaactgggtaaagggctcangaatgggc

SEQ ID NO: 272177 - DNA, 317 bp, Glycine max
cccacgcgtccggcagcaaatgtctctaataactagctgctccattcacaaagaggggattgttactcaagtttctgatattgggaggtggctccacccttgcatacttcagtgcaacagcctcaggtgacattctaccaatcaagaagggaccacaacttccaccaaagcttggtcctcgtggcaagatctaatttgacttgtatcagagctccatctatagagttcctttgtaatagttatttttctggcttgcataatgtgtaagtatgcttgcagactactattcagagatgcttctttccagtctaattgat

SEQ ID NO: 272178 - DNA, 314 bp, Glycine max
cccacgcgtccgctctctctctcgatcaatcatggctttgcccaatcagcaaaccgtcgattaccctagtttcaaactcgtcatcgtcggtgacggtggtacaggaaagacaacgttcgtgaaaaggcatcttaccggtgaatttgagaagaaatacgaaccgaccattggagtggaggttcacccattggatttcttcacaaactgtggaaagattcgcttctactgctgggatactgccggacaagagaagtttggtggcctcagggatggatattatattcaatggcaatgcgccattatcatggttgatg

SEQ ID NO: 272179 - DNA, 389 bp, Glycine max
cccacgcgtactgattacggcgatggtagtggccattcgcccagcaaagaatcctgtttgcgtgaaaggtcatgtctactgtgacccttgccgtgctggttttgagacctcagcttcaacctacattgctggagctgtgattatgtcgcaatgcaagatcactgctagcaacgacgttgtgtacaccaagaatgcgtacactgactcaaccggagcagacacaatagtacgtggatgatgatcacgcagatcagatctgcagtgccaaacttgaaaacagtcctcacagtcaatgcatggaagtcaccctatgccgggacgaagccgttgtgattctgacccggtacaacggaattgcctgcaacgataggttccacaatgccataggc

SEQ ID NO: 272180 - DNA, 327 bp, Glycine max
atggattcctagattggaattctagttagagcacagtttcgtgtaccgcgtgcacaacaggtcaacaggatactacgatggacgctactggaccatgaggaagctgactatgataggatgaactgatgcttctcatgtgttgacggagctcaaagaggctaagactggatacaccaacgggttaatccgattaatcggatccgacaacattcgacaagagcagtgcatcatcttgattgcctacaagcccggagccttctaagcgtgaaaaattagcagagcattagtagccggcaacctacttagcttgatagcacttaaactaca

SEQ ID NO: 272181 - DNA, 435 bp, Glycine max
ccctagcaagcggaacaatggcagacgttgaggtcgatgtggcggctgcagcagcagcagggcagccgaagaagagaacgttcaagaagttcagtttcaggggcgtggatctcgatgcgcttctggacatgtccaccgatgaactcgtgaagatgttcagtgctcgcgcacgtagaaggctccagagaggcctgaccagaaagcccatggccttgatcaagaagcttcgcaaagcgaaaagagaagctccaccaggtgagaagccagaacctgtacgcactcacctacgcaacatgattattgtgcctgagatgattggtagcattattggagtgtacaatggcaagacctttaatcaggttgaaatcaaacctgagatgattgggcattatctggcaaaggtttctattcatacaaacgccgttagcacgggag

SEQ ID NO: 272182 - DNA, 364 bp, Glycine max
tcgcaactagtaacaaagatccaacatgcatatcaatcactctctctgtctttcaatcaaaacaggggtgagatttgaaggaggattctgagcagtatgctgagaaagcaaagactttgccaccgactcaatcaaacgaatacttgcttattctttatggattgtacaagcatgccaccgttggacctgtcaacaccatccgtccgggaatgttcaacatgaggaacagagctaaatgggatgcatggaatgctcttgaagggaaatccaaggacgaagcaatgagtgattacatcactaacgtgaaacagctgctggaaacagtcggtatgcctgcttgataacattgtcatgccttgctttc

SEQ ID NO: 272183 - DNA, 422 bp, Glycine max
tgactagaaatcccatattttccccccacattaactcacccaacccctctttctatagggctggcatagcagagtttgtggccactttcttgttcctctacatcacagtgctgactgtgatgggtgtgttcaaatctaagagcaagtgttccactgtgggtatccaaggcattgcttgggcttttgggggaatgatctttgctcttgtttattccactgctggaatctcagggggtcatattaacccagcagtgacgtttgtgctgatcttggcacgcaagctctctctgacaaggggcaatttttacataatcatgcagtgcttgggagctatatgtggtgctggtgtagttaaggggttcgagccacacctctatgagaggcttggtggtggtgccaacacaatcgctaaagggtacacc

SEQ ID NO: 272184 - DNA, 373 bp, Glycine max
ctcaattcctcatcccaccacgcacacacagtcacaaactcccttcttcttcttccaatggccgccacagacgtcacggagcccacgtgggccgagctcctgggccgcgacaactgggcgggcctactagaccctctccacccctctctccgctccctgatcctccggtgcggggacctcatccaagccacctacgacgccttcaacaacgacaagaactcgctctactgcggcgccagccgctacggcaaggcctccttcttccgcaaggtcatgctggacttgcccgagaattatgacgtcgcggcgttcctctatgccaccgcaagggtcaccgttcccgaggccttcctgctgcactcgctctcgcgcg

SEQ ID NO: 272185 - DNA, 319 bp, Glycine max
cccacgcgtccggcttccggcgatggttgtggccattcgcccagcaaagaaccctttttgcgtgaagggtcgtgtctactgtgacccttgccgtgctggttttgagacctcagctaccacctacattgctggtgctgagattatgttgcaatgcaagagcagggttagcaacgaggttgtgtacacgaagaaggggtacaccgactcaaccggagcatacacaatgtacgtggatgaggatcacgcagatcagatctgcagtgccaagcttgtaagcagccctcaccctcaatgcaaggaagtcaccccaagccgcgac

SEQ ID NO: 272186 - DNA, 420 bp, Glycine max
ctcacgcgtgcggcttacggcgatggttgtggccattcgcccagcaaagaaccctttttgcgtgaagggtcgtgtctactgtgacccttgccgtgctggttttgagacctcagctaccacctacattgctggtgctgagattatgttgcaatgcatgagcagggttagcaacgaggttgtgtacacgaagaacgggtacaccgactcaaccggagcatacacaatgtacgtggatgatgatcacgcagatcagatctgcagtgccaagcttgtaagcagccctcaccctcaatgcaaggaagtcaccccaggccgcgacgaagccgtcgtgattctgacccgctacaacggcattgccttcgacgataggttcgccaatgccatgggcttcatgtctcaggaggttgcttctggctgtgc

SEQ ID NO: 272187 - DNA, 395 bp, Glycine max
cccacgcgtgctgcttacggcgatggttgtggccattctcccagcatagaaccgtgtttgcgtgaagggtcctgtctactgtgacccttgccgtgctggttttgagacctcacctgccacctacattgctggcgctgagattatgttgcagctgcaagagcagggctagcaacgaggttgtgtacacgaagaaggggtacaccgactcaaccggagcatacacagtgtacgtggatgatgatcacgcagatcagatctgcagtgccaagcttgtgagcagtcctcacccgtaatgcgaggaagtcaccctaagccgagacgaagccggtgtgatgtctacccgctacaacggcattggctgcgacgataggttcgccaatgccatgggcttcatg

SEQ ID NO: 272188 - DNA, 281 bp, Glycine max
cgcacgcgtgcgtcatcctggaactaacccttttatgcaactactagttagcaaggccatagggtgggttcccaattggatctgtggacactgcctatcagaccaacatcgctgctcaattacaccatgcatctcgagcaccattagaatgagaccgtatataaactaaatcatcatgtgctgtgagcagtgcaagttctaccttctctagctagatagatacagctagaatgtcaacctacctatgtgaactgatcacatctgcctacctacataaagag

SEQ ID NO: 272189 - DNA, 353 bp, Glycine max
ctttgaacgacgcagaaggttcatccaatctccgaatcctttaatcgcattgcaaccatgtcgaggagaaaggtcagagagccaaaggaggaaaacgtgactcttggcccagctgttagagatggcgaacatgtctttggcgtcgctcgcatatttgcctcctttaatgataccttcattcatgtcactgatctgtctgggagggaaacgcttgtccgcatcactggtggaatgaaggttaaggctgacagagatgaatcatctccttatgctgctatgcttgcagctcatgatgttgctgccagatgcaaggaacttggcattactgctctttatatcaagctccgtgccac

SEQ ID NO: 272190 - DNA, 387 bp, Glycine max
cccacgcgtccgcttggacgcaaaaatggcacctgcaacactgtctctgtctctcctcctcctgttctcactcagcatcgccgtaaccgttagatcgagcgactacgactacgattgtgtgtacactgcatacgttagaaccggttcggtgttgaagggcggaacggactctaagatcgggctgaagctgtacgacaagtacggctactacatctacattaaaaacctcgaagcatggggcggcttgatgggcaagggctacgactacttcgagcgcggcaacctcgacatcttcagcggaaggggaccctgtcttgacggacccgtctgtgccgttaacgttacttctgacggatcgggttctcaccacggctggtaccttaacta

SEQ ID NO: 272191 - DNA, 429 bp, Glycine max
gggaaggtgagcagtaatggtcatggatgttgcaaatcagggccaggctatgcttccccactggaagccatttctggtcccagagagtctctcatttatgtaacctctgtctacacagggaccggaatagagaagccagactatttggcgacagtggatgtggatccaaactctccaacttattccaaagtcatccataggcttcctgttccttatttaggtgacgaattgcatcacacaggctggaattcatgcagctcttgccatggagatccttcagcagaccgacgatttctcatcgtacctgcactcgtatcaggtcgagtatatgtggttgatgtgaaaacaaatccaaggggctcatctttgcacaaagttgtcgagcctgccgatatcatacagaagactggattagcttatccacacaca

SEQ ID NO: 272192 - DNA, 213 bp, Glycine max
ctcacacgtaatgctgacgctcagtaatctgtttaaacactctgatttatattgctcttgcgggaaagagccaagttaatgcatcgctagcctgcgaagcacattgacatgccgtatcaccaagcactctaactaccactgcactccgagagcttataaaggccctggctgcaagtgatgagatacgtaaactctctaatcatattgaccata

SEQ ID NO: 272193 - DNA, 265 bp, Glycine max
tcgacccatgcgtacgctttgggcgacccataacgttcagccaatcttctaatactttaatcgctttgcaaccatgtcgaggagaatggtcagagagccaaacgaggaaaacgagactcttcgcccagctattagagatggctaacatgtcttaagcgttgatcgcatattagcgtcctataatgatacctcaattcatgtaactgatctgactgggagggaaactctattcacaatcactgccggaaagaacgttaaggcttac

SEQ ID NO: 272194 - DNA, 350 bp, Glycine max
caatgctctagggtttatacaattatcgatggcttcttcagatgttgagtaccgttgctttgggggtgggctcgcttgggccactgacgaccaagctctcgagagagccttctctcagtacggcgaaatcgttgaaacgaaggtctgtttgttgcaggcatcacatctgatctcacacgattcggattcggaattttctcgatccctttctgatctgtgatctctgatctgcttgcgttacttgatcttatgatacttgtgttactatatgagtcttttattactctcacgccaatacgtacgttcatcatcttcctttcaccacatgcgaagatcgatcggttactatt

SEQ ID NO: 272195 - DNA, 405 bp, Glycine max
agacggagaaggtctttctgaagccgtagttgagactgagatcgatcatctgtcttagttagatttcgtagcagagagagaatgggagaggtagcgcgtggaggttgttgccctccgatggatctgttccgttcggagccgatgcaactggttcagctcatcatccccatcgaatccgctcaccgcactgtctcctacctcggagaccttggcctccttcagttcaaagatctcaatgcagacaagagtccttttcagcggacctatgcagctcagataaaaagatgtggaaagatggctcgtggattgcgttttttcaaggaccaaatgttaaagcttgtgtttcaccaaaatattccacaacaccagttgatttgaacattgatgaccttgaggtaaagctta

SEQ ID NO: 272196 - DNA, 423 bp, Glycine max
ggacaaacaggccgtaacagaagcaaacttaaagaaggctggctaccacacatgggaaaaattaattctcaaggatccacaagatccttccactccaaatgcagtttcatacaaaacagcagcgagagagaaactgataaggcagggatacaacattgttgggatcattggagaccaatggagcgatctcctcggaggccacagaggcgaaagcaggacctttaagcttcctaatcccctgtactacattcagtagttccttcacctctcaacaatctagcttgctcctatctatctatatgtaataagatccgttcaaataggggcactagcttcaactttatgtggtttcagctgtgtgtcaacaaggtaatgtaggagacttcactatggtggtttctctttcgtggctttaataaaata

SEQ ID NO: 272197 - DNA, 436 bp, Glycine max
aaaacacgtagttgagaactaagaagaaggaaatggcttcctcaatgatctcctccccagctgttaccaccgtcaaccgtgccggtgccggcatggttgctccattcaccggcctcaaatccatggctggcttccccacgaggaagaccaacaatgacattacctccattgctagcaacggtggaagagtacaatgcatgcaggtgtggccaccaattggcaagaagaagttcgagactctttcctacttgccagacctcgatgatgcccaattggcaaaggaagtcgaataccttctaaggaaaggatggattccttgcttggaattcgagttggagcacggtttcttgtaccgtgagcacaacaggtcacctggatactatgatggacgctactggaccatgtggaagctgcctatgtttgcctgcactgatgc

SEQ ID NO: 272198 - DNA, 274 bp, Glycine max
gacccacacagccgcccaagcgaccgctacccagcgccaacaagcctaacgacaacgatgagagccatcacaagagcgaacccacaccacacgccaggactcagcaactacccacaataaccataacaaactaccgagtcaacaccatgacgatgactcactgagtaacactgcaaccgacccaaaccttaactacaaaccagagatcagaatccaaacccaccccggcgaccgagcctacaaccgactcagcaacgccacaaaacttactaac

SEQ ID NO: 272199 - DNA, 402 bp, Glycine max
gcgtccgcccaagcgttcggctgagctgcaggtcaaggttctcactactgggctgttggccacgttattgatatatggattctgcggtcacgcactcgtgacaagaaagggacccttagacaaccatgatgatcaccttgctgaccctatgaacaacaatgcctgggcctataccacaaactaagtatacggaaagtgatggaaaatgagaaaacctgaaacaatgataaactatgactctagtagaaatctcatggagccattgagtgtaatatatattcgaagcataccttacttgccaagggacagaactactggctgtcgatctataggatccactgttacgtacgcatgcatactaccacctaccccttctatagtgaaacctaaagtcaacttact

SEQ ID NO: 272200 - DNA, 431 bp, Glycine max
agaccgcgtccgaccagagaatggctactatggctgtggtgagcctttcatgccccagggtggtcttcaacgcatcagcctcaccgcaaaacgcgcatgctgtaaagttctcacttccacccagccaagcagtgcgaccgggtagtatcaagttgggtcgcgtgatgaggatccgacccgttcgcgctgcgcctgagcgcatatcggagaaggtggaggagagcataaagaacgcgcaggaggcgtgcgccggcgatccgacgagcggcgagtgcgtagcggcgtgggacgaggtggacgagctgagcgcggcggctagccacgccagggacaagcaaaaggaaaaggacttcgacccgctcgagaattactgcaaggacaacccggagaccattgagtgcaaaacttttcgaagactgagcatgcatgct

SEQ ID NO: 272201 - DNA, 426 bp, Glycine max
  unsure (1)..(426): unsure at all n locations
gatcgagataactagaaacagtgtgatgaaaatgaaggtccttgttttcttcgttgctacaattttggtagcatggcaatgccatgcgtacgatatgttccctctccgaatgaacactggctatggtgcccgtactccggaggtgaaatgcgcaagttggaggcttgctgtggaagcacacaacatctttggctttgagaccattcctgaagagtgcgttgaagcaacaaaggaatacatccatggcgaacaatatagatcagactccaaaacagttaaccaacaagcttacttttatgccagagacctcgaagtccatcccaaggacacatttgtgttcagtatagatggcaccgtactctctaatattccatactacanaaaacatggatatggggtggaagaatttaactcgaccttgtatga

SEQ ID NO: 272202 - DNA, 474 bp, Glycine max
  unsure (1)..(474): unsure at all n locations
gcggacgcgtgggtgcggcctctcaccgcacgcactagcactgtctcactctctcacgcacgcgtcatctcaaacttctgcgcactttttcacggatctgatctaactaagttctcgccatgaatcgccaccacgatcccaatcctttcgaggaagaagaagtcaatcctttttcgaatggtggtgctgctcctgcatccaaatcacgtattccaccattagcatctcagccactgggctttggtcaaaggcatgatgctacagttgatattcctttggatactacaaatgactccaagaaaagaggtcaagagctagctgcttgggaagcggatttaaaacggaaagagaaggaaataaaaagaagagaagaggctgcttctagagctggtgttcctgttgatgataagaattggccctncaattttcccaatcattcatcatgatattgccaatgagataccggtcatgctc

SEQ ID NO: 272203 - DNA, 229 bp, Glycine max
acgccgttgtttttgttgtaattagatatataattgtaattgaaacccagcttggatctaaaaaagaaaaaaagaaaaaaaaaaaaagaaaaaaaaaaaaaaaaaaaaaaaaaaaaaaaaaaaaaaaaaggaagaaaaaaaaaaaagaaaaaaaaaaaataaaaaaaagaaagcaaagaaaaaaaaaaaaaaagaaaggaaaggaaaaaaaataaaataggcggaaggt

SEQ ID NO: 272204 - DNA, 387 bp, Glycine max
gaagaacaagtagttgagaactaagaaggagaagcaaatggcttcctcaatgatctcttccccagctgttaccactgtcaaccgtgccggtgccggcatggttgctccattcactggcctcaagtccatggctggcttccccaccagaaagaccaacaatgacattacctccattgctagcaacggtggaagagtgcaatgcatgcaggtgtggccaccagttggcaagaagaagtttgagactctttcctacctgccagaccttgatgatgcacaattggcaaaggaagtagaataccttcttaggaagggatggattccttgcttggaattcgagttggagcacggtttcgtgtaccgtgagcacaacaggtcaccaggatacta

SEQ ID NO: 272205 - DNA, 257 bp, Glycine max
cccacgcgtgcggcttcatacgtatcatcggattcgacaacgttcgacaattgcagtgcatgggcttcatggcctactagcccgcagtcttctaagtgtgaaaaatttgcaaagcatttgtagccgccaccccactttgtatgtttgtacttaaactacatacccattacgttcatgctttctgagatttcatcatccagtatctttgggttctgattacggacttcaatggaaattaatggatgagaactaatgaa

SEQ ID NO: 272206 - DNA, 422 bp, Glycine max
attgctttctctttggttcctagctcgcactctctctacgcacgcctcaacatgccttctctgctccattcattatgtctccgtcgttggatcttccccccaagggtggcttcagttttgatctatgccgaagaaacgcaatgcttcaaaacaagggcctcaaagccccaacctttctcaaaactggcaccactattgtcggtttagttttccaggatggtgtcattcttggggctgatactagggcaactgaaggacctatagtggctgataaaaactgtgagaaaattcattatatggcacccaacatatattgctgtggagcatgcacagctgctgatacagaagctgtaacagacatggttagctcacagctgcaactacatcggtaccatactggtcgggaatcaagagttggtacg

SEQ ID NO: 272207 - DNA, 442 bp, Glycine max
cccacgcgtccgcccacgcgtccggccaatttgtttatctttagtaccacctagtcacaaaacatataccatgtcgaatttgagtttccttcaatttcatagtagcaactcgttggggcactcctcttttcaacccaatagtccaaacccgaacaacaacataaaatcatcaaaacagacatcaaatgtagggtgcaatattcagccaaagtcagaggaaatgaaatgggtgttcgacaagtttgacaccaacaaagatggcaagattaccctcgaagagtacaaagcagcagtgagaacaatggggtggggaatcgaaggcactgagactgatgagtcttttcaggtgatggactctgatggagatggcttcattgacttcaaagagttcatggacatgttcaacgtggaagagagggtgaaagagacggagatcaagagt

SEQ ID NO: 272208 - DNA, 492 bp, Glycine max
taccggtcacgcgttcgcccacgcgtccgtgattgctgaagcattgagcagagttggtagaaagggtgtcgtgacccttgaggagggaaagagtgctgataacagtctgtatgttgttgaggggatgcaattcgaccgtggttatatttctccatacttcgttactgacagtgagaaaatggctgttgagtatgagaactgtaagttgctgttagttgacaaaaagataaccaatgcacgggatcttatcaacatactggaggatgctattagaagtggacaccctatattgattattgctgaggatattgaacaagaggctttagcaactcttgtggtgaacaaacttagaggatcactgaagattgcagcactgaaggcccctgggtttggagagcgcatgagccagtaccttgatgatattgccatcttgactggaggtactgtaatcagagaagaaggtggccttacttttgacaaagctgggaaaga

SEQ ID NO: 272209 - DNA, 360 bp, Glycine max
cccacgcgtccgtgattgctgaagcattgagcttagttggtagaaagggtgtcgtgaccctggaggaggtaaagagtagtgataacagtctgtatgttgtggatgtgatgcaattcgaccgtggttatatttctccatacttcgttactgacagtgagaaaatggctgctgagtatgagaactgtaagttgctgttagttgacaaaaagataaccaatgcacggcatcttatcaacatactgtacgatgctattataagtggacaccctatattgattattgctgaggatattgaacaagaggctttagcaactcttgtggtgaacaaacttatactatcactgaagatcgcatcactta

SEQ ID NO: 272210 - DNA, 253 bp, Glycine max
tatttcagtactctgaaaaattacaacaacctggggtctcttgtactaaggggtatattctcgacacgaagaacactggacacacaggccgcaacataatcttacttaaagaaggctgactaccacacatgaaaaaaattaattctcaaggatccacaaaatccttacaatccaaatgcaggataatacataacagcagcgagagaaacactcataaggctgctatacaacattgccacgatcattggacacc

SEQ ID NO: 272211 - DNA, 266 bp, Glycine max
tcgcccactcgtccggtctgtcgattctttgaatcctttcatgcatgctcgtaggtgtttgggtcatggttgataactgttcaactactgcaaggttggtttcacagaaatgggctccccaatttgattacatcctaacccagcttgccttggtggctgaggacaatggagcacctatcaaccaagacctaatcagtaacttcctgtcagaccaagtgcatggtaccattgaagttagtgcttaactgatacctacagttaacatt

SEQ ID NO: 272212 - DNA, 228 bp, Glycine max
tcgctagttgttggaaagacaccttctccagcttcacagtggctgacgttgtggtcaatggggcggctgcagcagcagcggggcagccgaagaatagaacgtgcaagaagttcagcttcaggggcgtgcatctcgatgcgcttgtggacatgtccaccgatgaactcgagaagatgttcagtgctcgcgcacgtagaacgttccagataggtcttaccacaaagccca

SEQ ID NO: 272213 - DNA, 190 bp, Glycine max
gcactgcatgtgtttaactcatttcttaggccgcattaattagctgcagcatgcacggatcagctgctatttgtttaattaatttctaaatatttctaaaaaaaaaaaaaaaaaaaaaaaaaaaaaaaaaaagataaaaaaaaaaaaaaaaaaaaaagaaaaactaaaaaaaataaaaaatatatagaac

SEQ ID NO: 272214 - DNA, 428 bp, Glycine max
cccactcgtccgcccacgcgtccgatcaggaggaggaggtggtggagggaaatcatcgtggagttcatcaacatcgtcatgggtacccacaacctcagtgtcggcatctggaaagaggattcagagggaaatggttgaactcaacaacgaccctcctcctgattgctctgctggccccaagggcgataacctctatcactggattgccaccattattggaaccccagaaacaccctaccaaggtggcatctttttccttgacatcaaatttccaattgattatcccttcaagccttccgaggtagtattcaaaacacgcatttaccactgcaatgtagaccctgatggccgtgttagtatgggaatattgaaggatgattggagtccagcactaacaattactaaggtgctactagaagttagatcaa

SEQ ID NO: 272215 - DNA, 217 bp, Glycine max
gttatccaccctgccaaggtttcaaggagttcatcgcagaatgctgcttcagttgctgggatggttttgaccacacaggccatcgtggtggaaaatcctaatcccaaggcacctgtgtctggttccccacatggccttaccgcttaatttttaggatatctaggctactgcttagaacagttttgtgcagaatattgaaagaccctaattgttcgaa

SEQ ID NO: 272216 - DNA, 424 bp, Glycine max
gccacgcgtcctcccacgcgttcgttcattttccctcactttgtcgctccccaaacgggcctgtctctcctccaatggccgaccagctcaccgacgaccagatcgccgagttcaaggaggccttcagcctcttggacaaggactgcgatggttgcattactaccaaggaacttgggactgttatgaggtcacttggtcaaaacccaactgaggcagaactgcatgatatgataaacgaggttgatgctgatggcatcggaaccatcgatttgccagagttcctgaacctgatggctcgcatgatgaacgacaccgactcagaggaagagcttaaggaggcttttcgagtgtttgacaaggatcagaatggtgtcatctctgcagcttatcttcgacatgtcatgacatatcttggggagaagct

SEQ ID NO: 272217 - DNA, 432 bp, Glycine max
  unsure (1)..(432): unsure at all n locations
cccacgcgtccgcccacgcgtccgttcattttccctcactttctcgctccccaaacgcgcctctctctcctccaatggccgaccagctcaccgacgaccagatcgccgagttcaaggaggccttcagcctcttcgacaaggacggcgatggttgcattactaccaaggaacttgggactgttatgaggtcacttggtcaaaacccaactgaggcagaactgcaggatatgataaacgaggttgatgctgatggcaacggaaccatcgatttcccagagttcctcaacctgatggctcgcaagatgaaagacaccgactcagaggaggagcttaaggaggctttccgtgtgtttgacaaggatcagaatggtttcatctctgcagctgagctccgncatgtcatgacaaatcttggngagaagctgacggacg

SEQ ID NO: 272218 - DNA, 293 bp, Glycine max
tgatatctggggctatcgatttctcaattagcaaaccatcagaggttgatgttgttggggctgttttaataataacgatctacacttgaatatcttcgtacactgatttctcttttacagtgaaaggctctcatattaccagtgacgaaaaatagtagcatttctaccaaggaacttgggactgttatgaggtcacttggtcaaaacccatctgaggcagatctgcaggatatgatggacgacgtttatactggatcgctacttaactatcgattctttagagttcctaaacc

SEQ ID NO: 272219 - DNA, 296 bp, Glycine max
gcctgcgccgctgctcaaacgacgtcgtccagctagacctctccaccccaacaacaggcaccaccaccaccaccaccaccacaaacaacacaaactcttcttctttctcctcttcttgttctctctccatcgacgtggacgaatcaacggaagcccgcatccagcgcctgatctccgagcaccccgtcataatcttcacgcgctcctcctgctgcatgtgccacgtcatgaagaagctcctcgccaccatcggcgtcaaccccaccgtcatcgaattggacgaccacgagatcgct

SEQ ID NO: 272220 - DNA, 417 bp, Glycine max
  unsure (1)..(417): unsure at all n locations
gtcttcgccaatcgcctgcgtctctctctgaattgactagcttaaatggctggtcctgggattgcccatgctaccttgaaaggtccgagtgtggttaaggagatcataattggaataacacttggcttagctgctggtggtgtgtggaagatgcaccactggaatgaacagaggaaaaccaggaccttctacgatttactggaaaagggtgagattactgttgttgcagaggaacagtgaaaatgttcttgttttgttgcctatgctctccatttataggctnttttttcccgtgttatattcaattggctcttcaaatgtaaatgagccaacatactatgagattgaaaagaataagtttcttgaactgattgaatactatgtttgcctgtaaaagtttcatgcacttatgttttt

SEQ ID NO: 272221 - DNA, 428 bp, Glycine max
aggaactagaaaatgcattcaatcttcaccaccatattgaacatcatggcgatggccagggcaacaactctagccacaatcactgtcgcggcggctagccccagtgttggcagcagaaggagtgggaagaggaatgtgaacttcatcagaggcttgaattcttttggagggttgaaggctcagaacaatgtgacattactaggccttcctgtgtgcactgatcagtgctctgcaaaggtggtgagctcattgaaatattcatcatcatcatcacgttaggggagacgtggaggtgctgccttttgaacatgcaatgctgctggcgagacttttcagattgcagtcatcatgaatggcctcgtgcttgttggcgtggcaatagggtttgtacttcttcgagtccaagcgcttgtcgaagagtctgagtg

SEQ ID NO: 272222 - DNA, 348 bp, Glycine max
cccacgcgtgcgcttcgttgcgagctataagctagttgatcgtgaggagaatatgacgttgtgagctgtctttggagctgcagtagttatggtagcatggccatgccatgtcgcaagctaccaaagggtccctctacgaatgaaaactgcctatggtgagcgatctttacatgtaaaatgcacaagaagtaggcttgcttgagaagctcacaacatgcgagcctttaaaaccattcctgaagagggcgttgaaccagcagacgactacattaaaggctaacaatttacatccgactattaaccagtttatcgacaagcgctctagtatgctagtgaacgcgaagtcca

SEQ ID NO: 272223 - DNA, 387 bp, Glycine max
caaagaaaaaaaaaaacccttagccaacacttctcatcatggccacctctgctattcagcaaggagcattcactggtcaaactgctctgaagcagctcaatgagttcgtccgcaagaccggtggcgccggcaaaggtcgcactaacatgcgccgcaccgtcaagagtgctcctcagagcatttggtatggccctgaccgtcccaagtacttgggtccattctcggagcagattccatcatacctgaccggagaattccctggtgactacggatgggacactgctggattatcagctgacccggaaaccttcgccaggaaccgggagctggaagtgattcacagcagaatggcaatgcttggtgcccttggctgcaccttcccagaga

SEQ ID NO: 272224 - DNA, 356 bp, Glycine max
gggctacccgctgagattaagcgtatcaataagcggcggaaatgagactaacaaggattaggttagtaacggcgagcgaaccgggaaaagcccaccatgaacatcggtcgacctaggcgtacgaattgtagtccggataagcgtgctcagtggaggaccgctcccaagtgccatggaagggggccccagagagggtgagagccccgtcatgcccggaccctgatgtaccacgaggcgctgacagcgagtcgaattgtttgcgaatgcaacccgcatcaggcggtaaattacgtgcaaggcttaatgctggtgatcgacgaggatgaagatgagggtatcgtccatattgatcagtg

SEQ ID NO: 272225 - DNA, 370 bp, Glycine max
cgagattcctagcggcgtggatgcagggaaaatctccatgagcgaagaagaccttctcaatgcggctggtgagacttacagcgttactttggatgccaagggaacctacagtttctactgttcgcctcaccaaggagctggtatggtgggaaaagtcaccgttaattaattatatattgtctcctacgtctaagttctcatatgcttgttttcctagaagagcctaattcatctttcttgttagggcctatgggatgaatcaacaatataatgcctttgagtaattcatttacctcctttgctttcttgatttatatcggactgataagtttttcttttcatattatgtaaaaatcttttagtttttatt

SEQ ID NO: 272226 - DNA, 452 bp, Glycine max
  unsure (1)..(452): unsure at all n locations
gtttgttgtgagctataagctagtttatcgtgaggagaatatgaagttgtttgttttcttggttgctgcagtagttttggtagcatggccatgccatggcgcaggctaccaaaggttccctctccgaatgaaaactggctatggtgagcgttcttcggaggtaaaatgcgcaagttttaggcttgctgtggaagcacacaacatccgagcctttaaaaccattcctgaagagtgcgttgaaccaacaaaggactacattaatggcgaacaatttagatcagactctaaaacaggtaaccaacaagctttcttttatgctagtgaacgcgaagtccatcacaacgacatatttatattcggcatagataacaccgtactctctaatatcccatactatgaaaaacatggatatggngtggaggaaattaatgaaaccttatatgatgaatggg

SEQ ID NO: 272227 - DNA, 459 bp, Glycine max
  unsure (1)..(459): unsure at all n locations
ccctctcgttcgtgccgatcactaggtcacacttcatcaatggcgggtagaggcaaaaccctaggatccagcgccgctaagaaggccacctcaaggagcagcaaagccggcctccaattccccgtcggtcgtatcgccaggttcctcaaggccggaaagtacgccgagcgcgtcggcgccggagcccccgtctacctcgccgccgttctcgaatatctcgctgctgaagttttggaattggctggaaacgctgcgagagataacaagaagactcgaattgttccacgccacatccaattggcggtgaggaacgacgaagagttgagcaagcttctaggagatgttaccattgctaacggcggtgttatgcctaacattcacaaccttcttctttccaagaaggctgggggctcatccaagggtgctgctgctgacgatgactcttanatagggattcac

SEQ ID NO: 272228 - DNA, 445 bp, Glycine max
aaagaacggcatcagcaacaataaggaatgcagttgtcacgggagcaaacaaagggataggagttggaatatgcaagcaattggtatctaatggcatcacagtggtgctaacagcaagggatgagaaaaggggtcttgaagctgttgaaaagctgaaagagtttggtgtgtctgatcaagtggtgtttcatcagcttgatgtgactgaccctaaaagcattgaatcccttgcaaatttcatcaaaacccagtttggaaaacttgatatcttggcgaataatgcaggaattcatggagcatatgttgaccgagatgctttagctgctgctggggaaaaagttgccaatgttgattgcagaaaaatctcaactgaaaattttgaagctgccgaagcaggcattagaacacattactatggagtcaaattaatgtgtgaagcacttat

SEQ ID NO: 272229 - DNA, 377 bp, Glycine max
cgaagcgaaatttccacctgcatcatcttcaaacctgcgcttgttttgaaccgatttgcgcggctttgttagtgaagcacatcgagtgcatactgtcgaacaggcatggcaagcctgttgacaacatcaagcatcacctattctcctctcaacaatggttccaaggatttcagaaaggcagggaattcttctaaaggaaggtgttgcataaaagcaatggcgattgagaaatccttggaggaattgtacaatgtgaacgtggacagaaaagcgtctactgagaaactagctgagcttggaatttcaaaatggacggtgtggaagactgagaaaagctagttgccatgagactggcacgtagaccaactggtgtacat

SEQ ID NO: 272230 - DNA, 377 bp, Glycine max
gccacgcgtacgatgttcgcacagtgcgcgagtatgcgaatggagcaagctgagaccaatggggtgctcaggaccctctgctgtgcgtgtctcggcataccgagcacccgtctggttttgcatacgctctatgtgacttcaccttaaccatctctatacgcgcccttatttctagctcacgcgcccttatttctcccttactgcggccttatcagtctcgtcgtttcttcgacgtcaaaggctacgccagggagctttcgatggtgggcaacaccgtaccgtatttggaatgcaaaggctgcgcttgaccagcagtttctgaacgagaaactatttgattacattgggaagaaataaggcgtgctcttcgtctaccc

SEQ ID NO: 272231 - DNA, 454 bp, Glycine max
  unsure (1)..(454): unsure at all n locations
ggcttggaacctttgggctgatttatgtgcttgtggatgtgcgggggaagaacactcgagagcgagacatagaaaagaaaaaggaaatttcagtcggacaggctaaatactactacgctggatgaagagtattaccctgagcttaaggtagatgttggcgttcttaaaattcatttctagtaagttggcattacctgtaagaatggtcatactgctactaaaggatgttttcgtaaggccgcggaagccctgatccttaaaatcggaaagtatggctatgttaagcgttatcccgccggaaccgacacccctatcgttaagaaatccgaggacaccgcgtttctcctctataatcgcgacgccttctacgcgaactgcatcgaccattagtctaccgacaccgtcgaggacggacccccgagctcgtccatcgaanacgggaatattaaagacg

SEQ ID NO: 272232 - DNA, 452 bp, Glycine max
gaaatcacgaccatgtcgtcgcagaatcagaataggtcgttggagcaagctggaccctacggctccggtggacaggtgggagtgagagtagtgaattggagtggttccgataggctttgcataagccctaagcgagatcacaagcccgaaaactatgacgaccttcaattcgagttcaatcctaatatcttcgcctctctcgagcactatttgcctcctcatatgctcaacctctcacgtgatgttaagcttcactacatcaggaacattcttcttcgctatttgcctgagaatgaccgcatttggattcaaaagctgaaggaatacaggctaaagatcatattgaattatccaccgctgcataaggagatatttactatggatgctgagagctttttcgtaccatcatttctcagagcaataaaagaaaacacagaagcgagttttagaag

SEQ ID NO: 272233 - DNA, 427 bp, Glycine max
accacgcgtccgaccacgcgtccgaccactcttacaaaaatcttaacatttacaatgaagcgatccactctattcctattcctattccacctggctcatgctgctctgactgacgaagctactttcattagagatggcctcaaatcctattcccagcttgatctccctcactcggtttttggttctgaaagtgtagccttcgattgccatggtaaaggaccatatgttggcgcgtctgatggtggaatcctcaagtggcaccagacaaagagagagtggattgactttgcatttacctcgccacacaggaaccagaaattacgtgatgggttaacaaatgacaagatggaatcaatgtgtggaagaaccttgggcctcaaatttaacactttaacttgtgaactgtacattgtcgatgcatactttg

SEQ ID NO: 272234 - DNA, 394 bp, Glycine max
gttgagaactaagaggaaggaaatggcttcctcaatgatctcctccccagctgttaccacgggcaaccgtgccggtgccggcatggttgctccattcaccggcctcaaatccatggctggcttccccacgaggaagaccaacaatgacattacctacattgctagcaacggtggaagagtacaatgcatgcaggtgtggccaccaattggcaagaagaagttcgagactctttcctacttgccagacctggatgatgcccaattggcaaaggaagtcgaataccttctaaggaaaggatggattccttgcttggaattcgagttggagcacggtttcatgtaccgtgagcacaacatgtcacctggatactatgatggacgctactggaccatg

SEQ ID NO: 272235 - DNA, 458 bp, Glycine max
cccacgcgtccgcccacgcgtccgcccacgtttccgaatttcttcacatttacaatgaagcgatccactctattcctattcctattccacctggctcatgctgctctgtctgacgaagctactttcattagagatggcctcaaatcctattcccagcttgatctccctcactcggtttttggttctgaaagtgtagccttcgattgccatggtaaaggaccatatgttggcgtgtctgatggtagaatcctcaagtggcacgagacaaagagagagtggattgactttgcagttacctcgccacacaggaacaagaaattatgtgatgggttaacaaatgacaagatggaatcaatgtgtggaagacccttgggcctcaaattcaacactttaacttgtgaactgtacattgccgatgcatactttgggcttctggtggtaggaccaggtggtggtgt

SEQ ID NO: 272236 - DNA, 308 bp, Glycine max
gatgagaactaagaggaaggaaatggcttcctcaatgatctcgctgcccagctgatactagcggtaaccgtgccagttccggcttggatgctcgatttgccgtgcttaaatccatggctggcttccccactagcgagaccaacaaggacattactttgattgctatgcaattgtggaagagtactatgcatgcaagtgttgctcaccaattgtcatgatgaagttctagactctttgctacttgccagacctcgatgatgcccaattggcataggaagttcgataccttctaaagaatggatggattc

SEQ ID NO: 272237 - DNA, 382 bp, Glycine max
aaaaaaaaaaaaaaaaaaaaaaaaaaaaaaatataaaaaaaaaaaaaaaaaaaaaaaaaaagggaaaaattaaaaaaaaaaaaaaaaaaatataaaaaaaaaaaaaatataaaaaaaaaaaaaaaaaaaaaaaaagggccgccctttttaaagtttcaaagtttccttccccttccttccaactttaaattttttttttggggcccctaaatttaatttaattgcccgttttttaaaaccctcttacttggaaaacccttgcctttcccaaatttaatccctttgataaaaatcccctttttcccacttgtctaattaccaaaaggccccatcccgattccctttccaaaaatttgcccaccctaattgtcaattgaaaccc

SEQ ID NO: 272238 - DNA, 388 bp, Glycine max
gttgagctcttataaggagggtatgcccacatcatggatcgcctgctcagctggcaccaggggcaaccgtgccggagccagactggcttcttgatttacctgccttaaatccatggctggcttcctcacgaggaagaccaacaatgacattacctacattgctagcaactggataagagtacaagaccatcataggtgtatctttattgtcccctgaaaattgaagggcatgcgatactttctatacaactactgttcgaatgcatctttggctgtagcatacgttttcttgatgggacatacaacatggatagcataaccttcttttagccttttgaagaatatacttcgcatcaatggtcgttgatcgttattggggaaaaactat

SEQ ID NO: 272239 - DNA, 408 bp, Glycine max
aagccttcgctggagctgatataaggagtgtatgcacagaagctggtatgtatgctatccgtgcccggaggaagactgtaacagagaaagacttccttgatgcagtaaataaagtcatcaaaggataccagaagttcagtgcaactcccaagtatatggtctacaactgagttattctttcatcttttcccgagaccatagtagttttatctttattttcccctgaaaattgaagggcatgcgattctttctatttaactcctgtttgaatgcatctttgtctgtagcaaacgtttccttcatgttacatccaaaattgagagcaaaaccttcttttagccttttgaagaatatacttgttatcaatggtagttgttcgttattggggaaaaactatcctcgtattgc

SEQ ID NO: 272240 - DNA, 463 bp, Glycine max
cccacgcgtccgattgttattagaatgtgcaaagcacaatccgaaggtggatggagacactgaaaacaatgttgcggagttactgtcagaagaactaactctacgggaaactgaagctttgaaaaatcagcatcgtgctgacatggctctgctggagtccaagaagattgcatcccagtatcaaaaagaagcagacaagtgtaattcaggaatggaaacatgcgaggaagccagggaaaaggccgagatggcactagtggcacaaaagaaacctaatggattgggggaactaagagcttgtcagaaaggatggaatgaagggcttgccaaatctaaaaaacagtctaaagggaaagtacagactgcttagacttggtgtgacctccatctagttattgcatagtagtttcagcgaaatgatatttagtaattagtactggtagtagcaaatcatcacatatag

SEQ ID NO: 272241 - DNA, 423 bp, Glycine max
ctcacgcgtgcgcccacgcgtccgattcactctcagacattagaatggctcgccaatcaagcactaaatcagttcacgatttcacagttaaagatgccaggggaaatgatggtaatctcgccgattacaaaggaaagggccttctccttgtcaatgttgcctcacaatgcggcttgactaattcaaactacacagagcttaatcaattgtatgagaaatacaaagggaaaggacttgaaattctggcattcccgtgcaatcagtttggggctcaggagccaggaactaatgaagagattgtggagtttgcttgtactcgcttcaaagctgagtttcccattttcgacaaggtggatgtgaatggtgacaatgctggtacactgtacaagtttctgaaattaagccaaagtggactctttgggg

SEQ ID NO: 272242 - DNA, 441 bp, Glycine max
ctcgctctgtttctgtctctgtgtttgcggttgaggattccgaacgagcgaccttcttcggttctcgcaaagtttaagtcatcatgggtaaggaacagactcacatcaacattgtcgtcattggacatgtcgactctgggaagtcaactaccactggtcatttgatctacaagcttggaggtattgacaagcatgtgattgagaggttcgagaaggaggctgctgagatgaacaagaggtcattcaagtatgcctgggtgcttgacaagctcaaggctgagcgcgaaagaggaattaccattgatattgctttgtggaagtttgaaaccaccaagtactactgcacagtcatcgatgcccccggacatcgtgactttatcaagaacatgattactggtaccttccaagctgattgtgctggccttatcattgacttcacca

SEQ ID NO: 272243 - DNA, 445 bp, Glycine max
  unsure (1)..(445): unsure at all n locations
accacgcgtacgacatagcacatcgccaagtttaaccttgagttaaaaaacggcagcagctgcttccatggctctctcatccccatccttggctggcaaggccgtgaagctgggcccatcagccccagaagtgggaagggtgagcatgaggaagaccgtcaccaagcaggtctcctcaggaagcccatggtacggcccagaccgagtcaagtacttgggcccattctctggcgagcccccgtcctacctaaccggtgagttcccaggcgactacggctgggacactgctgggctttccgcagacccagaaaccttcgccaagaaccgtgaactcgaagtgatccactccaggtgggccatgctcggagccttgngctgcgtcttcccggagttgctgtcccgcaacggggtgaagttcggagaggccgtgtggttcaaggccggg

SEQ ID NO: 272244 - DNA, 454 bp, Glycine max
aacactcataacacaaagcacaaagcaaagctcatccttgagttaaaaaatggcagcagctggttccatggctctctcatccccatccttggctggcaaggccgtgaagctgggcccatcagccccagaagtgggaagggtgagcatgaggaagaccgtcaccaagcaggtctcctcaggaagcccatggtacggcccagaccgagtcaagtacttgggcccattctctggcgagcccccgtcctacctaaccggtgagttcccaggcgactacggctgggacactgctgggctttccgcagacccagaaaccttcgccaagaaccgtgaactcgaagtgatccactccaggtgggccatgctcggagccttgggctgcgtcttcccggagttgctgtcccgcaacggtgtgaagttcggagaagccgtgtggttcaaggccgggtcccagatc

SEQ ID NO: 272245 - DNA, 456 bp, Glycine max
cccacgcgtccgaaacccactaagatggctttctttgtatccttcctagtgctgcttcttggagcccttatcctcatgcctcaagggcttgctacttactacaaaccaattaagaagccaccagtgtacaagcctccagtgtacaagccaccagtgtacaaaccaccggtttataagccaaaaccaccggtttacaagccgaaaccaccggtttacaagccaccatataagaagccaccatacatgaaaccaccttatggaaagtaccctccagtagaggacaacacccatgcctaaagcaagcaatgaggtctattatctacttaataaataagaagaactgctttggggtttctaacattgtgattaccactttctaagcattgcatattcttgactcttgcatgcacttcaatccttcgtagcattaatgatgtggccaagtcatcatgagca

SEQ ID NO: 272246 - DNA, 428 bp, Glycine max
aataggctatgccattaacgctaacaacactttgaagattttggaacatttgatgcactggggttgtggtgctgtgcttgttagtgggaatgagcttaggttggctcttcgtgctggctttgatcccacgaggtgcatctttaatgggaatgggaaaatcttggaggatttggtcttggctgcccaagaaggtgtgtttgtcaacattgatagtgagtttgacttggaaaacattacagaggctgcaaaaagggctggaaagaaggtcaatgttttacttcggattaaccctgatgtggatccacaggttcatccttatgttgccactgggaataagaactctaaatttggcattagaaatgaaaagctgcagtggtttttaaatgcaatgaaagagctttctaatgagctcaaacttgtaggggccc

SEQ ID NO: 272247 - DNA, 380 bp, Glycine max
cccacgcgtccgattttagccaatagaatacagttgattagggaacaaaacactaggcccagaatagcttaataaaagaaaatggagcaaaaacagaagttgcaagaccacgaaatatcaagcttataaaaatttccaactatcattttgtaatctttttaagaatgcagagtggatatgctcagttgccacccacgcgtccgcccacgcgtccgaaaaaaaaaaataaaagaaaacaccatacaagaaactcaccttatggaaagtaccctccagtagaggacaacacccatgcctaaacaagcaatgaggtctaataatctaacttaaaaaataataagaactaaaaaaaggggcgcccgctttaagaggcccaactt

SEQ ID NO: 272248 - DNA, 449 bp, Glycine max
cagaaacaaacaaaagaggcagaagatgttgtgggtggacaaatatcgtcccaaaaccctgggccaggttatggtccacaccgacatcgctcgcaatctcaagaaattggtaacggaacaggattgcccccatttactcttctatggcccatctggctccggcaagaaaaccctaatcatggctcttctccgccaaatgttcggacctggtgccgaaaaggtgaaggtggataataggacctggaaagtggatgctgggagtagatctcttgatttagagctgacaacattatcaagtgccaatcacattgaaatgagtccgagtgatgcaggctttcaggacagatacattgttcaggaagtaatcaaagaaatggctaagaacagaccaattgatactaaagggaagaaaggatttaaagtacttgtgctcaatgacgttgacaaac

SEQ ID NO: 272249 - DNA, 346 bp, Glycine max
acgggccgtaagagaggtgaatgtcagcgaacttgggcttgtgacgccggctgggaaagcggggtgttgtaaatacgctcaggtcacaaataacccagaaaacgatggttgcataaatgctggtttgcttgattaaagtcgcatcagggttccaacttgatttcagaggcagtggtctggtacctctcctatgatttttttttgggcacaggttctaaaattcttgtttggattgtcaatgcaatgatctgatcttgcactttgacatttgagataactattgtacaagagttaagccaaacaaatgtgataaatttatatagttcattcgcaagacaaattttta

SEQ ID NO: 272250 - DNA, 407 bp, Glycine max
cctagcccctcttctcttcattcttcactcatgaaacaagcataatggccttctgtaataaggttggaaatgtcttgaggcagggtgctgctcgcagcacacaagcacctgtttcatccatgcttaattacattcgctgcatgtcttcaagcaagctttttattggaggcctttcatatggagttgacgatcagtctcttaaggatgcattttctggctttggagatgtggttgatgcaaaagttataactgacagagactctggaagatcaaggggatttggatttgtcaacttctccaatgatgagtctgcaagttcggcactctctgcaatggatgggaaggatctagatgggcgaagcattaaggtatcctatgcaaatgatagaccttctggacctcaatct

SEQ ID NO: 272251 - DNA, 329 bp, Glycine max
cagaaacaaacaaaagaggcagaagatgttgtgggtggacaaatatcgtcccaaaacccggaccagtttatggtccacaccgacatcgctcgcaatctcaagaaattggtaacggaacaggattgcccccatttactcttctatggcccatctggctccggcaagaaaaccctaatcatggctcttctccgccaaatgttcggacctggtgccgaaaaggtgaaggtggataataggacctggaaagtggatgctgggagtagatctcttgatttagagctgacaacattatcaagtgccaatcacattgaaatgagtccgagtgatgc

SEQ ID NO: 272252 - DNA, 436 bp, Glycine max
gcgacgcgtacagcgtaggaaatgaaatccctaatcagaagaagcgcagcttcaaacgagtagcggacaccaaccatgggtcggatgcacaagccgaggtaagggtatatgctaattctgctatgccctacaaaaggacaccttctagctggctcaagatctcttcgcaagatgtctaataaaatatctgcaagtttgcgaagaaaggcttgaccccgtctcagattggggtcattctcagagattctcacgggattgctcaggtcaatagcgttactggcagcaaaatccttcgcatactcaaagctcaccgagttgcgcctgaaatttcagagggactgtaccattgatcaagaaggcagtttcaattaggaagcatcttgagaggaacaggaaggacaaggactccaagttcaggttgattcttgttgagagc

SEQ ID NO: 272253 - DNA, 414 bp, Glycine max
cccacgcgtccgggcaattattcaccgagatattaaagcatctaatatccttcttgatttgagagtttgaacccaaggtttctgactttggcttggcaaaaatcttccctaacaacgatcgttgcattagtcacctcaccactcgagtgatgggaacctttgggtatctagctccggagtatgcatcaagtggtaaattgacagataaatcagatgtatattcctatggcatcatgcttttagaacttataaccggacatccaccaatcactacagcaggatcaagaaatgagagcctcgtcgactgggctaggccattgcttgctcaagcactacaagatggtgacttcgacaatcttgttgatccaaagttgcagaaaagttacgaagctgatgagatggaaagaatgatta

SEQ ID NO: 272254 - DNA, 437 bp, Glycine max
gtgtgcagaagagcgtcgcagttgtaaccctaatcagaagaagcgcagcttcaagcgagtgacagccaccagccatgggtcgtatgcacagccgcggtaagggtatatcctcttctgctttgccctacaaaaggacacctcctagctggctcaagatctcttcgcaagatgtcgaagaaaatatctgcaagtttgcgaagaaaggtttgaccccgtctcagattggtgtcattctcagagattctcacggtattgctcaggtcaatagcgtcactggcagcaaaatccttcgcatcctcaaagctcacggacttgcgcctgaaattccagaagatctgtaccatttgattaagaaggcaggttcaattaagaagcatcttgagaggaaccaggaaggacaaggactccaagttcaagttgattctttgtgagagcag

SEQ ID NO: 272255 - DNA, 320 bp, Glycine max
gccacgcgtccggctgcagcgccagacctagctcatggtacaggagctgcacgggctgaggactgcatgtaccgtgtaccacgcactgtagtcattcatgaccttatttcgcgacatgcgcaggcttatggacggatggaggtggtatgacgaagaccatctaggtcgcgaagcttatccaggggatgtcatgacactaagcttcacgctttcggaatacgagccggatctacagagagtgaattatgctgaaggatgctgactgcttgaccgataagtgaaacgtcatcgggaagaggattacctaatatgcctactaa

SEQ ID NO: 272256 - DNA, 294 bp, Glycine max
cggacgcgtgggcggacgcgtgggcggacgcgtgggcggacgcgtgggcggacgcgtggggtacgaccgtggtgtggatgagttatttttgtaagaataaaatttaggtataacattttaagtatttcctgaggttttaaaaaaaaaaaaaaaaaaaaaaaaaaaaaaaaaaaaaaaaaaaaaaaaaaaaaaaaaaaaaaaaaagagttagaaaaaaaataaagatgatttcgttgtccataaaatctaattgattggctaaaagttttaaaacgtaattgtctggaaaatcct

SEQ ID NO: 272257 - DNA, 281 bp, Glycine max
cccacgcgtccggagtaatagaaacctctcagcccctctccgatcaaatggccaccgtaatcgacggcaaagccgttgcgcaaaccatccgatctgaaatcgccgacgaggtgcgccagctctctcaaaaatacggcaaggttccgggattagcggtggtgatagtagggaacagaaaagattcacagagctatgttggaatgaagagaaaggcatgcgctgaattgtgaatcaaatcctgcgatgtggaccttcccgaacaaggtttccaaagctgacct

SEQ ID NO: 272258 - DNA, 171 bp, Glycine max
cttcgtgagagttgcttacattgacacagaaggaactttccgaccagaccgaattgttcccatagctgagagattagagatggatcctggggctgtactgggcaatgttatatatgctcgtgcctacacttatgagcatcagtacaacctcctccttggtttggctgcaaa

SEQ ID NO: 272259 - DNA, 215 bp, Glycine max
gctggcttcaataattcatatagtaaatggtgactgggcatcccttgtccgtgctctggttgatatggatgttgtgaggccagagacaaatatacgacttgttaccctggaactcgaacaagccttgggagaagtagaatttaaagaaggaattcctgatgtgaagtttagcagggttctgggaaagatttggactgtagcactcaagcatcatt

SEQ ID NO: 272260 - DNA, 220 bp, Glycine max
cccacgcgtccggaaccatggcttgttgagctttatgcaccatggtgcccctactggcaggctatggaggaatcttatgttgacttagcagacaagttagcagggtcaacagggatgaaggttggaaaatttagagcagatggagaacagaaagaatttgcaaagagtgaactgcaattgggaagcttccctacgatattatttttcccaaagcattcgt

SEQ ID NO: 272261 - DNA, 419 bp, Glycine max
  unsure (1)..(419): unsure at all n locations
cgtccggatcgagataactagaaacagtgtgatgaaaatgaagtccttgttttcttcgttgctacaattttggtagcatggcaatgccatgcgtacgatatgttccctctccgaatgaacactggctatggtgcccgtactccggaggtgaaatgcgcaagttggaggcttgctgtggaagcacacaacatctttggctttgagaccattcctgaagagtgcgttgaagcaacaaaggaatacatccatggcgaacaatatagatcagactccaaaacagttaaccaacaagcttacttttatgccagagacctcgaagtccatcccaaggacacatttgtgttcagtatagatggcaccgtactctctaaatatccatactacaaaaaacatggatatggngtggagaaatttaactc

SEQ ID NO: 272262 - DNA, 403 bp, Glycine max
agagcttgtaggttattgctcagagtatggacaacacctcttggtctatgagtttcataaaaacggatcactgcgatgacttccttcacctaccagatgaatatagtaaaccattgatatggaattcgcgtgtcaagattgctttggggactgcacgtgctctagagtacctacatgaagttagttcgccatcagttgatcataagaatattaagtcagccaacatattactggatacagagctgaatgctcatctttcagatagtggattggcaagttatattccaaatgcggaccagatattggaccataatgttggatctggatatgatgcacctgaagttgccttggctggtcagtatactttggaaagtgatgtctacaagcttggagttgtcatgtt

SEQ ID NO: 272263 - DNA, 158 bp, Glycine max
aaaaaaaaaaaaaaaaaaaaaaaaaaaaaaaaaaaaaaaaaaaaaaaaaagaaaaaaaaaagggaaaaggaatgaagggaggtgggagaagaaggaaagaagaggaaagaaaaagaaaaaaaaaagaaaggaaaggtaaaaaaaaaaaaacttgatag

SEQ ID NO: 272264 - DNA, 388 bp, Glycine max
cccacgcgtccggaaaatcctcacccattttcttcgtagccaaacactctgaaattctcagttatgtcgtggcaagcgtatgtggatgatcacctactgtgtgaaatcgaaggtaaccacctcactcacgccgctatcatcggccaagacggaagcgtttgggctcagagcaccaacttcccttcattcaaacctgaagaaataactgccatcaataatgactttaatgagcctggatcacttgcgtcatctgtgttggatatcggtggcaccaaatacatggtcatccaaggtgagcctggggctgtcattcaagggaagaagggtcccggcggggttacttgcaaaaaaaccggtccggccttgaacattggcatttatgatgaac

SEQ ID NO: 272265 - DNA, 208 bp, Glycine max
ttggagaaaagctttcaaggcctgaaattcttgcatccacaactgatgctcgatacctcagacagataggaattcctgtgctcggtttctccccaatgaaaaatactcccatcttgcttcatgaccacaatgagcacttaaaggatactgtgttcatgaagggaattcacgtatactagtctctgataagttccttgagtacatttac

SEQ ID NO: 272266 - DNA, 401 bp, Glycine max
gggaccatgaagttgagcagttcatttgttgatcctggattagagtggaggctctgtgttagcaaaagtggcaagaggcagcgcaaggagaggagagtgaccattgtcaatgaacttggaggacaatatgaggacacttttgaagatgttaaagcgcaaatgctcaactatttcacatacaaggctgtgaggactgttcttcatcagttgtatgagatgaatccacctaaatacacgtggttctataattttgttgcttcaaacaaaccagcatatgggaaacgttttattcgatcccttgggaaggagcaacaagagcttgctgaaagagtgatggtaactcggcttcacctttatggaaaatggctcaagaaatgtaatcatgctgaaatatatcaaga

SEQ ID NO: 272267 - DNA, 417 bp, Glycine max
  unsure (1)..(417): unsure at all n locations
cccacgcgtccgctcataacaaagcacaaagcaaagctcatccttgagttaaaaaatggcagcagcttcttccatggctctctcatccccatccttggctggcaaggccgtgaagctgggcccatcagccccagaagtgggaagggtgagcatgaggaagaccgtcaccaagcaggtctgctcaggaagcccatggtacggcccagaccgagtcaagtacttgggcccattctctggcgagcccccgtgctacctaaccggtgagttcccaggcgactacggctgggacactgctgggcctttcggagacccagaaaaccttgccaagaaccgtgaactcgaagtgatccactccaggtgggccatgctcggagcctngggctgcgtcttnccggagttgctgtcccgcaacggggt

SEQ ID NO: 272268 - DNA, 418 bp, Glycine max
gcaggaattaggaatattcgacaggtagagtttcttcaatggctcctaaagttgataagaagaatgatccaaaggcccaggccttgaagactgctaaggcagttaagtcaggtgctacctttaagaagaaggtaaagaagatccgaacttctgtcactttccacaggccgaagaccttgaagaaggacaggaaccccaagtaccctcgcattagcgccccgccgaggaacaagcttgatcaatattcagatcctgaaataccccttaccactgagtctgccatgaaaaaagattgaaggcaacaacactttggttttcattgtcgacctgcgtgccgacaagaagaagatcaaggatgcggtgaagaaaatgtatgacatccaggccaaaaaagtgaacaccttgatcaggcctgatg

SEQ ID NO: 272269 - DNA, 255 bp, Glycine max
cccacgcgtccgcccacgcgtccggagataactagaaacagtgtgatgaaaatgaaggtccttgttttcttcgttgctacaattttggtagcatggcaatgccatgcgtacgatatgttccctctccgaatgaacactggctatggtgcccgtactccggaggtgaaatgcgcaagttggaggcttgctgtggaagcacacaacatctttggcttttagaccattcctgaagagtgcgttgaagcaacaaaagga

SEQ ID NO: 272270 - DNA, 361 bp, Glycine max
gcgtcagtgatcaacattaacatgtgaatgcctaagccataagacgaacattcggaagcgtgtagtgaaggatgcgaaagaggctcagaaaccatctaatacgggtctgcttgatggactgaacaagggtcacgacgtcaccaagaaggaattgcctccacgcgcaggagaacaggaggggaaaacaggcgagagggagcactgtgtgagagagcagagagataggtaaagccagttagaggttaagagagcgtaaactgtctgcagaacttggaaggtacaagagaaaaaagttgcaaagagaaaactcggaacacacaaacgcgcaaagaagaagcgagaggaaaaggccagtgttctc

SEQ ID NO: 272271 - DNA, 408 bp, Glycine max
cccacgcgtccgcccacgcgtccgcagaggataatgttgatgaaatcaagtcaaagcttgatgctgctgacgagtctgtgtccaatattggagagcacatatcaggaggttctagtggcggttcctcagctggtggttctcagggtggggaccaggctcccgaggcgggatactgggttgtgaagaagttaggtgaagatttgtttgtatgcgctgttagtgaggtattgtgtctagagttagggatgatatgagcttttttcatttagcatatgatataaggttttttgtacttagaggttggagttcattttttacttcatgtacttctggagaaccaaattatgctgtttgaataacggtatttaaatttttgcctattgaccggtgacgcattttttacttaaa

SEQ ID NO: 272272 - DNA, 416 bp, Glycine max
ccacgcgtccgttcttctgcgcggtgctgttctcttttgttgattgggtttttattctcttctttctgagaagggcttggggttgttgtgtttcgaaataatggcgactacgaatccctttgattcgttgggcgacgacgccgaggacccctcacagttgatcgcggcggagcaactgaaggccgcggcagccgcggccaccgcgccacccaagaaggaccaggccaagcccggagctcgcagcggcgcgccggcccagttgccgtcgaagccgcttcctccctctcaggctgtaagggaggctaaaaatgaaacttcttacggcggtcgtggtggtggccgaggaggtggaagaggatttggacgcggccgtggtggcggcggtggcttttggccgtgatttttccaatgatgat

SEQ ID NO: 272273 - DNA, 390 bp, Glycine max
caatctatgcattcaccaattgggtcgacattttgatacagttgtacgctctttaacagtgatgtgacatgggagcttggtagttgcagcaaataatcacgggacatgttatgtgtggcgcttgttgcgagggactcagacaatgacaaactttgagcctcttcacaagctgcaagcacacaagggatacatcctcaaatgtcttttatcacccgagttctgtgaaccccacaggtacttggcaactgcatcttctgatcatactgtcaaaatatggaatgttgatggttttaccctagaaaaaactcttataggtcaccaacgctgggtgtgggactgtgtcttctccgtggatggcgcctaccttattacagctttctctgatacaac

SEQ ID NO: 272274 - DNA, 386 bp, Glycine max
cccacgcgtccggatgatggaagtgattttctgtgagaatttccggtattcaccactctccatcttatcgtcttctccttcacctcgttgccatctctctgttccatcttcttctttgaggattaaaccttcttcttcatcttcatcatcatcatctgtgtcttgttctctcatggagaatcaggagacccaacgcatcaaattcatggactttccgttcgtttcatctgcccagaagaacctcatggttgatctcgtttcaacacttgagaatcgctttcactctcagcttcttccttgcacactcccctctgatgttcagtattaccaaagccaaactgccactgcccaaacttcccttcatattaaaccagctcataatgacc

SEQ ID NO: 272275 - DNA, 437 bp, Glycine max
cccacgcgtccgcaatcgcctctcgcttcgatgctacgctgctcgcgccgccttcgacagagttcccgttctcaatcccatcgtcgaaatggacggtgatgaaatgacgaggattatatggaggatgatcaaggataaacttatatttccttacctggatttgaacataaagtactttgatttggggcttcaaaatcgtgatgctactgatgacagagttactgtggaaagtgctgaagccactctcaagtataacgtcgctgggaaatgtgcaacaataactcctgatgagacccgagtgaaagaatttggactgaagtctatgtggagaagccccaatggcacaattaggaatatcttaaatggtactggtttccgtgaacccataatatgctgcaacataccgagaaatggttcccgatggaaaaaccccattg

SEQ ID NO: 272276 - DNA, 173 bp, Glycine max
tcgttaatgccaagtatcatcaagaccaaatttgggccagagagcatgtgggacgtgctgcaagcggtgcaattgtgggccttcgggagcctataggcattttgaaaggtgatcatgctatgcaaatatgaccacccacggtggaaaacataaatgtccataattaattatat

SEQ ID NO: 272277 - DNA, 175 bp, Glycine max
cccacgcgtccgcccacgcgtccgcccacgcgtccgagcccccaggcttctaagtgtgaaaaatttgcaaagcatgtgtatccgtctgccctacttttgtttgtttgtacgtaaactacattcccatttgtttttgctttttgagatttcatcatcctgtatttttggtttctgt

SEQ ID NO: 272278 - DNA, 334 bp, Glycine max
cccacgcgtccggaacataccaatctacaataaacgatgattctcattatctccctcatgttttctcttctgtctttctcccatgcttctgtcctagatttctgtgttgcagattatgcaggtcctattggacctgcaggatattcctgcaagaagccttcaaaggtcacagcagatgattttgcttacagtggccttggcattgctggttgcacctgagacattatcaaagctgcagtgacccctgcgtttgatgctcagtttgctggtctcaacgggcttggcattttcccagctcgtttggacttagcagcatggggagttataccacttt

SEQ ID NO: 272279 - DNA, 374 bp, Glycine max
  unsure (1)..(374): unsure at all n locations
gnggcgcgcaaaaaccgggggaacagcaatcgggaaggccttttcaaagctggcaaagaacattcaagtgctgtcaagttcctttgtcgataagcaagaccaatacactgtggaaggagtgcagaatcttggagacaaagcagtgatgcgtcataggctaaatttcagaactgcagtattttactgccatgaagtccgcgaaacaacagctttcatggttccattggtggctggtgatggaaccaaaactcatgcacttgctattagccactcaaatacttctggaatgaatcatcaaatgcttcatcaacttatgggagttgatcctggacctaacccttgttgccatttacctggaagcaaggccattttat

SEQ ID NO: 272280 - DNA, 347 bp, Glycine max
cccacgcgtccgcagaagaacaagtagttgagaactaagaaggagaagcaaatggcttcctcaatgatctcttccccagctgttaccactgtcaaccgtgccggtgccggcatggttgctccattcactggcctcaagtccatggctggcttccccaccagaaagaccaacaatgacattacctccattgctagcaacggtggaagagtgcaatgcatgcaggtgtggccaccagttggcaagaagaagcttgagactctttcctacctgccagaccttgatgatgcacaattggcaaaggaagtagaataccttcttaagaaagggatggattccttgcttggaat

SEQ ID NO: 272281 - DNA, 232 bp, Glycine max
cgcagagagagagagatccatcgatcaattaatttccaatggccgatcagctcaccgacgaacagatctctgagttcaaggaagcctttagcctcttcgacaaggacggcgatggttgtattaccaccaaagaacttgtgactgtgatgcggtcgcttgggcagaacccaactgaggctgagctgcatgacatgataaatgaggttgatgctgatgggaatggtaccattga

SEQ ID NO: 272282 - DNA, 434 bp, Glycine max
  unsure (1)..(434): unsure at all n locations
cccacgcgtccgtgcagatatcaccacctacaccactctgataaggacactaacttctgcctcttcatgcctctctttgatgctcttggcaataccctcaacaaaaaatcatggcaatcacccaaactaccaagttcaggttcaggaaacggtgacacggtaccccattttgttttcctggcacatatggttgatgtgtcatccagtatgcatgtccaattcgtctttcgatcctttgcttcaatgccatacaccacaagggtcctcctggttccaagctttgccggtacttttctagttttgctagcaatgtgggcttggtccaggcctttttagttaagttctactatctcagaggaagacttcaccatacgtgggttggacctagatgtggctttcagtatttctttgccattgctactgnaggaatcaat

SEQ ID NO: 272283 - DNA, 421 bp, Glycine max
attgcatttgagtatatctgttgtagactttgtagtatactactgaaagatggattcgaagacgaaagtagcaatacttattcctggcatgttagccatactccttttcatctcctcagaagtggcagccagggacttgaaagaggagggggttcttaaagagacatgtaaagttgtgatgccaaattagttggtggagggtttgcaggctcttgtcggggctcacctactcctgtctatcctggtcgtggcattcctggtcgtggctttcctggtcagggctttcccggtcagggcttccctggtcagggcttccctgttcaaggctttccctttcccggtcagggctacccttttggtccctggtcaaggcttttcccgtcaaggctttcccggtcaaggctttccctggtcagggctt

SEQ ID NO: 272284 - DNA, 408 bp, Glycine max
ccctctttcaccgcagtgttagggtttctgtagcctccaaccagaaagagagggaaatggctcccaaacatcctagtacgggtttgtttgttggattgaacaagggtcacgttgtcaccaagaaggagttgcctccacgcccttcagatcgtaaggggaaaacaagcaagcgagtgcactttgtgaggaacctcattcgagaggttgccggctttgcaccttatgaaaagcgaataactgagttgctcaaggttggaaaagataagagggcactgaaagttgccaagagaaagcttggaacccataagcgcgcatagaggaagagagaggagatgtccaatggtctccggaagatgagggctggtggagctggagacaggaagaaataagtcttggttactttttcta

SEQ ID NO: 272285 - DNA, 443 bp, Glycine max
cttttcccctagattcagccacagttggaaaaaaaaaaaaaagttgttcgagatggcacgtacgaagcaaactgctcgtaagtccacaggaggaaaggcacctaggaagcagctcgcaaccaaggctgcacgtaagtctgcaccaactactggtggtgtgaagaagccacatcgttatcggcctggtaccgttgctcttcgtgagattaggaaataccagaagagtaccgagcttttgatcaagaaggttcccttccagaagctggttcgtgaaaatggtcaagactttaagactgatctgcgtttccagagccatgctgtgcttgcattgcaagaagctgctgaggcataccttgttggactctttgaggatactaatctgtgtgccattcacgctaagcgtgtaactattatgcccaaagatatccagctggcaagaagga

SEQ ID NO: 272286 - DNA, 180 bp, Glycine max
aaaaaaaaaaaaaaaacaaacacaaaaaaaaaaaaaaaaaaacacaaaaaaaaaaaaaaacggccacagagaaaaagaagaacagatgaaacaaaatagagaaaaaaaaataaaagaaacaaacaacaaaaaggggcagcccttctagcgcacccaaccttccgccccctaccagccaac

SEQ ID NO: 272287 - DNA, 404 bp, Glycine max
cccacgcgtgcgcccacgcgtccgctggtgtgtcttcgctgagaagattgtctgtaccgggtgaagtatgttagcccttgcagtaaagcttctagtgatggtgcaaggctaatgttgctgggtgaaagtggtagaatcgtcagcgaggtgaaaccggttgatgacagttgtctagtagctgagacctcacagatttgttctctgcaactgcttattacggtagctttatcgtcaatgctgcttacagtggcactgatagaaagggtattcttgctgctgatgaatcaacagggacagttggcttgcgtttggccagcatcagtgtagagaacattgaatccaacaggctagctcttagggagctgcttttcactgctcctggtgttctttaatatctcagtggt

SEQ ID NO: 272288 - DNA, 164 bp, Glycine max
ctagaaacagcgtgaggaatttgacggtcccaggattcttcacatctacaggggtggtagcatggtgatgcgaggcggtcgatgtgttgcgtgttaggaggaacactggctatggtgcccgtactccggaggtgaaatgcgcaagttggaggcttgctgtggaa

SEQ ID NO: 272289 - DNA, 213 bp, Glycine max
cccacgcgtccgcccacgcgtccggttgtgttcgacgaggacgagattcctagcggcgtggatgcagggaaaagtctccttgagcgattaagaccttctcaatgcgcctggtgagacttacagcggtactttggatgctaagggaacctacagtttcttctgttcgccttacctttgaacttgtatggtgggaaaagtcactgttaattaatt

SEQ ID NO: 272290 - DNA, 179 bp, Glycine max
cccacgcgtccgcccacgcgtccggtttgatacttaaacatgatgcgtcacataattatgaaaaaaaaaaaaaaaaaaaaaagaaaaaaaaaaaaaaaaaaaaaaaaaaaaaaaaaaaaaaaaaaaaaaaaaaaaaaaaaaaaaaaaaaaaaaaaaaaaaaaaaaaaaaaaaaagaaag

SEQ ID NO: 272291 - DNA, 293 bp, Glycine max
cccacgcgtccggaatggatcattcttgggaagcacaaaagcttcttttcttagtgggaggaaactgaatgtgatcaactttacagtgccagttggagcacgatccagcactacagtttgcgcagttgctgagcctgataggcctctgtggttcccaggcagcacctctgcttcatggctttatggcagtttgccaggagaggatggctttgatcctgtgtgttttgcgtctgatcctgagagcctgtgatggtatgtccaagcagagcttgtgcactgcagatgggccatgt

SEQ ID NO: 272292 - DNA, 406 bp, Glycine max
ctgcatcggaagaaaccctagccactctcccggcgtcacgatgcagatcttcgtgaaaaccctaacgggtaagacgatcacgttggaggtggagtcttcggtcaccatcgacaacgtgaaggccaagatccaggacaaggaaggcatccctccggaccagcagcgcctcatcttcgtcgtgtagcagctggaggacggtcgcactctcgtcggctacgacgtggataaggagtccacgcttgagctggtgcttcggcttcgtggcggcgccaagaagcgcaagaagaagacctacacgaagccctggaagatcaagcacaagcacaagaaggtcaagctcggcattcttcagttctacaaggtcgacgattctggaaaagtccaaaggctccgaagggagtgccca

SEQ ID NO: 272293 - DNA, 414 bp, Glycine max
  unsure (1)..(414): unsure at all n locations
tctgaatcagaaatatactcggagaaagaaactgaatcgcttacgcacgcgttaacattaccactttcttgcttacagcacagcacttctgctaacctttcgtcttcaatttccctttggatttcattcattagatggattcgagttcggggcatcaagaattcgattatttgtttaagttgttgatgattggagactctggggttggcaagagtagtcttcttctcagtttcacctccgatgcttttgaagatctctcccccactatcggtgttgattttaaggtcaaatatgtgatgatggngggtaaaaagctgaagcttgcaatttgggatactgctggtcaggagagattcagaacactgnacagttcttactacagaggggcacaagggatcatcatggnttatgatg

SEQ ID NO: 272294 - DNA, 174 bp, Glycine max
cccacgcgtccggcgagttttaactgaatttgaatatgcttttttaatccccaaatacatttttaatttatttacccttgacaaaaaaaaaaaaaaaaaaaaaaaaaaaaaaaaaaaaaaaaaaaaaaaaataaaaaaaaaaaaaaaaaaaaaaaaaaacaaaaaaaaaaataa

SEQ ID NO: 272295 - DNA, 280 bp, Glycine max
acaacagcccgtccgccgatgtcatcaaggaaatccttggctccgtcggagtagaagcagatgaagataggattgaatccgttttgtctgaacttaagggtaatgatatagttgagcttattgctgccggcagggaaaagttggcctcggttccttctggtggtggtggtgccagtgccgtcgtccgaactcctgggggaggtgctgctgctgctgcttctgcttgtgatgcaaataacgaggaaaaggttgacgataaaagatgaatctgatgatgata

SEQ ID NO: 272296 - DNA, 394 bp, Glycine max
tcgaccacgcgtccggttgaagacatccgggctaagggtggaaatatcaccagggagccgggtccagttaagggtgggaagtctgttattgccttcgtgaaggatcctgatggttatgcttttgagctcattcaaagatcttccacccctgagccattgtgtcaagtaatgcttcgcgttggtgatttagagcgctcaattaagttttatgaaaagactttgggtttgagggtggtaaagaagactgatagacctgaatacacgtatactatagctatgcttgggtatgcagaggagcatgagacaactgtgttggagctgacatataactatggtgtcactgaatacaccaaaggaaatgcttatgcacaggttgctattggtactgatgatg

SEQ ID NO: 272297 - DNA, 384 bp, Glycine max
  unsure (1)..(384): unsure at all n locations
ancncatagagagagagagccccgagagagagaaaggangaagatcacggcatcgnaggggcttaaatgcacaggtgagggttccgatcccgttattctggcgaacgcttccgacgtcagccacttcggttacttccagcgttccagcgtcaaggagttcatcgtcttcgtcggtcgcaccgtcgcccgtcgcacccctcagggccaacgccaatccgtacaacacgaagagtacaaggtgcacacatacaacagaaatggtctttgcgcgttgggatttatggatgatcattacccgattcggagtgcgttttctcttctcaaccaggtaatagatgaatatcaaaaaaacttttgcgagtcatggagaaatgcttatgaaga

SEQ ID NO: 272298 - DNA, 167 bp, Glycine max
cactttgtttgttgtacttaaactacattcccatttgtttttgctttatgagatttcatcatcctgtatttttggtttctgttttcggacttcaatggaaattaatggatgagaactaatgaataaaaaaaaaaaaataaaaaaaaaaaaaaaaaaaaaattataat

SEQ ID NO: 272299 - DNA, 307 bp, Glycine max
gtgcctgatatacccccttcacataacaagattcaattaacggcaactatgactgatgtgaggcttgcaagccccagagccttcttcaacccatcaccctcaccggaaaacacgtacaccatatagttcgcagttacactctgccaaggcatgctacttgttagtgtcacgatgtgtaaattgatgaagatcctacccgttcgcgcatcttcagatctcatttcttaaaacgtgttggatagcttaactaactcgcaagaggcgctctcctataacccaactaccatttagtgctcctcgcctttat

SEQ ID NO: 272300 - DNA, 419 bp, Glycine max
ggctgtggcagttcttggcagcagcgagggtgtcactggaactattttcttcactcaggagggaaatggtccaaccaccgtaactggatctcttgctggtcttaagcctggtctccatggcttccatgtccatgccttgggggacactaccaatggttgcctgtcaactggagcgcatttcaatcctaataacaacgagcacggtgcccctgaggacgagaatcgtcatgctggtgatcttgggaatgttaatgtcggtgatgatggtaccgttagcttcagtattaccgacagtcagaaattcctctcactggaccaaactccatcataggaagggctgttgttgtccatgctgattctgatgaccttggaaaaggtggtcatgagcttagcaaaactactggaaatgctggtggcag

SEQ ID NO: 272301 - DNA, 442 bp, Glycine max
accatacacggcctctaaattccggatttgaaagcgagaaccatataattaattgacctatggaaggagagaggttttgaggtgtggggtcggtgatggacggtggtggagtgaactacaaccctcgcaccgtggaacaggttttccgggacttcaagggccgtagagctggcatgatcaaggctctcaccactgatgttgaagaatttttccagcagtgcgatcctgagaaggataatctttgtctgtacggattccctaatgagcaatgggaagttaatttacctgcggaagaagttcctccggagcttactgagcctgcattgggcataaactttgctagggatgggatgcaagacaaggactggctgtctttggatgccgatcacagcgatgcatggttacttgcagaggctttctactttggggcacgatttggctt

SEQ ID NO: 272302 - DNA, 237 bp, Glycine max
taacaaccgctctagcaactcagctacctttctcaatgataccttctccaactgttggggcggtaaaccctgccgctagcctccatgcaagctacatacactggcctaaagtccatatatggataccacaccatattgaccaacaacgacattacctccattaatagtatcagaacacgagagccttgcatacagttatggccaccacttttcattaatacgctcagactctttcct

SEQ ID NO: 272303 - DNA, 431 bp, Glycine max
cttcaccgcgctttctgcaccgccaccgagcccgtcaccaccgtcaccgtcaccgtttcgatcaagtccatttcggaggatctgtacaaggaagtgaagctaaagaatgtggtggagaagttcaagaaagcctcggacatcgaccgcttccgcaaaaaaaccggcatctacgaagacaccgtccgccgcctcgccggcgcccgacgcttccggtggatccgcgacatcctcgagcaccagaagcagtactccgacatctccaacgagggcttctccgcgcgcctcatctccctgtacggcaagtccggcatgaccaagcacgcgcgcaaggtgttcgacgaaatgccgcagcgaaactgcagccgcaccgtgctctccctcaacgcactcctagctgcgtacctccactcccgcaaatacgacatcgtcgg

SEQ ID NO: 272304 - DNA, 377 bp, Glycine max
  unsure (1)..(377): unsure at all n locations
gttgagaactaagaaggagaagcaaatggcttcctcaatgatctcttccccagctgttaccactgtcaaccgtgccggtgccggcatggttgctccattcactggcctcaagtccatggctggcttccccaccagaaagaccaacaatgacattacctccattgctagcaacggtggaagagtgcaatgcatgcaggtgtggccaccagttggcaagaagaagtttgagactctttcctacctgccagaccttgatgatgcacaattggcaaaggaagtagaataccttcttaggaagggatggattccttgcttggaattcgacgtggagcacggnttcgtgtaccgtgagcacaacaggtcaccaggatactacg

SEQ ID NO: 272305 - DNA, 445 bp, Glycine max
  unsure (1)..(445): unsure at all n locations
aaagagaagcattagcactaggagcagcaacaactagtctcagctgaaatggcctcttcagtgatggcatctgtggccctcaaacctgcccctttcactgttgagaagtcctcagtgagaggccttccctctctctcaaggaactcttcttcattcagagttgtggccagtggcaagaagatcaagactgacaaaccttatggaattaatggtggcatggctttgagggatggaactgatgcatctggcaggaaaggaaagggaaagggtgtttaccagtttgtagacaaatacggtgctaatgtcgatggttacagtcctatctacgacaccaaggactggtctccaaccggtgatgtctacgctggcggtacgactggcttggctatctgggctgngactctacttggtcttttagctggtggtgcacttcttgtctacaaca

SEQ ID NO: 272306 - DNA, 130 bp, Glycine max
tcccactcgtcctaaaaaaaaaaaaaaaataaaaaaaaaaaaaaaaaaaaaaaaaaaataagaaaaaaaaaaaaaaaattaaaaataaaaacataataataattaactaaaacattttaaaattaaataa

SEQ ID NO: 272307 - DNA, 429 bp, Glycine max
cccacgcgtccgccatccgctgcaaagaagccttcccagcctaaggaatctaagcccaagcggaaggatgaaccaaagaaagcagctaaaccagagcctaaacaagaagcagaaccagaggaggaggcacccaagcccaagcccaagaatcctcttgatcttcttcctccaagcaagatgatcttggatgactggaaaagactctactcaaacaccaagaccaacttccgcgaggttgcaatcaaaggattttgggacatgtacgatccagagggatattctctgtggttctgtgattacaaatacaatgatgagaacacagtttcctttgttacgttaaacaaggttggtggatttcttcagaggatggatctggctcgcaagtatgcatttggaaagatgctggtgattggatcacaggcaccattt

SEQ ID NO: 272308 - DNA, 406 bp, Glycine max
ctcgtcactagctctgtgcattcttctctcgctctctgccttccatcacactcggcatggcctttcccaagatagtagaagatggcagacactgaggatattcaacctcttgttcgtgacaatggaacaggaatggataaggctggatttgctggagatgatgccccacgtgctgcgtttcccagcattgtaggtcgtcctcgtcacactggtgtgatggctggcatgggccaaaaagatgcatatgttggtgatgaggcacaatctacgaggggtattttgactctcaagtaccccattgaacatggaattgtgagcaattgggatgatatggaaaagatttggcaaactttgcaagagcatacaccgtggaattcggtcgttgcaagttccctgagaacttcac

SEQ ID NO: 272309 - DNA, 321 bp, Glycine max
gtaggaggtggtgtcctaggctgaagaggattccactcaagctttagaactacacagagtggcctgtctcttaacatagatgtgtcaactacaatgataatttctcctgggcctgtggtggatttcttaatttccaatcaaaatgtgagagatccttttcaactcgactgggctaaagccaaaaggaccctaaaaaatctgaggattaaaactagcccatccaatcaagaattcaaaatttctgggctcattgaactcccatgcagagagcagacttttactttgaaaggtaaaggtggctgggatgcttgctgaggtatg

SEQ ID NO: 272310 - DNA, 419 bp, Glycine max
atcgctctctcttctccaaaattcctcatcctcctcctcctaatctctgccataccgatgggaatcatcgacactctagagcgagccaaacccgccacccacgtataccactaccacagtaacggctgattccgagaatgcgccaattgggattctcataaccgccgcttcattgcttccttcttggaatgtggtcttgatcacgttttgctgcctgagaaggattatgagtcatcgccgccattggacgaagacaccgtggtcaaagagacccacttggccggaaatgcccacatgggaccctcgacattgacgcacctataaatcgagtcctcgtcgttaacgatgacgtgatcggtaatcgatacggcgcgcttgcagcatatgatctctacacctggaatcgcctctttttaacc

SEQ ID NO: 272311 - DNA, 201 bp, Glycine max
cacgacaaacaccagcacgggaaagggaggaggaaaaaaaaaaaaaaaaaacagaaacaaaaggaaaaaaaaaaaaaaaaaaaaaaaggacaagaaaagaaaaaaaaaaggggagaaaaaagcgaacacagacacgcggacaaccggaaagcaaagaaaggacagcggacacccaaagaaacaccggggaagcacaaaacc

SEQ ID NO: 272312 - DNA, 66 bp, Glycine max
accaggaacaaaaaaaaaaaaaaaaaaaaaaaaaaaaaaaaaaaaaaaaaaaaaaaaaaggggggg

SEQ ID NO: 272313 - DNA, 441 bp, Glycine max
cgcagaattagaagcttttgcccaattcgcttctgatctcgataaagctactcaaaatcaattagcaagaggtcaacgattgcgcgagttgcttaaacaatcccaatcagctcctcttaccgtggaagaacagataataactatttatactggaacgaatggttatcttgattcattagaaattggacaggtaaggaaatttcttgttgagttacgtgcttacttaaacacgaataaacctcaattcaaagaaatcatatcttctaccaagacattcactggggaagcagaagtccttttgaaggaagctattcaagaacagatggaactctttttactacaggaacaggtagaaaaaaattgattaatcatttaataactttataatttcactttcaaattcttataattagtatcttttaatatctttttatttcattt

SEQ ID NO: 272314 - DNA, 412 bp, Glycine max
gtttgagactctatcctacctgccagaccttgatgatgcacaattggcaaaggaagtagaataccttcttaggaagggatggattccttgcttggaattcgagttggagcacgggttcgtgtaccgtgagcacaacaggtcaccaggatactaccatggacgctactgtaccatgtggaagctgcctatgtttggttgcactgatgcttctcaagtgtagaaggagcttcaagaggctaatactgcataccccaacggcttcatccgtatcatcggattcgacaacgttcgccaagtgcagtgcatcagcttcatcgcctacaatcccccaggcttttaagtgtgaaaaatttgcaaagcattcgtagccgtcaccagactttgtttgtttgtacttaaactacatgtccat

SEQ ID NO: 272315 - DNA, 397 bp, Glycine max
tctagccattcgaattcccaatctaaaaccctaataccttcaaagaacgaagtagtgggtgcagtgatggcacctaaggcagagaagaagccagcggagaagaagcccgcggaggagaagaagtcgacggtgggagacaaggctccggcggagaagaagccgaaggccggaaagaagcttccgaaggagggaggagccggctgagaaggggggaagaagaaaaagaggaacaagaagagcgttgagacgtacaagatatacatattcaaggtactgaagcaggtccaccctgacattggtatctcaagcaaggccatgggaatcatgaacagcttcatcaacgacatcttcgagaagcttgctcaagaatctttcagacttgcccgctacaacaaga

SEQ ID NO: 272316 - DNA, 414 bp, Glycine max
aaaacacacatcttcatgaactaatacaatcgtactgaatgtacaattcatatcagggagagatgatagcaccgggcatcgtgccttggccaacatggttgctccattcaccggcctaaaatcggtgggtggctttacaagatcgaagaccaccaacgccagcacgctacttgatagcaacggtatgaagagaacataagcatgcttgagtggccaccaattgacaacaagaagactgagactaccttgtacgttgccaaacctaattgatgcccaatagcaacaggatgtccaataccgtcgtttatgaaaggataggacccctcgcttggaatcttagaacaagcacgcattctggatgcgtgagcacaccacgccatgtgcatactattatgcacgctactggaccatgtt

SEQ ID NO: 272317 - DNA, 417 bp, Glycine max
aaaacacacatcttcaagaactaatacaatcttactgaatgtacaattcatatcagtcagagattataccaccgggcatcgttccttggccaaaatggttactccattcaccggcctcaaatccgtggctcgctttacaacaaccaagaccacctacgccatcaccctacattcttagcaactgtatgaagacaacaatacatacttgagtggccaccaatttacaacaagaagactgagaataccttctacttaccaaacctaaatgatcccgcaattacataacacgattttccaatacctcataaaagaaaagataggacccctcgctatcgaactcttataacaatcacgcattctgataccgtaatcacaacagctcatctgcatactattatacacgctactggaccatgt

SEQ ID NO: 272318 - DNA, 428 bp, Glycine max
aatctatgaagcttgggttatttataatttcctatcactgtgtctcgaatgggttggggggcctggatcagtagtcctaagtttaacaggtcgggttctaaagccatcatggtttctgatgacctgttgcttacctcctctggcgcttgatggtcgttttatacggaaatgcaagcaagggtgtttgcagttcgtgattttgaagcccattttacttgttgttacacttatactttatgcaaaggggaaatataaggatggaaatttcagtccaaagcaatcatacttgtatcttacaaatcatctatacgttctcatacacaatggctctctatgctcttgttttgttttatgtggcatgcaaggatctgcttcaaccattcaatccagtcccaaagtttattataataaaatctcgtgtattccta

SEQ ID NO: 272319 - DNA, 177 bp, Glycine max
aatattaatttttactttttcttcattttttctattttttaagattacaatacttaattcaatggccaccaatttacaacattattatttttaatatcttgtacttacaaaacttatttgattttcaattgataaaggttttcaaataccttttttattgaaaagaaggatttttta

SEQ ID NO: 272320 - DNA, 315 bp, Glycine max
caacccactaggctttggtaaggatgagaagtccttgaaggatttgaagctcaaggaagtgaagaatggaaggttggctatgttggcaatcttgggttactttgttcaagctcttgtcacaggtgttggcccataccaaaacctcctagatcatttggctgaccccgtgcacaacaacatcttgaccagtctcaagttccactgaatgtattatatgttattttacatattctttaaaaaaaaaacaaaaaaaaaaaaaaaaaaaaaaaaacaaaaaaaagaaaaaaaaaaaaaaaaaaaaaaaaaaaaaattaa

SEQ ID NO: 272321 - DNA, 445 bp, Glycine max
cagcggtatgcaatgtggagttgatacaaggagacacaattgtcatgggatccgacgggcttttcgataatgtttttgatcatgaaattgtgccaaccattgttagatacaaagatgttgcagaggctgcaaaggcattagctaacttggcaagcagtcatgcaatggattcaaattttgattctccctattcgttggaagccaggtctaggggttttgagccacccttatggaagaagattcttggaatgaagcttacaggtggaaagcttgatgatatcactgtaatagttggtcagattgtgagttcatgagatttgctaataatgaaagaagacaaagtcctgattgctgagatcactagagaagggtttgccttaagtatactgcggcaactaaattttggtgatgctctgagaaataaggatctattcattgaagtgag

SEQ ID NO: 272322 - DNA, 428 bp, Glycine max
cccacgcgtccggtgatttcagtgagtgatcggtgttcacttgatctcatcataatcgtgagcgtcaattgaagaagatgccgatcagaaacatcgccgtcggaaggcctgaagaggcgactcaccccgacacgttgaaggcggctttggctgagttcatctcaaccttcatcttcgtgttcgccggctcaggctccggcatcgcctacaacaagctcaccgacaacggcgctgccacccctgccggcctcatctccgcctccatcgcccatgcattcgccctcttcgtcgccgtctccccctcggcgccaacatctccggcggccacgtcaaccccgccgtcaccttcggcgccttcgtcggcggcaacatcaccttcctccgcggcatcgtctacgtcatcgcccagctcctcggctccatcgtcg

SEQ ID NO: 272323 - DNA, 440 bp, Glycine max
aaaaaaaaaaaaaaaaaaaaaaaaaaaaaataaaaaaaaactaaaacaaaaaaaaaagagaaagaaattaataaaacgaacatgccactcaataacatcttccatagtaacacctaaatactcttctctccccgacactttacaacctgctttctgtgaattcatttgaccctccatatttattttccttgcatcacacttccccttcgcctactacaatattacactaaaacgccctcacacatctcccttcctaatagttccgctacattgaacatgcattggcactctccctgtacctctacaaattaaccccaacatttgttttggccacgtgcaccgtgacctctacttttgccacttccctagcggcaacatcttcttctttctttgcttcctttatttcatcgtccatctgctttcctcgataagctcttaat

SEQ ID NO: 272324 - DNA, 398 bp, Glycine max
  unsure (1)..(398): unsure at all n locations
ctgnctttgagcagaagaatgatatagcaaaggctgtggaggaggagcttgagaaggcgatgtcaacctatggatttgagatagtccagactctcattgttgatatagagcctgatgttaatgtcaagagagcaatgaacgagattaacgcagctgctagattgaggttggctgcaaatgagaaggctgaagcagaaaaaatactgcagatcaaaaaagctgagggagaagcagaatccaaatatctgtcaggactcggtatcgctcgccaacgtcaagccattgtggatggactgagggacagtgtgcttgctttctctgagaacgtgcctgggacaacagctaaagatgtcatggacatggtgctggggactcaatactttgacaccatgaaagag

SEQ ID NO: 272325 - DNA, 432 bp, Glycine max
cccacgcgtccgtctttctgcaactccaaaatgtcttccataggggcaaaaaatctagcgctcgcctcagcctttttgctccttttggtcggttttgcaacctcagacatcaaccaagacaaagcagaatgtaccgacaaacttcttggtctagctggttgtcttccctatgttggtggtgaagccaaagtccccgccatggattgttgctctggtatcagagaggttattgacaagagcaagaggtgcctctgcatcctcatcaaggatcgtgatgaccctaatcttggcctcaagatcaacgtcacccttgctctaagtttaccagatgcttgtcaaacacccaccaatataactcagtgtgttgatcttttgcatttggcacctaactccacggaagctaaggtgtttgagggggttaaaaatgccttg

SEQ ID NO: 272326 - DNA, 436 bp, Glycine max
cttagatgaggataccaaggtcaagggtatggcagccattgatgttgtgtgcaacccatgggggaaatctggaggagctctgattcagcagttcatgatcttaacttttggttcactagctaactcaaccccatacctaggaggggtccttctggtgattgttcttgtctggttatcagcggccaagtcgcttgatacccagtttactgcattgcgccgagaagaagaacttgagaaagagatggaaagagcagcagctgttaagataccagtggtggccaaggatgaggatgaaaatggttctcttaaaagtgttccactgttaaatccaacagctggtgactcctcaagtatattgaattgaactcaactcacagtatttaaagcttaaactacattgaattgcaaggcatgaggagtaagccaaactcatgag

SEQ ID NO: 272327 - DNA, 437 bp, Glycine max
cactgatctccattcccattccatggcttccactgaatcatcccctttcaagaaaattgagagtcaaagggatgacactacatttgacgcatatgtggttggaaaagaggatgctcctggaattgttgtgattcaggagtggtggggtgtggattacgaaattaagaaccatgccgtgaagatttctcagcttggtagtgggtttaaagctcttattccagatttatactgaggaaaggttggtctggatgttgctgaagctcagcatttgatggatggtcttgattggcaaggtgctgtgaaagatattgctgcttcggttaactggcttaaagcaaatggctcatagaaggctggtgtaactggattttgtatgggaagtgctctgtctattgccagttcttggcttggtcaagaggttgacgcttttgtagcat

SEQ ID NO: 272328 - DNA, 331 bp, Glycine max
gaggatttggtgaatctgagagactacgcagtcactgcagatgatcagggaaataagtgggctttatcactctttgctggtgcacctgctaataatgcaaatggatcatgggaagccttcccgtcaaatggacagccagaagtgacttcagcctggcaaaccccgtgcagcagatcctgagaaagctgattgggaattggcattggtagagactgctagcaatttttcaaagcagaaggcagctttaggtggtgggttggatcctctattgttgactggtatgtatgatcaaggaatggtgaggcagcttgtcaacactacccaactgaat

SEQ ID NO: 272329 - DNA, 395 bp, Glycine max
aatgtattgtgggattctattctaagattttgagaatgtctagctgtgggtgtggaagcagctgcaactgtggcagcaactgcggttgcaacaagtactcttttgacttgagttacgttgagaagacaaccacagagactctagttttgggtgttgggcctgtgaaggcccaattggagggtgctgaaatgggtgttgcatctgagaacggtggctgcaactgtggatcaagctgcacctgtgacccatgcaactgcaagtaacgtcaagatgtataaccttgaagcagagatagcttggtaatatatgtatcaacaaataataagaagtagaagttgcgtttggagctttataataaagtgtttgcttaggaactgaagagaaagagacaaatc

SEQ ID NO: 272330 - DNA, 341 bp, Glycine max
gttatagtggaaggctaaagtggctcgagaggttcgcatatgtgaacaccacaatctatgcagtcacttccattccccttctcatgtattgtaccttacctgctgtctgtctactgactaacaagttcattattccacagattagtaacattgcaagtatatggtttatctctctctttctttgcatctttgccacgggtatccttgagatgaggtggagtggtgttggaatcgatgagtggtggagaaatgaacactttagggtcatcgctagtgtctcggcccatctttttgccgagttccaaggtttactaaaagggcttgctggaattgacactaac

SEQ ID NO: 272331 - DNA, 339 bp, Glycine max
cggctagagctgtcccaaatgcacatgctcctttctcctttggtactcttctgtgaacggagttgattctcatggggtgggctgaaagcaagacatgggtggacttcttcaacccagactcacagtcagtggaatgggccactccatggtcaagaacatctgataactttgccaatgccactggtgaacattgctaccctatacgcaaattctttgaccctttgagcttgtccgttactatcaaggatggagtttacattccggataccgagaagctcgaaagattgaaattggctgagataaatcatgccaggatagctatgttggacatgctgattt

SEQ ID NO: 272332 - DNA, 405 bp, Glycine max
tctctcttgtatctctctcactgggtgggaatcaactttttgggtgtccacttaatattttccaaggtagacgcgtaaaaaattggatgtggatccgtaggttggttttggttcccaattagcatgtgatctaactcgtttgcaaacttgtccatagctttggcgggcaaccaaattggtaataatatgccttcttctccttttgcattcttatgtgccatcagatagaatactgcaggaaagggtccagccccacctttggccactccaccatataatgccctaccccacccaaaatcaatttgtttgaaaccaaaatgtctcaaatctgacacaataaaagatctcacggtggtaaacaagcatcttccattagtcaccattagatctgccacagaatgcatg

SEQ ID NO: 272333 - DNA, 271 bp, Glycine max
tcgatggtatccggagcaaccttcttcgccgttacagctcaagagccaccagcatgtggggagtgtttaagcataacaacgttatccccaatggacacttcaggaaacactggcaaaactatgtgaagacttgattcaatcaaccagcacggaagaccagaaagcgtatatctcggcagaagaaggctgtcaatatgtttccaagacctactgctggacctctcatagcaattgttcatggccagactctgaaatacaacatgaaagtcac

SEQ ID NO: 272334 - DNA, 432 bp, Glycine max
gagaaaagagaagagaagatgacaacacgcttcaagaagaacaggaagaagaggggccacgtcagcgctggccacggtcgaatcggaaagcacaggaagcaccctggaggacgcggtaacgccggaggcatgcaccaccacaggatcctcttcgacaaataccaccctgggttcttcggcaaggtaggaatgcgctattttcacaagcttcgcaacaaattctactctccgatcctcaacatcgacaagctgtggtccctggtcccgcaagaagtgaaggacaaggcctccaaggagaacctaaggcgccgctcatcgacgtcacgcagttcgggtactttaaggttctcggaaagggcgttttgccgcagaaccagcccgttgtggtcaaggccaagcttatttccaagatcgctgagaagaagatcaaag

SEQ ID NO: 272335 - DNA, 434 bp, Glycine max
cccacacgtccgccctccctcaaatcccaaaccagcaaaaacctttcttcacaaaatggcgtcaacaactctaacaaccctcaccctccgcacgctatcttatcctacaccctcctcttcttaccctacgcacctctccgccaaaccctcctccctccaattccccaatctctcccaccgcgccgccaccacgcgccgcccccgtgtcgtcgtctccgccgttgaggcgccggataaaatcaccaagctcggcgacgaaatcgccggactcacgctcgaggaggccaagaacctcgtcgaaccctcctccaggacaagctcggcgtctccgcggcggcgttcgcccctgtggcagtcgccgcgggtgccggcggcgctgtggcggacgcgccggcggtggttgaggagaagacggagttcgacgtggtgatcga

SEQ ID NO: 272336 - DNA, 327 bp, Glycine max
atcgtcttctgcagaaatttgcgccatcgtcgagagaagcgtgagagacttctcgtttgtgatgagagctaagatagtttagttgtcaagtcataaatcagtatcatcactttaaatttcattagaagctgtcaaaatgtcccggaagggtttgatggagcaagacctgagtaagttggatgtaacaaagttgcatccactttctccagaagtcatatctcggcaggctactattaatatcggcactataggtcacgtggcccatggcaagtcaacagttgtgaaagcaatatcaggtgtccagactgtgcgtttcaaaaatgagtt

SEQ ID NO: 272337 - DNA, 458 bp, Glycine max
cgggctataattactaactcgacccacgcgtgctgttacttgatcttacgctgtaagaaatgacttgtaaaacaactagaaacattcctcacataaaaaaaaaaaaaaaaaaaaaaaaaaaaaaaaaaaaaaaaaaaaaaaaaaaaaaaaaaaaaaaaaaaaaaaaaaaaaaaaaaaaaaaaaaaaaaaaaaaaaaaaaggggggtcccctttaaaaaatcaaaattaactatcccatcattgcaacttattaactttttattagttccaccaaaataaatttaattgccctgcttttaaaaacaccttaactgaaaaaaccctacctttaccaattttaaaatccccttgaaaaaaatacccttttcccaagttgtagttatatgaaaaaggcccgttcaaatcgccttttcaaaaatttacgaaccctaaattgaaaatggtaccccccctttaac

SEQ ID NO: 272338 - DNA, 409 bp, Glycine max
aaaccttacgcattccatttctctctattcgctctctttgagtcacaacaacatggccgaacgtggaggcggagaccgtgccggtttcggtcgcggctttggcggtcgtggacgcggcggcgacaggggacgagggcggcgcagggcaggagggcgccgcgacgaggaggagaagtgggtcccagtgacgaagctggggcgcctggtgaaggaggggaaaattcggagcctggagcagatctacctacactcgctcccaatcaaggagcaccaaatcatttttacaccctcgtggggcccaccctgaaggacgaggtgatgaagatcatgcccgtccagaagcagacccgcgccggtcagcgaacccgcttcaaggccttcgtggtggtcggcgacaacaacggccacg

SEQ ID NO: 272339 - DNA, 406 bp, Glycine max
gcaaaacatgtctctaatagcttcactctcctccacaacttcacaactcacttccctgccttccctcgcttcttcctcctctccactttctcgcaaatttcccctcactttccgggaaaaaaacagaactccaatcacacctcacaagctccctttttcagcaaggcctaccaccaccagagtggtgttggtgaagtctcaggccacagcacctgcttcttctgaggctgtggcagtgacacctgtgtcttctgagatgaaggcatgggtctatggtgaatatggcggtgtggatgttctgaagctggactccaatgttactgtgcctgatgtgaaggaagatcaggttctaatcaaagttgttgctgctgctcctaaccctgttgatgccaagaggaggcaggga

SEQ ID NO: 272340 - DNA, 367 bp, Glycine max
tcttcagcgactgcgtttttggatcggaacctcttctgcggcgtggcaatgggacagtccaacgtttggaactctcacccaaaaaactacggtcctggttctcgcacttgccgcgtgtgtgggaatccacatggactgatcaggaagtatggccttatgtgctgcaggcagtgcttccgtagcaatgccaaggaaattggcttcatcaagtatcgctaaaagagcagttgtcaactacggaccaatattgtgttctggcactaggatgttttgaggatgttatgtttgaagaaacttgagactttcttttttcatctaattaattatcagacgtaatttgtggtactaagaatacttttatataaat

SEQ ID NO: 272341 - DNA, 401 bp, Glycine max
cccacgcgtccgactgatagtgttattggtgaaggatgtgtgattgagaactgcaagattcaccattctgtggttgggctgcgatcttgcatatcagaaggtgcaattattgaagacacgttattaatgggggcagattattacgagacggaggctgataagaggtttctggctgccaaaggcagtgttccaattggtataggcaggaactctcatatcaaaagggcaattattgacaagaatgctcgaattggggaaaatgtcaagattattaacagtgacaatgtccaagaagctgcaagggaaacagatgggtatttcataaaaaggggggattgtcacagtaatcaaggatgctttaattcctagtggaacagtcatctaaacacaaccaccttccc

SEQ ID NO: 272342 - DNA, 433 bp, Glycine max
  unsure (1)..(433): unsure at all n locations
cccacgcgtccgcccacgcgtccgcaactattctacttaccttttctcttaatccaaatatcatcatctgaaacgatggctgccatggcaaccacaaccctctcttcaaacccgaaactctcatttttccacggaaagcccgttacatattcttcccgcgtcgcacccaccaccaagttattctcatccaaacaaggcacaatctccatgtccctaacccaacccccatacgacctccaatccttcaaattccaacccatcaaagaatccatcgtctcacgcgaaatgacgcgccgctacatgaccgacatgataacctacgccgacaccgacgtcgtaatcgtcggagccggctcggcggggctctcctgtgcgtacgagatcagcaagaaacccgccgtgagcgtcgncataatcgagcagtccgtgagcc

SEQ ID NO: 272343 - DNA, 406 bp, Glycine max
aaaaaagcctcgtctctcgtgccgattctccaggacaattcccttcacccaacctagtgggtacttgcaattattgtagaagatgagtacgttggatgcaacaagggctgaacttggtcttcttgttttatatttgggcaaggctgaagcaagggacaaaatatgcagggcaatacaatatggttccaaatttttgagtaacggggaacctggtactgctcagaatgtcgacaaaacaaccagcttggcacgaaaagtcttccgtctttttaagtttgtcaatgacctacatgctttgataagtccaacaccacagggcactcccctccccctaattctgttgggaaagtccaagaatgcactactctccactttcttgtttcttgatcaatttgtgttgcttggc

SEQ ID NO: 272344 - DNA, 314 bp, Glycine max
atcggccaggaccaaacagcatccgcggcagcgacggtaaccctccaacaacaacaggtccgctgcgaaaaatgtctctggtggcgaacgaggatttccagcacattctgcgtgtgctgaacaccaacgtggatgggaagcagaagataatgttcgcaatgacctccatcaagggtattggaaggagattcgccaacatcgcttgcaagaaggctgatgttgacatgaacaaaagggctggtgagttgactgctgctgagttggatagtgtgatgactgtggtggcgaaccctaggcagttcaagatcccagac

SEQ ID NO: 272345 - DNA, 391 bp, Glycine max
ctttgaagattgagatttttccatattcagtgttttatatgttttttgagcaataccttcatatatggaagactgcactgatcaaccttgctatagctattggtgcagtatttattgtgtgcttgattttcacaagcagtttatggagctcatcaataattttgttggtgttggcaatgattgttgttgatcttatgggtttgatggccattctgaatatccagttgaatgcgctctcggtggtcaaccttgttatgtcagtgggcattgctgttgagttttgtgtgcatatgactcattctttcactgtagcaagtggagacagagatcaacgtgctaaggaagctttgggtacaatgggtgcttcggtgttcagtggtatcacactaac

SEQ ID NO: 272346 - DNA, 369 bp, Glycine max
cccacgcgtccgaaatgttgatcccccagagatcattgttgacaaccaagtctatctgccacctggacgccatcatcacaactctcatgatctctactgctctggtggggtggtgttggcttctcgtgatggaaagattgtgtgtgaaaatactcttgatgcacgacttgatgtagtgttccgtaaaaagcttccagagatccgaaatcagctctttggacaagttgttgcttgaagattttgattgtattgtttggttacccctgtaatatttatattccgaagcataagcttgtctttggacctaaatagctatcttgccatagattctgtcaacttataatggtcttttagataacaccatatttc

SEQ ID NO: 272347 - DNA, 398 bp, Glycine max
gcgagaatttctatctatctcttgtttcaatttcaacaacggttactcctttttcgtttggagtttcaatcgggccatcatcatgtctaccgcatcgcaacccaaggccaagaaaacggcgtcgtccaagaagcccctctcccaccctcccttcgccgtgatgatagcagaggcgattgcgagtctgaaagagagaaccggttcgagccaatacgcgataaccaaatacatcgaagggaagcacaaggagttgcctgcaacctacaagaagcttgtcctcgttcatctcaagaaatctgttgctgctggcaagcttgttaaggtgaaaaactcctttaagctcgcaccgactaagcctgcttccgttaaggccgctgctcccaaaagccaaccaaagc

SEQ ID NO: 272348 - DNA, 410 bp, Glycine max
cctcaaaccactttccccacactcttttagtgtgtcgtattttttcctctctttctggacaattaggtcttggaccgacccttttgtgtaagtgcaatggccatggctaagcttgtatgtgttctgcttctggcattccttggcatttccatgatcacaactcaagttatggcaacagattctgcctatcacttggatggaaggagttatggacctgggagtctaaagacctcacagtgcccttctgaatgcacaagaagatgtagccagacacagtaccacaagccgtgcatgtttttctgccaaaaatgctgcaaagcgtgcctttgtgttcctcctggctactatggcaacaagtctgtgtgcccctgctacaacaactggaagaacaagcgtggaggacccaaatg

SEQ ID NO: 272349 - DNA, 437 bp, Glycine max
  unsure (1)..(437): unsure at all n locations
tagaaatgcagatttttccctggcaaatgtgacaaaggcaaatttaagcaatgctaacttggaaggtgcacttgcaacaggaaatacatcttttaagggatcaaatattacaggcgctgacttcacggatgtaccactaagagaagatcaacgtgaatacctctgcaaagttgctgatggagtgaacccaacaactggaaatgctacgcgtgatacattgttctgcaattagtattccattgctgaatactcactccaagaccttcaaatgtttgcatagaatggtttcatagctaacanaatactcccttcatgttgctggaatcttgtatttacatagcaccacaatttagattatttcaaatttccattccccatacacacacttgacaataacattgtgatgtaatgctcataaccagcctacctatgttata

SEQ ID NO: 272350 - DNA, 320 bp, Glycine max
gaacgctgctgccgaaacccttccggaaccctaaggtaagtgagtaatcagtggttgagaatggtggagaaggcgaagggtagaaaggaggaggtggttacccgtgagtacaccattaacctccacaagcgcctccatggctgcacatttaagaagaaagctcctaaagctattaaggagataaggaaatttgcccaaaaggccatggggaccaatgatgtgagggtggatgtgaagttgaacaagtttgtctggagccagggaatcaggagtgttccaaggaggattagagtaagaattgctcgcaagagaaatgatga

SEQ ID NO: 272351 - DNA, 404 bp, Glycine max
  unsure (1)..(404): unsure at all n locations
nccacgcgtccgcaaatcttagccgccattgatttttcctcttccatttctcttacggtctcagccttggtcgattacccatttggttatttcgccctaatggctcttgctccatccaaagtttccaccttttctggtttttctcccaaacccagtgttgggggtgctcagaaaaacccaacttgctctgtttctctgagctttttgaatgagaaacttggaagcagaaaccttagggtttgtgcctcaacggtgcctctcactggggtgatttttgaaccgtttgaagaggttaagaagagcgagcttgctgttccaactgctccccaagtctcggtggctcgtcagaactacgctgatgagtgtgaatctgcgattaacgagccgataaatgtggaatacaa

SEQ ID NO: 272352 - DNA, 440 bp, Glycine max
  unsure (1)..(440): unsure at all n locations
attttggttcagttaattagtttctccctttgcactttctcttgtggccacaaagccgtgaaatcacgtcctttgcacatagcaatgtatccatggctggccatgggtcaccaaatcgcattcctccatctatgcaacaagttagccattaggggtcacaaaatctccttcatcaccccaccaaaagcacaagccaagttagaaccattcaacttgcacccaaattcaatcacctttgtcaccatcaatgttccacacgttgaaggccttcctccagatgcacaaacaacagcagatgtcacttaccctttgcagccacagatcatgacagccatggatctcaccaaagatgacatagaaacccttctcactggcctcaaacctgacctcgtcttctatgacttcacacattggatgccagccctagcanagcgtttagg

SEQ ID NO: 272353 - DNA, 383 bp, Glycine max
ctgaaatggcctcttcagtgatggcatctgtggccctcaaacctggccctttcactggtgagaactcctcaatgagaggccttccctctctctcaaggaactcttcttcattcacagttgtggccagtggcaagaacatcaagactgacaaaccttatggaattaatggtggcatggctttgacggatggaactgatgcatctggcaggaaaggaaagggaaagggtgtttaccagtttgtagacaaatactgtgctaatgtcaatggttacagtcctatctactacaccaaagactggtctacaaccggtgatttctacgcttgcggtaccacttgcttttcctatctgggcttagactctacttcggcctttaacttgttg

SEQ ID NO: 272354 - DNA, 358 bp, Glycine max
  unsure (1)..(358): unsure at all n locations
cactagaagtgttggatgcatttctatttctaactaattattgtgcttattattatgggtgagaaagaaaagaatggcaaagttaataaaattctttgagttgaacacaggggccaagattccttctgttgggttaggcacttggcaagctgagcctggtgttgtagccaaagctgtcaccacagccattctggttggatacaggcatattgattgtgctcaagcgtataacaatcaagcagagattggttctgctcttaagaagctttttgatgatggtgtggtgaagcgtgaagacttatggatcacctncaaactctggtgttcacatcatgcttcagaagatgtgcccaaagca

SEQ ID NO: 272355 - DNA, 396 bp, Glycine max
cccacgcgtccgaaaaaagattctaaagaaatataactaatattctttagaataatcgaaaagaatattaaattcaaataaattttagatagaaaaaagacttaaaaaggaggatttgaaatgcgagatctaaaaacatatctttccgtggcaccagtagtaagtactctatggttcggggctttggcgggtctcttgatagagatcaatcgtttttttccagatgcattgatattcccttttttttcattctagttattgacacggaaaggggtgaagaagattatagatccaattaagtattaaatatatgtaattaatatgtaattaatctcctcttctttatttcgtcttttatttcttcttttttttacaattgtaataggaatagttagg

SEQ ID NO: 272356 - DNA, 418 bp, Glycine max
ctgaaattttaattgacttttctcccctcataaaaaaaacctaccaatggctcccgcggaggcagagaagaagcccgcggagaagaagccggcagagaaggccccagcggagaagaagccgaaggcggagaagaagatatcgaaggaaggaggaagcgagaagaagaagaagagaacaaagaagagcgttgagacctacaagatctacatcttcaaggtgttgaagcaagtgcaccccgacatcgggatctccagcaaggctatggggatcatgaacagtttcataaacgacatcttcgagaagctcgcccaggagtcatcgcgtctcgctaggtacaacaggaagcccaccattacttccagggagatccaaacggcggtgcgtttggtccctccctggggagtggccaagcatgcc

SEQ ID NO: 272357 - DNA, 344 bp, Glycine max
cccacgcgtccgcccgtccgaaaacccttgaacaacattgtatgaacagagaacagttgagttgaggctaatcaatgctatatagagcgcaatcatagtccctctttcttctcttccgccatcgttttctttgaaacgcacagcttcaatcaccgaccacaccacccatcaacgacatgcttcctctttcccttctcaagactgcccaaggccaccctatgttggtggaactgaaaaatggggagacatataacgggcatttggttaattgcgacacatggatgaacatccatctgcgagaagtcatttgtacatctaaagacggagatagattttggaggatg

SEQ ID NO: 272358 - DNA, 324 bp, Glycine max
gtctgctgccaaaaaaaaaaaaaaaattaaaaaaaaaaattaaaaaaaaaaaaaaaaaagaaaaaaaaaagaaaaaaaaaaaaaaaaaaaaaaaaaaaaaaaaaaaaaaaaaaaaaaaaaaaaaaaaaaaaaaaaaaaaaaaaaaaaaaaaaaaaaaggggaccacattaaaaataacaaaatttactaaccctttaaattataaaaaatattcatttatagggtacctaaaataaaattaaagggcctaattataaaaacatgggatttgaaaaaacactacgtattcaaaaataaaaaccttttaaaaaaaattccattatt

SEQ ID NO: 272359 - DNA, 430 bp, Glycine max
  unsure (1)..(430): unsure at all n locations
cagcaccaaatgcaactgtttaccctctgaagataagagaaggagagaagcctgtgatggaggaaccaatcacttttgctgaaatgtacaggaggaagatgagcaaggacattgagattgcaaggatgaagaagctggctaaggaaaagcatttgcaggaccttgagaatgaaaagcatttgcaagaacttgatcagaaggcaaaacttgaggccaagcctttgaaggagattcttgcttaattaataataattacatatgtatcatttgcatgcccncttggtgtttttagtattttttaagggccatgaattaataatagtccttacctttgtgcttttgtacgtcttatgatttatcctttgtggggatatcatgtgttgtgttcagttgcctatgtcttattagctagctggctcatctatgtata

SEQ ID NO: 272360 - DNA, 358 bp, Glycine max
gtcatttcttgcccttgagcaagttcatgtgttttggacttgtgatgggtgtgttagggtcatggttgccttgtatatatatatatatataaatgtttggtaattggtcgcttctgtataaagttcggctagttaatctgaattatgaatctctgcttataaaaaaaaaaaaaaaaaaaaaaaaaaaaaaaaaaaaaaaaaaaaaaaaaataaaattaaaaaaaataaattatattaaataaaaaaaataaattaaaaatatattataaaaaaaggggcgccccttttaaaggacccaatttttctaacccgttctttcaacttattaaccttttatatggggccccctaaattaaat

SEQ ID NO: 272361 - DNA, 335 bp, Glycine max
cccacgcgtccgctgttttaaccttcttattgtgaaggcaaggggggtaaattgttagttgtgaggttaatgatgttgggataccacttgcaaggtttaacaaatgtgaaagcagttgctgcatcagtcatttttgtgtttgtataagtagtctttctttgcttaataaagctttttaagcttctttttccctatgtgccatataattcttaatcttcccttttttggctgctgccattgtaatttatatgtattaatgggtcttttagtattggatgctggtgtagcttaaacgttgccttgtgttctcaataaaagagcattttgagtattct

SEQ ID NO: 272362 - DNA, 419 bp, Glycine max
  unsure (1)..(419): unsure at all n locations
cccacgcgtccgctctccgcatacactctgctcgcagggtttctccaccaagagggaaatggctcccaaaccgcctagtacgggtctgtttgttggactgaacaagggtcacgtcgtcaccaagaaggaattgcctccacgcccctcagatcgtaaggggaaaacaagcaagagggtgcactttgtgaggaacctcataagagaggtagccggttttgcaccctatgaaaagcgtataactgagttgctgaaggttgggaaggataagagggcactgaaggttgcaaagagaaagctcggaacacacaaacgcgcatagaagaagcgtgaggaaatgtccagtgttctcaggaagatgagggctggtggtgctggagacaagaagaaataagtcttatttactggtttncagattcact

SEQ ID NO: 272363 - DNA, 358 bp, Glycine max
ggcttctgcagaagtagagttccgatgctttgttggtgggcttgctggggccaccgaccacgatgctctcgagaaagccttctctcaatttggcgaaatcgtcgaatcgaaggtcatcaacgatcgtgaaactggaagatccagagggtttggatttgtgaccttcgccacagagcaggcgatgagagacgcaattgaaggaatgaacggccagaacctcgacggtcgtaatataaccgtgaacgaggctcaatcccgtggaaaaggtggcggcggcggcggcggcggctacggaggatgtggtggtggttacggtggcggcggatgttacagccgcggtggatgatgatatggtggc

SEQ ID NO: 272364 - DNA, 333 bp, Glycine max
cccacgcgtccgaaaaaaaatcttattatgagtcatttcaaaaaaagacagactccagcttcaactgcaaaaacacaattccagaaatatctagtctcaccctcacctataacagaactcgtcaagcatcaatcaccactgaattgatagagattatctctggagcttcagcactggaaggttaattacaggagagcaatctgtgtaatatattcaacagtggcgcgatattaagataatatcgatggattcttttgaaatttgttggtgtcatttttttaatcttacttgacttccgtaataagtgttccaaggtcaaacccattgtgggga

SEQ ID NO: 272365 - DNA, 312 bp, Glycine max
cccacgcgtccgcccacgcgtccgtagtattagtaagagagtgtgtattttcacgcggcaccgctatctatcatggtgcagcaccgcttcctcctcataacctaccccatacaaggccacataaacccctccatccagttcgccaagcgactcgtttccatgggcgtccacgtcaccttcgccaccagcctctacctccaccgtcgcatgctcaaaaagcccaccatccccggcctctccttcgccaccttctccgacggctatgacgacggttacaaagccatcgacgactcctccctctccttctacatg

SEQ ID NO: 272366 - DNA, 325 bp, Glycine max
aaaaaaaaaaatatataaaataaaaatataataaaaaaataaaaaaaaaaaaaaaaagggaataataaaaaaaaattatatataaaaaaataaaaactaaaaatatataaaaaactattatcttttttaataaattatttaaatatttcaaaaatttaatttattttatactttttctttatatatatgtttttttttttttctatttcttattttattttcttttcttcttttaattcttatttcttttttttattattttctttttattttttttttcttctttttcttttatattttgtttttatttttatatatctttttt

SEQ ID NO: 272367 - DNA, 363 bp, Glycine max
gtctatcgccgcaagtgggtcatccacatcgagcgcatcacccgcgagaaggttaacggctccaccgtcaacgttggcattcacccttccaaggttgtcgtcaccaagcttcgaatggacaaggaccgcaaatccttgctcgatcggaaggccaagggtcgcgccgccgccgacaaggaaaagggtaccaagttcgctcctgaggatgtcatgcagaccgtcgattaatttctctctttacttttttgccctctctgtactttcttatttgctgcttttgtttgtggtttggatctcaagggttccgctattgtgaggcctttctgttttgtttaatttaatcaaatgcttgacattattact

SEQ ID NO: 272368 - DNA, 397 bp, Glycine max
  unsure (1)..(397): unsure at all n locations
tcgccacgcgttcgcggtcgcgtggggatttgtgttgtgaaacagttaaaagtggtcttgatgtctgaggcattggaagaggttgttccttcaatgaaaggagggtgtgaagaagaagggttgaacctgaaggctactgagctgaggcttgggttgccagggtgtgagtcaccagagagggagggtgtgtttaagagtgtggtggtgtctggggccaagaggggtttctctgatgccattgatggaaactggaatggtggaggatctgaaaaagatgccgctgccttgttttctccaacttcaaggngtgctgttagtgttagtgttagtgctgccaagtctctcactctcactgcaacagactgcaccaaccaaccaactgctttgggtgcttctg

SEQ ID NO: 272369 - DNA, 409 bp, Glycine max
  unsure (1)..(409): unsure at all n locations
cccacgcgtccgcccacgcgtccgctacctccagacctcatctcttgcatccttttgctttctccagatgcttgtcttccgtcttggatggacttaagtatgcagattcacacgaatgggtcaagcacgaaggctcagtcgccaccattggtatcactgaccatgcccaggaccatcttggagaggttgtgtatgtggagctgccagaatcaggtggcacagttacccagaagtctggcttcggagccgttgaaagtgttaaagcaacaagtgacataaactctccaatctcggnggagattgttgaggttaaccaaaagctcacagagacacctggcctggtcaactcaagcccatacgaagatggatggatgatcaaagtatagccagtgatccatctgaattagat

SEQ ID NO: 272370 - DNA, 296 bp, Glycine max
ggccgtcctttttttttttttttgattaaaatattccttgtccattcgagacttggcggtatcaaatattagcttcattacataacaaagaccattcaaaaggaaacataatacaaatattttgacaaattgtaaaggagatctaattattcatcaaactcatgcatgtgatctaaaaggtagttggcagccagctcctcattttgttacaagcaaagtacacctccaatacagttgcacgatcaaaacccattgcttttagactgcttaattgcttgccgctcctcatgggtgac

SEQ ID NO: 272371 - DNA, 397 bp, Glycine max
cccacgcgtccgattcaaaccagagacaacctgtttgaagaaatgttgcaagaacctgatgagatagctgtgaaaagaaagcgctgtcgagaacttctccgagcttatcagcaggcttttaaggacttggaggaactgcctctggaagctgaaacagttgaaagaggatacagtttgcctgaaacatctggtttgcctaaaattcatggattaccaacatcatccatgtactctacaagcagttctggagactattatgcagcttctccgaagcactctatgtcaaaaaggtcttcccattctggggagctgcaatcaccattgcatgccaatgcagattccaatggaagtggaaggccattcatgttatgtttttatcccacgggggatgcatgag

SEQ ID NO: 272372 - DNA, 413 bp, Glycine max
acagaatctactctctttttttctaccttagattccttctccaacaatggctctcgccgtgtccactacttcttcctcttcagcagctgctgcagcttctagctccttcttctctcgtctcggatcttcctccgacgcaaaagctcctcaaatcggttcgtttcggtttccggagaggtcgcttgtttcgtctgttgttgtcaatgtaactcaacgacgctccttggtgaggccactcaacgccgaaccgcaacggaacgattctattgttcctcttgcagcaactatcgttgctcctgaggttgagaaggaagaggaagattttgagcaaatagcgaaagaccttgaaaatgcatctcctcttgaaattatggatagggccctcgagaaatttgggaacgacatcgctattg

SEQ ID NO: 272373 - DNA, 403 bp, Glycine max
cccacgcgtccgcggacgcgtgggtgtttggccaaacactcccattcccactgcactgcgggagctgctaaagcctctccctgcaggtgttgaaatcgatgaactccctaagcaaattgatgatacacagtacccaaaaacattcttctataaagaagaccttcatccaggcaaaacaatgaaagtacaattcaccaagcgtccctatgcacaaccttatggtgtatatacatggttaacggatattaaagacacctctaaagaaggatatagttttgaagagatatgcatcaagaaagaagcgtttgaaggagaagagaagttttgtgcaaaatccttgggaacagtaattggttttgccatttcaaagctgggaaagaacattcaagtactttcaagttcc

SEQ ID NO: 272374 - DNA, 410 bp, Glycine max
  unsure (1)..(410): unsure at all n locations
acaaaacctacctacacacgtattagagaaaaaacacactattcttctctcatggcactcggtgagggtatctttttcaaatgcaaattgatctattgcagacaaatacttctacaaaaggagcatgctattccaaatcagaactttgttaaaaagtctgcccctcctgcccttaaaggagactagatgctgaagaacatttttgtggacgtgaacaacaaattntagaccgccatatgaatatttaacaacgacaaaatcaccatttacccacaagatccaactgttttttctcattatgcgaaggtcatgaaaacaattatagagaacgcatgcttattgaccgagtaccaagacatactattcaacattgtaattgagacacacgatatttcagatgctccgaccta

SEQ ID NO: 272375 - DNA, 407 bp, Glycine max
caaaaggagaattttgccacaatatgctctctcaacagaaaactatcatcaatgcgatgggtgtcaatgaggagggtgtgatggttactggaggcgacaatggcagcatgtggttctgggattggaagagtggtcacaatttccagcaatcccaaacaattgtccagcctggttcattggacagtgaaactggtatttatgcttgtacctatgatcttactggttcgaggctcataacctgcgaaactgacaagacgataaaaatgtggaaagaagatgagagtgccactccagaaacccatccccttaacttcaggcctgctaaagacatccgtcgattctagacatgctcctcatttatctcaagcaacttattctgctaatacagagtgggtatgtgctatctg

SEQ ID NO: 272376 - DNA, 433 bp, Glycine max
cccacgcgtccgcccacgcgtccgcaactattctacttaccttttctcttaatccaaataggatcatctgaaacgatggctgccatggcaaccacaaccctctcttcaaacccgaaactctcatttttccacggaaagcccgttacatattcttcccgcgtcgcacccaccaccaagttattctcatccaaacaaggcacaatctccatgtccctaacccaacccccatacgacctccaatccttcaaattccaacccatcaaagaatccatcgtctcacgcgaaatgacgcgccgctacatgaccggaaaatgataacctacgccgacaccgacgtcgtaatcgtcggagccggctcggcggtgctctcctgtgcgtacgagatcagcaagaaccccgccgtgagcgtcgccataatcgagcagtccgtgag

SEQ ID NO: 272377 - DNA, 418 bp, Glycine max
ccttcatctctttcgtttcgtccttgccttcaccccaaagcctattttcccattttcccctgttcatgataacaactctccatgtagggcaaacttcacttcaattgaactaacttgtctgtggctttttgtagattgattcaattcaatgggttcagtaatgctcagtggaactgaaaagctcactctcagaaccctaaccgggaacggcttaggtttcactggttcggatttgcacggtaagaacttcccaagagtgagtttcgctgctaccactagtgctaaagttcccaactttagaaggccctagtagtacccaagtgtagtgtctcggcttccaggccaagctcgcagccaaggttcattcagcacaaaaaagaggccttttgggtctataagcttctctcaattgtgtatg

SEQ ID NO: 272378 - DNA, 422 bp, Glycine max
  unsure (1)..(422): unsure at all n locations
cccacgcgtccggctagataatgcgcttctttaccaaccctcgcaagcctatgatacttgctcttgctaggccggaccctaaaaagaacatcacaactttggtaaaagcatttggagaatgtcgtcctcttcgagagcttgccaaccttacattaattatgggcaacagagatggaattgatgagatgtcaagcacaaatgcttccgttcttctctcggtacttaagctgattgacaagtatgatctgtatgggcaagtggcctatcctaaacatcacaaacaatatgatgttcctgacatatatnccccctagcagcaaagacaaagggtgttttcattaatccagctttcattgagccatttggtcttaccttaattgaggcagctgctcatggtttgccaattgttgctactaaaaatg

SEQ ID NO: 272379 - DNA, 258 bp, Glycine max
tagtaacgggtcccacgcgtgctgcaactcgtccttatagataacccgcccttttatcaacaccctcaatcttattatacttaggctcgctagatcgtaccctataaataacatcacaactctgttaaagacatcatgaaaatgtaattctcttctaaatccctcctaccttacattaattatacgcatcaaaaatgtaattgattttatatctataacaaacacttgcatttttctttattaactaatctcatttat

SEQ ID NO: 272380 - DNA, 451 bp, Glycine max
tggaatttccgccgccattcgaagctacagcgatggccataaccgccaccatttccgttggcctcacatcccccagtcgccgcactctcacctccgtcaatagcctctctcccctttctacccgatccactttgcccacaccgcaacgcactttcaaataccctaattcgcgcctcgtcgtgtcttccatgagcaccgaaacagccgtcaaaacttcatccgcctccttcctcaaccgcaaggagtccggcttcctccatttcgccaagtaccacggcctcggaaacgacttcgttttgattgacaatagagactcctccgagcccaagatcagtgctgagaaagcggtgcaactgtgtgatcggaacttcggcgttggagctgacggagttatctttgtcttgcctggcatcagtggcaccgattataccatgaggattttaactctgat

SEQ ID NO: 272381 - DNA, 318 bp, Glycine max
ctccaagatcaccttccccatttctgttaaacagcctggcccaagggagaatctcctacggtgcttgataaaacgcaacccgtccacccaaacatactatttggttcttaagttaacccagacccttgcttaaaaatggaaagttcttttttcttgacgccaatgcagaccttcaacctggacaaattatattattttttttgacccaaatgatatgttaaagggaagcaacttctatgttgggaaactaagatcaaactttcttggaacaaagatcacaatctatgatagccagctgcctcatacaggagcaaagat

SEQ ID NO: 272382 - DNA, 371 bp, Glycine max
  unsure (1)..(371): unsure at all n locations
cccacgcgtccgcccacgcgtncgcaagaatggcacaaattaacaacatggcacaagggatacaaacgcttaatcccaattccaatttccataaaccccaagttcctaaatcttcaagttttcttgtttttggatctaaaaaactgaaaaattcagcaaattctatgttggttttgaaaaaagattcaatttttatgcaaaagttttgttcctttatgatttcagcatcagtggctacagcctgcatgcttcacggtgcaagcagccggcccgcaaccgcccgcaaatactctggcctttccggaaccgtccgcattcccggcgacaagtcgatctcccaccggtccttcatgttcggcggtctcgcgagc

SEQ ID NO: 272383 - DNA, 432 bp, Glycine max
gcgctagtgctgcttttgcacccttatctatgcctcagggcttgctacttagtacaggccattaagaagccaccagtgacaagcctccagtgtacaagccaccagtgacaaaccaccggtttataagccaaaaccaccggtttacaagccgaaaccaccggtttacaagccaccatataagaagccaccatacaagaaaccaccttatggaaagtaccctccagtagaggacaacacccatgcctaaagcaagcaatgaggtctattatctacttaataaataagaggactgctttggttttctagcattgtgatttacaacttcgtgcaatgcatattcttgactcttgcatgcacttcaatccttcgtagcattaatgatgtggccaagtcatcatgagcatcatacttatttctttgtgaatgtaaatc

SEQ ID NO: 272384 - DNA, 358 bp, Glycine max
aagagatcacatatcagaatggcttctactcaatgtttcttgctccaccatgctcttaccaccgcggccagatccccatgacaacgcatcatggttagcaccaagcctaaccagcttgtttgcaaggcacagaagcaagaggatattgatgtcagcccaatctctcgccggttagctctaaccgtgctcattggagctgctgctgttggctccaaagtccaacctgctgatgcagcttatggggaagctgcctatgtgtttggaaagccaaagacagacacagattttctgccatacaatggaggaatggattcaaactatcgattccctcaaagtggaacccaagcatagaggttga

SEQ ID NO: 272385 - DNA, 344 bp, Glycine max
cccacgcgtccgcgaggctcccatgtggattcgccgcgcagacaatcattggcaccggccggcgtgagagcgccatcgctcgcgtcgttcttcatgaaggaaccggctaattcataatcaattaccgcgacgctaaggaatatcttcaaggaaatccattgtggcttcaatacattaaggtccccttaataactttgggatatgaaagtaattatgatgctttcgtcaaagctgagggtggtggcctgtctggtcaggctcaggcaatctctcttggcattgctcgtgccttgctgaaggtgaaaaggatgatcatagagcacctttgagacaggaaggacttc

SEQ ID NO: 272386 - DNA, 369 bp, Glycine max
  unsure (1)..(369): unsure at all n locations
cccacgcgtccgctcactgcatctatcctcgtaaaacaaaacaacctaagttaaaccttcggacgtgctttcaccatgtcctggttcagacacctctccaccaagttttccgccatcaccaccacaagcacgcaccgcttaagtcttctgccccggtttagcacctcgaccgctccggttcggcatgcgggcctggagcccactcaggcccacgagaagcccacggtggtggttctgggctccgggtgggccgggtgccgcctcatgaangggctcgacactcaaatctacgacgtcgtttgcgtgtccccgcgcaatcacatggtcttcacgcctctcttggcttccacgtgcgtcggaactctcgag

SEQ ID NO: 272387 - DNA, 457 bp, Glycine max
  unsure (1)..(457): unsure at all n locations
gcctggaaaccccagatacattcaaccctttgatcgcatggtacttgtccaacctgcccgcatacggaaccgcaatgagcccactactaacagggatcgaggtgggcctggcccacggataccttctggtgggcccattcatgaaggccgggcctcttaggaacaccgacatcgccgggcaagcgggctctctggccgccggtgggcttgtggagatcctcagcctttgcctcacaatctatgggatttcatccttcaacgaaagagccccattcactgctccgacgctgaccttgacgggccggaagaaggagcccgatcagctccaaactgctgatgggtgggccaagttcaccggacgcttcttcttcagacgcatttccgatgttatttggggctacttactcctctacgtcttggaccttgcatactacatcanatgatgaatgtgcttact

SEQ ID NO: 272388 - DNA, 459 bp, Glycine max
cccacgcgtccgaacctcactcaaactcgggatcacagaaaccaacaacagttcttgcagtgaggtttcacgatgttgctggaacttgcacttggtttgtttgtgttagctttgtttctgcacttgcgtcccacaccaagtgcaaaatcaaaagcacttcgccacctcccaaaccctccaagcccaaagcctcgtcttcccttcattggccaccttcacctcttaaaagataaacttctccactatgcactcatcgatctctccaaaaagcatggccccttattctctctctccttcggctccatgccaaccgtcgttgcctccacccctgagttgttcaagctcttcctccaaacccacgaggcaacttccttcaacacaaggttccaaacctctgccataagacgcctcacttacgacaactctgtggccatggttccattcggaccttactggaag

SEQ ID NO: 272389 - DNA, 395 bp, Glycine max
tgtctctctctctcctgtatttgtcttgattccgatgcgaatgaatcatggccaaagctgggggtggcaaggaaccaataaatgaacaagcagtagcaaatatgtatgctgcaatgaggtctgagctcaaccaaatttactccaaaataactgaactggagatggaagttagtgagcacacattggttaccaatgccattcaaccacttgaccaatctagacgatgctatcgtatgattggaggggtgcttgtggagagaaccatcaaagaggtcttgcctgctgtgcagcgaaataaagaaggactcgaagaggttgtggcaaggcttaacgaggcgttggaaaagaagaaaaaggaaatttctgagtttgaggctaattataaaatcacgata

SEQ ID NO: 272390 - DNA, 448 bp, Glycine max
cccacgcgtccgcccacgcgtccgcttttggggaagaggtcgagtttcacagcagcaatggtgtacgtcaaggctcagaaatcaaaagcctacttcaagagatatcaagtcaagttcaagagaagaagagagggaaaaaccgattaccgtgccaggattcggttgattaatcaggacaagaacaaatataacactccgaaataccgatttgttgttcgctttagcaacaaggacattgttgcacaaataatatctgctagcattgctggcgatattgttcttgctgcagcatatgcacatgagctgccacaatatggtcttgaagtacggcttacaaattatgctgcagcttattgcactggtctcctgttggcccgaagagtcctcaatacacttgaaatggatgatgagtatgaaagaaatgttgaggctactggagaggattatt

SEQ ID NO: 272391 - DNA, 425 bp, Glycine max
cccacgcgtccgcccacgcgtccgctcacgcgtacgaccacgcgttcgatctactgattggattgaggagtgggtcaaaattggcttgcctgcaaaggcaaaggtgaagacacagcatggggatgccccttttgctgacttgtgctcacactgtgaaaaggaatctgtgaatggttcccttggaaacctgctaacttacccatctgttagagatggcttggagaacaaaacattgtcactgacaggaggatactatgactatggtaaaggatcttttgagctctggagcctacacataggacttgcatcctctttctccggatgaacatcaaccattatcaacgacctcatattgcgttcctaagtattctgctatctaaaatgtactctcgaattaaatgctcgttgtataatgcatgcatgtg

SEQ ID NO: 272392 - DNA, 283 bp, Glycine max
ggaagacagacttagattctttgtttgctaccttctctcggaaaaatggttaccttcagcgtgcggcagtaccagttggctgggatgtctcttcccacgtaagcacatcagcaccccaagatctaccgaatgaatctctggcccaccaacaaggttcgagccaagtccaacttctggtattttctgaggaaactgagaaaggtgaagaatatcattggtcaattgcttgccatcaacgagatttttgagaataacccaacccctattaagaaccatggtatat

SEQ ID NO: 272393 - DNA, 401 bp, Glycine max
  unsure (1)..(401): unsure at all n locations
cggacgcgtgggtcagccacagtttcggaggagaagaaaatagtcgttcgagatggcccgtgcgaagcaaactgctcgtaagtccacaggaggaaaggctcctaggaagcagcttgcaaccaaggctgcacgtaagtctgcaccaactactggtggtgtgaagaagccacatcgttaccgtcctggtaccgttgctcttcgtgagattaggaaataccagaagagtaccgagcttttgatcaggaagctccccttccagaggctggttcgtgaaattgctcangacttcaagactgatctgcgtttccagagccacgccgtgcttgcattgcaagaagctgctgaggcataccttgttgggctctttgaggacactaacctgtgtgccattcacgctaagc

SEQ ID NO: 272394 - DNA, 299 bp, Glycine max
gttctttgaaaatgcatacagacttaaccttcgctgtcaccaacgttgtgccattggcaccgacagagagtgtctcccatattaccatctttcccaccaaattgaaagccccgcgctcctcacctcgctactctccgattagggttgcaaccggggagcccgacacttaaactgacgactacaactctgcgttctaagtgttttctgcagaagcatgcgaaactgtatgaggggaagcctgcatggcagacatgttccctgaaacgaaccttcagacagaggctcagactgcacgagtc

SEQ ID NO: 272395 - DNA, 423 bp, Glycine max
gaaaaccttagcccaaccggatcttcacgattaggagatggctaagtcgaagaaccacacggctcacaaccagtcctacaaggcccacaagaatggcatcaaaaagccaaagaggcaccgccacactttcaccaaagggatggatccaaagtttctgaggaaccaaaggtacgcgaggaagcataacaagaagagcggtgaaacagccacggaagaagagtaaagtgtcactctcaaatggggctattaggatttgatttgctattcaagtcccatatgttttgtgtcaaatctatatttagtagtatagtcattttgatgagttaatttaatccagagagaatgcaggacttactcttatagcatcgttgctggcttttcgttgttaaagacccttcaaattgtatcgatggattgatgatc

SEQ ID NO: 272396 - DNA, 459 bp, Glycine max
  unsure (1)..(459): unsure at all n locations
gggagagggaatcccaagagttgctagaattcatgccaacattaggtgcaggaggcgagagcgaccatctcgctcgctttgctgtanaggaacaaaacaaaagagagaatgcaaatctggagtttgtgggggtgattagggcaaagcagcaggtggtggaagggttcatatactacatcactttggaagcaaaagatggtgaaaccaaaaatgtgtatgaaacgaaggtgtgggtgagatcatggttgaactccaaggaggtcctcgaattcaagcccatcagtattaatcctctttcggtgtcggtctagtctttataaggttacagaaataaatggtcgcaagctgaaagttgtactaaaatttattttttataaaaaaatcgaaggtagtattaaatatgttatatgtatgtattgtgcggaataaatgcagccacgtactatatataatggtaca

SEQ ID NO: 272397 - DNA, 453 bp, Glycine max
tgaagaggaaaagcttgctgaagggataaaactttatgctatagcagccactgccacttgagagcggacaattctttctgatcttgtaactgtttatgcaaagggtgggaagactatagtttttacacagacaaaaagagatgctgatgaagtatcattgtcattaacaaatagtataatgtctgaagcactgcatggtgatatatcccagcccaaacctcttgtcgattggtccaccggcctctgtgactgcttctccgaatgtggaaactgttgcatgacgtgttggtgtccatgtgttacctttggccgagttgcagaaattgttgacaagggatccacatcatgtggtgctagtggggctctgtatacgctgatttgctgtgtcattggctgtggctgcctatactcttgcttctaccgccccaagatgagacgacagtatggtctaaa

SEQ ID NO: 272398 - DNA, 417 bp, Glycine max
ggacaccttcggcgacggagacggccccagcttctcccgcgaccttaagctcttggtcgggaatctccccttcagtgtcgacagtgcgcggctcgcggagctcttcgagagtgcggggaatgtggacgtggttgaggttatttatgataagactactgggaggagcagggggtttgggtttgtgaccatgtctttcgttgaggaagctgaagcggatgctaagcagttcaatggctatgaacttgatggaagatcattgagagtgaattctggaccacctcctgctcggaatgagagtgctcctcggtttagaggtggttcttctttcagatccagacgtcgtggtccttcacatagtgaaaaccgtgttcatgtatgtaatcttgcttggggtgttgacgatgtaacacttgcttc

SEQ ID NO: 272399 - DNA, 433 bp, Glycine max
gggttccacggtgatgtcatgtcaatggctgcaactctcactgctgtaagaattcccacgggccagcgacgccatctcaaacaacacttcacggcaccctcttcctcttccttacgcctcctcaatctcgcaaagatggaaggaagtgagatcagtgagcaagtagtaggggaggatttgggagcaaagaagaaagtttttgtagctggagccactggtagcactggcaaaagaatcgttgagcagttactggcaaagggttttgctgttaaggctggggttagagacatcgacaaggccaagacaaccctttcctctgtcaacccatctcgttaaattgtgaaagctgatgtcacagagggttctgataagctagctgaggccattggtgacgattcaaacgcagtagtatgtgccacaagctttcgcccgg

SEQ ID NO: 272400 - DNA, 405 bp, Glycine max
gtgatttcagtgagtgatcggtgttcacttgatctcatcataatcgtcagcgtcaattggggaaggtgccgatcagaaacatcgccgtcggaaggcctgaagaggcgactcaccccgacacgttgaaggcggctttggctgagttcatctcaaccttcatcttcgtgttcgccggctcaggctccggcatcgcctacaacaagctcaccgacaacggcgctgccacccctgccggcctcatctccgcctccatcgcccactgttccagcattcggactctccgctggagttggagttggcaacgccttggtgttggagatcgtgatgaccttcggtctggtgtacacggtctacgcaactgccattgaccccaaaaaaggtaatttgggaattattgctcccatc

SEQ ID NO: 272401 - DNA, 304 bp, Glycine max
gaaagagctcaagaatggtaggttggccatgttctccatgtttggtttctttgtggagggagttgtgacaggaaagggacccttggaaaaccttgctgatcaccttgctgacccagtcaacaacaatgcttgggcttatgccacaaactttgttcccggaaagtgaaatgacttgtgaattttatgttatttagttaaatatgtattgcatctatcaagtgagaatgtaaattatattattatattttaaaaaataaaactaaaaagaaaaaacataaaaacaattaaaaaaacaatacaatag

SEQ ID NO: 272402 - DNA, 458 bp, Glycine max
gtgattgttgaaactcgttcttcttcgcctttatcttcttcttttgttgtttgtgggtttgtgtttttctctcacctgaaaatgtcttgctgctgtggtaactgtggttgcggaagcgcctgcaagtgcggcaacggctgcggaggctgcaagatgtacccagacttgagctacaccgagtcaaccaccaccgagaccttggtcatgggagtggcaccagttaaggctcaattcgagagtgctgaaatgggtgttcccgctgagaacgatggctgcaaatgtggagctaactgcacctgcaacccctgcacttgcaagtgaggtgttggagagctaaagcttcaagcagagatggcccttagaaataatgataaaaactatatgtagtttcaaaacttcaaaattatgtagtatgtattatgttgcactctggtgttgtgtgtctaaacaaacaccct

SEQ ID NO: 272403 - DNA, 454 bp, Glycine max
  unsure (1)..(454): unsure at all n locations
cccacgcgtccgtactgactaagagtgcatgcaagagcaatggctccaccaacgggtaggagcttaggtatgttccttccacctggcttgtcagaagaatcctgattttcagtctccaacaagtcactgatcgtgttttccagagacctcacattatccatggttactttagtgttgatcttagcagcacgtgcacagggtgacaaagcggtaccagaagccctttgtttctcatatgtccgtagtcctggatcaaacttcttgacagctccccacataccctgtcgaactccaagcttagcaatttcccagggtatgcccatatcttcgtgatgaaacaacaacacttcacatgaagtcagctggtcatcttttcttgatttaactgcacgaatacaccagcttgaataaaantaaatcaactcgttaggctttgtgcggtatatgtatgata

SEQ ID NO: 272404 - DNA, 377 bp, Glycine max
ccacaatgtgtgtttgatcactgggacatgatgtcttctgacccattggaggctggatcagaagctgcacagcttgtcactgacattcgcaagaggaagggcttgaaggaacagatgactcctctctccgagtttgaagacaagctttaaatttgtttcatgaattattttactttgaacttagtcgaatttattttctcttgtgaacaatgctactttagatttaatttctgttagttttttttgtggttttgcccgtgaatgttgtaatgctgttatttggtccttgcatcgatgtatttttgctctaataggattttgcatcggtgttggttcaaattattattttgcgaattttgcttgaaagatagtatttt

SEQ ID NO: 272405 - DNA, 436 bp, Glycine max
  unsure (1)..(436): unsure at all n locations
aggaagtgaagaaattgatacaccttgttttccatgccatcgcattaatacttggaatagggggaagttatactgccttcaagtatcacaatgaaagtgggattgccaatctctacagcttgcattcatggcttggaattggggttattgacctttatggcattcaatggatatatgggcttgtgatctttttcttccctggggggactcccgacattaggcgcgcctcacttccatggcatgcgctattcgggctgtttgtatttgtcttggctgtgggcactgctgctcttgggtttctggagaagctcactttccttgaaaactcangattggacaaatatggttctgaagctttgcttgtcaacttcactgctattatcacagtcttattcggngcctttcgtgngttatctgctctagctgatgctccccc

SEQ ID NO: 272406 - DNA, 354 bp, Glycine max
cccacgcgtacgacttgactcgcctttctgctgacatggctattggtatcgtcggaaatgcgggtgttagagctcaatgcacagcatcacaaaactttttgggggaatgattctcatcctcatttatgctgaagctcttgcccttgatggtctaatcgatggtattatcctgtcttctcgtgctggccagtctatatctgactaagaaaggagttgagctgcaaaatattctttgaccacccatctgttttaacctctgtttagatggggtgagggaggtaattattattttttccgagcttagcaatggtcaagcagcattgtcacgctttaacaattgagtgaaagttcaat

SEQ ID NO: 272407 - DNA, 478 bp, Glycine max
  unsure (1)..(478): unsure at all n locations
accggnccggaaaacccggggtgaaaaatgggaattaagatagataaaatatatggctaattaaagataaatatattttcataaaaatggcgttcagatcgaattctataacaatcaaaagctatactaattatatggcagttccaaaaaagcgcacttctatatcaaaaaaaaggattcggaacactttatggaaaaagaagggatattttacaacattgaaagctttttcattagcgcaatctatttttacggggaattcaaaaagctttttttgtaacaaatacaaacgttagactaatttcaattaactaggttcaacgaatatttttaaatgcaaaagagaaaaaataaaaaaaaaaaaaaaaaaaaaaaaaaaaaaaaaaaaaaaaaatttaaaaaactaaaaaaaaaaaataaaaaaaataaacaaaaaaaaacaaaacnancaaaaagggggggccgttttaaaaaaaca

SEQ ID NO: 272408 - DNA, 441 bp, Glycine max
gaacaagtagttgagaactaagaaggagaagcaaatggcttcctcaatgatctcttccccggctgttaccactgtcaaccgtgccggtgccggcatggttgctccattcactggcctcaagtccatggctggcttccccaccagaaagaccaacaatgacattacctccattgctagcaacggtggaagagtgcaatgcatgcaggtgtggccaccagttggcaagaagaagtttgagactctttcctacctgccagaccttgatgatgcacaattggcaaaggaagtagaataccttcttaggaagggatggattccttgcttggaattcgagttggagcacggtttcgtgtaccgtgagcacaacaggtcaccaggatactacgatggacgctactggaccatgtggaagctgcctatgtttggttgcactgatgcttc

SEQ ID NO: 272409 - DNA, 378 bp, Glycine max
ggaagagagaaaaaccatggcaataacactcaacaatggcttcaagatgcctatcattggattgggcgtgtggcgcatggaaggaaacgaaatcagggacctaattctcaattccatcaaaattggttatcgccattttgattgtgctgctgactacaaaaacgaagcagaagttggagatgcgcttaaggaggcttttgatagtggccttgtgaagagagaggatctcttcattaccaccaagctttggaattctgatcaaggccacgttcttgaggcgtgtaaagacagtctcaagaaagcccctcagttaacgtatctagatttatatcttgttcactttcctgttgccgtaaggcatactggggttggtaatac

SEQ ID NO: 272410 - DNA, 333 bp, Glycine max
ccaagacatacttaccatggtaataacactcatctttggcttcaatattcctatcattggggcagtcgtgtatcacattgaatgaaaccatatccttgacctaattctcaattccatcaaaattgtttatcgacattatgattgtactactgactacaataacgaaacactacttggagatgcgcttaaggacgctcttgatagtatccttctgaagagagagtatctcttcattaccaccaagcttttctattcttttcaaagacaatttcttgaagcttgtaaaaacagtctcaaaaaacattttatttaacgtttctaaatttatatctt

SEQ ID NO: 272411 - DNA, 383 bp, Glycine max
cccacgcgtccgctccattgctagcaacggtggaagagtgcaatgcatgcaggtgtggccgccagttggcaagaagaagtttgagactctttcctacctgccagaccttgatgatgcacaattggcaaaggaagtagaataccttcttaggaagggatggattccttgcttggaattcgagttggagcacggtttcgtgtaccgtgagcacaacaggtcaccaggatactacgatggacgctactggaccatgtggaagctgcctatgtttggttgcactgatgcttctcaagtgttgaaggagcttcaagaggctaagactgcataccccaacggcttcatccgtatcatcggattcgacaacgttcgccaagtgcagtgca

SEQ ID NO: 272412 - DNA, 449 bp, Glycine max
caaagagatcagtggtagtgtggtacattgtgttgatcaacgatggaacaaaagaagtttgtggcactattaatggtggtgggggtgatggcttcttctatgtggaaaggatccaaaggtcttagtctctgtaacatggatgaagatggattggaggcttgcaagccctcagtgactcagccaaacccacttgatccatcccctgattgctgcaaggctctggatggtgctgacttgaagtgcctttgctcttacaagaactcatcagagttgcctcttctaagaattgatctaactcttgctgcttcacttcctgcaaagtgcaatctcactcctccagataattgctagttagcttctctgagctatttctgctttttgattgtgtgtgttataatcttttttctgcagatgacctattgagaaaaaaagaaaattattggactcta

SEQ ID NO: 272413 - DNA, 349 bp, Glycine max
cccacgcgtccggacaagaccacttcataagtgacactggagatgttgcttattatcagactgatgtgtctgctcctccactcgcaacgagactgagtttcaaactttttgggttattatttattggattctagctactcaaattactttttttttaatgttatgttttttggagtttaacgttttctgaacaacttgcaaattacttgcatagagagacatggaatatttatttgaaattagcaaggccgtaataataaattttgaattgtcagtttcaaaagaatagaactaactgtaggtgcttcacttcctgcaaactgcaatctcactcctccagatacttgct

SEQ ID NO: 272414 - DNA, 459 bp, Glycine max
atctcattcttcacctgcaactatttggattgctgatttttgttaataccatatggactggtattggcgcatttctttgagaaagttactaattcctagatagaggcaaaaatgttgggaattttcaaggagaagttggttaaagcacccaaagagctgaacagtccagcttcgttgaattcatgcactaagcctaagctaagtcacgaaatccttcaggatttcatgtcctgcaattcctccaatgctttctcaatgtgctttgggaatgaagctttgctagcctattccccttcaaacaagccctccattcatcaaaggttgtttagtggtttggataacatatactgtgtcttcctgggtggcctgcacaaccttagcatgctcaacaagcagtatgggctatcaaagggaacaaatgaggccatgtttatcactgaagcatatcgaactcttcgt

SEQ ID NO: 272415 - DNA, 449 bp, Glycine max
gcggatcgccgtgctgagtgtgaagcgaaggcatcatggggctgacgaatttcgggctggcggtggcgggtgtaagcgccgtcgttcttctccttaggagtgacgtcagacaatctgcctccgtcttccggcgtaacgtcaagcacattcgcaactggctcgaagaagaaaccgccgctacatccaagacaatggaaaagtccactcccaaagaatttgaatcaaaggttcctccgaaagacattcctaaggaggacaaaaaacattaatgtttatacaggtgatgcagatgttactgcagtaattgtgtttctcttattgtttttgaatggatacatgtttttgtgtctttactagaatgaattcttgatcactgtctgttcatattactcttgaatgacccttgtattagtacatatatatttagcaataatatgacggatgacaat

SEQ ID NO: 272416 - DNA, 418 bp, Glycine max
gtggatcagcatcgacagttttctacaatttgaggcaaaaacatcctacgcttgacatgcgagtggtcgactacgacttggcacttcttttccaaccagtgctggtgcttggaatcagcattggagttgccttcaatgtgatttttgctgattggatgatcacagtcttgttactaataattttcgtaggaattgcaaccaaggcattcttaaaaggagttgagacatggaaaaaagaaaccattatcaagaaggaaactgctagacaatcacaatttaatggcactgaaaggaccgcggagggagcgcatatgagcctctaccgggagggccaaacacaagcaatcataaagagcctaaaaaatccaaggaaacgggatcaattcttgagaatgttcgttggaaagcacttggagtt

SEQ ID NO: 272417 - DNA, 398 bp, Glycine max
  unsure (1)..(398): unsure at all n locations
gcgctaaattaacgatagtccaagtgtgtgggagacacacagagacatggctaagtggcgtatgttggtgctggttcttgctctggctgtggctacaaccgccatagatgttcccaatcccaatgatgctggtctcaatgaccagaataacttcatcagctatggtggagttggtggctattctggaattggaagccatggactaccttttggaggtgtcggaataggcggtggcattggcagcggtggacttggtggcggcctcggcggcaccaccgggatacgtgggttgggaggattcggaaaagtcccattgatgcccatcggttggtgtatcaacatacctcatcctaccccttgtatgaacatgcatgcatatcgaatctctntaggttctt

SEQ ID NO: 272418 - DNA, 352 bp, Glycine max
cccacgcgtccgcccacgcgtcctttgaaggttagcttagggacggcttatagtgcggtgcgttgattatgggtgcaccgtggctgtcaaaaggctcaaggatgcgaacccttgcgcgaggcatgagtttgagcacatacatggatgtgattgggaagcttaagcatcctaatgttgtgagactcaaagcttattactattccaaggaggaaaagcttcttgtctatgacaatctctccaatggaaacttgcatgctcttcttcacgggaaccttggtccgggaagaattgcattggattggactacaaaaataagcttgctgttaagagcatcaagatgtcttgctaagat

SEQ ID NO: 272419 - DNA, 406 bp, Glycine max
agtaacggacgccagtgtgctggaattcgtccttccagccgtcctcccgacctgtctctggtcagaaagcaaatgatgtaacatattggtgagagtttgaagtgccagaggattttataacaatcggggcaattaagatagaaaaccaacaccgcatagaggtattcgttgaatccgttgttatagaaagcgcacctatcgttcctattaccgtaccatgtgagtcatgggttcattccaagttcaccaaccctgagagtcgtgttttcttcgatgacaaggtatcatgcctaccatcgcaaacacccagcggcctctaatattaaccctatagaaggaattagcggctctttggggcgaaggtgcaccatacaaacctagacaaaagcaagacattatttattat

SEQ ID NO: 272420 - DNA, 367 bp, Glycine max
acccacgcgtgctggccactcgtcctttgaaccatcgtgagcacctgcttcatgaggaaacaacctattacgacgaagagcgtaaagacattccccaacgctctttttggtctaaaaggtggacgaggtggtcgtgtaacttgcatggcctcgtacaaggtgaaactcataaccccagaaggagaagctgagtttgaatgcccagatgatggtttcattggtgacaatgctgaggaaaaaagcattgaacttccctactcgtgcagggctgattcttgcgttttatgtgttgggaaaattgtgaaacgtgacttttacccccatcaaatggtttcttccttgttgatgaacaaattgcacgtggatt

SEQ ID NO: 272421 - DNA, 468 bp, Glycine max
ttggcttggaacctttgggctgatttatgtgcttgactgagacaatcagaaatagcgcgacgaaaacgaaggcttccgcccctcctgccgtcataaccccggcagtacggtaacgttacgtgcatgacacgcctttctcttgaacgaatatcggtcacggcgtttgcatcttggaggcgaaacgtgtaagccggaggtccgtcgcggaagtatataatactcccggtcccgagattaccttcgaagagcgtgccgaagtaataaaggaacatacttacggtgaataacacagactagatcttaaaatagccaattaataagtccatccccacgttagagattctgaagcttactttaaggatatacccgcggctagcacagacggtattgcatctctcaacaccttacatcataaaaaatacggacacggggcggagaaacccaatctgattccgcacgacgaacggg

SEQ ID NO: 272422 - DNA, 336 bp, Glycine max
actggaccatgtggaagctgcctatgtttggctgcactgatgcttctcaggtgttgaaggagcttcaagaggctaagactgcataccccaatggcttcatccgtatcattggatttgacaacgttcgccaagtgcagtgcatcagcttcatcgcctacaagcccccaggcttctaagtcattgaaaaatttgcaaagcatctgtagccaccccactttgtttgttgtacttaaactacattcccatttgtttttgctttatgagatttcatcatcctgtatttttggtttctgttttcggacttcaatggaaattaatggatgagaactaatgaat

SEQ ID NO: 272423 - DNA, 386 bp, Glycine max
aaatatcatcatctgaaacgatggctgccatggcaaccacaaccctctcttcaaacccgaaactctcatttttccacggaaagcccgttacatattcttcccgcgtcgcacccaccaccaagttattctcatccaaacaaggcacaatctccatgtccctaacccaacccccatacgacctccaatccttcaaattccaacccatcaaagaatccatcgtctcacgcgaaatgacgcgccgctacatgaccgacatgataacctacgccgacaccgacgtcgtaatcgtcggagccggctcggcggggctctcctgtgcgtacgagatcagcaagaaccccgtcgtgagcgtcgccataatcgagcagtccgtgagccccggcggc

SEQ ID NO: 272424 - DNA, 431 bp, Glycine max
cggaattccggtcgacccagtcttcgaccaatgaaattttaaaaatgactgtgataaacttaagaattagttattgaaagtgaataagtaaacaatttaattggattggtcgaatggtatcaaaaaaatggagtactaactcccatttcttatttattattgaattaaccgatcaacttgctttgttatcgaacatttctttttgatttcaaaaattttccggaaaaaatttgaatctatttttatatgcgaatcaatcctactacttctggtcctgaggtttctgcgcttgaaaaaaaaaatctgggacgtatcgcccaaataattggtcctgtactagatgtagcttttcccccaggtaagatgcctaatatttacaacgctctgatagttaagggtcgagatactgttggtcaacaaattaatgtgac

SEQ ID NO: 272425 - DNA, 450 bp, Glycine max
  unsure (1)..(450): unsure at all n locations
gaaaagggtggaaagttgagtgtgtggtacacaaacacaaggctctgtgaagggtcactgccacaattctaccaaggtcatgagaacaaaacagtgctcaatgtgtccttgagtggtcaagtgcagtctggaagcaccctaatgaatgcactgcagcagcaacagcagacagggcgcattccattggatctcaaggtgcatgcaccaatagccatcaaacttgggaggttgaagctgatgaaggtgagagtgttgggagaatgccttttggtggtggatagcttgtcatctaataatctcataagcatcaaggctagcaactgcaagtttagattgaaactttgatatggaaaagcttgccttaattagttcatgtcatttngttatttctattccttggttttttggactggaagacttgattcttttatggatttcttttacactgct

SEQ ID NO: 272426 - DNA, 377 bp, Glycine max
ccttaacatgcacaccactttcttcttcttcttattctcatgacaccactctaaagccaaacctcaaccctcttctgggtgcagatgcaacttctaggccatgttctctacccttgaaaagaagaacatgctttactaccaaagccattctctcatccaccagagaagatgtcttgaagcatttcaacgaacgacgagctctcaagattatctcaggcttgcagaatttcaataaagacaatgttgcctcggttgtcactgctgcagacaagggtggagcaactctcgtggatatagcatgtgaccctgagttggtaaagctggccattgacttaacttcttgtccggtttgtgtttcttctgtagatcctgcaaca

SEQ ID NO: 272427 - DNA, 379 bp, Glycine max
ccttaacatgcacaccactttcttcttcttcttattctcagcacaccactctaaagggaaacctcaaccctcttctgggtgcagatgcaacttctaggccatgttctctacccttgaaaagaagaacatgctttactaccaaagccattctctcatccaccagagaagatgtcttgaagcatttcaacgaacgacgagctctcaagattatctcaggcttgcagaatttcaataaagacaatgttgcctcggttgtcactgctgcagacaagggtggagcaactctcgtggatatagcatgtgaccctgagttggtaaagctggccattgacttaactttctgtccggtttgtgtttctttttgtagatcctgcaacat

SEQ ID NO: 272428 - DNA, 282 bp, Glycine max
attccgcgcgacgccacgcgttcggagaactattaagaaggaaaggctttctcatgatctgggcccatctgttaccagcgcaaccgtgccggtgccggcatggttgctccattcaccgtcctcaaatccatggctggctttcctactaggaataccaacaatgacattacctccattgctagcatcgttggaagagtacaatgcatgcatgtgtgtccaccaattgtcaagaagaagtttgagactctttcctacttgtcagacctcgattatgcccaattg

SEQ ID NO: 272429 - DNA, 127 bp, Glycine max
tcgcccacgcgttcgcaaagaacgaaatgacttttgagagtttttagatttgtgtttggtgaagtacttcagataatgtgaattatcttgtgtatccgaatccaacttaatgttacttgctttttac

SEQ ID NO: 272430 - DNA, 351 bp, Glycine max
cccacgcgtccgcccacgcgtccgcagagactcaagaagttgccgaagtgaaaccaactgagggctctgtcaaccgagatgcagtgcttgcaagagttgcaactgagaagagattgtcactaatcaaagcatgggaagaaagtgaaaaatcaaaagctgaaaacaagtaagagtctacactctttggttcagaagctagaatcttcaattgaatcaccttaatcatggtgattaatcgacctaacatcaagctttatctaaaaatgctcaatctaacatcaagctttatctgaaaatttattggttggtttccttgtttatcttgtgctgatctttgatattttttgcaca

SEQ ID NO: 272431 - DNA, 374 bp, Glycine max
cggacgcgtggtcgtgggtctcgtttttgaccaatatatctggttgtatatagtcgacttagtgaaatgataatcagtaatcggagtaaaaaaaaatgaaaaaaaaaaaaaaaaacaaaaaaaaacacaagctaaaatataaaaccaaagggctgtccatctatagagaccatggttacatccgcggacatacatggaaatgactctcgtatacacagcactaaattcgatatattgcccgactgttaacatatggcaacctgagaaaaccgcttctgaacggacttcatctgcgaaagcccataacacagtttatgcaattggcgttactcagtccaggaccgaaccgatcatacgtgaaaacaggaaatcca

SEQ ID NO: 272432 - DNA, 383 bp, Glycine max
cacaaggcagaaagcaagctcatcctagagttttaaaaatggcagcagcctcctccatggctctctcttccccatccttggctggcaaggccgtgaagctgggcccatcagcccccgaagtcgggagggtcagcatgaggaagaccgtcaccaagcaggcctcctccggaagcccatggtacggcccagaccgcgtcaagtacttgggcccattctctggcgagcccccgtcctacctcactggcgagttcccaggtgactacggctgggacactgctgggctttcggccgacccagaaaccttcgccagaaaccgggagctcgaagtgatccactccaagtgggccatgctcggggccttgggctgcgtcttccccgaacta

SEQ ID NO: 272433 - DNA, 348 bp, Glycine max
ctgacgcgtgggctcttttgctttaccaaattccaatttccaattcgggaccctagggccgttcgaatcaccaaatcgtgatggcaccaaaggcatagaagaagccagcagagaagaagcccgcggaggagaagaaatcgacggtggtagacaaggctccgtcggagaagaagccaatggccggaaagaagcttgcgaaagaggtaggctccggctgataagggaagaagaagaagagaaacaagaagagcgtggagacatacaagatctacatcttcaagggtctgaagcatgttcaccctgacattggtatctcaagcaaggccatgggaatcatgaacagcttca

SEQ ID NO: 272434 - DNA, 384 bp, Glycine max
atccaagccatttacaaaaatggtaaccattaaagcatctggcacagtccttccaagtgaaccaactccggagggccttttatggctatctgatattgatcaagtggcacgtctacgccacacacccaccatctacattttccatgcaaaacacaaccatgatacattaattgagaggatgagaaactctcttagcaagattttggttcactactatccaatagccggtcgattgagaaggatataaggtagtggtcgattggaattggattgcaatgcataaggggtggtgttgcttgaagctgaatccacataaacattggatgattatggagactttttacgtgagtccatcaaggacttggtttcaactgttgattacac

SEQ ID NO: 272435 - DNA, 335 bp, Glycine max
tgatcttgcaagcgaggggattgaacttatcggcattaacaaccgtaacctggaaacatttgagctggatatcaggatcacaaagaagcttcttgaaggagagcgaggcaaaataatccgtgagagaggcataactatggttggagaatctggtctgttcacccatgatgatattgcctatgttaaggaagctggtgttaaagctatattgcgtggagagtatattgtaaaacaaaatgatcctgggaagggcatcagcagtctctgtggcatagacatctctttggcgtgaagtgagctatctgtcttgagatatataggcattggacatgaca

SEQ ID NO: 272436 - DNA, 354 bp, Glycine max
tcgcgctgttgtcgaatcccttcccgatccctaaggtaagtgagtaatcggtggttgagaatggtggataaggcgactggtaggaaggaggaggtggttaccatagagtacaccattaacctccacaagcgccttcatggctgcacatttaagaagaaagctcctaaagctattaaggtgataaggaaatctgcccaaaaggccatggtgaccaatgatgtgagggtggatgtgaagctgaacaagtttgtctggagccagggaatcaggagtgttccaaggaggattatggtaagaattgctcgcatgatgaatgacgatgaagatgccattgaagagctatactctcttgtc

SEQ ID NO: 272437 - DNA, 356 bp, Glycine max
cccacgcgtccgcccacgcgtccggttgagaactaagaaggagaagcaaatggcttgctcaatgatctcttccccagctgttaccactgtcaaccgtgccgttgccggcatggttgctccattcactggcctcaagtccatggctggcttccccaccaggaagaccaacaatgacattacctccattgctagcaacggtggaagagtgcaatgcatgcacgtgtggccaccagttggcaagaagaagtttgagactctgtcctacctgccataccttgatgatgcacaattggcaaaggaagtagaataccttcttaggaagggatggattccttgcttggaattcgagttggagc

SEQ ID NO: 272438 - DNA, 384 bp, Glycine max
aaaaaaaaaaaaaaaaaaaaaaaaaatttaaaaaaaaaaaaaaaagggaaaaaaaaagggaaaaaaaaaaaaaaaaaaaaaaaaaaaaaaaaaaaaaaaaaaaaaaaaaaaaaaaaaaaaaaaaaaaaaaaagggggggccgtttaaagggaccaaagctaacgaccgcgggaaggcaacgaaaaagcccttaaaaggggcccccaaaataaaataaaggggccgccgttaaaaaacgtcggaacgggaaaaacccgggggtacccaaactaaaccgcctggaaaaaaacccccctttcgcaagggggcgaaaaagcaaaaaggcccaaaccaaaggcccttccaaaaattggccaacccgaaagggcaaagggaaccccccct

SEQ ID NO: 272439 - DNA, 350 bp, Glycine max
aacacacgtctactgccgcgggagatttacctgaactctaaggccggatcagagtcgaaggctgaggacgccgcgtggaatgaagtggcgttgcctgagatactcagatgactggctggcaagactacttggacaacccaggcctgatacacgcacaaaggcattcagtgccaatcaggccacccaaagtatcacgatcggggcacacagaggagataccgtcttgctcgagggactcttgatgaacagactgatccaatgtatccacgtggactcgttgacccattgtggctcgctgacgacccagatgctgctgctcatcctgatgccaaagagctcaagaatggcca

SEQ ID NO: 272440 - DNA, 381 bp, Glycine max
aacgaagtactactacaagggaagaaaaacttagctactaaggaaggatcaaagagaatggctcaagcaatggcatcaatggctggcttgcgtggttcctctcaggctgtgttggaaggtagccttcaggtgagtggctccacacgcttgaatgtggggagtggaagcagggtggcctcagtcacacgtgcagggttcacagttagagcacaacaacaacaagtgagtggtgaggtacaaagcagccgtatggcagtgctttcacttgttgctgctggtttggccactggctcttttgttcaagctgtgcttgctgatgccaaatctatcaaagttggaccaccttccccaccttctggtggattgcctggaacgttgaac

SEQ ID NO: 272441 - DNA, 348 bp, Glycine max
ccgaattagggttttccaattcgcagagcaactcatcacaacgaaccaaaccaacagtgtcgcagccgcagcctcagtcgcagccgcaacacgggcaagcggcgctggagcaggtgcagtgcttcggtcgcaagaagacggcggtggccgtgacctactgcaagcgcgggcgcggcctcatcaagatcaacggctgccccatcgagctcgtcgagccggagatcctccgctttaaggccttcgagcccatcctgctgttgggaaagagccgcttcgccggcgtcgacatgcgcatccgcgtcaagggcggcggccacaccttccagatctacgccattcgccagagca

SEQ ID NO: 272442 - DNA, 410 bp, Glycine max
caaagagctaacaagagattcaagaccggcatggctaatgaagaggaacagaaaaaccacctcttcggcatcaaagatctcggtcacaagactctccttcagagtgatgcactctatcagtatatacttgaaaccagtgtctatccaagagagcacgagtgcttgaaagagatacgcaagatgactgcaaaacacccactgaacatcatggcaacaccagcagacgaaggacaacttctgagcatgcttgttaagctcacgaattcaaagaacgccttggaaattggtgtattcactggttactctctgctctccactgccctggctcttccccctgatggaaagatcttggctttggatgtgaatcgcgaatactatgaattaagattggccattattcaaaaaggctg

SEQ ID NO: 272443 - DNA, 357 bp, Glycine max
caacctcacaatttcctctttccactccccgtttctacttcccgcaacctcccactgtcacaaaccctccatttccccagaaactggaatctccgctctctctctccatcgctgcacctaacatacgacgattccgacgaccacgtcatcggcgactgcgtcgtgttcgaggacggcgttttcgacgaacccgttttccacaaccaccacctcaattccgacaatctcgccgtcgataagcccaagcccaagcccgggcgcagttggaggaaaaaagtggaggagacattgggcgagaatttggtcccggacaagtggcgagaggtacaggcggagataaacataacgaagagggag

SEQ ID NO: 272444 - DNA, 272 bp, Glycine max
gcgagtcgtactcgttttccactcatttgaccctgttattgtattagactctgttggagatactacactagtctttgaagtttcggagtgattaaatgtatcttagtagatagttgctcgcaacaattaatcacgtatttgatataataattccaagctactttgattgttgcaaaaaaaaaaaaaaaaaaaaaaaaaaaaaaaaaaaaaaaaaataaaaaaaaaaaaataaaaaaaaaatacaaatgaaaaaaaaaaaaaaaatatatatg

SEQ ID NO: 272445 - DNA, 438 bp, Glycine max
gttatattttcaggtcaaattataaaatccaaattccaaaataaaagatattttggggaaaatatgggtggcttagtactatttatctgatgttaaaagacttttcttctgattttaacaataataaaccatggtattctcactctttactacaaaaagatgctaatatttaatactatagagagatacaactaaccatagttggcaaaaacggcttgcccacctcatctatctctcggtcgtgcccttttcgctgtcccaatccagatttgggacagcgatacccgcaatgtatccagctgggctacatcctttaaattcaacattttcttacccaacatatcaaacttatctgacggtctttccttcttattatctcctcttaggtcttaactcctattcactatatatttttttaatcttttatatatttccttt

SEQ ID NO: 272446 - DNA, 353 bp, Glycine max
tcgacccactcttccgaatgcatatacagattaaatgctaattttcaaataacaatatcaaaggtaaatcaaagctcttataagaaaaaatcaagtctctatcataaataccacactttacctactcacagtaaaattaacaaaaaaaaggattctcaatattaaaaaaataactacaaacttccaatatcttacaaatacatcacttgatgcttcccattaacgtatccaataacaattaatttcttatacaactgatatctatatactttctacatataaaccatataataaaaaataaaacaatatctaacataaatagtgctttcttacaaatgtaacttaattcacta

SEQ ID NO: 272447 - DNA, 389 bp, Glycine max
cacaactattaaaagcgtagagagtactgtgtgttcagaggctgccaaaaactcacgcggagaaagtacaagtagaaggagaagaagcacaatgaagctgctctctccaaaattgttcactctcgccattctgctcgcggcggcgctggttttagcttccgccgacgcagtcagtgacaatgagatgcagaaacatgaagccacggaatcaagggacgtggttgaagagaagttgcgagtgcagagcttgaagaattcgtcaatggcagaaaggtcagggggtgctttaaatgaacatgcagttgataatccagaggagattgcttccatggttgatgagagcatacgcaattacacagcttgaaggaacctgaacttcttcttatgcg

SEQ ID NO: 272448 - DNA, 223 bp, Glycine max
cccacgcgtccgcccacgcgtccgcttaacaagtcccaggcaattgtttagttagattgagttcgctgtaggattgtgttatcagttttgtcaactatagctcaatctttctgtgatagtatgttaattttgaggcaggttttgaatcaatgtttatcatttcagtttcgtcatgaagcatatggattaacattagccctgattaaacggcacttttattacg

SEQ ID NO: 272449 - DNA, 382 bp, Glycine max
gaagaaagtgaagaaagacgttaagatgaaaggctcttcatcttctaaggatggcactgctaaatcaacctcttctaagaaaaaagcaagtggctctgatgaagaccacacttcacctactcacagtcaaattgacgagaaagaggaggctccagatgaagatgatgacgacgacgtgcaatggctgacagatacatcacttgatgctgcccgtcaacgtatccaagaacagttaagtgctgtgacagctgatatggttatgctttctacagatgaaccagagaagaagaaaaaaacaataagtaacagaaatggtggttctcacaatggtaactcaatgcactacgggaccctggttggtgaagtgaaaggcaatttcaag

SEQ ID NO: 272450 - DNA, 363 bp, Glycine max
tcgcttaaccagaaacgtggacatgtgttcgaggaaatgcagaggcctggtaccccactgtacaacatcaaagcatacctccctgtcattgagtcctttggtttctcgagcacattgagggctgcaacatcaggccaggctttcccacaatgtgtctttgatcactgggacatgatgtcttctgacccattggagactggatcacaagctgcacagcttgtcaccgacatccgcaagaggaagggcttgaaggaacagatgactcctctctccgagtttgaagacaagctttaaattgtttgaactatttaacttacttttgaacttagccgaatttatttctcatatgaacaatgttacttt

SEQ ID NO: 272451 - DNA, 360 bp, Glycine max
  unsure (1)..(360): unsure at all n locations
gagaaactgacattcagtgtcaccaagaccaagcctgagaccggcgaggacatcggagcgttccagagtcttaagccgtccgacactgatttgggtgcagaggctgcaaaggatgtcaagatccacagtatctggtatgctcagcttgactcatagactgcatgcttttgcttcgtgcatttcacgcctaaattggcttgaaacttcatgctgatgctgcattatcatccttcgacccaactttactagctcactctaagatctgtcatataggtgatcattgacgacctncaattccagtgcttaaaatttaaaggattatcagacataatgtgtggaacgaagaacacttttatataa

SEQ ID NO: 272452 - DNA, 343 bp, Glycine max
gttagtcattagcacttcgtcataccttactgactgtacaacaatggcttcaaagagggaactttcgaacccaatgagggaaataaaagtgcagatgctcgttctcaatatctgggtaggcgagagtttagatcgtatcaccagagcccacaaggtgttggaacaacttaatgtccaaaccccagcgttttccaaagctatgtacactattcgttcctttgtgattagaacaaatgagaagattgcattctatatcactgtcaaaggttacagggcaatgcaactatagaagagtggttcgaaagttaatgaatatgaacttctcataaagaatttcaatgat

SEQ ID NO: 272453 - DNA, 383 bp, Glycine max
cccactcgttcgccctcgcgttcgatttggctagttatttgactcgggcaaagttaggttcatctgcatcggtcactagcatcatacaaagcttggttgattggtgttatgcttattgcaagttccgtgattttgacatgaacccacgagcacatcaagttttctattctggctgccaggccatcatgtatattatgtgttttcgcatgacatctttgatggatgttcctaggcttaagttgcagctgcttaatatgcccatggaggcaatcttgaaacataaattgagtcccttgaaggtgtgtttgcccactgtagtagtggaatttcttatacaggcaaaggctgctcaacttttcatggcttcagagtcatttggtttc

SEQ ID NO: 272454 - DNA, 363 bp, Glycine max
gaagcgtggtcgtggtggttcggcggttaacaagttccgcatgtcggggggtcttcgagtggctgcgaccgtgaactgcgcctacaacacggtggcgaagaacctctacatcatttcggtgaaagggatcaaaggccgcttgaaccgtcttccctcggcctgcgttggcgacatggtgatggccaccgtgaagaagggaaaaccccatctgaggaagaaggtcttgccagctgtcatcgttcgccagcgcaagccatggcgccgaaaggacggcgtctacatgtacttcgaagataatgctggtgttattgtcaatcccaagggagaaatgaaagggtctgctatcactggtcccattggaaa

SEQ ID NO: 272455 - DNA, 389 bp, Glycine max
cccacgcgtccgctctctctctctcatgctctctgatctggggtggttcaggagccggccgctcctgcagttttctttcgcggctggagtggaaggccattctcgcaacgtttgagttcagcagatccagaatttttcagaaaacaggtttaggagaatgaagaatacggaacgaattgccaatttggctttagcaggcttaaccttagcgcctcttgttgtgaacgtagatccgaatttaaatgttattttgactgcttccctcactgtgtttgtgggctgttaccgctccgttaaaccaaccccaccaactgagacaatgtccaatgaacatgccatgcgttttccctttgatgggagtgcaatgttattgtcactcttcttactct

SEQ ID NO: 272456 - DNA, 360 bp, Glycine max
tcgcccacgcgtccggcttggcaaacaaaatcctcatcttatgcgattgattcaagagcatcaagttgacttccttcgcctaattaatgaacctgttgaagggggtgagggaaatatactgggacagctggctggtgccatgccgcaagcagtgactgtcacccctgaggagcggcaagcaattgagcgtctcgaagcaatgggttttgatcgtgcaactgtattggaggtgtactttgcttgtaacaaaaatgaggagctggctgccaactaccttttagatcacatgcatgagtttgatgaataattagatctcctttacaatttgtcaaaatattggtttatgtttccttttgaatg

SEQ ID NO: 272457 - DNA, 388 bp, Glycine max
  unsure (1)..(388): unsure at all n locations
cccacgcgtccgatcatcaattataagcatgggtttgtggaacacaacgaatacagtgtcttgccgctttcacaagtttggtgatgaccaaaagaatctggtcttccaaggtgatgccacgtcttcttccaggggcatagaactcacaaagttagacggtggaggaaaaccagtgggtggcagtgtggggagagtgttatactcttctccagtgcacctttgggaaagctctacagtggtcgcaagctttgaaaccgacttcaccttttccatctcatcagactctactactccaggtgatggccttgccttcttcattgcaccatttgacactaaaatccctccaaactctggtgggagcaaccttggactcttnccatcagacaat

SEQ ID NO: 272458 - DNA, 432 bp, Glycine max
tagagtttgttgtgagctataagctagtttatcgtgaggagaatatggagttgtttgttttctttgttgctgcagtagttctggtagcatggccatgccatggcgcatgctaccaaaggttccctctccgaatgaaaactggctatggtgagcgttcttcggaggtaaaatgcgcaagttttaggcttgctgtggaagcacacaacatccgagcctttaaaaccattcctgaagagtgcgttgaaccaacaaaggactacattaatggcgaacaatttagatcatactctaaaacagttaaccaacaagctttctcttatgctagtgaacgcgaagtccatcacaacgacatatttatattcggcataaattacaacgtactctctaatttcccatactatgaaaaacattgatattgggttgacgaaatta

SEQ ID NO: 272459 - DNA, 347 bp, Glycine max
aaataatttgcttctctctctgtctttctcacaagacaacagaggaacactcccaaacaaaccatggacgtgggtcagatgcagagacagtggatcgactacaccaaatccctcttcctcgagggcttcctggatggtcagtttctgcaacttcagcagcttcaggatgagaacaaccctgactttgtggtcgaagttgtctctctcttctttgaagattctgaaaggcttctcaaagatctcacctttgccctagatcagaatggcgttgacttcaaaaaagttgatgctcatgtgcaccagttaaagggtagcagttcaagcataggtgcacaaagggtgaaaaa

SEQ ID NO: 272460 - DNA, 380 bp, Glycine max
aaataatttgcttcgatctccgtctttctcagaagacggcagaggagcactcgcacgcgaccatgggcgtagttcagatgcatgagacagcggatcgactacaccaagatccatatagctcgagggcttaccaggatggccagtttcatgaactcaagcagcttcaggatgagaacatccctgactttgtggtctaagttgtctctctcttctttgaagattctgacaggctcatcacagatctcacctttagcctagatcagaatggcggtgactataaaaaagttgatgctcatgtgcaccatttaaagggtagcagcttaagcatacgagcacaaagggtgaaaaatgcctgcattgctttccgcaacttctgtgag

SEQ ID NO: 272461 - DNA, 413 bp, Glycine max
gttctggcccgaaccctttctttcgtcacaatcacaacttggtaagggtactccgtgcaagaaagatgaagctcgagttcgcaaatgtgctacttctgtgccttgtccttagctcttctttcttggaaatctcaatggctggttctcctttctgtgactcaaagtgcgcgcagaggtgtgccaaagctggggttcaggacagatgcttgaggttttgcgggatctgctgcgagaagtgcaactgcgtcccatctgggacttacggaaacaaggacgagtgcccttgctacagggacatgaagaactccaagggcaaggacaaatgcccttgaagaatatctaatttcatcatcacactccattccaataaactaccttgtattgtatcttcagccttccttttcagagtattg

SEQ ID NO: 272462 - DNA, 306 bp, Glycine max
cccacgcgtccgcgggcttgcccgcttcagcggcacaaggcctcgcacgggccgcgttccggtcgggatcggcggcaggaggcagcgaatcgccggtgcactacaaatacaaccccgtcaagaccatcaagacgaatgtgatgggcacgcttaacatgcttggccttgcgaagagaaattgggctaggtttctgcttactagtactagtgaggtttacggtgatccgttggagcattctcagaaggagacttattggggaaatgtgaatccaattggggagaggagctgttacaatgaagggaaaa

SEQ ID NO: 272463 - DNA, 292 bp, Glycine max
cccacgcgtccgcccacgcgtccggaatatgatcatgctcgagatgcagagagcttaaaccctggagaacagatttttgagaagataatttctggtatgtatttgggtgaaattgtaaggagagttttgttgaagttggctgaagaagttgacttctttggagatactgttcctccaaaattgagaattcctttcgtacttaggacacctgacatgtctgcaatacatcaagatacatcttcagatctgaaagtggtttggaaacaaattgaaggatatattagagatcaat

SEQ ID NO: 272464 - DNA, 353 bp, Glycine max
cccacgcgtccggtatccgtaacacttgcaacacacatggctacaatcaccaacactttcatattcaaaccccccatctctcatcacccaaagcagcttctttattcccaccgctcttctctacgctttctcaccaaatttaaaaccccctccggagcgaattctcggcggctggttccgaaagccacggcggctcccggggccaagaagacagaaaagccgcacgagagagtccagcgagtccacagcgtggaggagttcgagtcggcgctcgaatccgccaaagacaggcttgtggtggtggaatacgctgccagcgacagcgaagagagcagccaaatataccctttcat

SEQ ID NO: 272465 - DNA, 239 bp, Glycine max
gtcgcgggtttgaagcatgttcggctgtggactggtgatggtcgatcaccagcaatgggtattggaacgagaagcgatggtggattgacgatagtgtgttcgtttaggccgcacaataatgcgatggcgcatcacatgaacactccgcctcggaagacgcacgcatgggatggataccgaaggcccaccggctacgatgcactccctactcttaatgctgattggagagcttgttattc

SEQ ID NO: 272466 - DNA, 430 bp, Glycine max
gcttcaacgggccttaccttacctgaagatggcttcggtgtcctttgccgcgggattattaccttgctcttcttcttcttgctatacccgcgtctcttatggttcagttcgatttcccgtattgaacaacgccaactcactgaaactcagctcctcagctaacatctccagtccaattcttcaccaaaagcttggcactgttccttctccccttgctgtaaggcctcgccctctcaccattgtatccgctcagggctacacaatgaaaacccacaaggcatctgcaaagcggtttatggtgacggggcgaggcaagatagtgcgtaggagagctcgcaagcaccatttgctcgtttagaaaaataccaagcgcaaatcccgactgttcaaaatgcatgctgtcagcaggagcgactatgacaatgtaatt

SEQ ID NO: 272467 - DNA, 400 bp, Glycine max
  unsure (1)..(400): unsure at all n locations
gtacggttactgggaccggggcagcacaattgagtcgagcgagagcactttcagggtgaggtgccccgtttatcatcaacgagggcaacgcgcttatgaccacgggtacgctgtacgggtcctcacgaacaacaaaaacgccatcagagcgaattctccgagggtcgttgcgacagccactgaggctcccggggccaagcagacagaaaagccgcacgagagagtccagcgagtccacagcgtggaggagttcgagtcggcgctcgaatacgccaaagacaggcttgtggtgggggaatacgctgccagcgacagcgaggaaagcacccagatatacccttttatggtggagctgagccgganctgcaacgacgtggagttcatactggtgatgggcgac

SEQ ID NO: 272468 - DNA, 336 bp, Glycine max
actagttgtagatcacagggcaacacactgtgccaaatgtatttattggtggcaaacacattggcgggtgtacagatacactgaagctgtaccggaaaggagaactagaacctttgctatcagaagcgaatgctaaaaaaactgagagctaagctgttgactggcattctaaagggaacctgatccccttaccaatttgttactttgtaggtcaaagcagatctctcaacgttattgttattcacaaatgctgggtgaaagaaaccagagcgcactgataacttcaaacattggcgtgtagggaagaacttatcgttacaaatatgcagttgaatg

SEQ ID NO: 272469 - DNA, 400 bp, Glycine max
gctccgtgagcagcgactcctcttcgttctcctcggcgtcatcatagcaaccctcttcttcacattcgtcccttcctcttccccttccgcttcctcctcaagcgtttcgtacgagtctctcccgatctcctacttcgagcgcgagtcaaagattccggcgtaccaccaccgcgtggctgcggcggtgcattcggtggggaaggtgccgctggggattaagaggaagggactccggatcgtattgacgggcggcgcggggttcgtggggtcgcacctggtggatcggttgattgcgagaggggacagcgtgatcgtggtggacaatttcttcacgggaagaaaagagaacgtgatgcaccattttgggaaccctagattcgagctcatccgacacgacgtc

SEQ ID NO: 272470 - DNA, 392 bp, Glycine max
caacacttacgaaccttgcattgtatctacccacttctcaaccaacaatggcaatggcaacccaagcctctctctttaccccacccctcttcggtcttaaacccagcgaccgagccaccgcgccatggaaacaatcctgcaccctctccttcttcacctcgaagcccctcaagttctcgcgaacaatcaaagcagcagccaccgaccagaccacagaggcaccggttgggttcaccccaccggaactggacccaaacacccctttcccgatcttcggaggcagcaccggcgggctcctgcgcaaggcccaagtggaggagttttatgtcatcacatgggactccccggaagaacagatcttttgaatgcccactggcggcgctgccatcatg

SEQ ID NO: 272471 - DNA, 336 bp, Glycine max
ccggttcgagttcggggacgcgtacgcgtacgtgcgactggatggacgagaactatctctacacctgctttgctcataccggctaggtttggtgaggtatagacattcggaacatgcgaactcttcaatctgaacggtatcggtttattgaggataatatttctgctggagctgatataatcctccaaacatataaaggggttattatgccgaatggcgggcagcacttcacggtcgcatagaggcaaccgttagggctcaccgagagggaactgaacaagacactcctgattacatcatatttggtggcgactagggtgtacatgttactgatca

SEQ ID NO: 272472 - DNA, 429 bp, Glycine max
gttgttgcttccatctcttcttttggggtgaatcatgagttgactgctatgttataccctctcattatcagttctgtgggtatccttgtttgtttgctcacaaccttatttgcaactgacttctttgagatcaaggctgtaaaggagattgagcctgcattgaagaaacaactcatcatttccactgccctgatgactattgggattgcaattgttagttggattgcactcccaacttccttcactatcttcaattttggagttcagaaagatgtcaagaattggcagctattcttgtgtgttgctgttggtctttgggcacgtcttattattggatttgtaactgagtactatactagcaatgcatatagtccggtgcaagatgttgcagactcctgcaggactggtgctgcaactaatgttatattt

SEQ ID NO: 272473 - DNA, 317 bp, Glycine max
cccacgcgtccgatgctatgaagtggttccaggtgaaatatgagggagtgatccttaacaagtctcaggcgattgtttagttagactgagttcatttcaggggagtgtttttatcagttttgtcaactatctttctgggatagtatcttaattttgaggcaggttatgaatcaatgtttctcatttcagttttgtgatgaagcacatgtattaacaatagcccttttaaacgacacttttattgcaacaagaacatgtgagacacttttaaatgcattctctttattgattatttattgaaaaacataattttgttt

SEQ ID NO: 272474 - DNA, 318 bp, Glycine max
gttaacctagacggcgtcgacacctcctccattctctccgaagccacctcaaccgtcgccagcatcatcggcaaacccgaggcctatgtgatgattgtattgaaaggatcagtgcctatatctcatggtgggagtgagcagccagcagcttatggtgaattggtgtccattggtggtcttagccctgacgtgaacaagaaacttagtgctggcattgcttcaattctcgaaaacaagttgtctgtgccaaagtcgcgattctacttgaagttttatgacaccaagggttccaactttggaaggaatggatctacattc

SEQ ID NO: 272475 - DNA, 364 bp, Glycine max
gaaaaaaatggttcatcttggcttcttccttctggggtgtctctccatgatctcatatgctaatggttatgtcagcaatgggggttggaccaatgcccatgctacattctatggtggaagtgatgcttctgggacaatgggtggggcttgtggttatggaaacttgtatagtcaaggatatgggactaacacagcagcacttagcactgccttgttcaacaatggcttgagttgtggctcatgctaccaaatcaaatgtgcaaatgacccacaatggtgcctccgtggcaccattgtagtcactgccactaatttttgcccccctggtggatggtgtgaccctcccaatcaccattttgatctt

SEQ ID NO: 272476 - DNA, 402 bp, Glycine max
gaaaaaaaagaaatacccacagtgattgcttgtgaggacaaaaaatcaagatggtgaagcttcatgggtttgcaaaccctggcggaagcgcgcatgtctcactctcatgctatggtatgtgcgacacattgcatacacaacttgcggcttgttgaaatccaaaacaacataaattggtctttaacgcctaaatcgtcgctttgggtaggggcgatgctcatacgcttacgtagataacgccaaaattaaagatgtcagcgtcagatgtggcagcaacaatgccgctaatcgccttatcggaaattgtttgcaaggtgtagacttctatgcgataaataccgatgctcaagcactattaaaatctgctgctgagaaccctattaaaattggagaacttctgac

SEQ ID NO: 272477 - DNA, 360 bp, Glycine max
gaaaataacaaatgcgactgaggcttcagaggtgatagtacctacttgcatggcttcatggatcatgagtgcacgtatacatgttttgcagccaatgcaacgtgcgatatgggaagtgatacgtatttgactaagggttgagcttgctggtattgaaacttgggtgagcaaggatatgggactaacacagcagcacttagcactgccttgttcaacaatggcttgagttgtggctcatgctaccaaatcaaatgtgcaaatgacccacaatggtgcctccgtggcaccattgtagtcactgccactaatttctggccccctggtggatggtgtgaccctcccaatcaccattttgatctt

SEQ ID NO: 272478 - DNA, 422 bp, Glycine max
ggaatttcgatgctcaatcatctcttttaccattctcttctctcttgctcttgcaggagagagccatgtccatgcatcgctacctgaggaagattattgggaagctgtttggccaaacactcccattgccactgcactgcgagagcttctaaagcctctccctgcaggtgttgaaatcgatgaactccctaagcaaattgatgatacacagtacccaaaaacattcttctataaagaagaccttcatccaggcaaaacaatgaaagtacacttcaccaagcgtgcctatgcacaaccttatggtgtatatacatggttaacggatattaaagacacctctaaagaaagatatagttttgaagagatatgcatcaagaaagaagcgtttgagggagaagagaaagtttgtgcaaaatccttgg

SEQ ID NO: 272479 - DNA, 314 bp, Glycine max
aatctgaaccttccggatttacgttttgctttgttcaggtagccagccagtcatggtgctcttcaatgtttcacgcgtagagaccactcccttcgatggccagaagcctggaacctctggtctccgcaagaaggtgaaagtgttcgtgcaacctcattacctccataactttgttcagtcaacattcaatgcattaactgtggaaaaagctagaggtgcaacgctagttgtatctggtgatggtcgtgacattttaaaggggaagctattgagattatccctaacgtgtcagcagcaagtggtgcaacacgtgt

SEQ ID NO: 272480 - DNA, 368 bp, Glycine max
atctgaagctaagtttcgttgccactgaggaatgaaatggccaatggtaacaacattagtcatttcttcaagctcttgcttttccttctaactttccactcttgtctcgctgagattttctttcaagagagattcgaagatggatggaagagccgttgggtgctatccgattggaaaaggagcgagggaaaagcgggtaccttcaagcacacagcagggaaatggtctggggatcctgatgacaaacgtcttcagacatataatgacgccaagcatttcgccatatctgcaaagataccggagcttagtaacaaggacagaaccctggtggtgcagtattctattaggtgtgagcacgacattgaatg

SEQ ID NO: 272481 - DNA, 386 bp, Glycine max
gggctagagaacactgaagctaaccgccaggcgtaccgtaccctccttgtgacagttccaggacttggtcagtacatctctggtgccattctctttgaggaaactctctaccaatccacaactgatggcaggaagattgttgacgtgctcctcgagcaaaacattgttcccggtattaaagtcgacacgggtttggtaccccttgctggttccaacgatgagtcatggtgccaaggtcttgatggtcttgcctctcgctcggctgcatactaccaacaaggtgcccgtttcgccaaatggcgtactgttgtgagcatccccaacggtccctctgctctggcagttaaggaaagcaccttgggtctggctcgctatgccgcaattgc

SEQ ID NO: 272482 - DNA, 322 bp, Glycine max
gggctggaggacactgaagctaaccgccaggtgtaccgcacgcttcttgagacaactccaggacttggtcaggacatctatgtgtgccattctctttgaggaaactctctaccaaatcacaactgatggcgggacaattgatggcgtgctcctacgagcaaaacattgatgccggcattaaagtcgacaaggggttgggacccctatctcgttgcaaccataagtcatggagccaaggtcttgatggtctagcctctcgctcggctgcgatactaccagcaaggtgcccgttttgccaaactgcgtactgctgtgagcattc

SEQ ID NO: 272483 - DNA, 433 bp, Glycine max
agctcagatatactcctaatatgaagaagcatattggcatgattgctggaggcacaggaattactcctatgcttcacgtaattgaagctatattgaggaatcctgatgacaaaactcagatatctttactttatgctaatgtctccccggatgacatactgcttaaacaaaagcttgacattcttgcaacaagccacccaaacttaaagatattctacactgtcgataatccaacgaaaaattggagaggaggtgcacgttacatatcaaaggatgtggttgtgaaaggcttacccagtcctagtgatgatactctaatacttgtgtgtggacccccgggtatgatgaaagcaatatctggagaaaaggccaaagactggacacaaggagaggtttctggcatcctaaaagaggctggatacactgaacaaat

SEQ ID NO: 272484 - DNA, 259 bp, Glycine max
gatggatgagcacgtggatgctatccgattggaaaaggagccagggaggcgcgggtgccttcaagcacacagcagggaaatggtctggggatcctgatgacaaacgtcttcagacatataatgacgccaagcattgaggcatatcgtgaaagataccggagcttaatgacaaggacagaaccatggtggtgcagtattctattagggttgagcaggacattgaatgcggtggcgggtacattaagcttctttcttgtta

SEQ ID NO: 272485 - DNA, 375 bp, Glycine max
gccacgcgtccggatcgagagtggccccaggttaggctcaattctagagtgctgaaatgggtgtgttccgctgaaaacgatggctgccaatgtggagctaactgcacctgaaacccccacacttgcaagtgaggtgtttgagagctaaatcttcaagcaaagattgcccttagaaataatgataaaaactgtgtgtggtctcaaaacttcgaaattatgtggtgtgaattatgtcacgccctgatgttttgggtgtaaacaaagatgcttacaataaagaggtaaccactttgccctgatcgcgtacaagtgtttggaacctctaatgtgcgtgtgaagtgccaggctggcttcatatatatatatggatcaatg

SEQ ID NO: 272486 - DNA, 255 bp, Glycine max
gggaaacccatgctcatcaatcttattgtggttgtcattgctgagattgatcttgtgggaggtgcagaatactacagaattattaatggtctgaatggcgaagacaaacttcaaccaggtggtgcatatgacccattggggctcgcaaatgatacataccaagtcgcactgataatggcgaaggaaatgaaacacggaagactggctatgtatgccatgctgggtttctacttacaagcttatggcactggagaa

SEQ ID NO: 272487 - DNA, 274 bp, Glycine max
gcattacccgacaaaacaaaaaaaaatagagtaactgataaagcagggaatacaacattggggggatcataaggagaccaatggaacaaatctcctcggaggccacaaaaggacaaagcaggaccgttgtacactttctaatctcctgtacttaattgaggaggtccttcacctttcaacgatctagcttggtcctatctatctatgtgtaattcgatgcggttcaaataggggcactcgctaaactttatgctgtttcaactgtgtgtcaaca

SEQ ID NO: 272488 - DNA, 383 bp, Glycine max
acattacattactaagtctttgttcatttgagtagtagtgatggctagcctcaaggttgcatgtgtggttgctgtgatgtgcatggttgtggtggccatgagtgctgcacccatggcacaggccgcaatcacgtgcgggcaggtcgccggcgacatgtctccgtgcttcagttatcttcgaagcggcggaaaaccgtcgcaggcctgctgcaacggagtgaagtccctcagcagcgcggcgaataccaccgcggaccgccagggggcgtgcagttgcctgaaaaaccttgccaataatatgggacagagtttgaatgccggcaacgcagcctctctccctggcaaatgtggcgtcaacattccttacaagatcaagaccttca

SEQ ID NO: 272489 - DNA, 391 bp, Glycine max
  unsure (1)..(391): unsure at all n locations
tccaaatgcagtttcatacaaaacagcagcgagagagaaactgataaggcagggatacaacattgttgggatcattggagaccaatggagcgatctcctcggaggccacataggcgaaagcaggacctttaagcttcctaatcccctgtactacattcagaagttccttcacctctcaacaatctagcttgctcctatctatctatatgtaataagatgcgtgcaaataggggcactagcttcactttatgttgtttcagctgcgtgtcaacaagtcatgtaagacacttcactatgaatggttctctatcgtggctttaataaattatgcgcccttgtgccatactttctnanacaaacaaatttggaacaggggaagggaccttttaag

SEQ ID NO: 272490 - DNA, 349 bp, Glycine max
gaaaatgatcaactgaatgttgcctttgatgatgttggacatgctagcgtgcaagtatgcattgctggatttaaaaaggggccgctgaaagtgttgtcccaatcatatgataggtccctacgtgggagggacttttacgaggttctgttcaatcattaaactgccacgtttaaggaggcgtacaagattgatgtattccaaaatgctagggcttgtctgaggttgagggctgctcgcgacaagctgaataaagtgcttaatgcttattccgaggcacctttaaacattgagcgcttaatggatgagaatgatgtcagacgctatatcaagcgcgatgagcttgagcaac

SEQ ID NO: 272491 - DNA, 352 bp, Glycine max
gaaaatgatcacactgaatgttgcctttgttgatgttggacatgctagcatgcaagtatgcgttgctggatttaaaaaggggcagctgaaagtgttgtcccaatcatatgataggtccataggtgggagggacttttacgaggttctgttcaatcattacgctgcaaagtttaaggaggagtacaagattgatgtgttccaaaaagccatggcttgtctgaggtggagggctgcttgcgagaaactgaagaaagtgcttaatgctaatcccgcagcacctttaaacattgagtgcttaatggatgagaaggatgtcaaacgctttattaagcgcgatgagtctgaacaactg

SEQ ID NO: 272492 - DNA, 381 bp, Glycine max
gggagctataagctagcttatcgcgaggagaatatgaagacgcctgctttctttgttgctgcaggagttttggtaacatggccatgccatggcgcaggctaccaaaagttccctctccgaatgaaaactggctatggtgagcgttctttggaggtaaaatgcgcaagttttaagcttgctgtggaaacacacaacatccgaacctttaaaaccattcctgaagagtgcgctgaaccaacaaaggactacattaatggcgaacaatttagatcagactcttaaacacattaccaacaaactttcttttatgctagtgaacgcgaaattcatcacaacgacgtatttatatttggcatagataacaccggactctgtcatatc

SEQ ID NO: 272493 - DNA, 399 bp, Glycine max
gcgagctcatacctagttgatcatgcggaggatatgacgaacgttgcatacttcgctactgcagcagctatggtagcctggccatgccatggcgcacggtaccaaacggttccttctacaatgaaaaccggctattgtgcagccacttctgaagggaaaaacgcacgttttacgctcgctgtggcacacacaacatgccagccttttaaaccattcctgaagagggcgttgaaccaacacatgactacattaatgcgcgaacaacctaaaccagactctgaaacagctaaccaacaagctgtcttttatgctggtgaacagcctattcatcgcaacgacgtctttatattctgcgtagattacaccgcactctctaatatgccatactatgaaagacat

SEQ ID NO: 272494 - DNA, 385 bp, Glycine max
cccacgcgtccggaacattgctgataaccccaccaatgtgcagcttccaggtatgtacaacaaggaagagaacccccgtgttcccatcattgtcaccggtaacgatttctcaacactctatgcacctctcatccgtgatgggcgtatggagaagttctactgggcaccaacaagggaagaccgcattggtgtttgcaccggaattttccgcactgatggtattcctgaacaggacattgtcaagcttgttgacaccttccctggccaatccattgatttctttggtgcactgagggccagagtatatgatgatgaagtgaggaagtggatttctggtgttggcgttgacagtgttgggaagaagcttgtgaactcaaaagatgga

SEQ ID NO: 272495 - DNA, 431 bp, Glycine max
cccacgcgtccgtcgaaacgaagaaagaaagcgttgtgaagaatggcggaagagggacaagtgatcggtgtccacagcgtagaggagtggaaggaacatctcaagaagggagaagagtccaagaaattgattgtggtggattttactgcttcttggtgcggtccatgccgtttcattgccccaattcttgcagagtttgctaaaaagttgccgaatgtcaccttcctcaaggtggatgtggatgaattggagactgtttccaaggagtggggaattgaggctatgccaaccttcctgttcttgaaagaaggcaagctggtggacaaggttgtgggtgccaagaaagaggagctgcaattgacaatagccaaacatgccgcaattgctgctgcttgaagtgccatatgaatatgttaaaaataatagactat

SEQ ID NO: 272496 - DNA, 407 bp, Glycine max
cccacgcgtccgctagttctgtattcagattacattgcaaaaatggcatcattcaccatgacagcttctatctttggctgcccagctgtcaccaaacggtcggcagtggctgcgcagaggagattactcgtagtgagtgctgccaaagctgaaggggaaaaggtcaggtatgacaacaatgatagcaatggaaggaggaacttgatgttcgctgtggctgctgctgctggtttctctgttgctgggatggcagtggcagatgagcctaaaccaggaacctcagaagccaagaaaaagtatgccccggtttgtgtcaccaatcctacagctaggatttgtcgcaattgaggatctcctgtttcattttacctctgatgatcggaaatgtactgttgggatgtgataat

SEQ ID NO: 272497 - DNA, 316 bp, Glycine max
cccacgcgtccgctagaactgaaaaagaatttctttttgaaaatggcctaagacggccaagtgatctgtatacacagcgtgtaagattggaacgaacatttcacgaagggtgaacagtgcaaaaaattgattgtgggggctcttacagcttcttggtgcgggccatgccatttcattaccccaattcttgcaaagtttgcataaaaagttgcctaatgtcaccttcctcaatgtggatgtggatgaattggatactgtttacaacgagtggggaattgatgctattccaacctccctgtttttgtaagaatgcaag

SEQ ID NO: 272498 - DNA, 428 bp, Glycine max
gacgcgtccgcgacccgtacggtgtccgtaacacttgcaacacacatggctacaatcaccaacacttgcgtattcaaaccccccatctctgatcacccaaagcagctaactttattccgcaccgctcttgtctacgctttctcaccaaatttaaaaccccctccggagcgaattctcggcggctggttccgaaagccacggcggctcccggggccaagaagacagaaaagccgcacgagagagtccagcgagtccacagcgtggaggagttcgagtcggcgctcgaatccgccaaagacaggcttgtggtggtggaatacgctgccagcgacagcgaggagagcagacacatataccctttcatggtggagctgagccgcagctgcaacgacgtggagttcattctggtgatgggcgacgagtcggag

SEQ ID NO: 272499 - DNA, 222 bp, Glycine max
ccgggtcgacggcacgccgtccgcgagcggtcacgcttgttgattcttgcggagtatattttaaagattgttttctttgttgctgcagcagtttttgttgcatggccatcccatgacgcacgctaccaaaaggtttctcttcgcataaaaaactccttttgggggcgcccttctgagggggaaaagcgcacgttttatgctttctgttgaaacacacaacat

SEQ ID NO: 272500 - DNA, 395 bp, Glycine max
tatcatcttacatatttctactgaagcctagtggttgtggaaataaagagttaccatgtggatcacactcatcataccaaacgattttattctatgtttccatatacctaatagctctaggaaatggaggataccaacctaacattgctacatttggggctgatcaatttgatgaaggagatcccagggaacaacattcaaaaattgtatttttcagctatttttatttggctttgaacattgggtcactcttctccaacaccatattgaattattttgaggatgatggactatggactttggggttctgggcttcagctggctctgctgctctggcattgattttgtttctttgtggcacacgaaggtatagatactttaagcctaatggaaac

SEQ ID NO: 272501 - DNA, 317 bp, Glycine max
tcgtatcatcttacatattgctactgaagcctattggttgtggaaataaagagttaccatgtggatcagactcatcataccaaacgattttattctatgtttccatatacctaatagctctaggaaatggaggataccaacctaacattgctacatttggggctgatcaatttgatgaaggagatcccagggaacaacattcaaaaattgtatttttcagctatttgtatttggctgtgaacattgggtcactcttcttcaacaccataatggaatatttagaggatgatggactatggactttggggttcttggct

SEQ ID NO: 272502 - DNA, 373 bp, Glycine max
gtttcgggggaagagatccagcagcaatggtgtacgtcaaggctcagaaatcaaaagcctacttcaagagatatcaagtcaagttcaagagaagaagagagggaaaaaccgattaccgtgccaggattcggttgattaatcaggacaagaacaaatataacactccgaaataccgatttgtggttcgctttagcaacaaggacattgttgcacaaataatatctgctagcattgccggcgatttagttcttgctacagcatattcacatgagctgccacgatatggtcttgaagtaggacttacaaattatgcagcagcttattgcactgggctcctgttggcccgaagagtcctcaaaacacttgaaatgga

SEQ ID NO: 272503 - DNA, 417 bp, Glycine max
attggccttgtacacagcactaggaggagttagaccatcagcatgtttgcctattacgattgatgtggggacaaacaatgagaaattactaaatgatgagttttacattgggcttagacaaaagagggcaactgggcaggaatattctgaacttttgcacgagttcatgactgctgtcaagcaaaactacggagaaaaagttcttgttcagtttgaagattttgcaaaccacaatgcttttgagttgcttgcaaaatatggcacaactcatcttgttttcaacgatgatattcaggggactgcatctgttgttcttgctggggttgtggcagccttgaagctcattggaggtactctggctgaccacacattcttgtttcttggtgctggagaggcaggaactggaatagcagaact

SEQ ID NO: 272504 - DNA, 133 bp, Glycine max
gtagttgagaactaagaaggagaagcaaatggcttcctcaatgatctcttccccagctgttaccactgtcaaccgtgccggtgccggcatggttgctccattcactggcctcaagtccatggctggctttccc

SEQ ID NO: 272505 - DNA, 413 bp, Glycine max
cccacgcgtccggtttcaaacctaggaagttggaagtcatggcagcaacattgatggcagcaacaagttctggcactcttaaagcaactcctttcctaggccaaggcaagggtgccaatgccaatgctcttagggatgttgtttccatgggaactgggaagtacaccatgggcaatgatttgtggtatggaccagacagagtgaaatacttgggacccttttcagctcagaccccttcatacttgaaaggagaattcccaggggattatggatgggacactgctggcttatctgctgacccggaagcatttgccaagaacagggctcttgaggttatccatgggagatgggccatgcttggagcactaggatgcatcaccccagaggtgctagagaagtggttgagagtggac

SEQ ID NO: 272506 - DNA, 412 bp, Glycine max
aagtcatacaaattgtcagagctgagtgatgctgagcttcgcagcctcatcgctcgccctcgcattgatttctcttcggttttcgctctggtcaaccctatcgttgaccacgttcgcgaaagaggcgatgctgctgtcaaagaatacacattgagattcgacaaagctgaattggataacatcgttgaacttgtctccgaccttcctgatccacaactcgatgcgcatgttaaggaagcttttgatgtcgcctacaacaatatatatgcctttcatgctgctcagaagacacccgagagaaatgttgaaaatatgaaaggagtccaatgcaagcgagttgcaagaagtattaattctgttggtctttatgttccagggggaactgctgtattaccctcaacagctctgatgc

SEQ ID NO: 272507 - DNA, 366 bp, Glycine max
aacacacaacataataaccacgcttctgtttagctttgctcagatgattctgagaaagtagggtcgtttcttcttggtctaatggctgctgcaactgctgcaagattcatcaagtgtgtgacccttggcgatggatgctgtaaggaagacctgcatgctcatttgctataccagctacaaatttcccacggactatattcccactgtgtatgataatttcagtgcaaatgtgggtgttgaaggcataactgtcaatttaggcctttgggaatcagctgatttctctttttgtctctaatctgtatgcacttgtcactggattccttaaactccagtattttttgccctgggcatcccaattggtat

SEQ ID NO: 272508 - DNA, 418 bp, Glycine max
cccacgcgtccgacttactactatagtgtctgattcacaggccagagggcaaagattttgagcacaatggcctcgacacaatgctttttgcaccaccacgccctcaccactccagctagagcttcaacacagcgcctagttgtgagcaccaaaccaaaccacattgtttgcaaggcagcacagaagcaggttactgtccaagagggtgaggacactactactggccttgtctctcgcaggttggccctcactgtgctcattggtgctgctgctgttggctctaaggtggcacctgctgatgcagcctatggagaagctgccaatgtgtttggaaaaccaaagacaaacacagacttcctttcatacaatgggaatggattcaaactctcaattccctcaaagtggaacccaagcaaag

SEQ ID NO: 272509 - DNA, 200 bp, Glycine max
cccacgcgtgcggtttcttgtgagctataagctagtttatcgcgaggagaatatgacgtgctttgctgtctttgttgctagctgcaatctcgcttgctcggtcatactcagataccaagctacctactgttccctcttcgaatgaaaactgactatggtgagcgttcttcgcatgtaaaatgcgcaagttctacgcttgc

SEQ ID NO: 272510 - DNA, 444 bp, Glycine max
taccggtccgtcgtcccacgcgtgcgcccacgcgtccggtttgctgtgagctataagcatgattatcgtgacgagaatatgaaggggttagcggtcctttatgctgaattggttgtggtagcatggccatgccatggctcacgctaccaaaggttccctcctcgaatgactactggctatgagtgagcgttcttcggaggtaaaaggcgcaagttttaggcttgctcgggaagcacacaacatccgtacctttgaaaccattcctgaagagtgcattgaaccaactaaggactacattaatggcgaacagatgtagatcagactctaaaacatgtataccaacaagcttccctttatgctagtgaacgcgaagtccatcacaacgacatatttatattctgcatatattaacaccgtactttctaaaattccatactatgaaaa

SEQ ID NO: 272511 - DNA, 398 bp, Glycine max
ctcgtcactagctctgtgcattcttctctcgctctctgccttccatcacactcggcattggctttcccaagatagtagaagatggcagacactgaggatattcaacctcttgtttgtgacaatggaacaggaatggttaaggctggatttgctggagatgatgccccacgtgctgtgtttcccagcattgtaggtcgtcctcgtcacactggtgtgatggttggcatgggccaaaaagatgcatatgttggtgatgaggcacaatctaagaggggtattttgactctcaagtaccccattgaacatggaattgtgagcaattgggatgatatggaaaagatttggcaaactttgcaagagcatacaccgtggaattcggtagttgcaagttccctgag

SEQ ID NO: 272512 - DNA, 329 bp, Glycine max
gcatttgggcaattttgctagcacatgtgatcatcatcgtggttactcctttatagtagttttatccttgcatagtcttaggtgttttgtttaagttatatttttaagtttctgccgatttcatgtagccgtaactttcaaaactaggttcttgatcggcggtggtcaattttcattgctgtttgtttttgatgagtactgttttttgttttgatggtaagaagagtctgagatatttcgaatttcacaagcagctatagggttttagtccatttcctttgctgctgagggatgttttaagttgcatttaatttataacgaagttttat

SEQ ID NO: 272513 - DNA, 418 bp, Glycine max
cggacgcgtggggcacaaagcaaagctcatccttgagttaaaaaatggcagcagcttcttccatggctctctcatccccatccttggctggcaaggccgtgaagctgggcccatcagccccagaagtgggaagggtgagcatgaggaagaccgtcaccaagcaggtctcctcaggaagcccatggtacggcccagaccgagtcaagtacttgggcccattctctggcgagcccccgtcctacctaaccggtgagttcccaggcgactacggctgggacactgctgggctttccgcagacccagaaaccttcgccaagaaccgtgaactcgaagtgatccactccaggtgggccatgctcggagccttgggctgcgtcttcccggagttgctgtcccgcaacggggtgaagttcggaga

SEQ ID NO: 272514 - DNA, 423 bp, Glycine max
cggcagccgcgatatcatcttcttatagccactcgaaaatgaccaagagaaccaagaaggccggtattgttggaaaatacggcacccgatatggtgctagtttaaggaaacaaatcaagaagatggaagttagtcagcacagtaaattcttctgcgagttctgtggaaagtatgctgttaagaggaaggctgtgggtatttggggctgcaaagattgtggaaaagtgaaggctggaggtgcttacacattgaacactgccagtgctgtcactgtccggagcaccattcggaggctgagagagcagactgagagttgaaagcagtttacacttttcatttgttttcaaatcataaattttgctgctgtttattttgaaattagcatacttgctttggatagttgatggaattttggcaggtctt

SEQ ID NO: 272515 - DNA, 392 bp, Glycine max
cgacccatgcggacccacgcgcgcgcggcacaaagcaaagctcatccttgagtgaagaaatggcagcagcttcggccatggctctctcatccgcatccttggctggcaaggccgtgaagctgggcccatcagccccagaagtgggaagggtgagcatgaggaagaccgtcaccaagcaggtctcctcaggaagcccatggtacggcccagaccgagtcaagtacttgggcccattctctggcgagcccccgacctacctaaccggtgagttcccaggcgactacggctgggacactgctgggctttccgcagacccagaaaccttcgccaagaaccgtgaactcgaagtgatccactcgaggtgggccatgctcggagccttgggctgcgtc

SEQ ID NO: 272516 - DNA, 209 bp, Glycine max
gtatgagactctatcctacctgccagaccttgatgatgcacacttggcagaggaagccgtgtaccttcttaggaacgtatggattactatcttgaaattcgagttgcagcaccgtttattgtaacgggagcacaacagcttatcatgatactaccttggactctagtgaaccatgtggtagctacctatgttgaggatgcactggtgct

SEQ ID NO: 272517 - DNA, 420 bp, Glycine max
gctagtttatcgtgaggagaatatgaagttgtttgttttctttgttgctgcagtagttttggtagcatggccatgccatggcgcaggctaccaaaggttccctctccgaatgaaaactggctatggtgagcgttcttcggaggtaaaatgcgcaagttttaggcttgctgtggaagcacacaacatccgagcctttaaaaccattcctgaagagtgcgttgaaccaacaaaggactacattaatggcgaacaatttagatcagactctaaaacagttaaccaacaagctttcttttatgctagtgaacgcgaagtccatcacaacgacatatttatattcggcttagataacaccgtactctctaatatcccatactatgaaaaacatggatatggggtggaggaatttaatgaaacctt

SEQ ID NO: 272518 - DNA, 415 bp, Glycine max
ggcatcatcaagtgagtaacaatttctattctatctcgtcatgaaaccctaatccactcgcttctcgatctcggttgagccattcttccacgctcgtcttcgctctccatctgttcaaagatccgtccgtcacgagcgttggttatacgatggatgggaacaaggacgacgcgttgaaatgtttgagtatcggcaaagaggcgttggaaagcggcgatcggtcacgtgcgttgaagttcgtaacgaatgcacgtcgcctcgaccccaccctccccgtcgacgatctattgtccacgatagacgcggatgcatgggatcagcctgccgccgcggaggcggctgagtccacaaagtctcccgatcagccttctatccgccggagggctgctagagcggccgctctagaggatccaag

SEQ ID NO: 272519 - DNA, 425 bp, Glycine max
cccacgcgtccgatgaattcaaaaacttaagttcattccttgcgtattgctttcttcctcaaaaccaaacatgtcgaacacatgcggcaactgcgactgcgctgacaagactagctgcaccaagggaaacagctatggtgttattgtagagactgagaagagttacatcgagactgttgtcatggatgttccagcagctgagcatgatgggaagtgcaagtgtggcactaactgcacttgcacggactgcacctgtggccattaatgaatatgtatgaaaatgtaattgccatgtgtttggcaatacatatatccaaataatgtaatcttcgtatgaataaatgtgtgtgctgttatcctacttcaggtctgtgtagtcatgcagtctgaatcatttcaagttcctgtcttagttaatataacag

SEQ ID NO: 272520 - DNA, 412 bp, Glycine max
cccacgcgtccgaccacgcgtacggttgtgaactaagaaggagaagcaaatggcttccgtcaatgatctcttccccagctgttaccactgtcaaccgtgccggtgccggcatggttgctccattcactggcctcaagtccatggctggcttccccaccacgaagaccaacaatgacattacctccattgctagcaacagtggaagagtgccatgcatgcaagtgtggccaccagcttgcacgaagaattttgagactctttcctacctgccataccttgatgatgcacagttggcaaaggcagtagtataccttcctaagaaggcatggatttcttgctgggcattcgagttggagcacgtgtacctgtaccgtgagcacatcatgtcaccaggatactactatggacgcta

SEQ ID NO: 272521 - DNA, 375 bp, Glycine max
aagaaataccatatcaatcaatatatgggcgatattcaaatattccttcacacatatcaccttgtttccgtgttaaggaaggagatcatgttattattggccaatgcaggccaatctcaaagacagtgaggttcaatgtgttgaaagtgatccccgctggatcctctagcggtgcaaagaaggcttttactggaatgtgagatttgaattttcagttctcattgaagggtagtgttaccttacaaagttagtagaagcctctgttcaaatacatcaaggttgagttaaagattgaatcaattttttgatatcttgtaatgctttgagtggttatatgttacagactttaattgttgaatagtagttgcagttatt

SEQ ID NO: 272522 - DNA, 406 bp, Glycine max
gttatgctcatatcttccttgtcactgtccgtgtgtcgacggcatggccaccgtcaccacccaagcctgcgccgcaattttccgggcatgtacctagaaatccaggattctgaccggctcttacggttaacttaaccggaaagtgactataccgtcactggggtgccctccttctggctgtactcaaggttgaagccaagaagggagagtgggtacctgacttggcctgcccaacttacctcaatggcactctacctggtgacaatggatttgaccctctggggctagctgaggacccacagaacttgaggtggtacgttcaagccgagcttgtgaatggacgttgggccatgttgtgggttgcaggcatgacgcttgctgatgttttcaccaagcttggaatcat

SEQ ID NO: 272523 - DNA, 388 bp, Glycine max
cccacgcgtccgcacaccgcagggagacggtttctttcactctctgcgattcgcgatggctgacgaggactatgaagatattgacatggggtacgaagatgaaccgccagagcccgagattgaggaaggtgcagaggaagatgtggagaacaaaaacgatgaaataactggagagcctattgacaccgaggataaggaagaggaacaaccagtgaagcggcctcgaaagacatcgaaatatatgactaagtatgagcgtgctagaattttgggcacccgtgctcttcagatcagtatgaatgcacctgtcatggtcgagttggagggggaaactgacccactcgagattgctatgaatgagcttcgagagcgggaaataccctttaca

SEQ ID NO: 272524 - DNA, 403 bp, Glycine max
  unsure (1)..(403): unsure at all n locations
cccacgcgtccgcccacgcgtccgcccacgcgtccgctggtttatagatctttgcgaaggaggtttacagcgctcaaccaaagatgcagaacgaggaaggacagatcactgagctttacattcctaggaagtgctccgccacaaacagattgattaccgctaaggaccatgcttcggttcagatcaacattgggcatgtggatgagaatggcgtctacaatggccatttctccacttttgccctctgcggattcatccgtgctcagggtgatgctgacagtgctctagaccgcttgtggcagaagaagaaagttgaagttaagcaacagtagacacccatgatagtttgttacttcgttatgtattaatttctactctggctagagatatntgagtactatga

SEQ ID NO: 272525 - DNA, 354 bp, Glycine max
gaaatttattggcttaatttagcagctagacattgactgtattactaaggagcttgcaggtgatactggtgctaacaaattcatcagctgtagacatgtcaataatatcacaatgacgaacgctcatgcggatagggccacgaggcgcaccgacgacaaggtgatgtcaatgttcgaggcgtggctggtgaaacacgacaagggggacaacgcgctaggagagaaggagatgaggtatcagatctgcaagaacaatctgcgctttatcgatgaacgaatctctctgaacggaacctacaacaagtgactgaacgtgttagctgatctgactaaggcggagtacagagccatgta

SEQ ID NO: 272526 - DNA, 404 bp, Glycine max
  unsure (1)..(404): unsure at all n locations
ctcgctctatttctcagtctctgtgtttgcggctgaggattccgaacgagtgaccttcttcgtttctcgcaaagtttaagtaatcatgggtaaggaaaaggttcacatcaacattgtcgtcattggacatgtcgactctgggaagtcaactaccactggtcacttgatctacaagcttggaggtattgacaagcgtgtgattgagaggttcgagaaggaggctgccgagatgaacaagaggtcattcaagtatgcctgggtgctcgacaagctcaaagctgagcgtgaaagaggaattaccattgatattgctttgtggaagtttgaaaccaccaagtactactgcacggtcattgatgctcctggacatcgtgactntatcaagaacatgattactggtacct

SEQ ID NO: 272527 - DNA, 383 bp, Glycine max
gcacgatggagatcattatgccaagtttggagagagacttaaatgacacgagggggtattatgagagtggaaagactaaggaagcgtcctggagagaatcgcagctcaaagggttgcgtcgttttctcattgaaaaacaagaagatatcatgaatgccctcatgcatgatttaaggaaacatcaacttgaagctttcagagacgagataggaacgttgattaagaccttaaatctggcgttgaagtctttgaaacattggatgtcaggcaaaaaggctgcgttgccgcaattagcattgctaaccagtgcagaaattgttcccgagcccacttgtgtggtcctcattaattcatcttggaaatttccctttggaatatccttg

SEQ ID NO: 272528 - DNA, 426 bp, Glycine max
cccacgcgtccgcccacgcgtccgcccacgcgtccgggcagctgcttctcctatggcaagccaactcaagtccaccttcactaaaactcttgtagctcccaagggcctctctgcctcttcaccactccacctcctgccttctaagaggcaatttagcttcactgttagggccatccaatcagaaaagccaacctatcaagtgattcaaccaatcaacggtgatcccttcattggaagccttgaaaccccagttacatccagccccttgattgcatggtacttatcgaacctccccgcatacaggaccgcagtgagcccactactaagagggatcgaggtgggcctggcccatggctaccttctggtgggcccattcgtgaaggccgggcctctgaggaacaccgagatcgccgggcaagcgggctc

SEQ ID NO: 272529 - DNA, 419 bp, Glycine max
gtttgttttgtgctttagataaaagttctgccaaatcaagaggggttttaagatcatagtgtgtgttttgcaacaatggctaagttctttgctgctatgatcttggcactctttgccatttccatacttcaaacagtggtaatggctgctaatgaacaaggaggccacttgtatgacaacaagagcaaatatggaagtggaagtgtcaagagttaccaatgcccatcacaatgctcgaggagatgtagccagacccaataccacaagccctgcatgtttttctgtcagaagtgctgcaggaaatgcctgtgtgtgcccccggggtattatggtaataaagctgtgtgcccttgctacaacaactggaagaccaaggaaggaggacccaagtgcccttgagcttcaacttgttcaacttc

SEQ ID NO: 272530 - DNA, 422 bp, Glycine max
gtttgtcattagcacttcttcttttcacactgccgctgcaacaatggcttcagagaagaaactttcgaacccaatgagggagataaaagtgcagaagctcgttctcaatatctctgttggcgagagtggagatcgtctcaccagagccgccaaggtgttggaacaacttagtggccaaaccccagtgttttccaaagcaaggtacactgttcgttcctttgggattagaagaaatgagaagattgcatgctatgtcactgtcagaggtgacaaggcaatgcaacttttggagagtggtttgaaggttaaggaatatgaacttctcagaaggaatttcagtgatactggttgcttcggctttggtattcaggagcatatcgatttgggaatcaagtatgatccttcaactggtatttatggaa

SEQ ID NO: 272531 - DNA, 405 bp, Glycine max
gtttggtgttgtaactcgttcttcttcttttgttgttctgtgtttgtgtatgtttcttctgtcacctgaaaatgtcttgctgcggtggtaactgtggttgcggaagctcctgcaagtgcggcaacggctgcggaggctgcaagatgtacccagacttgagctacactgagtcaaccaccaccgagaccttggtcatgggagtggcacctgttaaggctcaatttgagggtgctgaaatgggtgtgcccgctgagaacgatggctgcaaatgtggaccaaactgctcctgcaacccctgcacttgcacgtgaggtgttgggagagcaagcttcaagcagagataggccttacttaggaataatgattaactattaatgtgtacctaaaaacctatgtattatgtct

SEQ ID NO: 272532 - DNA, 409 bp, Glycine max
cccacgcgtccgcccacgcgtccggtatttttcaagtaacttaaggtttcaaacctaggaagttggaagtcatggcagcaacattgatggcagcaacaagttctggcactcttaaagcaactcctttcctaggccaaggcaagggtgccaatgccaatgctcttagggatgttgtttccatgggaactgggaagtacaccatgggcaatgatttgtggtatggaccagacagagtgaaatacttgggacccttttcagctcagaccccttcatacttgaaaggagaattcccaggggattatggatgggacactgctggcttatctgctgacccggaagcatttgccaagaacagggctcttgaggttatccatgggagatgggccatgcttggagcactaggatgcat

SEQ ID NO: 272533 - DNA, 423 bp, Glycine max
  unsure (1)..(423): unsure at all n locations
aacacacaacatatcaaccccacttctgttttgttttgcttaaattattctgagaaagtttcttcttttcttcttgttccaatggctgctgcaactgccccaagattcatcaagtgtgtgaccgttggcgatggagctgtagggaagacctgcatgctcatttgctataccagcaacaaattccccacggactatatccccactgtgtttgataatttcagtgcaaatgtggttgttgaaggcataactgtcaatttaggcctttgggatacagctgatttctcttttgttctctaatttgtatgcactgtccagtggatccctgaactccagcattttgcccctggcatcccattggtattaagtggcacanaaatggatctgcgcgaagacaggcactatatggctgatcatcctggcttg

SEQ ID NO: 272534 - DNA, 412 bp, Glycine max
ggatcttaccctcttgtttgctaatattctcattcttctgtctctgctgcttctccttctgaactaagagatggggttgtctttcaccaagctttttagccggctctttgctaagaaagagatgcgtattctcatggtaggtcttgatgctgctggtaagactaccatcttgtacaagctcaagctgggagaaattgtcacaaccattcccacaattggattcaatgtggagactgtggaatataagaatattagctttactgtatgggatgtgggtggccaagataagatccgtcctttatggagacactacttccaaaacactcaggggcttatctttgctgtggatagcaatgatcgtgaccgtgtagttgaggctagagatgagcttcaacggatgttgaatgaggat

SEQ ID NO: 272535 - DNA, 396 bp, Glycine max
aacacacagcacaccaaccctacttctgtttcgtattgcttaactcattctgagaaagtggcttcttttcttcttgttccaatggctgctgcaactgccccaagattcatcaagtgtgtgaccgttgacgatggagctgtacggaagacctgcatgctcatttgctataccagcaacaaattccccacggactatatccccactgtgtttgataatttcagtgcaaatgtggttgttgaaggcataactgtcaatttaggcctttgggatacagctgatttctcttttgttctctaatttgtatgcactgtccagtgcatccctgaactctagcattttgcccctggcatcccattgttattagttggcacaaaattggatctgcgcgaaaacagg

SEQ ID NO: 272536 - DNA, 424 bp, Glycine max
  unsure (1)..(424): unsure at all n locations
gagagaacaagaacataagggaaccacagcggcggtaacagaagaacaagcagagaatgggtcgagtgagaacgaagacggtgaagaaatcctctcggcaggtgatagagcgtcactactcgcgcatgaccctggacttccacacgaacaagaagcttctggaggaagtggcgataatcccgtcgaagaggctaaggaacaagatcgcggggttctcgacgcacctgatgaagcgcatccagaagggccctgtgcgcggcatctccctcaagctccaggaggaggagcgcgagcgccgcatggacttcgtccccgacgtctccgncatcaacaccgaccacatcgaggtcgacaaggaaaccctcgacatgctccactccctcggtatcaacgacatccccggcatcaccccagttgatcctgt

SEQ ID NO: 272537 - DNA, 414 bp, Glycine max
atccgctagaagttcgcatcttcaacgatgcatagctcacggcattcgtccttctccaaggcactcgtgcttgactgctccatctgcttataagcgactgtggctcgtggacgcgagttctgcattgcgggctattcatcggaggactcaaagtccatggataagctcattgaactctatgaattatcgatgtcacaacatggcaagatttaccaaagcattgaagagaatcttcttacgttctagattttgaaggataacctagagcacatcgatgagagcaacaaggtggtcagcaactactggcttgacttgaacgacttggctgatttgagccaccaatagttcaagaacaagtatctggtgcttaacgtggactactgtctaacgacatagacttctgaataattcact

SEQ ID NO: 272538 - DNA, 397 bp, Glycine max
gggtaatgtcttcaagaacaagagagtctcggtggagcgcgtacacaaggcaaaggctgagaaggcaagagagaagaccttatctgaccagtttggggccaaacggactactaacacggcaagcagggaaaggaaaattgctaggagagaagagcgtttggctcaaggccctggagagaagccatcagcagccccaagtgctccatctgcaacagcatcccagccagcccaagcatcaaagaaatcaaagaagtgacatttttggagattggaaggaagggcattgaatattcaatgtggctgacatcctgagttacgtggcatatgtatttttgacagattgtctcggtttcttaaaccttgttagtttcattcgaaatttaagttgtacatctgc

SEQ ID NO: 272539 - DNA, 411 bp, Glycine max
agacagtgtccaacctgcaaaggtacaagtagtggggtggccaccaattagatctttgaggaagaacattctgcaacaacagaagaaggtggagcagcagggtgatggaagtggaacgtatttgaaagtgagcatggctggtgcaccttacttgaggaagatagatctgaaggtttacaatagctacccagaactcctcatggccttgaaaaatttgttcaagtgcacatttggtgaatattcagagagggaaggttacaatggatctgaatacgctcctacttatgaagacaaggatggtgactggatgctggttggagatgttccatggaacatgtttgtatcctcctgcaagaggctgaaaataatcaaaggatcagaagcaaaggggttgggttgtttgtgaccaac

SEQ ID NO: 272540 - DNA, 354 bp, Glycine max
tctgctattcatagaccttttcaatacattggactgaccactgttagcctagtcagcctgtagagcggtccttgaaggatttgaagctcaaggaagtgtataaagggaagttgactatgttgtcaatcttgggttactttgttcaagctcttgtcacaggtgttggcccataccatacccttctagatcatttggctgaccccgtgcacaacaacatcttgaccaatctcatatttcactgaatgtattatatgttattttacatattctttacgttgccaaaactcatctatgtttctacctttctatatcatggggacattttgttccctgatggggcgctttaagaaatga

SEQ ID NO: 272541 - DNA, 206 bp, Glycine max
gtacttaaactacagttccatttgtttttgctttttgagatttcatcatcctgtatttttggtttctgttttcggacttcaatggaaattaatggatgagaactaatgaataagctattgtgttgtgttgctttgcttcaaaaaaaaaaaacgattgaaaagcataaatataccataaacattgtaaatattcaagcaattaatgg

SEQ ID NO: 272542 - DNA, 330 bp, Glycine max
cctccgcaagaccgtcgacggcactgacagagtcggcttcgctcagttcctcggggtcatgggagtggcgtgcaagattccgatgagggaggcgatgacgctggcggtgctcatgaacactaaaggattggtggagctcatcgtcctcaacattgggaaggaaaaaaaggtgttaaacgatgaaatgtttgccattttggttcttatggctctattcaccaccttcattacaaccccaatagtgttgtccatctataaaaacactaatgacatatcctttcatcaaaccctgagaaaactaggtgaccttgacactaatggataagccac

SEQ ID NO: 272543 - DNA, 396 bp, Glycine max
  unsure (1)..(396): unsure at all n locations
cagcattgttcatgttcacatgccgtgggattttaggctactccacccagctcccattgcctcaggggtttttgggctcgggtgtggacttccctgttgggaacgtgtcttttttcttgtttttttctgggcacgttgcagggtcagtgattgcttcattggacatgaggaggatgcagaggtgggaactggcttggacttttgatgtgctcaatgttttgcaagctgtgaggttgctgggtacaagaggccattacactattgatttggccgtangggttggtgctggaattctctttgattctttagctggcaagtacgaagatagcaaaaggaatggtgctcttaaacacaatttgattgcgtgaacaatgtggatatagcttaaaaaattta

SEQ ID NO: 272544 - DNA, 215 bp, Glycine max
ctttaccattcaattataattcactttagattatgttctgcatcaaatttcacgcggacagtgactctgtacatagggctatattatcgatgcactgtattagtattcaaattccaaatggctaacatattcgattgctgttagtattcaaggttctgtagatcatgtgacaatgcaccagcaatatttgcatttgtgacatattcacatgctat

SEQ ID NO: 272545 - DNA, 380 bp, Glycine max
cccacgcgtccgagaagatgaaagcaatgcctatgattgacagcgagggatttatgtgtggggctaacttcaatgttgactctcagacaaagatccaagtgatgcctcgtgttggaagtgaagctaattgggccacatggagctaacaaacttgactgatttaatcatagcccaacttttttttaaaacccttttctaagtggttaagagtacacaacttaatatgatggtgctgactctgcttttaggcttcagctcttttgggttatgtagtttttctcgtttggttccattgatctgtacatattcatgcttcaatgttgaacatgactatggtaatttctaatatcaataataagaagtttcagttttttgctttt

SEQ ID NO: 272546 - DNA, 328 bp, Glycine max
gatggatcggctgggtgggtcggagctacctgattgcgatcagggacgagaagaaacccggcatgaacgagatcatcatcgatgttcctctggcttctcgcttgctcttcaggggtttcagctggcccgttgctgcctacagagaactcatcaacggcgacctcattgccaaggatgtctagataagagagggtggatggctacattggaggaaagcctggagaatttgtatgtggatgggatctttacgcgctctttttgtaattactttttttataaatggtacatgatatgatgtaatctaatgcatgtgaaccacaatcaacct

SEQ ID NO: 272547 - DNA, 399 bp, Glycine max
cccacgcgtccgggaacaattcgagtcttcttgttatctctcgcagcgtttccagccaatggcaaaacctcagcagcgagatattcgagaacggcggcgaggtagacgggggctccggcgccgacgcgctcggcgtactttccggccttgaggaacctggcgatacgaccgacggggaattggaggccggctttgctgctccttgaggtggccttcttagcggcgctggatcctagggttttgcctctacccgccattgatgaagtgtgacctagtgatcggcggtgttatgcctaacattcacaaccttcttcttcccaagaaggctgggggctcatccaagggtgctgctgctgacgatgactcttaaatagggattcactgttcacaaagttcttg

SEQ ID NO: 272548 - DNA, 351 bp, Glycine max
gcacttttcagttacaaagcatttcattgttttacaatatacaacactacaatggctgcttgaacaatggctctctcttcatcatcattggctggccaagctatcaagcttgccccctccacccctcagcttggtgttggaagggttagcatgagaaaaacagcctccaagactgttacctcaggaagcccatggtacggcccagatcgtgtcaagtacttgggcccattctctggtgagcccccatcctacctcactggtgaattcccaagtgactattgttgggacactgctgggctttctgctgacccagagacctttgccaaaaaccgtgaactggaagtcattcac

SEQ ID NO: 272549 - DNA, 469 bp, Glycine max
ctcattaattgcaagaatggcacttcgttgcttggtgatgtccctttctgttctcttcacgcttggtcttgcgagagaaagccatgccagagacgaagatttttggcatgctgtttggccaaacactcccattccaagttcattgcgagatcttctaaagcctggccctgcaagtgttgaaatcgatgatcaccctatgcaaattgaagaaacacagtacccgaaaaccttcttctataaagaagaccttcatccaggcaaaacaatgaaagtacaattcagcaagcctccctttcaacaaccatggggtgttggtacatggttaaaggaaattaaagacactactaaagaaggatatagttttgaagagctatgcatcaagaaagaagccattgaaggagaagagaagttttgtgcaaaatccttgggaacagtaattggttttgccatttcaaagctgggaaagaac

SEQ ID NO: 272550 - DNA, 227 bp, Glycine max
acgcgtccgcccacgcgttcggtcagaactactctgattagctaactagacttagctagcaaatggggcagcgtgctcgctcctcttgagccgcttaaacggttcaaaaatcacgccaatgagaggcaccgcttaggcacaaaccctgatgaagctgcttgcaagtccttcattcaaaaagctcacagaaacatagcacgttgggtgtatctgagcacccttaacac

SEQ ID NO: 272551 - DNA, 413 bp, Glycine max
gcagaggagaattgccttctagaagcgttatctcgcagagatgggtactgtttgtctgcttaggaagtttctgtgctggaatgctcttcactaccaggatatggaccatacctgaaaacaacaaaggactagcacgaccaacagcctcagaagctgaaaaattgagtttagtttctgaaggttgcaattcgagaattttgcaagagatggaaatgaagcgcgataaagacatttatggtgaagttttcaagagtcataattccatacaaacattggacaagactatttcgaacttagagatggaattggctgctgctagggtaactcaggaatctctacgaagtggtgctcctatttcagatgatataaggttgagtgaatcttcttcgggtaagagaaagtaccttatggtc

SEQ ID NO: 272552 - DNA, 426 bp, Glycine max
  unsure (1)..(426): unsure at all n locations
ctttgttcactcttcttctcttgcggcttttgttttagcgcagcttcttctaggtttaaggaagatgggtaaggaaaaggttcacatcagtattgtggtcattggccatgtcgactctgggaaatccactaccactggtcacctgatttacaagcttggaggcattgacaagcgtgttattgagaggtttgagaaggaagctgctgagatgaacaagaggtctttcaagtatgcctgggtgctggacaaacttaaggctgagcgtgaaagaggaatcaccattgatattgctntgtggaagtttgaaacaacaaagtattattgcacagttattgatgcgcctggacatagggatttcattaagaatatgattactgngacatcccaagctgactgtgctgttcttatcattgattcgaccactgg

SEQ ID NO: 272553 - DNA, 369 bp, Glycine max
tggctgtgcgggataagttgttgattgccgggggttttcaaggagaacttatttgcaagtgtgtagatcgacctggtgttagcttttgttctagaactacttatgatgacaatgcaataacaaatgctgttgagatttatgatcatccaagtggggctgttcatttcatggcttcaaataatgactgtggagttagagactttgacatggaaagatttcagctttccaagcatttctccttctcatggcccgtaaatcacacttcattgagcccagatgggaaactggttgtgattggtggagacaacccataagggatactaatggatttctaaactggaaagactgtcaaggccttatgtggacact

SEQ ID NO: 272554 - DNA, 411 bp, Glycine max
gcagggtggcctcagtcacacgtgcagggttcacagttagagcacaacaacaacaagtgagtggtgaggtacaaagcagccgtagggcagtgctttcacttgttgctgctggtttggccactggctcttttgttcaagctgtgcttgctgatgccaaatctatcaaagttggaccacctcccccaccttctggtggattgcctggaacgttgaactcagatgaagcaagagaccttcagctgccattgaaagataggttcttccttcaaccattgtctcctactgaggctgcacaaagggcaaaggaatcagccaaggagattgttggtgttaagaagttgattgaaaagaaggcttggccatatgttcagaatgatctgcgtctcaaggctgagtatttgcgctttgatc

SEQ ID NO: 272555 - DNA, 273 bp, Glycine max
cgttctttgagatgagagtcttgatgaatagtaccattctgatgtattgcttggctggaaagttaatgcatgcttcttatcttctgtctaaaaaaaaaaaaaaaaaaaaaaaaaaaaaaaaaaaaaaaaaaaaaaaaaaaaaaaaaaaaaaaaaaaaaaaaaaaaaaataaaaaaaaaaaaaaaaaaaaaaataaaaaaaaaggtcatcctctttaaagaaacaaatctaaataacactttcttaaaatataaataattttatttttaataaa

SEQ ID NO: 272556 - DNA, 388 bp, Glycine max
ctttcatataaaaaaaaaaaaaaaaaaaaatttaaaaaaaaaaaaaaaaaaaaaaaaaaaaaggaaaaaggaaaaaaaaaaaaaaaaaaaaaaaaaccccacgcttcccccaacccttccccttgagggaaagaacctttttttccttcccttaaaaaaactttttcgaacccccccggcctttgtggcccttattttctttattcgaccaaaagggggaaacccctggaaccgggtttaatatttccatattccggaattaccgttccaaaattctttccaacttttcaaacttttgaaacgttttcttaaagctcctaaattttcgcctaattcaatcggttttttcgggtatttccaaggttttttcctttaaattaaaggggtt

SEQ ID NO: 272557 - DNA, 429 bp, Glycine max
  unsure (1)..(429): unsure at all n locations
aagaaacagaaacttttttctttgataattttgttctttgttccgacaatgcgtccaccgcggaagagggtggatttctcgcgcggcgacaaggtggagatctgcagcaacgaggagggcttcctcggctcctactacccggccacggtcgtgtcgcgcctcgacaacggcctctacgtcgtacgctacgacacgctcctcgaggacgacgcctcgttccagcccctcaccgaaaccctatttccgaaagagctccgtccccatccgccacgtgtccccaggacccacttcgcgctccaccagtgcgtcgacgccttcgacaacgacggctggtggctcggccagatcaccggcaagaaagacggcgagcattactatgtttacttttccaccaccaatgaagagatngcgtatcatgtntctggaata

SEQ ID NO: 272558 - DNA, 403 bp, Glycine max
ccaatatattccattctctctgtgtatttccctacctctcccttcaagatgcagatcttcggcaagaccctcaccggcaagaccatcacccttgaggtggaaagctctgacaccatcgacaacgtcaaggccaagatccaggacaaggaaggaatccccccggaccagcaacgtctcattttcgccggaaagcaacttgaggactgccgtacccttgctgactacaacattcagaaggagagtactcttcacctcgtacttcgtcttcgtggtggcatgcacatcttcgttaagacactcaccggcaagaccataaccctagaggttgaaagctccgacaccatcgataacgtcaaagccaagatccaggacaaggagggtatccccccggaccagcaacgtc

SEQ ID NO: 272559 - DNA, 301 bp, Glycine max
  unsure (1)..(301): unsure at all n locations
cccacgcattcgattgcatatgcgaatgatttaccatgtacctgccatatgcatacacacggcaagagtctgatcgagtagaccatcaaccatgatagcgactgctcttacaacatcnacatcaaagatgataagatccaggacccgctaaggctacccctgtacgagaatcgtttatattgcttcggaaagctgcttgaccactggctgtaccctagactactactgcctccacaaggatagatgtctctaactcgtcctccgtcgccgcaaatacatgcagatcctaatggatacactt

SEQ ID NO: 272560 - DNA, 274 bp, Glycine max
aaaaaaaaaaaagacaactcactgtattcgttataaaaaggaaaaaaaaaaaaaaagggaaaggaaaaaaaagaaaaaggaaaaggaaaaaaaaaaaaaaaaaaaaaaaaagaaaaaaaaaaggacaacaaaaataaaggatgaagctaagataaagacaagtacgaagatatagccaatatataggataaagaaagtaaattgaaaaagctcaccaaataaaaggacaaggctggaaaaacataggtgaaaccaaaaagaagttatttgaagt

SEQ ID NO: 272561 - DNA, 358 bp, Glycine max
gacactcgtacagacagtcgcacatttacattttgcaaatctcaactctggcaagggctacgatcaatttgctgaggggactggacttaccaacgcctattcatgtctacacttgaagaaactatcttatctgaaatccacaaatgcatctctacttaaatctattctcccggctctgtatttctaccttcaatctgatataactagactctctatgagagcttatctatcctattctcatatatgaccccactttgtatatgttgaattaaactgttatgcatctttacgtagagtgtctcagacataattcttgtggaatctggtgatggtatcatcgtatcaatagatttttact

SEQ ID NO: 272562 - DNA, 260 bp, Glycine max
cccacgcgtccgcaaatacggtgcttatgtttatggttacagtactatctacgaggccaaggactggtctccaaccggtgatgtctacgctgacggtacgactggcttgcctatctggactgtgactctacttggtcttcttgctggtggtgcacttcttgtctacaacacaagtgcttatggcacaataaactttgcaaatttatgttttaagcttaaacttagtctcatgaactatctattaatgaataagtattcat

SEQ ID NO: 272563 - DNA, 372 bp, Glycine max
cttacgcctccgatcaataaaaattacttattatcatgaaagataatcaaaatgcaagttctctaaccacataaagccgtcctggaaagcaaattcagatcgagcatgctttgactgactgtcgaatctcgacaaacgtattttggaattaaagctacaaatggactcgacattgctaccgaaaagaaattgccatctatatctgatgatgaagcatcaatccaaaaaattcagctattaacaccaaatatacgtgtcgtatatagaggcatgtttcctaattttcgactttaggatcagaaaaacatgaaacaagcctatcagtatcaccagtttatataaataaccaaatcctgacactcaactttacat

SEQ ID NO: 272564 - DNA, 452 bp, Glycine max
  unsure (1)..(452): unsure at all n locations
cccacgcgtccgtgcaaaaatggcatcatttaccatgacagcttgcatccttggcggcccagccgtgaccaaccggttggcagtagcaacgcagaggagatcactcgtagtgaatgctgccaaagctgttgaagcggaaaaggtcagttatgacaatgacatggatggtagcaatggaaggaggaacttgatgttcgccgcggcggcggcggctgctgtttgctctgttgctgggatggcagtggcagatgagccaaaaccaggaaccccagcagccaagaaaaagtatgctccgatttgtgtcaccatgccaactgctaggatttgtcgcaattgagggactcggtttttattttacttctgatgatcggaaatgtgcattangggtgtagtaatgttttgattcacatgatccttactggactagatgttcataaaactatcgactttgc

SEQ ID NO: 272565 - DNA, 410 bp, Glycine max
cccacgcgtccgtgcaaaaatggcatcattttccatttcagcttccatccttggcggcccaggcttggccaaccggttggcagtagcagcgcataggagatcactcgtagtgaatgctgccaaagctgttgaagctgaaaaggtcagttatgacaatgacatggattgtagcaatggaaggatgaacttgatgattctcgcttcggcttcggctgcttgttgctctgttgctggtatttcattgtcagatgagccaataccaggaaccttatcttccaagaaaaagttttcttcgaattgtgtcaccatgccaactgctaggatttgtcgcaatttagggactcgggttttattttacttactgatgatcataaatgtgcattagggttgtagtaatgttttgatttcac

SEQ ID NO: 272566 - DNA, 340 bp, Glycine max
aacacgcgtacgaagccaagctgtgactgctgtttgaggtagcttgcatggggttcttgagggaaaaagccctaggttacagcaatgatcgtcatcattctgtagctagacaaagtcagtactaacattgatgagagaactcaagttgcttatggatccaagaatgagatcatcctgtttgaagaaaccctgtatggtaaatgcaggctcaaggatggggtagctgttggatcatctgcttaatccgatgaacctgcgattcattgactatgctatctgctattagaataaaagctatgtgctatatcttgagacaagtacctgcaactgagtcacatat

SEQ ID NO: 272567 - DNA, 349 bp, Glycine max
gccgaacggcctcacacactttgaggctgttgatacacgtgccaaggagtatgtgagcctggtcaaatccaatgaccctgtgggattcaacattgtagatgtctaggcttgaagctccattggccatgttgttgcttactacatcttgtccaccactagcgatggctatgaccctgcattctttgtctgatttaatttcatcatcatgttgttccaactgtgtttcttgcgtactttttagtatgtaatgtaatcaatggcatgatgtatatattctcttttaatattcatcgatttcatcatatgctaatttgatcactattaccggctgcaaataggtttgctatta

SEQ ID NO: 272568 - DNA, 383 bp, Glycine max
  unsure (1)..(383): unsure at all n locations
ntccgccacgcgtccgaagccaagctgagactgttgtttgaggtagctccgttggggttcttgattgaaaaagccggaggttacagcagtgatggtcatcagtctgtgctagacaaagtcatcactaacattgatgagagaactcaagttgcttatggatccaagaatgagatcatccggtttgaagaaaccctgtatggtaaatccaggctcaaggatggtgtagcttgtggagcagctgcttaatctgtaaacctgcaattcatggtctattttatctgcttttagaaaaaaagatatatgctatatcttcagacaagtaccttgcaattagtcacatatttctgntaatcactataataaccaaagtaaattatgttggt

SEQ ID NO: 272569 - DNA, 278 bp, Glycine max
cccacgcgtccgcccacgcgtccggttttgtacaacagttttattgagctgaaacaagtgtgtctccaaaagtgctgctatctttccatgacaattatttttttattcataaaagtggttacttaagattaaaaaaaaaaaataatattacaaaaaaaaaaataaatttaaattaataataaaataatatatattagatttaaattaaaaattaatatataaaaaaaataaataaattatatattgttaaaaaaaaaaaaaaaggggcgtccctttta

SEQ ID NO: 272570 - DNA, 440 bp, Glycine max
cttcccttcactctcagttctgccacatattaacattccggcgcaaaatgaaggtcatcgccgcctacttgctcgccgttttgggaggcaacgcagccccttccgccgatgacttgagggacatccttggctccgttggagctgacgcgaacgatgacaacatcagcaacttcttgtctgaagttaagggcaaagacattgtggagcttatcgcctccggtagggaaaagctggccttcgtgccttctggcggtggcgccgccgttgccgttgctgccgctcccggcggtggccctgctgcaccggctgccgccgaatcgaagaaggaggaaaaggttgaagagaaggaggaatcggatgacgatatgggattcagtctctttgattaattgttagggtttttaaacccttggtcgggacatattgtcgaattagagttc

SEQ ID NO: 272571 - DNA, 411 bp, Glycine max
taactaagcatatatagcgtgtaatacagtttgaaaaaaagtgttgtgtagagagaaatggctaggtggtgcatcttggtggttcttgcccttgtcgtggttgcaagtgccagaaacatgcccaatgacgcatgtttggaggaccagaagaacttcctcgggtatgggttctctggagttggcaacaatgggcttccctttggaggagtgggttctggttttgatggtaatatgggtggaccttctgggctcggtggatttgtatgattctgtgagcctagcgatctcggaagtcttggcaacggtgaatggcccaaccttactttgccttgagagttgagaccacacaccttcttgtttcttaattttggtcgctattatcatatcctatatagtgtttcttttactgtt

SEQ ID NO: 272572 - DNA, 455 bp, Glycine max
cccacgcgtccggtctgaggttgaagctactctcaacttgaatgccatgaaccagtctcgggacccgtggcacgtgtcgttctcgtatgccagagccctccaaaacactgccttgaagacatggggaggccgcccagagaacgtgaaggcggcacatgatgcactccttttccgtgccaagtccaactcgctcgcccagcttgtgaagtacaccggtgagggtgaatcctaggaagccaagaaggagttgttctgcaaaggctactcctactaagatgtatgtaaggaatatgatacatgttaggcagcagcaacaccagcaggtatagtaggtggtgacggaagatgaagtggaagaagactaatttgtctaaaatgtaatgcttttatagtcttggagactatttgcgtttattgttacatgtacctttacagcttataatacctttgctgtg

SEQ ID NO: 272573 - DNA, 475 bp, Glycine max
gggtgggatgggttttatccagtccaaccactcagtcattatgtacaacaacaccatgatgagcttcaacatgattgaggctgccaggatcaatggtgttaagaggtttttttatgcctctagtgcttgtatctatcctgaattcaaacagttggagacaaatgtgagtttgaaggagtctgatgcctggcctgctgagccacaagatgcatatgggctggagaagcttgcaacagaagagttatgcaagcattataacaaggattttggaattgagtgccggattgggagattccataacatatatggtccttatgggacatggaagggtggaagggagaaggctcctgctgctttttgtcgcaagacacttacttccaaagatcgatttgagatgtggggagatggattgcaaacaagatccttcaccttcattgatgagtgtgttgaaggtgtactgagattgactaaatca

SEQ ID NO: 272574 - DNA, 394 bp, Glycine max
gacacgcgtgagtccgtgtatgatccatgttgttttttcagagaggacaccgtgaggcgtgcgaatcactcatactaacacaatcgcagactagtatgcatagttgactgtcgtactgcaattggtttcgtcgtgatgggattcgtcggtttcttcgtgaagctcattttcattccaattaacaacatcattgtcagatctggttatgatgaagggaactactatcgcatcataacttacgttgtcaagcataaggatgtagacagataacctacatcaatagatcattttatgcacctaatcttagtgctaaacccatgggggctccaacttatatctggaagcgttaatttagatgttaaaagttatttatcctctgttagaccttgacaca

SEQ ID NO: 272575 - DNA, 412 bp, Glycine max
catgcccatttttcacaccaccaacactttatgtttctccacattgtgttcctccttggcctgctctcatccacttcccatgccactgtccaagacttctgtgtggcagacctcaaaggtgcagacacccctgcaggctacccctgcaagccacctgctaatgtcacttcagatgactttgtgtacactggcttagctgaagctgcaaatgtcacaaacataatcaatgctgctgtgaccccagcttttgttgctcaattcccaggtctcaatggccttgaactatctgcagcaaggttggaccttggtcctagtggtgttatcccactccacactcatcccggtgccaatgaactactcattgtgcttcaaggtcacatccttgctggattcatatcttcaggtaacatat

SEQ ID NO: 272576 - DNA, 414 bp, Glycine max
cccacgcgtccggcgaagggaatggtgccttgggaattagaatggctctccttggatcaaagataacaagcgaggttggactccgtttgctcctttgtcctcttggttccaacgttgtaattagaacagcatgctgtactgtgggagttgctttgcctgtgtactctacgttcaaggcaatagaaagtaaagatcaagatgctcagcataagtgtcttctctactgggcagcctatggttcattcagtctcgctgaagtgttcacggacaagcttatttcttggtgtcctatctactatcacctgaagtttgcatttcttgtttggcttcaacttgcatctaccagtggtgcaaaacaaatatatgcaaaccacttgcgccccttcttgttgaggcatcaagcacgagttgatc

SEQ ID NO: 272577 - DNA, 359 bp, Glycine max
aaaagcaagagatccccggaaaaattatttgtacttttggacatgtatgaaataatgcaagaacttcattcagagattgaaactctttttaaaggcaaagcttgctctgcaataagagaagctgcaactagtttgacaaaacgccttgcacaaacagcccaggagacctttggagattttgaagaggcagttgagaaagatgctacgaagactgcagtaacagatggaactgtccatcctctaacaagctatgtaattaactatgtgaagtttttatttgactaccaatccaccttgaagcaactttttcagaaatttgaaggtggtgaggaatcttcacagctagcatctgtgacagt

SEQ ID NO: 272578 - DNA, 423 bp, Glycine max
cccacgcgtccggaaaaaatggcggtgcctcttctctcgaagaagatcgtgaagaagaggctgaagaagttcaagaggcctcaaagtgacaggaagatttctgtgaagacaaactggcgcagaccaaagggtatcgattcccgtgttaggagaaagttcaagggatgcactttgatgccgaacattggttatgcttcagacaagaagacccgtcactatctcccgaatggtttcaagaaatttgctgttcacaatgtgaaggatttggaactgctcatgatgcacaacaggacttactgtgctgagattgcccacaatatatccacaagaaagagaatagatatagtcgagagagccgtgcagcttgatgttggtgtgacaaataaaacggggcagattacgtagccaggatgatgaatagtc

SEQ ID NO: 272579 - DNA, 384 bp, Glycine max
tagagaatgatgatgaagtctgctatgtgtgcagtggtggttgtagcacttcttcttctggcggaggtggggcccatggctgaggctgtgacatgcaccccaacagagttgagtccgtgtcttccagcaatcacttccggtgctaaaccttccaatgcttgttgcacgaagctgaagcagcaaaaaccatgcttatgtggctacctcaaaaacgctagcttgaagcagtatgttaactctcctaatgcccgaaaaaccgttgcttcttgtgggattccctttccaacttgttaattaattaagccttcttataattaaagtgtgggatatatatatatatatatatatatatatatatatataaacaggtgtaattatacacac

SEQ ID NO: 272580 - DNA, 463 bp, Glycine max
cggacgcgtgggtagccatgttcgatccaatatccagcactggtgtcttgagaggatgagtagcgagaggaaagtgaagcaaagaacgatgagtaccaacagaagaagagagtaatggagttccctgattagtttccaaaatcaacaatacaaaaccacacaaatttcattcatatgttatcaaagccaagtgatgtacctattggaaggtgttgagggatgccaaaatggagcctctaatccagacactgtacttcctctttggtggtgccaccaccttaattttcatgctgcttggtgctaatgttgtgatctccttgctcatcctatcagcaatgccacggaacattgttgagccatcaccacaatgttaccatagaggtccttcttgatgtcagtatttccaaaatgattttctaaagcattggcagatgcaagaaagtctaccaaactcttcaacagc

SEQ ID NO: 272581 - DNA, 238 bp, Glycine max
cccacgcgtccggtaaagcctgatctccgttataaggtgctccccgctgtcatgggtcgggagcgcaagccgtggggcctaaaggactgtgtttacatgtacttcgaagataatgctggggtcatagtgaatcccaatggtgaaatgaaaggttctggtatcactggtactattgtgaaggcgtgtgctgatctgtagcccaagattgcaagtgctgcaaatgctattggttaagctg

SEQ ID NO: 272582 - DNA, 276 bp, Glycine max
  unsure (1)..(276): unsure at all n locations
cacacacatagaaactcaacaactagaatgtatatgatgattcttacccacttgttcaaggtcaatttatctgtgctatcaatttctcacgcttccgtagtagactattgcgttgcttactacacatgccccgttggcctggcaacgtgctcatgcatgagcaccgctaaggtcacggatgaccacttcatctacttgggccttggcaccgccgggaacaccanatacatcatcaaagccgatgagactgactccttcgacgcgcaattcaacggc

SEQ ID NO: 272583 - DNA, 416 bp, Glycine max
cccacgcgtccgggcaaaggaatcagccaaggattttgttggcgttaagaagttgatggaaaagaaggcttggccatatgttcagaatgatctgcgtctcagggccgagtatctgcgctttgatctcaacactgtcattgctgcaaagcctaaggatgagaagaaatcactcaaggaactcactggcaagctcttccaggatatcagcaatctggatcatgcagcaaaaattaagagcagcccggaagcagagaagtactatgctgctactgtatcttctctgaacgatgtccttgccaaacttggttaatgtgattaatttcttgctttcttgtgtaagctttgtgcatgattttctcagacactttattgactgatattttaagaaaatcaaatgatgagggaaaattttctat

SEQ ID NO: 272584 - DNA, 305 bp, Glycine max
  unsure (1)..(305): unsure at all n locations
acgctggatacctatgcacccaaaaattaggtttttncatctaagcgacaaaatgcgtaggggaatttaaaataagcgtacatcctgagattcccgatatacgtcaacctttccaactgctgctgaatccacgggcatgcaagagacaacctgctgaacttacacatattacttgccacacttaatgcactctcactcaatcttcttcgcagaggaaccgaaaacactctgtctcaaccatgaaaactttctcttccgagatctatacaactgcctcactgctagactacgcactttaaaatgct

SEQ ID NO: 272585 - DNA, 459 bp, Glycine max
tgcaattttgcctaaagaatattcaattgattccgttatcaggtcattacaagtgggctctagatcaactgttctacaagcataacttcagtcgtgtaatcatccttgaagatgacatggaaatagcacctgatttctttgattattttgaagctgcagcgagtctccttgagaaggataaatccattatggctgtttcctcatggaatgacaatggacaaaagcagtttgtacatgatccatatgaactttatcgctctgacttctttcctggattaggatggatgctggccagatctacatggaatgagctatcaccaaaatggcctaaagcttactgggatgactggttgagacttaaagagaatcataaaggacgacagtttatccggcccgaagtatgcagaacatataattttggtgagcatggttctagtttgggacagttttttaagcaat

SEQ ID NO: 272586 - DNA, 451 bp, Glycine max
ggtgttcaacaaggaacatcccgacaacaaagcagtgtctgctgtgggcaaagctgctggagcaaaatggaagacgatgtctgatgctgaaaaagcaccttatgtggcaaagtctgagaaaaggaaagtggagtacgagaagaacatgagagcttataacaagaaacaggcggaaggtcctactggtggggatgaagaagaatctgagaagtctgtatctgaggtgaatgatgaggatgatgacgaggaaggcagtggcgaggaggaggatgacgattagagaatggactgatgataatagcatttatgtaggttctgatgattttgatcatccgtgtaggtggtctggtcatttccttataaacatatttctctttccaaaaaatatttccctgctcctccttccgtaaattgctcgtctttccaaaacgtgaatagtttaaagaaggga

SEQ ID NO: 272587 - DNA, 428 bp, Glycine max
cccacgcgtccggtgaagcccccgggttttctccctccaattcttaacccaccaagtacaccaacaccgtcgccggggaagggagggaacactccatgtccaccaccaaagtctcctgcacaggctacatgccccattgacacgctcaaactaggtgcttgtgtggatcttcttggtggcttggttcacattggcttgggagaccctgttgcgaaccagtgctgccccgtgcttcaaggcctggttgagcttgaagctgcggtgtgtctttgcaccactcttaagctgaagcttctcaacctcaacatttatgtcccacttgcccttcagcttcttgtggcttgtggcaagtctcctcctcctggttacacctgctccctctaaaccagtgaaaggattgaagaaaatatggtcaaaatcgacatgag

SEQ ID NO: 272588 - DNA, 425 bp, Glycine max
ctttctctctctttgtaacttgtaagcatggagtcctcaaagatctatgcttacctcttcctttgcatgctcttcctctcctccgccactcccattctcggttgtggctactgtggcaaaccccccaaaaagcacaagcctggtaaaacaccaaagacacccacagtacccgttgttaagccaccagtcacaatccctcccattgttaagccaccagtcacaatccctcccattgttaatccaccagtcacaatccctcccattgttaatccaccagtcacaatccctcccattgttaatccaccagtgacagttccacccgttgtgcttccaccaatagtgaagcccccgggttttctccctccaattcttaacccaccaagtacaccaacaccgtcgccggggaagggagggaacactccatg

SEQ ID NO: 272589 - DNA, 335 bp, Glycine max
gtcagaatcagaatcagaagaagcgagcaatgatgtcgggtcgtggaaagggaggcaagggtttgggtaagggaggagccaagaggcacaggaaggtgctccgcgataacatccagggaatcacaaaacccgccattcgccgtttggctcgcaaaggcggcgtcaagagaatcagtggcctcatctatgaagaaacccgcggcgtccttaagatcttcctcgagaacgttattcgcgacgctgttacctacaccgagcatgctaggaggaaaactgttaccgttatggatgttgtatatgctctcaagaggcagggcaggactctatatggtttc

SEQ ID NO: 272590 - DNA, 458 bp, Glycine max
gtttcaacctcatcgtcatcgtactactactacccacgttctgctcctttgcggatcgtgtccacaaaagatggcagacaatgaggatggaagggataagactactcgtgggaatgaatgggaggttgtatctctgacagcatcgacatatgcagctgctcctggtcctgatgaagttgagatgaaggatgatgggaacgaagatgtatatggacaagatgaaggagaaacgtcacatgctttatttatgtctcgtcactttgtctttcctcccagtcagcatgaaaacttgcctgtggaacctgactatggtgagattcatgatgattctggagacaaagatgttgcctctgaagagactcctgaaaaaaggaccataccaagtggaaaggatgaagaaaacttgacattaccaggattggaaagttcaaaggagtttgaaggcatgcggtattttg

SEQ ID NO: 272591 - DNA, 360 bp, Glycine max
ggcacctggattcaaagttgcaattttgggggctgctggaggaattggtcaatccctttctttgctgatgaagatgaacccattggtttcagttcttcatctttatgatgttgtcaacacccctggtgtcacagctgatgttagccacatggacactggtgctgaggttcgtggctttctggggcagcaacaacttgagagtgcactcactggcatggacttggtaatcatacctgctggggtgccaaggaaacctgggatgacaagagatgatttatttaaaataaatgctggaattgtgaggaccctttctgaaggaatttgccagtgctgtcccaatgcaattgtcaacttgattag

SEQ ID NO: 272592 - DNA, 461 bp, Glycine max
cccacgcgtccgcccacgcgtccgggcattgggtgttcctgctcttcccctgacatacgtggctcacgttctggcacttgttgccagcatcttggtcgtgctctgggtcctcaattttaggggtggcttggcttgggattctgataacaaggccctcatcttcaatcttcatccagttcttattgtcattggcttactagtccttgggggtgaagctattataagctacaaagcattacccctgaagaaggaagtgaagaaattgatacaccttgttttccatgccatcgcattaatacttggaatagttggaatttatactgcctttaagtatcacaatgaaagtgggattgccaatctctacagcttgcattcatggcttggaattgtggttattgtcctttattgcattcagtggatatatgggtttgggaatcttttcttttccttgggggacttcc

SEQ ID NO: 272593 - DNA, 374 bp, Glycine max
cccacgcgtccgctttccagttggcagcaagaggagcttttagggaaggaataagaaaagctggaccaaggatgcttgagcctataatgaaggttgaagttgttactcctgaagaacatctaggtgatgtaattggtgatctcaactcaagaagaggacagatcaacagttttggtgacaaacctggtggccttaaggtggttgatgccctggtacctcttgctgagatgttccagtatgtcagcacactcagagggatgacaaagggccgtgcatcctacacaatgcaattagccatgtttgatgtggtgcctcagcacattcagaaccaacttgccacacaagagcaagaagttgccgcttaatgtaattgc

SEQ ID NO: 272594 - DNA, 453 bp, Glycine max
cacgcaacgttcagaaaccaaatcggtttgagtcctcattacccgcctctctctggaaaccagcaaaaccacctttctctactatctatcggttccttttgtactctgagtgggtagaagacatggtgaggctcactgctgacttgatctggaaaagccctcatttcttcaacgcgattaaagagcgtgagttagatcttcgaggcaacaagatagctgtaattgagaacttgggtgctactgaggaccaattcgacacaatagacttatctgacaatgagattgtcaaacttgaaaatgtaccatatcttaaccgggtgggtacaatgctcattaacaacaacaggattactagaattaatcccaacattggagaagtctttgccaaattacacacttctaggtttacaaacaacagaattgtaacttggtataaattgatcctttagcatt

SEQ ID NO: 272595 - DNA, 443 bp, Glycine max
tcgcgccatacccctgagggtgctaaacttgaagctgagtggaatgccaagtttgcagaatatgagaagaaatacagtgaggaagctgcagagctgaaggctattattactggtgaattaccagctggttgggagaaagcactttcgacatacactccagaaagccctgctgatgctacaagaaatctgtctcagcaaaatctaaatgcccttgttaaggttcttcctggtctacttggtggcagtgcagatcttgcctcttccaacatgaccttgttgaaatcatacggagatttccaaaagaatactcccgaagagcgcaatgttagatttggtgttagagaacatggaatgggagcaatctgtaatggtattgctcttcatagccccggattcattccatactgtgcaactttctttgtcttcactgactacatgagagc

SEQ ID NO: 272596 - DNA, 428 bp, Glycine max
  unsure (1)..(428): unsure at all n locations
gtcgtctcttcctcttcgcaacaatggttgccgccaagaaaaccaagaagacccatgagagcatcaacaacaggcttgctcttgtcatgaagagcggcaaatacacccttggttataagaccgttctcaaatctcttaggagctccaaagggaaattgattatcattgctaacaactgcccccctttgagaaagtcagagattgaatactatgccatgttggcaaaggttggagttcatcattacaatgggaacaatgtggatttgggcactgcctgcggcaaatattacagagtgtgctgccttagcattattgatcctggtgattcggatatcattaagacactgcctggtgaacagtaaagtagtgttgaagttacttgcttgntattttctggttttagttgattcggactttgaaagaatatc

SEQ ID NO: 272597 - DNA, 461 bp, Glycine max
  unsure (1)..(461): unsure at all n locations
tccatggcgaacaatatagatcagactccaaaacagttaaccaacaagcttacttttatgccagagacctcgaagtccatcccaaggacacatttgtgttcagtatagatggcaccgtactctctaatattccatactacaaaaaacatggatatggggtggagaaatttaactcgaccttgtatgatgaatgggttaacaagggcaatgcaccggcactgcccgagactcttaagaattacaacaagctggtgtctcttggcttcaagattatattcttgtcaggaagaacactggacaaacaggccgtaacagaagcaaacttaaagaaggctggctaccacacatgggaaaaattaattctcaaggatccacangatccttccactccaaatgcagtttcatacaaaacagcagcgagagagaaactgataaggcagggatacaacatntgtgggatc

SEQ ID NO: 272598 - DNA, 453 bp, Glycine max
tccacgcgtccggtaatttccccctagccaccaccaatggccaacaaagagatggaagttgtgaagggtttggatttgcaaaggtacatggggcgttggtatgagatagcctctttcccttcaaggaatcagcccaaggatggtgagaacaccagagccacatacactcttaggaatgatggtactgtgcaagtgctcaacgagacttggagtaatggcaagagagggtacatacaaggaactgcttataaggttgaccccaaaagtgatgaggccaagttcaaggtcaagttttatattcctcccttcttgcccattatacctataaatggggactactgggttttgttcactgatgatgaatatcagtatgctttgattggccaaccaagcaggaattacctttggatattaagcaggaaaccccatctggatgatgagatctacaacgag

SEQ ID NO: 272599 - DNA, 355 bp, Glycine max
tccacgcgtccgcccacgcgtccgtataactccaaggaaataagccacataccgctgaatcttttttgctttctctccttcgcactttcttactcttccttgtgattggtgattgcattactgggagaaactgtgacacagaacatgagagagataattcgtattcatattggacaagctgcaattgaggtggagaattcatgctgggagttgtattgccttgagcatggaattaaccctgatggcaccatgcctagtgataccttagtaggtgtatcacatgatgctttcaacaccttcttcagcgagacgggatccggctagcatgtgccaagggctttatttgttgatctgg

SEQ ID NO: 272600 - DNA, 399 bp, Glycine max
gccgctcctggtgtgggtgccttggtgggctcagctgggatgatctcatcaattgataggcttcctctaatatcctgggcttcttgaggtcgtatgcattggctacactgggtggtttgcttacaagaacttcgttttcaagccagacagggaagcttttctacgaaaggtaaaggaaacatatagcgaaatacttggaagcagctaaaagagtgaggaattgatgcttagattctgttcacacaaaagagatctgtctttcagtattttattgaagatgcaaccttgtcgcaataagcttcctgaccatactttatcgcatgtgatgtaatctaacctgataataaatgtaacttttgtaataatcattctacttcaagtagatattatttttttaat

SEQ ID NO: 272601 - DNA, 423 bp, Glycine max
cccacgcgtccgcccacgcgtccgcgcagctaccctgaggcttctcttctcttctcttctctgtcgtgagtcaccatggtgagggttagtgtgctgaacgatgctctgaagagcatgtacaatgctgagaaaaggggaaagcgccaagtcatgattaggccatcctccaaagtcattatcaaattccttttggtgatgcaaaagcacggatacatcggagagtttgagtatgttgatgaccacagggctggtaaaatcgtggttgaattgaacggtagactgaacaagtgtggggttattagtccccgttttgatgtgggcgtcaaagagattgaaggttggactgctaggcttctcccctcaagactgtttgggtatattgtattgactacctctgctggcatcatggatcatgaaaaggct

SEQ ID NO: 272602 - DNA, 302 bp, Glycine max
cggacgcgtgggtgacttttttgaaataaatcaaacatatggagtttttgtaacgataattggtatctttattacactagctaaaacttatttattcttattcctttctatcgcaacaagatggactttgcctaggctaagaatagatcaattattaaatcttgggtggaaatttcttttacccatttctctcggcaatctattattaacaacttcgtctcaactgttttcactgtaaaaaaaagtggaccttatatattcataacttgtgtcaaacaaaagaaaaataataatattaaaaa

SEQ ID NO: 272603 - DNA, 448 bp, Glycine max
caaataccaatccaatcctctcccaacttacaaagccatgtctccaggtcccgttgtcgacgcttcccctgaggttgatgcagagcaacaacttccctccctcgatgacgccactcagaagaagataccccaaccacaggaggacgatgctccccttgtcgaggacttgaaggatgatgacaaagacgacgacgatgaagacgacgacgacgacgacgaagatgacaaggaagacgatgctcaaggtggtgctgagggttcaaagcagagcagaagtgagaagaagagccgaaaagcaatgttgaagctgggactgaaacctgttactggtgttagtagggtcacaatcaagagaacaaaaaatattcttttcttcatctcaaaacccgatgtcttcaagagtccaaattctgagacctatgtcatatttggggaggcgaaaatagag

SEQ ID NO: 272604 - DNA, 416 bp, Glycine max
gtcaactcaaacttctggcactttgacagatcgaccacgctagaagaatggacgactggctgaccagtggaggttgtcatgagaggctgaggctttgattaatggggcctatccaggtcggattgcaaatcaagctcataacggttccgcacatgccgtaggggaccctaatgacttatggactggcctatatctttctgtgtgtcagagatatcatcatgatccgactgcatctgtaggaggtgcatctagtacttacttgtacacatccactccaacttttgaggctcagttaagcttgcatctgggacgtgtgagaccttcctatgatggattgcatatggtggcttgaagttactcttctagacatacaatgccatagaccactgttggctggcagagcaatgatagacatg

SEQ ID NO: 272605 - DNA, 400 bp, Glycine max
  unsure (1)..(400): unsure at all n locations
ccttatggaattaatggtggcatggctttgagggatggaactgatgcatctggcaggaaaggaaagggaaagggtgtttaccagtttgtagacaaatacggtgctaatgtcgatggttacagtcctatctacgacaccaaggactggtctccaaccggtgatgtctacgctggcggtacgactggcttggctatctgggctgtgactctacttggtcttttagctggtggtgcacttcttgtctacaacacaagtgctttggttcaatagactntgcaaatcgatgtttaagttataacatagtccatgtaactatctaaaaatgaagaactattcgtgaagtactttgtggatatgttccttctggtctataaatgagtggatgtgaaaaaactttttt

SEQ ID NO: 272606 - DNA, 445 bp, Glycine max
attttaattctcagatccaagcttgggagacagagaaagagaaagagaatggacgccattgattctgtgttcgatccgctgagagaattcgcaaaggacagcgtgaggctcgtgaagcgctgccacaaacccgatcgcaaagaattctccaaggttgccgtccgtactgcaattggtttcgtcgtgatgggattcgtcggtttcttcgtgaagctcattttcattccaattaacaacatcattgtcggatctggttaggatgaagggaactacaattgcctcagaattcaggttgtcaagcaaaaggaggtagacagagttcccacatcaatagatcattttatgcccccaatcttagttctgttttcatttttgatttttcttatatctggaagcgttactttagatgtaaaattttatttatcctttggtagaccttgacaca

SEQ ID NO: 272607 - DNA, 329 bp, Glycine max
cccacgcgtccgcccacgcgtccgcccacgcgtccgacaatttccaaccatcacgaaaagtctttcccgttcttgatcaggatctcaattttcttccttatgaagactatgagtctgagtcaccggacaatgagacagatgttgaaagctcaccaggttttctagtgaagaaaaagagggcacccagtgatcttgtagcaaaaatttctttatcagatttggtgaagtactttggtatgccaattgtagaagcatcaagaaatctaaatgttgtgcttactgttctaaagagaaagtgcacagaatttgggattcctcgcttgcctcat

SEQ ID NO: 272608 - DNA, 423 bp, Glycine max
ggtgtgggtgtttgaatctggtgaaggatgtcaattgttccaatcaaccagggtgatgccaacggctccaaccccttcgcttcgtggggtcaattcgtggattttcctctccctccttccatctccggcttcttccccggcttggaattcggattcggattcggatcatccgtgaacacacgtgtggactggagggagactcccagagcgcacgtgtggaagctggtgcttcccggcttctccaacgaggacgtgctggttgagctccaagacgagagggtgctccaagtcagcgtggagagcggcaacttcgtcacgaggtttaaggtccccgacaacggtaacctataacaactcaaagccaacatgcgtcacggggttctcgttgtcactgttcccaagtttcatcaacccactactact

SEQ ID NO: 272609 - DNA, 463 bp, Glycine max
  unsure (1)..(463): unsure at all n locations
cccacgcgtccggatgctgtgtatgaagggcaacagaaaatgatagaacttggaataactggtcctgaagggcatgctctttcaaggcctgcagtgttggaaggagaggcaactgctcgtgccattcgtttagcagattttgtgaatactcctttatatgtggttcatgtaatgagcattgatgcaatggaagaaattgcaaaagcccggaaatcaggacaaagggtaattggagagccgattgcctctgggttagcccttgatgaatcctggctttggcatcctgactttgacattgcagcaaagtatgtcatgagcccccctattaggaaacgaagacatgataaggcccttcaagctgccctttcaacaggagttttgcagctggtaagaactgatcatcgtgcctttaattccacccaaaaagctcgtggaatcgatgacttncgtaaaatgcctaatg

SEQ ID NO: 272610 - DNA, 411 bp, Glycine max
cctttcgctctcttctctgcaaatgcttcattccaagatggttaggactctgtaggctgataaagacaacactcataccgttggaaagaaggatgctgctggccatgttgcttaatttagttcttgcttcctttgtcttcttgagttttatcagagacgggagtgcagggatcactagctctttcattcggtcagagtggccggcagttgacatcccccttgatcatgaagcatttgcagttccaaagggttataatgcacctcaacaagtgcacatcacgcaaggtgactatgatggaaaagcagtaatcatctcatgggtgaccacagaagagccagggcacagccatatacagtatggcacatcagagaataaatttcaaactagtgaagaaggcacagttacaaact

SEQ ID NO: 272611 - DNA, 455 bp, Glycine max
gggtttacagagaagctaagaggcgcagccgtagcaaaagctcgtggaattgctagcaatggcgaggatcaaggtttacgagctgaggcagaagacgaaggctgatctgctgaatcaactgaaggacctgaaggcggagcttgccttgcttcgtgttgctaaggtcaccggtggtgcccctaacaagctttccaagataaaggtggtgaggttgaacattgcccaggttttgacggtgatttctcagaagcagaaggctgcgttgagggatgcctacaagaataagaagtacttgcctctcgatctccgccctaagaagaccagggctattcgcaggaggcttactaagcaccaagcatcattgaagacagagagggagaagaagaaagagttatatttcccactaaggaaatatgctatcaaggtgtaactttagagcaatcttatcgggtaat

SEQ ID NO: 272612 - DNA, 450 bp, Glycine max
ctcttttttgttgttgtggtgtttcatttgtgaaactaacaacaacacaaggccatcatcatggcagctgcttccccaatggcaagccaactcaagtccaccttcactaggactcttgtagctcccaagggcctctctgcctcttcaccacttcacctcgtgccttctagaaggcaatttagcttcactgttaaggccatccaatcagagaagccaacctatcaagtgattcagccaatcaacggtgacccattcattggaagcctggaaaccccagttacatccagccctttgatcgcatggtacttgtccaacctgcccgcatacagaaccgcagtgagcccactactaagagggatcgaagtgggcctggcccacggataccttctggtgggcccattcgtgaaagccgggcctcttatgaacaccgagatcgcccggcaagcgggc

SEQ ID NO: 272613 - DNA, 438 bp, Glycine max
caagaatcttgaaaatgtcatgcggaaattccttcagtccttggagcttttcgaggaaaatgagaggaaaaagttggcaatcttcacagcacttgctttttcccagaagctgtctggtctcccaccagaaactgtgttccaaccacttcttaaagataaccttgtggccaaagggctagttctgtcatttatgactgacttctttaaggagtatctgattgacaacagtcttgatgatcttatttcaattctaaaacggggtaaagtagaggagaatcttttggacattttcccccctacaaaaagatctaatgaagccttctctgagcatttcaccaaggaaggactggtggccttggtggagtataatgaaaagaaaaattttgaggtgaaacttaaggaaatgaagtcctctttaacagcacaggttacagacta

SEQ ID NO: 272614 - DNA, 362 bp, Glycine max
tgccatcgtacgagccacggcaacgtgtgtgagcttgagcctgacctcagccctgacgggtgtatctatgggtccttcctcatcgtccttctctggaagcggtagttattgtgtccgcgcgggtcccacctcgggggcgaccttgcccctgcgcttgccgctgaccatagagaacgcccacaagaacggggccgacaacaccaagaacggccgcgactaccagcgcaagcgtctcggagtgcagatatacggcgaccagttcggcaagcacggctccatgatcggccgccagatcggaaccaagcttcatgcacgaaagaatgcggggcttggcgtagagcataccatagactacacgattg

SEQ ID NO: 272615 - DNA, 353 bp, Glycine max
tcgcctatacccatggctatgacagagagggacaccccgtgtgctacaacgcctatggggtgttcaaggatagggagatgtacgagaatgttttcggggacgaggagaagctgaagaagttcttgcggtggagggtgcaggtgctggagagaggggtgaggatgctacacttcaagcccggtggggttaattcgctcattcaggttacggaccttaaagacatgcccaagagggagctaagaattgcttctaaccagattctgtctctgttccaggataactatcctgaaatggtggctcgcaagattttcatcaatgtgccatggcactttattgtgttgtattcaatgttc

SEQ ID NO: 272616 - DNA, 459 bp, Glycine max
gacatgtttcactggcaagccacaatcatgggacctgctgatagcccatatgcaggtggtgttttcctagtttcaattcattttcctcctgactatcccttcaagccaccaaaggttgcttttcggactaaggtgttccacccaaacatcaacagcaatggcagtatatgtcttgacattctcaaggagcaatggagcccatccctaaccattttcaaggtccttttgtcaatttgctcattgttgacggatcccaaccctgatgatccactcgtaccagagattgcacacatgtacaagactgacagggccaagtatgaggctactgcccgcagctggacccagaagtatgccatgggatgaccatatagagctgcttttcaatgaagcagcaaaatcataatttatgtaaaagaacaaaagatattatgaatgaaattgaatgctttattttatatt

SEQ ID NO: 272617 - DNA, 307 bp, Glycine max
attcagcgggctcaagtgctccccactctcatcttcttctctcttcttcaaaccttctctttggacccaacaatcccaaaagcgcgtttcaactaccattgcgaactcaatagcaatagccaatgcgcataacatagagagagcgaggcttaagaaactcttcgaagaagcctacgagagatgccgcaatgctccaatggaaggcgttttcttcaccatcgaagacttcactgttgctcatgacaagtacgacttctattctgaagttggctgcatgattaaaggctctgtgttctacacagatatc

SEQ ID NO: 272618 - DNA, 385 bp, Glycine max
ctggcggcttccaccgcagctatgtcagaaatgcttggaaaccccgtgagcctgagaggcgccaccaggtctgctccatcaccgtctacacctgatactttcaagaccgttgcgcttttctccaagaagaaggcagcaccacctcctccaaagaaaaagcctgctgctgtatcctccgtcaatgaggatctcgccatgtggtatggtccagacagattgatcttcttgcctgatggtctcttggaccgatcttagatccccgagtactttaccggagaagtgctctggagattatggttatgacccgtttggtcttagcaagaagcctgatgacttcttctaatactaggcttgtgagttgattcatgccatatgggcaatgctt

SEQ ID NO: 272619 - DNA, 379 bp, Glycine max
ctgatttccccggcagcaacaatggaacaggtctcttccaaaccatagttggtttgaagataagagatttatatgagcagctaatagccaccaaggctgagactccagtggctgcaaaagcttaggaattgaattgaacctgccataataatatatatacatatcgaccgagcgacgcagtcaaattgcattagttctcatcaaaatcatcattttctttcttctttcatgttttccacaatttcactgtgtttcatgttattttgtctattgttattaggctgttctgcatcataattaatgaaaaaaacacatatgtatgtatgtatgtacttatccgagaaaaaaaagtgaggctgagattccagtatgttgaaaa

SEQ ID NO: 272620 - DNA, 405 bp, Glycine max
ggatgaggtgaggagggaggcgaggaagtgggtggtgagcggggaggtggcggaggttaccgcggtggcgagggaggtgctgaaggaggatgaggaggaggtggtggaggaggagagggcgagggagagagaggaggagagggagaggagggagtttgtggtgcacgtgccgctgccggatgagaaggagattgagaggagggtgctggagaagaagaagaaggatctgttgagtaggtacgcgagtgaggggctcgtggaggagcagactgaggccaaggacatgctcaacattcagcgttaggctgtagaagcagagagccgcttgaaaaagtgttgaggagcaattgcgtatgatcaatgatgactttttatcatagtggataattttgcagagactctttt

SEQ ID NO: 272621 - DNA, 453 bp, Glycine max
  unsure (1)..(453): unsure at all n locations
cccacgcgtccgcaaaacttcttcacactccttcttttccctcttctgttgcccgatcttctgcctccaagattttggtatttgggattgatcacctggagttggaaatggttaaaagttatggagtgttctgatttgcaaaagatatcatgttgcggtgcttagagggacttaagcctttatttgcttccatattacgatgttgtgacctggatatatataaccagccaagaggccttgaagatcctgaacttcttgctagagagactgtgttcagtgtaagcgaaatagaagcactttacgagctcttcaaaaagattagcagtgctgtaatcgacgatgggttgattaacaaggaagagtttcagttggcattgttcaagacaaattaaaaagaaagtctgtttgctgatcgggtatttgatttatttgacacanagcacaatgggatac

SEQ ID NO: 272622 - DNA, 375 bp, Glycine max
aatcgggacgccatcttgctcactacatcgtccctattagcacactagattttgccaaaaagatcaacttttgaagcaattgatcatgtgggcaacattcattctttcctatccctggaaaaatcaattttcggcttcgggctcaatcggaaatggagaaggtgatgaacattctgaagccgaagccaaatccacagcaactattgagggattggcagcgcaggcttcgtcaagagtgtcgcaacattgagcgccaaattcgcgatatacaaagagaagaaaaaaatgtgcagaatgctattagagaagctgcaaaaggaatgacatgggctttggaaaagcacttgccaaggacttgtgagatctagcaaactg

SEQ ID NO: 272623 - DNA, 459 bp, Glycine max
cccacgcgtccgcttctatcatctctccaccatggttctctccaaaaccgcctccgaatccgacgtctctgtccactcaaccttcgcttctcgctatgtcagaacttcgcttcccaggttcaagatggcggaggagtcgataccgaaggaggcagcataccacatcataaacgacgagttgatgttggatgggaacccaaggttgaatttggcatcatttgtgacgacttggatggagccagagtgtgataaactcatcatggctgccattaataagaactatgttgacatggacgagtaccctgtcaccactgagctacagaatcgatgtgttaacatgatagctcatcttttcaatgcaccactagaagagactgaggcagcagttggtgttggcacggttggctcatcagaggccattatgttggctggattggcattcataagaaagtggcaaaa

SEQ ID NO: 272624 - DNA, 388 bp, Glycine max
cttctacttcccccctttgctctcaaaccttatcacctaatccttatcctcccaaaccagagaaccatgtctacctccgcagcttccctcgcactcccaaccctcactctccgaacccgacaacctctatgttctccccaatgcttctcctcgtccctctccctcacacccaacaacaaacccatttccaattctgctgtttttctcaaaccaacaactctgtcgtcgtctcgcttcgttccccacgtcgtggtgtcgtctgatttggggcaggaggaggacaccttcagtgacggagacggccccagcttctgccccgaccttaagctctttgtcgggaatcttccggtcaacgtttacagcgcccagtttgcggagctttttgaga

SEQ ID NO: 272625 - DNA, 119 bp, Glycine max
ttttttttgttttttttttttatttttttatttaatatttttttttaatttattttatttaatattttaattaaaaaatatttcttataatataattactttaaaaaaaataagtatat

SEQ ID NO: 272626 - DNA, 439 bp, Glycine max
cgtccggccagaccttgatgatgcacaattggcaaaggaagtagaataccttcttaggaagggatggattccttgcttggaattcgagttggagcacggtttcgtgtaccgtgagcacaacaggtcaccaggatactacgatggacgctactggaccatgtggaagctgcctatgtttggttgcactgatgcttctcaggtgttgaaggagcttcaagaggctaagactgcataccccaacggcttcatccgtatcatcggattcgacaacgttcgccaagtgcagtgcatcagcttcatcgcctacaagcccccaggcttctaagtgtgaaaaatttgcaaagcatttgtagccgccaccccactttgtttgtttgtacttaaactacattcccatttgtttttgctttttgagatttcaatcatcctgatttttggg

SEQ ID NO: 272627 - DNA, 428 bp, Glycine max
caaagtttgaaattgacacccacaatatcatcatcaatcaagtaatctttgatgatgaagatgttgaatccaagttacttaaagcaagaatgaaaatgcaacagaaatatctggaccagttttacatgttgtatgatgactttaacattaccaagctgccactgctcccagaagaggttactggggttgaagctctgaaagcattttcaagacattttacatgaccatatcaagccttatgcagtaaaggagatccagtagaacggttggagagtaaagtatcagcattacagcgccagttacacgaggctgaagaagagttggagagactcaaaagtggcaattaggtttgatggtatccattcatgaataatgtcaatgtatgcctttatggttcacattattttttagcttaaatttgataaagc

SEQ ID NO: 272628 - DNA, 367 bp, Glycine max
gagccattgaactttgactataatattcagagttcagattactcactctaatcttctaagttttcattttggggtttaagtttctgaaggaaaaaaaaaatgataaagtttgttctatttttgttctgctttgcctctgcactgaccctttcagtatcggagtccaaatcagcttcagtgcaacctcatgctgctgaatctttctctgttggatatattcagatgaagactgcagcgaactgttcttacctggtagttatatctacgagttgttcatcgcctaagttcacaacggataagatcggtatcacgtttggcgatgctaatggcaaccaggtatatgaaccaagactggatgatccaattt

SEQ ID NO: 272629 - DNA, 443 bp, Glycine max
agaaaaacaagtagttgagaactaagaagaaggaaatggcttcctcaatgatctcctccccagctgttaccaccgtcaaccgtgccggtgccggcatggttgctccattcaccggcctcaaatccatggctggcttccccacgaggaagaccaacaatgacattacctccattgctagcaacggtggaagagtacaatgcatgcaggtgtggccaccaattggcaagaagaagttcgagactctttcctacttgccagacctcgatgatgcccaattggcaaaggaagtcgaataccttctaaggaaaggatggattccttgcttggaattcgagttggagcacggtttcgtgtaccgtgagcacaacaggtcacctggatactatgatggacgctactggaccatgtggaagctgcctatgtttggctgcactgatgcttct

SEQ ID NO: 272630 - DNA, 425 bp, Glycine max
gttactgaagaaaatggcaaccatctccgctgctatcacaaccccatcgatcacccgcgcatgtctagtgcaaaaacgttctcttgggttctcatctcccgttcttggtttgccagcaatgggtaaggtgggaagagtgagttgctccatggaggaaaagccttcttctgtgaaggaaagcagctcaagcatgttggggatgggggcatctttgatggcagcggccagcgccgcagccatgtcaggcccagccatggccttggtggatgagagacttagcactgaaagaaccgggctacccttcggccttagcaacaaccttctcggttggatcctgttcggcgtcttcggactcatctgggctctctattttgtctacactttctctcttgaagaggatgaagagtcaggactgtccctttaaa

SEQ ID NO: 272631 - DNA, 386 bp, Glycine max
atgcaacataacataatggtaagatgcgtacagtcgccatctcagaggactgggctcctgagcaagatcccgagagttggagacctggcttcgaacgctaaccatctaaaggccgtaccgaagcttacgctggagggaggcgctggcgcagaacggaacacgaagaagagagccaggaagagcgtggagacatacatcatctacagctttatggttctgatgcaggatcaccctgacatgggtatctgacgcagggccatgggaatcatgaacagcttcatcaacgacatgttcgagaagctggcccaggaatcttctagacttgcccgctacaacatgaaacccaccatcacttggagggaaattcataccgcggtcaggcttgt

SEQ ID NO: 272632 - DNA, 331 bp, Glycine max
caaattccaatttccaattcaaaaccctaactccgttcgaagcaccaaatcgtgatggcaccaaaggcagagaagaagccagcagagaagaagcccgcggaggagaagaaatcgacggtgggagacatggcttcggcggagaagaagccaaaggccggaaagaagctttcgaaagagggaggcgccggcggagaagggaagaagaagaagagaaacaagaagagcgtggagacatacaagatctacatcttcaaggttctgaagcaggttcaccctgacattggtatctcaagcaaggccatgggaatcatgaacagcttcattaacgaca

SEQ ID NO: 272633 - DNA, 421 bp, Glycine max
accaggcgcacgttagcacaaactatcatggccactgcaacagcagctgccacctcgtcctttatggggacgcgtctcctggaggctcactccggagcggggcgagtgcacgcccgattcggcttcggcaagaaaaaggctcccgccccaaagaaagcctccaggggatcgggccgagacaccgacagacccctttggtatccgggcgccaaagcgcccgaatacctcgatgggagtcttgtcggagactacgggttcgatccgtttgggctagggaagcccgcggagtacctgcagttcgagctggactcgctggaccagaaccttgcgaagaacgtggctggggacatcattggaaccaggaccgagctcgcggacgtgaagtccacgccgtttcagccctacagcgaagtgtttgggc

SEQ ID NO: 272634 - DNA, 415 bp, Glycine max
acgcccacgcgtacgaaaaaacaaactataaagtacacttaaacaaacaaatgacaaaataaaaagaaaaggagacacagtctactggaggcttactacagaacgatagcgagtgcacgcccgattcgactgtttttttgaattttgctcccatttccaaagaaagcctccaggggatcgggcacgagacaccgacagacccctgtggtatgcgggcgccaaagcgcccgaatacctcgatgggagtcttgtcagatactactggttcgatccgtttggactaaggaagcctgcggagtacctgcagatcgagctggactcgctggaccagaaccttgcgaagaacgtggctggtgacatcattggaaccaggaccgagctcgcggacgtgaagttcacgccgcttcattcctac

SEQ ID NO: 272635 - DNA, 378 bp, Glycine max
cccacgcgtccgctccatttccatttcctttctcttagattccaagaatcttaagctatgggaaagtcttacccaaccgtgagcgctgattaccagaaggccgttgagaaggcgaagaagaagctcagaggcttcatttcttataagagatgcgctcctctaatgctccgtctggcatggcactatgctggaacttacgacgtgagctcgaagaccggtggtcccttcgtaaccatatagcacccttccgaactcgatcacggcgctaacaacggtcttgacatcgatgctaggcttctggagccactcatagcggagcatcccatttcgagctacgccgatctttactacttagctggcgtaactgccgttgaggac

SEQ ID NO: 272636 - DNA, 375 bp, Glycine max
atccactttcactggaatcacaatcctgaaacaaaaacatcttagcatttaacatactacgagacaacatgaccaccacattggaaagaggtttctcggaagagcaagaagctctggtggtgaagtcatggaatgtcatgaagaagaattctggagagttgggtctaaagtttttcttgaaaatatttgagattgctccatcagctcaaaaattgtgctcattcttgagagattcaacggttcctttggagcaaaatcccaagctcaagccccatgccgtgtctgtctttgtaatgacctgtgattcagcagttcagctgcggaaagccgggaaagtcactgtcagagaatcaaacttgaaaaaattaggtgcta

SEQ ID NO: 272637 - DNA, 390 bp, Glycine max
ctctcttacacacccaagcactactacttctactttctttctagatatgggttctggggctgtgcaactgtttctgatcttggggctcttggctagctcatgcttagcccaagccccaggtgctgcaccgtcacaaccacccactacaaccccatcaccaccaccacccagatcagcacctgcaccagcacccaccacaccatcaaccccaccaccagcaaccccaccaccagcagcaactccaccaccagcagcaactccaccaccagcatcatcaccaacaccagcaccagcaccaccaacggctgcacctacacctgcttcctctcctgcagcctctcctccttcaccttctcctacagtgacaccaatccccacctctcctaacac

SEQ ID NO: 272638 - DNA, 385 bp, Glycine max
gaaaaaaaagattctaaagaaatataactaatattctttagaataatcaaaaagaatattaaatgcaaataaattttagatagaaaaaagacttaaaaaggaggatttgaaatgcgagatctaaaaacatatctttccgtggcaccagtagtaagtactctatggttcggggctttggcgggtctcttgatagagatcaatcgtttttttccagatgcattgatattcccttttttttcattctagttattgacacggaaaggggtgaagaagattatagatccaattaagtattaaatatatgtaattaatatgtaattaatctcctcttctttatttcgtcttttatttcttctttttttacaattgtaatagaataagttag

SEQ ID NO: 272639 - DNA, 370 bp, Glycine max
cccacgcgtccgctaatgtggagtgatccttaagatattgaaacatgggcagtcagtccgggtggagcaggttggctttttggatccagggtcacttcggagttcaatcacataaataaccttgatcttgtttgtcgagcgcaccaactcgttcaggaaggccttaagtatatgttccaagataaaggccttgtaactgtatggtctgcacctaattactgttaccgatgtggaaatgtagcttctattctgagtttcaatgaaaatatggaaagagaagttaaatttttcaccgaaacagaggagaacaatcagatgagaggcccaggacaggcgttccatatttcttataagttggtgcaaaatttgt

SEQ ID NO: 272640 - DNA, 327 bp, Glycine max
aaaaaacataacataatacaaaaattatacttaaaataaaaaaacatacaacaaacagtccgggataaaacaaatagacttcatgcatccaaaagtcactacggagttcaatcacaatccataaccttgctcatttgcggcgagcgcacacaactcgttcaggaaggccctacgtctatcctccacgatataggccttgtaactgtatggtctgcacctaattactgataccgatgtagacatgtaccttctattctgagcatcaatgtcaatatctaaagagaacttaaatctttcaccgaaacagatgataacactcagatgata

SEQ ID NO: 272641 - DNA, 411 bp, Glycine max
tcggccgtcagtcaccgtcttctctgccgccatgaatcttgtcaggtttctcatgaagctgaacgacgaaaccgtttcaatcgagctcaagaacggaacagttgttcatggcaccattacaggtgttgatatcagtatgaatacacatttgaaaacagttaaactaactctgaaagggaaaaacccagttactttggatcatctcagtgtgagaggcaacaacattcgatattatatccttcctgacagcttgaatcttgagactttactggttgaagaggctcctaagatcaagcctaagaagccaactgctgggaagcctttgggaagagggcggtggcgaggacgtggacgcggtcgtggtcgtgggcgttaagttgcacatcacaaaatttgtggcatttgcttgta

SEQ ID NO: 272642 - DNA, 333 bp, Glycine max
atactacgtacaacatggatacggtgttgtgtattccaactagtccttgtgtgatgcaggggttatcaaggtcgttgcaccgacactgtacgagactcttaataactactacaagctagtgtctcttggcttcaagattacattcttgtcaggtagtacactgtgcttactggccgtgacactagcttactttcagaatgctggctaccacacatatgaaaacttaattctcaaggatccacaagatccttgcactccaaatgcaagctcatactgaacatcatcgatagagacactgatgaggctgggatacaacattgttgacatcattgt

SEQ ID NO: 272643 - DNA, 340 bp, Glycine max
  unsure (1)..(340): unsure at all n locations
gaagtgtacccgtagggaaaagaggagaagtgaacctaaggaaggaagggagatggaagtggagaaccagttgttgaggtctgccaccggtcccgaagccaattcccggtcagaacgtaaccgttcactgcactggtttcgggaagaacggtgacctttctcagaaattctggagcacanaggatcctggccagaacccattcactttcaaaatcggccaaggttctgttatcaaaggatgggatgaaggtgtgcttggcatgcaaattggtgaagttgctcgtctccggtgctctccggattatgcttatggtgctggtggctttcctgcttgggaata

SEQ ID NO: 272644 - DNA, 419 bp, Glycine max
  unsure (1)..(419): unsure at all n locations
acgcccacgcgtccggcaagaaactccatagcgaaaaagaaaattcacgttatattgttagttgattcgtcatttctttctttgagtagtaatggcaagcctcaaggttgcatttgtggttgctgtgctatacatggttgtggtgagtgcacacatggcacatgctaggatcaactgcggccgtgtcgcggtcgcggtgtctccgtgccttggctaccttcgtcgcggtggaaggccacaggcgaggtgctgcaacggagtgagaaacctncacgccctggccaagaccaccgtggaccgtcggacggcgtgcaattgcctgaaaacctttgccagaggtcttggtaggggtgtcaatgccaacaacgcagctgcacttccaagaaaatgtagagtcaacatcccctacaagatcagca

SEQ ID NO: 272645 - DNA, 341 bp, Glycine max
cggacgcgtgcgcgacttctccttattctaaatgataaggttcagtggacttgttacaacgtcgggggcagcgaaccgctcacgttgccggaatgccatcactttacatgaccattcaatgtgctagtgctactgtcgggtgagtccacgggctgcgcctgctacgacgcactctgatcacttgcgcttactaggaattccgaacatggtgtcccacttgacttggtgaatatcgccagaggacgagctataactgactgacgtaagctgcatacaaatgggacagaccaacacattcgcgtctgacagagtgacagaacgtgaaaacctttgccatatgt

SEQ ID NO: 272646 - DNA, 426 bp, Glycine max
cccacgcgtccgagtggatgagaattctttatattcatgcattggaattgctggtgctcaggctgcacaagaaatagcagctccgttagaagaggaagtagcagatgatgtttatccaggtgttattccggtgggacgaggtttatctacaatgacacggccaactacctgatatttttggactatgttttggcctgcttgctttaagatcgggaggagtgtctggaagtttgatgacaagttatcgttcgaaggattagctgcatgtgtgacaacacaagaagttgctgcattcatttaaacattcaacccattcggaatacaagctgttcgatcaaacctgggaagcggttattgacttgcgtgtgattgatttcctcaattatccttatctccagttgaatcactaataaaatgctgttacta

SEQ ID NO: 272647 - DNA, 183 bp, Glycine max
gataaggcccccttcggtatcgcggccgatttgaagatacacgagtatgagaaaaccatggtggcttacaataagaaattggaggggaagaactcagaggaacgactgtctgacatagtcaagtctgaagtcaatgacgatgatgaacatgaggagtaggatgatgatgatgacgacgagtga

SEQ ID NO: 272648 - DNA, 356 bp, Glycine max
cacactttggtggccacagcatcaataacattgtcagcctcactacaagctgcagctaggtgcatgcatcccaccaaggtgggcatggccactcgcaacctcatatctacacaatgcatttctaaggcttatggcttggaacccgcttgaactaaactcatttgctcccttaagcccgatctgaaagatttcgctcaaaaatgtgtcgactccaccaaaattgcaggattcgcccttgccacctgatctctcgctgcttctggagcgagtgcagaacgtgttccaaagaggctaaccttcgacgaaatccagagcaagacatacttggaagtgaacggaactggaactgctaatca

SEQ ID NO: 272649 - DNA, 428 bp, Glycine max
aagctgttaccttcaatcacacaatctgtttaatggtctggcgatcctgatgacggaggtcttcatacatataatgactccaagcatttcgtcatatctgcatagataccggagcttattaacaaggacagaaccctggtggttcaatattctattatgtttgagcatgacattgaattctgtagcggttacatcaagcttctttctggttatgtcaatcataagaagtttggtggtgatactccttacagtttgatgtttggaccacacttatgttggtcacagacatagaagctccatcttatactatcataccatggtcagaattacccgattagaaaacatctgcaatgtgaaacggataagtagactcatttctatacattgattctaaggcctgatgcctcttatagtatacttgttgataa

SEQ ID NO: 272650 - DNA, 431 bp, Glycine max
cgctgattaacgggcttgccgtgcatggacgtggtatggaggctttggaggcgttttatgtcatggtggagtctggttaagcccgatccttgaaataaaagcgtgaacccagatacccaattccaaggcacctaagctcgaaaccgcggatatcacactcaacatgacaaccccatcgggtaagatatcactctcgagaagctgcatttgctgaaaaagcgcatgggattcatcggggaatccgtgtttggcgaaacaagagattaaagaggaccaagagaacaaatctcggtggggcatttcgttgaacagtttgagggacacgtggagggacccggaggtgccgtacgagctaataagcgcgttttggacatagacgttggagtgaaacccgagtttgagaatgagggtgtgaagtggtcgaaggggac

SEQ ID NO: 272651 - DNA, 431 bp, Glycine max
caaaattgcgaagaaccctaattgattgattgattgattgattcccatggcgtcccgaagaggtggagtctcactcccagaaagaccaagcaacaactcatgctccgtcctggcgaacatctcgcgctcctccatcgtcacccgcggcaaggaagccgtcgtcgacgccgcattcgtcgccaagaagctcctccgcagcaccggcaaggccgcgtggatcgccggcaccaccttcctcgtcctcgtcgtccctctgatcgtcgagatggaccgcgagcagcagctcaacgacctcgagctccagcaggccagcctcctcggcaccttcgcccccaaatgaaaatttgaggttttctctcagatcagatttcttgcttttagggtttacggttgcaataattgttcttaactgttctggattttgattaaaa

SEQ ID NO: 272652 - DNA, 427 bp, Glycine max
cctgacatctggagtcctatttcttcatgtcggagtattccagcaatacataaaagctttaatgagcagactactgtagtgcttgatggaaagttgatatccatggaaatcagatcaaaaatagctgctaaggtaagacaaatgaagaaaggcctaggaaaagttcctggattagctgtaatcttagtgggccaaagaagggattctcaaacttacgttcgcaacaagataatggcctgtgaagaagttggaatcaagtctttggtgactgaattacccactgattgtgcagtaacagatgttcaaaatgccatcatgagatttaacaaagatccatccattcatggtattcttgtgcaacttcctcatctagatgttgcggtagaggaaaaagttttggatgctgtatgtctagaataagatgtgg

SEQ ID NO: 272653 - DNA, 427 bp, Glycine max
cccacgcgtccgcccacgcgtccgaacaagtagttgagaactaagaaggagaagcacatggcttcctcaatgatctcttccccagctgttaccactgtcaaccgtgccggtgccggcatggttgctccattcactggcctcaagtccatggctggcttccccaccagaaagaccaacaatgacattacctccattgctagcaacggtggaagagtgcaatgcatgcaggtgtggccaccagttggcaagaagaagtttgagactctttcctacctgccagaccttgatgatgcacaattggcaaaggaagtagaataccttcttaggaagggatggattccttgcttggaattcgagttggagcacggtttcgtgtaccgtgagcacaacaggtcaccaggatactacgatggacgctactggacca

SEQ ID NO: 272654 - DNA, 426 bp, Glycine max
tctgcacttttcagttacaaagcatttcattgttttacaatatacaacactacaatggctgcttcaacaatggctctctcttcatcatcattggctggccaagctatcaagcttgccccctccacccctcagcttggtgttggaagggttagcatgagaaaaacagcctccaagactgttacctcaggaagcccatggtacggcccagatcgtgtcaagtacttgggcccattctctggtgagcccccatcctacctcactggtgaattcccaggtgactatggttgggacactgctgggctttctgctgacccagagacctttgccaaaaaccgtgaactggaagtcatccactccagatgggccatgttgggagccttgggctgtgttttccctgaactcttgtcccgcaacggagtcaagttt

SEQ ID NO: 272655 - DNA, 428 bp, Glycine max
cccacgcgtccgcccacgcgtccgcccactcgtccggaaaaattattttcccttataaacgttatctctatctatcctttgaaactattacctataatttcagagctagctagttcacagcttcagttcgtttttgttgatcctgtgaacttatggctgacggggtggttctgttggatacatgggccagcatgtttgggatgagggttaggattgcattagctgaaaagggtgctgagtatgaatacaaggaagaaaatctcaggaacaagagtcctttgcttttgcaaatgaacccaattcacaagaaaattccagttctgatcccatattggcaaaccaatttgtgaatctgcaattatagtgcagtacattgatgaggtctggaatgataaagctccaatcttgccctgtgacccttatgagag

SEQ ID NO: 272656 - DNA, 191 bp, Glycine max
tcccactctttctcccactctttcgaaaataaaaaaaaaaaaaaaaaaaaaaaaaaaaaagaaagataaaaaaaaaaaaaaaaaaaaaaaaaaaaaaaaaaaaaaaaaaaaaaaaaaaaaaaaaaataaaaaaaaaaaaaaaaaaaaaaaacaaacaaaaaaaataaaaaaaaaaaaaaattcacataact

SEQ ID NO: 272657 - DNA, 333 bp, Glycine max
ttcccggctcgacgcactcgttctcacttctttaaaaggccaaggctaaaggtgtttctttgttgcttccaactgatgttgtcagatcttacaaatttgcttctgattctaacaacaagacttttcctgcatcaatcatcccaaatgggtggatggggttggatattggtcctgattccatcaagacatttggtgaaacatttgatactactcataccattatttggaatggaccaatgggtgtttttgaatttgataagttttccacatgaacagatgctatagccaataaactggcaaaacttaatgggaaaggagtgacaaccatcattt

SEQ ID NO: 272658 - DNA, 426 bp, Glycine max
tctttctgaaaaccctatcccaacctgatcttcacttcttggagatggcaaagtcgaagaaccacgccgatcacaaccagtcctacaaggcccataagaatggcatcaaaaagccaaagaggcatctccacacttccaccaaagggatggatccaaagtttctgaggaaccatatgtactcgaggaagcataacaagaagagcggttaaacagccaccgaataagagtaaagtgccactctcaaatgggcctattaagatttgatttgttatttaatccccatatgttttgtgtcgaatctatctttagtagtatagtcatttatatgagttaacttaatccatagagaatgcagtacttactcttataacatcgttgattgttttttgtaatgacccttgaaaatttatcaatggattattattc

SEQ ID NO: 272659 - DNA, 388 bp, Glycine max
  unsure (1)..(388): unsure at all n locations
cggaggagaagaaaatagtcgttcgagattctccgtacgaagcaaactgctcgtaagggcagattatgaaaggctcctatgaagcagcttgcatccaatgctgcacgtaagtctgcaccaactactggtggtgtgaagaagccacatcgttaccgtcctggtaccgttgctcttcgtgagattaggaaataccataagagtaccgagcttttgatcaggaagctcccctttcagaggctggttcgtgaaattgctcatgacttcaagactgatctgcgtttccagagccactccgtgcttgcattgcaagaagctgctgaggcatacctngttgggctctttgaggacactaacctgtgtgccattcacgctaagcgggtaaccatta

SEQ ID NO: 272660 - DNA, 336 bp, Glycine max
cccacgcgtccgaagaatttggataaggctattgaccacaaggccttacatgatactttgtcttcttttggactcattctttcttgcaaaatagcaactgatgcttctggtctgtctaagggctatggttttgttcaatttgacaatgaagaggctgcacagaatgctattgacaagttaaatggcatgctgatcaatgataagcaggtctatgtaggccatttcctgcgaaagcaagatagagagaatgctctcagcaagacaaaatttaataatgtctatgtgaaaaacttatcagagtcaaccacggatgaagaggtgatgattaattttgga

SEQ ID NO: 272661 - DNA, 426 bp, Glycine max
gtttgttgttgtaactcgttcttcttcttttgctgttctgtgtttgtgttcgttttttcggtcggctgaaaatgtcttgctgcggtggtaactgtggttgcggaagctcctgcaagtgcggcaacggctgccgaggctgcaagatgtacccagacttgagctacactgagtcaaccaccaccgagaccttggtcatgggagtggcacctgttaaggctcaatttgagggtgctgaaatgcgtgtgcccgctgagaacgatggctgcaaatgtggaccaaactgctcctgcaacccctgcacttgcaagtgaggtgttgggagagcaagcttcaagcagagatagcccttaattaggaataatgataaactattaatgtgtagctaaaaacttatgtattatgtctgtgatggttttcgtgcactct

SEQ ID NO: 272662 - DNA, 412 bp, Glycine max
cccacgcgtccgcccacgcgtccgcccacgcgtccgcaaaatatgtcaactagagatcaggccacttctggtgaacacatgcctgttggtctttcctcttcccaaaattagattgcttctcaactctgttatattcctaacccattcgtgagaagttgcaggttacatatcagtatccagccattgcctgaagctttatatatgatgtactttctaacatgaaaatttctggactgattcataaagaaatggatcagcttcctttttttctgagggatcttgtagaaataaagacttgaagggtgaaaatataccttttttttacttcgctaagaatattatattggattaaaaaaaaaaaataaaaatataaaaaaaaaaaaaaaaattaaaaaaataaaaaaaattaaag

SEQ ID NO: 272663 - DNA, 279 bp, Glycine max
acccttctctacccactctttctatctctatcttctccctttttttatatataaatatttttttttttttttttttttaaaagaaattttataaaaattttatccttccttttatttttttttttttaaaaaaaaataaatttatttttatataaaaaaaataaaaaaaaaaaaaaataataaaattaaaaatataaaaaataataatattataaaaaataaatttataatataatatattttaaaaaattaaattaaataaataaaaaataaaaatta

SEQ ID NO: 272664 - DNA, 433 bp, Glycine max
  unsure (1)..(433): unsure at all n locations
ctttgttactctcacacatgtctcgctccgtgcctttggtttcaaccagttttgtcttgcttctgcttctggtggccactgagatgatggggccaacaatggtggcagaagcaagaacttgtgagtctcatagccaccgtttcaaggggccatgtttgagtgacaccaactgtggctctgtttgccgaaccgaacgtttcactggaagacactgccgtggctttcgtcgcagatgcttctgcaccaaacattgttaattttaaaaaattaattaagagtgctttgatagaagatgatagatctatcatctntctactcgtgttgttaattaaccactttgtgtttgagaataagggttacccattctactatgggtttctttgtttgcctcttattttatctagttagagatccttttatgaaacgagtgatc

SEQ ID NO: 272665 - DNA, 408 bp, Glycine max
caaaattgcgaagaaccctaattgattgattgattgattgattcccatggcgtcccgaagaggtggagtctcactcccagaaagaccaagcaacaactcaggctccgtcctggcgaagatctcgcgctcctccatcgtcacccgcggcaaggaagccgccgtcgacgccgcattcgtcgccaagaagctcctccgcagcaccggcaaggccgcgtggatcgccggcaccaccttcctcgtcctcgtcgtccctctgatcgtcgagatggaccgcgagcagcagctcaacgacctcgagctccagcaggccagcctcctcggcacccccgcccccaaatgaaaatttgaggttttctctcagatcagatttcttgcttttagggtttaccgttgcaataatttttttta

SEQ ID NO: 272666 - DNA, 338 bp, Glycine max
cgatttcgacagcaccttcatcggctacgcctcgctcacaaagcgcccgatgggccgcgtgttgaacccgctgcgcgaaatgggcgtgcaggtgaaatcggaagacggtgaccgtcttcccgttaccttgcgcgggccgaagacgccgacgccgatcacctaccgcgtgccgatggcctccgcacaggtgaagtccgccgtgctgctcgccggcctcaacacgcccggcatcacgacggtcatcgagccgatcatgacgcgccatcatacggaaaagatgctgcagggctttggcgccaaccttaccgtcgagaccgattccgaccgcgtgcgcacca

SEQ ID NO: 272667 - DNA, 372 bp, Glycine max
tcttagctttcctttccagttcatacttcatcctattattactttccctctttgcattccaaatggccactgttgaggttgcacagcaaacaccaacaactgtgacagagaatgaaacaacgactgaggtaaccaagattgaggaaactaccccagaacagccagccaccgaggttactgccccagaaacagtcaacgaagaagcaaaagaggaagcagcagttgagactaatgaggcaacagaagttacagaggaagggaaggctgagaaaacagaagaagaagaagaagtgaaagaggagactaaagaaaccgaatcagcaccagtggaggaagagaagcatgatgagaacataccagctgaaaccgtag

SEQ ID NO: 272668 - DNA, 422 bp, Glycine max
cccacgcgtccgcagcgggtccctctgtctaattcctatttgaggtatgaactgatttggaggacttccattcaccaaaactgacattgacatagacttgaggcttccttcaatccaagtcatccaccgggagttgaagccaaaccttctcaacatatacaacaagaattcccaagataccgaatcatacgccttctcaaaatcgatcttgaagatcagacaaggtttgtggttctttcttgcttcatctattatctcattagtgattaagacactttgcagcaaatgtctaccttcaatgaatgcgaattgagtttcctcaattattgctggcagcactcttctaattctgtttgcaagcaccttggccactatcttgtacatgcacccaattaaggatatgggtttgtattctcccaaat

SEQ ID NO: 272669 - DNA, 352 bp, Glycine max
gttccattccaattccaagttacaacttttctgtgtctatggatcgcgctcagcttcggttggttcgtgtacccctcttcctcttctgctctgacctcttctcccttttcactcatcatccaccgtcgccaccccaccaccaccaccaccaccaccatcctcacccgccgcaccaccaccaccacccaccgcaccaccatcaccacccaccccaccaccaccatcatcacccgtcccaccaccatcaccagccggtgacaatagatttcccttccgagaaacccaccaacaatattgcaactccgggtctcggcaacacttgccacatcaatttctgctctttctgctctta

SEQ ID NO: 272670 - DNA, 357 bp, Glycine max
cccacgcgtccgcttagatagagttgttactatttgctcccagtacagagcttaaccgagcttcacaaagatgaatcgggaaaagttgatgaagatggccggttcggttagaactgggggaaagggtaccatgagaagaaagaagaaggctgtccacaagacaacaaccacagatgacaaaaggcttcagagcaccctgaagagaataggggtgaatgccatcccggctattgaggaggtcaatatctttaaggatgacgtagttatccagtttctaaatcccaaagttcaagcatccattgctgctaatacttgggttgtcagtggttctccacaaaacaaaaaagttgcaagata

SEQ ID NO: 272671 - DNA, 277 bp, Glycine max
cttaattatgattttaatttgggaatacattaacatcatgtgaattatgactgaaccgagcttgagaaagatgaatcgggaaaagattgatgaagatggccggttcggttagaaactggaggaaagggtaccatgaagaagaaagaagaaggctgtccaggggacgacgtcttacaggtgccaagctgctttacagcaccctgcagagaataggctttaatgccatgcacgctattgaagatgtctggccctctaatgacaacgtagttattgggaa

SEQ ID NO: 272672 - DNA, 319 bp, Glycine max
ctagaggaagagctccataagcgtgttgtcggtcaagatcctgctgtcaaggcagtagctgaggctatccaacgttcaagagcaggtctttcagatccccatcgcccaatcgctagcttcatgtttatgggaccaacgggtgtaggaaagaccgagctagccaaggcccttgcttcatatttgttcaacacagaagaagcacttgtacggattgatatgagtgagtacatggaaaagcatacggtttcaagattgattggggctccacctggatatgttgggtatgaagaaagagggcaactaacagagaccgttcgtc

SEQ ID NO: 272673 - DNA, 429 bp, Glycine max
tgtctccatcgtttcgcattgcacaagcactctctctttcccttaccctttttcaggtttcaacgctccaactatccatggcaaaccgctggctcagacccgaggtgtatccactgttcgctgcggttggtgctgctgttgggatctgtggattccaactggttcgtaatatctgcatcaaccctgaagtcagggtgaacaaggagggaaggaaggcaggagttttggagaactttgctgagggagagaagtatgccgagcacttcctgaggaagtatgtgcgcaacagaactccggagattatgccctccatcaacagcttcttcgctgacacaagtcgcaactaagttgctttgaataaacaaaggttaatgtgagatattaattctattgtggttacaaacagattttatcatgcatttgtaaaac

SEQ ID NO: 272674 - DNA, 412 bp, Glycine max
ctccaaggaagtcccctaatcagaaccagatatggacaccaaacccaccgagatcagcagcggcaagatgttcggaggttacaacaagagattcaagcatttcagccttaccctgggatgctccatgaacttccacatctacttccctccatctccttctccctctcacaaattcccagtgctgtactttctctctggcctcacttgcaccgacgagaacttcatattcaagtcgggtgctcagcgtgccgctttcgccgagggtgttgccttggttgcccccgacacttctccgaaaggcttgaatgtggaaagagaagcagacagcttggaccttggaataagtgcaagattttatctcaatgccacacaagagaaatggaagaattggcgcatgtatgactatgttgtc

SEQ ID NO: 272675 - DNA, 367 bp, Glycine max
aggtgggccatgctcgccactctcggagctctcactgttgagtggctcactggtgttacatggcaagacgccggggaggtggagctagtggaaggttcatcatacctagggcaaccacttccattctcaatcaccacactgatctggatcgaggttctcgtaattggctacatagagttccagaggaacgcagagctggacccagaaaagaggctgtacccaggtggcagttacttcgacccactgggcctggcctcagatccagagaagaaagccacccttcaattggcggagatcaagcacgcccgtctcgccatggtgggcttcttgggctttgcagtccaagctgccgtcactggcaagggcc

SEQ ID NO: 272676 - DNA, 204 bp, Glycine max
acccacccttctcccacacatccatttctattctataaatttaatctaaaaaacaaaaaaaaaacacaaggaagatttaaaaaaaaaaaaaaaccaaccaaccaaaaacaaacacaaaacaaaaaaaaaaaccacacaaaatcaataacaaaaaaaccaaaaaaaaaacacaaataccaccataaaaaacacaaatctacaacc

SEQ ID NO: 272677 - DNA, 482 bp, Glycine max
gtgataaacccctctctcttatcgaagaagctgagcgcaaagcagcagaaaatgggttttgtgatgcaatgctcaagctatggcacttgtatttctatttgtatctctcatcgtttcccccaaacctctctatcttttcacgttccagctcaccactggaaccgattcaagagtgcacgaaggaatcagaggatgatggttctttgtagcgtggacgaccgaagctacaacctagattccccgaggaaaataaaaattgtggaacacgtttgtctcctcaaagcaaagcatgatttatctgaagaggaagagaacgacatgcttggttatttgtacacaacgcagtaccaaatgggcggtgttggtgcaatttcattagggcgcatttcttcttcaaatcctgagcgctacacgcatgctctctttatgcgggttcagaaaaaggaaaatcttgaaaaggtttacgagaatcccttttacat

SEQ ID NO: 272678 - DNA, 458 bp, Glycine max
cgattaaagacttgcttccaagatggttctgctagagaagctctgggatgacgttgttgctgggcctcaacctgagcgtggccttggcaagctcagaaaactcaccaccctcaaaactattgatgaaggagacagtagcaagctgcagaagacgttgtcgatgccgtcgacaccgacaaccccgatgactcccacgactccaacgacaccgggatccgggcgtaaagctgacaacgtttggaggagcgtcttccatcctgggagcaacttcggcacaaagaccatcggtgctcaaatgtttgacaaaccactttccaacacttccactgtctacgactggctgtacactggggagaccagaagcaggcaccgctgaaaggataagctaagaaaaccgggggttgcatggaaatattggcctttttcggtaaacacctgccacgtttgaatctactact

SEQ ID NO: 272679 - DNA, 339 bp, Glycine max
cccacgcgtccgcccacgcgtccggtgatttcagtgagtgatcggtgttcacttgatctcatcataatcgtcagcgtcaattgaagaagatgccgatcagaaacatcgccgtcggaaggcctgaagaggcgactcaccccgacacgttgaaggcggctttggctgagttcatctcaaccttcatcttcgtgttcgccggctcaggctccggcatcgcctacaacaagcttaccgacaacggcgctgccacccctgccggcctcatcttcggcttcatcgcccatgcattcgccctcttcgtcgccgtctccgtcggcgccaacatcttcggcgggcacg

SEQ ID NO: 272680 - DNA, 480 bp, Glycine max
cccacgcgtccgaaaaggccatgagggcagtatctggtatttcaggggtggagacagtctcagtggacatgaatgacctgaaaatgactataattgggaatgttgatgctgtaatagtagttggcaagcttagaaaatgttgtgatcatgctgatatactatcagttggaccagccaaagaggagaagaaagaggaaccaaagaaagatgagaagaagccagaagacaagaaagatccaaaggaggaatatgctgaacttctgaacgccttttataatcagaccagacagcagcaataccccccttattatcacagaacagtggaagaggatccaactagctgtgttatttgctaagtattggaatatcatatggagtttgaaatgatggataataaaatgagatcaagaaaagatggtggctgcatggagttgaagaagaattatgtttctttggagttccctgtgtccttcttttctt

SEQ ID NO: 272681 - DNA, 477 bp, Glycine max
ctagaaactgaggacttagctagtagttagagatgcctgagttttgcgtgacaggtggtactgggttcatcgcatcttacctggtcaaggccttactagagaagggtcacacagtgaggaccaccgtgagaaacccaggggatgtggagaaggttggttttctgactgaactaagtggagccaaagagagactgaagattttgaaagcagatctattagtggaaggaagctttgatgaggcagtgagaggagttgatggtgtctttcatatggcgtcccctgtgcttattccttatgatgagaacgttcagcaaaatttgattgatccctgtataaaaggaactttgaatgtgcttaactcttgtgtaaaagcaactgtgaaacattttgggctcacctcttcttgctcttccataagataccgggatgatgtgcaagaaagtgtgcctcttaatgaatctcattggactgatctag

SEQ ID NO: 272682 - DNA, 400 bp, Glycine max
agaaatttaagtgaggagctagagaatgatgatgaagtctgctatgtgtgcagtggtggtggtagcacttcttcttctggcggaggtggggcccatggctgaggctgtgacatgcaccccaacagagttgagtccgtgtcttccagcaatcacttccggtgctaaaccttccaatgcttgttgcacgaagctgaagcagcaaaaaccatgcttatgtggctacctcaaaaacgctagcttgaagcagtatgttaactctcctaatgcccgaaaaaccgttgcttcttgtgggattccctttccaacttgttaattaattaagccttcttataattaaagtgtgggatatatatatatatatatatatatatatatatatataaaccagttaatttataca

SEQ ID NO: 272683 - DNA, 470 bp, Glycine max
gtgaaaggttaagatcgagaaattagggtgaagtgaaggagaagctcttgagaagcatatgtcttttcatatttaatattaaaagagttgcattggagcatgttgggtcgggaattattgtagctgacttgaaagttgaaactgaagatgggagaagcaacagaaagatatgcagttgtgacgggtgcaaataaaggaattggattagagataggtagacaggttacttcagctggaatcaaagtgttgctcacagcaagaaatgagaagaagggtcttcaagcactggaaacactcaaagactcaggtctattccaccttgtactgtttcatcaggtggatgtggctgatgcaacaaatgtagcttctttggcagattttgtcaaatccaaatttgggaaactcgatattctgattaacaatgcacggattggtggagttgtaaatgatgacactgatttaatcactac

SEQ ID NO: 272684 - DNA, 396 bp, Glycine max
cccacgcgtccgaaccaaaccatcgagtgcgttgcacccccaccgtaagcacagctatgtcgtggcgcatgcgaaccttgctcaaggtcattgttctcggcgatagcggggttggaaagacctcgttgatgaatcaatacgtgcacaagaagtttagtcagcaatataaggctaccattggggctgattttgtcaccaaagagcttcagattgatgacagacttgtcactctacaaatatgggacactgctgggcaagagagattccagagtctcggggttgcattttacagaggtgccgattgctgtgttcttgtgtatgatgtgaatgtgatgaaatcgtttgatacccttgagaactggcacgaggagtttctcaaacaggcaaacccttctg

SEQ ID NO: 272685 - DNA, 211 bp, Glycine max
  unsure (1)..(211): unsure at all n locations
cccacgcgnccgcccacgcgnccggaccacactcangagancncnaacannanaagcaacgcgggcggcaccacaaacgggcnggcgccccncgngaagaaccnggangcagagcnnggacacgggaagggaaccangacaaccacgcannccaacacnggagaccagaggcncnnggaagcgncacaccgngacccgagaagagccaggg

SEQ ID NO: 272686 - DNA, 390 bp, Glycine max
gaacattcacgtgcgcgctgctgtcttatcttgccattgcgtcaacgtcgcgatcgtgtgtgcgactaacatcacacaacagaaccttgttccgttcttctcagaactctctcattggagagagcacgagagtcatgacggacggtcatctattcaacaacatcacactctgaagccggggcggcaccaatccagggcagagtagactatatactggaagaattatatcgaagagacagtgcgatgggcaattaaacgaagttgatcaatctgacatagtggagctgacatggatgaacgtgcccactagtaaccaacttgaagttgaaatcaaagatgggacgttctataagctcacactatctcgagacgcagatgatgtaagtgtga

SEQ ID NO: 272687 - DNA, 335 bp, Glycine max
aaaaaaaaaaaaaaaaaaaaaaaaaaaaaaaattaaaaaaaaaaaaaaaaaaaaaaaaaaaaggggaaaaaaaaaaaaaaaaaaaagaaaaaaaaagggacgccaggataaaaggtccaagctttggaatcgcgaccataaaaattaataaattttaaaagggagacctaaaataaaaaaaaggggcgcactttaaaaaacgtggaaacgggaaaaacctggggtataccaaactaaaaagcctaaaagaaaatacctttttggaaagatggggaaaaaaaaaaaaggccaaaccgaaaagcctttccaaaaattggccaagcctaaagggaaaa

SEQ ID NO: 272688 - DNA, 447 bp, Glycine max
gagataactagaaacagtgtgatgaaaatgtaggtccttgttttcttcgttgctacaattgtggtagcatggcaatgccatgcgtacgatatgttccctctccgaatgaacactggctatggtgcccgtactccggaggtgaaatgcgcaagttggaggcttgctgtggaagcacacaacatctttggctttgagaccattcctgaagagtgcgttgaagcaacaaaggaatacatccatggcgaacaatatagatcagactccaaaacagttaaccaacaagcttacttttatgccagagacctcgaagtccatcccaaggacacatttgtgttcagtatagatggcaccgtactctctaatattccatactacaaaaaacatggatatggcgtggagaaatttaactcgaccttgtatgatgaatgggttaacaaggggcaatgc

SEQ ID NO: 272689 - DNA, 400 bp, Glycine max
  unsure (1)..(400): unsure at all n locations
ctctgtttcttttcttctcgcagagcgaaattcctatcccacacaaatggcatgctcagccggctctgcttctctcttctccgcaaaccccacacctctcttctctcccaaatcctccctctccctccctaacaactctctccacctcaaccctctccccacgcgcccttctctctccctcacgcgcccctcgcacactcgccgctccttcgtcgtcaaagcctcctccagcgagcttccgctagttggaaacaccgcaccggatttcgaagcagaggctgtgtttgaccaggagtttatcaacgtgaaactatctgattacattgggaagaaatatgttgtgctcttcttctacccgttggacttcactttntgttgtcccacagaaatcactgctttc

SEQ ID NO: 272690 - DNA, 373 bp, Glycine max
gattgtctgatgcagtaactcgttcatcttcatttgctgctcagagatagagaatggacattgtgtcacctgaaaatgtcttgctgcggcggtaactgaggctgcggaagctcctgaaagtgccgcaacgcctgcggaggctgcaagatagacccagacttgagctacactgagtcaaccaccaccgagaccttggacatgggagtggcacctgttaaggctcaatttgagggtgctgaaatgggagtgcccgctgagaacgatggctgcaaatgtagaccaaactgctcctgcaaccactgcacttgcaagtgaggtgtagggagagcaagcttcaagcagagatagcccttaatcaggacaaatgataaac

SEQ ID NO: 272691 - DNA, 384 bp, Glycine max
cccacgcgtacgcgcctgcgtctctctctgaattgactagcttaaatggctggtcctaggattgcccatgctaccttgaaaggtccgagtgtggttaaggagatcataattggaataacacttggcttatctgctggtggtgtgtggaagatgcaccactggaatgaacagaggaaaaccaggaccttctacgatttactggaaaagggtgagattactgttgatgcagaggaacagtgaaaatgttcttgatttgttgcctatgctctacatttataggctttttttatccgtgatatattcaattggctcttgaaatgtcaatgagccaacatactatgagattgaaaagaatgagcttcttgaactgattgaatactatgt

SEQ ID NO: 272692 - DNA, 440 bp, Glycine max
tgaaaatgaaggtccttgttttcttcgttgctacaattttggtagcatggcaatgccatgcgtgcgatatgttccctctccgaatgaacactggctatggtgcccgtactccggaggtgaaatgcgcaagttggaggcttgctgtggaagcacacaacatctttggctttgagaccattcctgaagagtgcgttgaagcaacaaaggaatacatccatggcgaacaatatagatcagactccaaaacagttaaccaacaagcttacttttatgccagagacctctaagtccatcccaaggacacatttgtgttcagtatagatggcaccgtactctctaatattccatactacaaaaaacatggatatggggtggagaaatttaactcgaccttggatgaagaatggggtaacaagggcaatgcaccggcactgcccgag

SEQ ID NO: 272693 - DNA, 182 bp, Glycine max
gaaaagaaaaaaaaaaaaaaaaaaaaaaaaatataaaaaaaaaaaaaaaaaaaaaaaaaaaaaggagaaaagaaacaagaaaaaagggaaagaaaaaaaaaaaaaaaaaaaaaagaaaaacaaacagagaaaaaaaaataaaaaaaacaggaaaaaacaccaaaaggaaagaacaaaagaaa

SEQ ID NO: 272694 - DNA, 473 bp, Glycine max
gggagaggtacagattgacaaggcttgagcaatataggaattttgagaacattcttacatctggggatgctgtggacaaggagtgtaagcaaatggagaagggtggcaattactatgaattcttctataatacaagaatggttaagcctaccatccttcattttcagctgagaaacttagtatgggcaacttcaaaacatgatgtctatcttatctccaactactcagttaatcactggtcatcattaagtggtaatttgtctgagataatcaattttgctgggcatgtggccccgacccctactaagagatatgcaggaaatttgttggaaggattttctcagacccagattagcacattagccgtcaaggataatcttcttgttgctggtggcttccaaggagagcttacttgtaagcgtttgaataagaaaggagtaagcttttggacaacggccacacatgatgaatat

SEQ ID NO: 272695 - DNA, 413 bp, Glycine max
cacaacatttgcggttctgcctgcaaatttttttcccctcaatcgtatattgctcaggtgggggtcctgttcccccccaagcacccctgagattcgttcgcaaaaagcttaataagaacaaaaaataaaaataatattcttcgatattatttcatttcaatttcgttttcgatttcgttttctgttttgatttgatcttccaatggcgtccgatggctttaccgacaagaacaccgtgttcagaaagctcaaggcgaaatctgaaaataacatgtgcttcgattgcaatgcgaagaaccctacctgggcgtccgacacgtatgggatctttctctgcatcgattgcaccaacgtacaccgcaatctcggcgtgcacatcagcttcgggaggtctacaaatttagactcatgga

SEQ ID NO: 272696 - DNA, 388 bp, Glycine max
aaaatagacaatacttgtctatggttattattggttgtatgtctgtatttggatgctctggatcggtttgcaagtaataagagtgttttcactgtcactttgtaaaaaaaaaaaaaaaaaaaaaaaaaaaaaaaaaaaaaaaaaaaaaaaaaaaaaaaaaaaaaaaaaaaaaaaaaaaaaaaaaaaaaaaaaaaaaaaaaaaaaaaaaaaaaaaaaaaaaaagggcgccccttttaaagaacccaagttaacttaccctttattgcaacttaaaaacttttttatagggtacccaaaattaaattaactggccgtcttttaaaaactctgtaattgaaaaaacctctgcgtaaccaaattaaatccccttgaaaaaaatccccttttt

SEQ ID NO: 272697 - DNA, 383 bp, Glycine max
gattgttgtgactcgttcttcttcgtcgttatcttcttcttttgttgtttgcgtgtttgttttggctctcacctgaaaatgtcttgctgcggtggtaactgtggttgcggaagcgcctgcaagtgcggcaacggctgcggaggctgcaagatgtacccagacttgagctacaccgagtcaaccaccaccgagaccttggtcatgggagtggcaccagttaaggctcaattcgagagtgctgaaatgggtgttcccgctgagaacgatggctgcaaatgtggagctaactgcacctgcaacccctgcacttgcaagtgaggtgttggagagctaaagctttaaacagagatggcccttagaaataatgattaaaactatatgta

SEQ ID NO: 272698 - DNA, 465 bp, Glycine max
caagtccatggctggcttccccaccagaaagaccaacaatgacattacctccattgctagcaacggtggaagagtgcaatgcatgcaggtgtggccaccagttggcaagaagaagtttgagactctttcctacctgccagaccttgatgatgcacaattggcaaaggaagtagaataccttcttaggaagggatggattccttgcttggaattcgagttggagcacggtttcgtgtaccgtgagcacaacaggtcaccaggatactacgatggacgctactggaccatgtggaagctgcctatgtttggttgcactgatgcttctcaggtgttgaaggagcttcaagaggctaagactgcataccccaacggcttcatccgtatcatcggattcgacaacgttcggcaaatgcagtgcatcaacttcatcggctacaagcccccaggcttctaaaggtgaaaaat

SEQ ID NO: 272699 - DNA, 341 bp, Glycine max
cccacgcgtccgcaactttgcccccttgtaaaacttcttattgtgatgtctaaaagcgaagacgtgaagcttttgggaggctggttcagcccatttgccctgagggtgcagattgcccttaacctcaagggtctagaatatgaggttgttgaagagaccttgaatcccaaaagtgacctgcttcttaagtccaaccctgtgcacaagaaaatcccagttttcttccatggagataaagtcatttgtgaatctgcaatcatagttgagtacattgatgaggcttggactaatgttcccttcatactttcacaaaatgcttatgatcgtgctaatgctcgatt

SEQ ID NO: 272700 - DNA, 451 bp, Glycine max
  unsure (1)..(451): unsure at all n locations
gtttctttcttcttctacatccactgcacaattgccacatgaatcattagttagggtttattcggcaagaaaagcaatgagtgcgtccaggttcatcaagtgtgtcactgtgggtgacggtgccgttggcaagacttgcatgctcatctcctacaccagcaacacttttcctacggactacgtgccaactgtctttgacaatttcagtgcaaatgtagttgtggatggaagcactgtgaatcttgggttgtgggatactgctggccaagaagattacaatagattaagacccttaagctatcggggagcagatgtattcctgcttgctttctctctcataagcagggctagctatgaaaatgttgccaagaaatggattcctgagttgaggcattatgctcctggtggtccaattattcgtggnggaacaaaacttgatcttcgggatgat

SEQ ID NO: 272701 - DNA, 435 bp, Glycine max
caaccctaacgcgtgcagagcagagagagacgcagccatggggcgaagacccgcgaggtgttataggcaaattaagaacaaaccataccccaagtcacggttttgccgtggtgttcctgatcccaagatcaggatttacgatgttggtatgaagaagaagggtgttgatgaatttcctttctgtgtccatctggttagttgggagaaggaaaacgtttctagtgaggccctggaagctgctcgtattgcttgcaacaagtacatggccaaatttgctggaaaggatgctttccacttgagagtcagggtgcacccattccatgttcttaggatcaacaagatgctttcgtgtgccggagctgataggctccaaactggaatgagaggagcttttggaaagccacagggtacttgtgctagagtggctattggaca

SEQ ID NO: 272702 - DNA, 386 bp, Glycine max
  unsure (1)..(386): unsure at all n locations
ancccgctngannngaaggccgccncgcgcttttagataaaagntctgccaaatcaagaggggggaatagatcatagtgtgtgtgggtgtgttaaacaatggctaagttctttgctgctatgatcttggcactcattgccatttccatgcttcaaacagtggttatggctgctaatgagcaaggaggccacttgtatgacaacaagagcaaatatggaagtgggagagtcaagagataccaatgcccatcacaatgctcgaggagatgtagccagacccaataccacaagccctgcatgtacttctgacagaagtgctgcaggaaatgcctgtgtgtgccccacatatattataggaataaagccgtgtgcccttgctacaacaac

SEQ ID NO: 272703 - DNA, 364 bp, Glycine max
ttgacggcggtgaagggaggagggtgttattgatggaaagtcttatataattgatatgaagaaagggaggatgaggattcggttgaaggtggcgctggctttgggggttgtggtgatttgtactggggtaggtgtgggggttatgcattttgtggagaagcttggatggttggattcgttttatctttcggttatgtcggttaccacggttgggtatggagaccactcgttcaagaccatgcacggtcggatttttgctgcgattttggtgcttgtgtctacgcttgctgtgtcccgggcgtttctctatctggctgatgccagagtggattagcgtcatacgaagatggcaaagtggattctt

SEQ ID NO: 272704 - DNA, 385 bp, Glycine max
attgagtttctgagataaccacggttctttttgattcatcaatggcaaccgcaattgtccgtgttttatgtttcgcctcacgatttcatgaatgcttacgcctcccatctcaagcgttccggcaagattgagcttcctgagtggactgatattgtaaaaacagctaaatttaaggaattggctccatatcatccttactggtattatgttaagtcttcctcaattgcaatatacatttatttgagaggccgtctttgtgttggtgctttccatagcatctattgtgtaatcatgacaaatggaagccggcccccacattttttcaaaatcatttttgctatttcaagacacattctgcaacaatttcaaaacattatcatttttt

SEQ ID NO: 272705 - DNA, 377 bp, Glycine max
ctaaaacttaatttaacttaacaattgctagctttctaaaattaacattcttaaactcaagcgtgtaacagcttttaatacgaagtttgtaaagtttgaatatggttgaatttagtagtaatggccattgagttgatacttgtctttcaattttcaggggatttacaaagttcagtcgaagtgagtatttgaagttgaagtctgagaacagaattgtgccggatggggtcaatgccaaggttcttgggtgtcacggacctttggcaaatcgtgagcctggaagagctttcttaccagctactgcttaagccatttagcagttagcactaggatactcattgaatatgtgggttttctttttacctggtgaatggata

SEQ ID NO: 272706 - DNA, 399 bp, Glycine max
cccacgcgtccgggtggcatcccaactggtcgatttagcaatggaaaggttccatcagaccttggagttgaagagttgggcattaaggagcttctgccagcatatttgaaacccaatctccaatctagtgatttgatcacaggggtctgttttgcttcaagtggctcaggctacgaccctttgacatcaatattagagtcatcgatgccattaactgggcaagtggatttgttgaaagaatacatagggaaactaaaagggctggttggagaggacagagcaagtttatcttaaccaacagtctattcattgtagtagcacgcagcagtgacatttctaatacctatcggactagatccctgctctatgatcttcctgcttacactgatcttttggtca

SEQ ID NO: 272707 - DNA, 381 bp, Glycine max
ggaatcttctggaggagttccatgcgaatcatggccttcgccctccaagcattcttggagtgagggaacatgtttttacaggaagtgtctcttccttggcttggtttatgtcaaatcaagaaactagctttgtaaccttggcccaacgagttttagcaaatcctctcaaagttcgcatgcactatggacacccagatgtatttgacagaatatttcacataactcgaggaggcattagtaaggcatcacgtgttattaatattagtgaagatatatacgctggtttcaacttcacattgcggctgggaaatgtcacacatcatgaatacattcaggttggaaaaggaaaggatgttgggttaaaccagattgccctctttg

SEQ ID NO: 272708 - DNA, 361 bp, Glycine max
cccacgcgtccgctgggttggatcagtaaggttataaaataaagttaattcatttaatttaatgattttttttatatattacttagtatttaattagtttgctttaaaatgaattaaaaaaaaaaagaatctacctcctccaagaaaactcttttataatcatttcttatctttattatttattttcttaatattattataatcattagatattaaaaaaaatgaaaacaataaaaaataattttgtaagaattattctcgtagtaagagtatcttttctcgtaaaaaaaatatttggttcaaggccagaattttacctaatataatgccttcttaatatttggataagtttcaaaaatat

SEQ ID NO: 272709 - DNA, 445 bp, Glycine max
  unsure (1)..(445): unsure at all n locations
cccacgcgtccgctgttcttgcgcgtgaacattcctcaggtaagccaaaaccatggttaaggataacaatgttatcccaaacggacacttccgtaagcactggcagaactatgtgaagacttggttcaatcagccagcacggaagacaaggagacgattggctcgtcagaagaaagctgtgaagatattccccagacctacggctggacctctcaggcccattgtacatggtcaaactttgaaatacaacatgaaagtgagaggtggaaggggattttctcttgaagaactcaaggcagcanggattcccaaaaagcttgcaccaaccataagtattgctgttgatcatcgttgcaagaactcgtctttggaaagtctgcaagctaatgtgcagaggctgaaaacatacaaggccaaattggttgggtttccaagacgggcacac

SEQ ID NO: 272710 - DNA, 299 bp, Glycine max
aataacctattttatatttatatttatggtacaagtgcaactactgtttagttggttcaaaaaaaaaaaaaagaaaaaaaaaaaaaaaaaaaaaaaaaaaaaaaaaaaaaaaaaaaaaaaaaaaaaaaaaaaaaaaaaaaaaaaaaaaaaaaaaaaaaaaaaaaaaaaaaaaaaaaaaagcccccccttttaaaaaaaccaaacttaataaacccttcaatccaacttaaaacttttcaaaaagttaccccaaaattaaataaaattcccttcttttaaaaacatttttaactttaaaa

SEQ ID NO: 272711 - DNA, 412 bp, Glycine max
cccacgcgtccgcccacgcgtccgcccacgttttcgtttaggatttcagcatcagtggctgcggcctgcatgcttcacggtgcaagcagccggcccgcaaccgcccgcaaatcctctggcctttccggaaccgtccgcattcccggcgacaagtccatctcccaccggtccttcatgttcggcggtctcgcgagcggtgaaacgcatcaccggccttctggaaggcgaggacgtcatcaatacgggcaaggccatgcaggccatgggcgccaggatccgtaaggaaggcgacacctggatcatcgatggcgtcggcaatggcggcctcctggcgcctgaagcgccgctcgatttcggcaatgccgtcacgggctgccgcctgaccatgggcctcgtcggggtctacgatttc

SEQ ID NO: 272712 - DNA, 410 bp, Glycine max
gatcgcctactggcggaaccatattgtggtcactgttctcgccgctttgggaatcgcgcccaaggggaccgtcgatgttcatgagatgctcttcaagaccgctgactatttgaccagagggggtgactctggcattttctcgccgatgcacatgatcctctgcagaaagccccatgacaaggacgaccataactgagcgtttcattgggaaattccaaaactataacaaccaccaccttgtttctttccggtactctcttttttttttttcataattattattatcttgggtttaacttattggtattagttattattattactatgaacttggtgtaatatgggatttgatcttttcaaattattgttattttgctatgttgatcatttaaaaaaaaaaaatagggcgg

SEQ ID NO: 272713 - DNA, 445 bp, Glycine max
cccacgcgtccgaggcgaaggactttaggttgttatttgggaattagggttgttcgcgtgggggagatgattgaggtggttttgaacgatcgattggggaagaaggtgcgcgtgaagtgcaacgacgatgataccatcggcgacctgaagaagcttgtggcggctcagactggcacaagagccgacaagatccgcatccagaagtggtacaccatctacaatgatcacatcactctcaaggattacgagatccatgacggcatgggtctcgaactctactacaactaaacacaacaaggtgtgttttatgcgtaatatactatgtgctgggaatgggataagcgctgaatgtaattctgacttgcgaaagttcccatgatttgaaataatgtacatcttcaaatgatattggggattatatacccgtgacaacttaagttgcttt

SEQ ID NO: 272714 - DNA, 447 bp, Glycine max
atccatccgcgcatattctcatttcaatttgcttttgcatttgcgtttcatttggcgttttgcgggtttctggaagcttcgttcgggcatcaatggcgtccttcgatgaagctcctcccggaaactccaagaacggcgagaagatcttcaaaaccaagtgcgctcagtgccacaccgtcgacaaaggtgccggccacaaacaaggacccaatctgaatggtttgcttggaagacaatctggtacaactcctggatattcctattccactgctaacaaaaacatggccgtgatttgggaggaaaagaccctctatgattacttgctcaaccccaaaaagtatattccaagaacgaagatggtatttcctggtcttaagaaacctcaggaacgtgcagatcttattgcatatcttaaagaatctactgcttaatgattaaattttcata

SEQ ID NO: 272715 - DNA, 442 bp, Glycine max
  unsure (1)..(442): unsure at all n locations
cccacgcgtccgcccacgcgtccganctcatatcaccaaaaacatagtactatacagccccggtgtctctttctctttctcttgactctaaagtctaagcatccatggccatggcgtctgcaaagctcaacaccttgtcttcccagtggatcgcccacaattccttctctcctcgccgtggatcctcttctcgccgagtctctcttccgatccgcgcttcttcttaccaacacgaactcgtccaaaccgccaaatctattgcatctcccggtcgtggaattcttgcaattgatgaatcaaatgccacatgtgggaagcgtttagcatccattggattggacaatactgaggtgaatcgccaggcctataggcaacttctgctcaccacacctggccttggtgaatacatctctggtgcaattctttttgaagaaacccttta

SEQ ID NO: 272716 - DNA, 187 bp, Glycine max
aaaaaaaaaaaaaaaaaaaaaaaaaaaaaatttaaaaaaaaaaaaaaaaaaaaaaaaaaaaggggggaaaaaaaaaaaaaaaaagggaaaagcaaaaaaaaaaaaaagaaacaaacgggacgacacaggcatgagacccaaaaacgcagaaaaaagggggcccgaaagaaaatatacgtggccgggg

SEQ ID NO: 272717 - DNA, 441 bp, Glycine max
gtgaagagtgagagagagagagagagagaggctcttggaatccaaaaatgagagaaatcatcagcattcacataggtcaggccgggatccaggttggcaactcctgctgggaactctactgcctggaacatggcatccagcccgatggcatgatgccaagtgactcctccttcggtgtagcccacgacgccttcaacaccttcttcagcgaaaccggatccggcaagcacgtccctcgcgccgtcttcgtcgatctcgagcccaccgtcatcgacgaagtccgttgtggcacttaccgtcaactcttccaccccgaacaactcatctccggcaaggaagatgccgccaacaactttgccagaggccactacaccgttggcaaagagatcgtagatctgtgcttggatcgcgtccgaaagctcgcagacaactgcactggtc

SEQ ID NO: 272718 - DNA, 406 bp, Glycine max
gcagcatcaaaggccattaaggaatggggctatacccttatcagaaatcacacacctcatcggctacaccacttcttgcttcggctccgttcccggtcctgaccactacctctccaaacaacttggactccgctcaacggtcaaccgcctcatgctcttcagccacggttgccacgctggcggcaccattctccgcgttgccaaagatatcgcggagaacaaccctggctcacgtgttcttgccgtctattccgagaccatgtttgcctcgtttcgcgctcctagcgaatccaacgttgaggttctcgtaagacaggctctgttcggagacggtgccgccgccgtcatcattggcgcggatcctaagcactccatcgagcatccactcttcgaactcgtgttggct

SEQ ID NO: 272719 - DNA, 404 bp, Glycine max
caccgcacgaatatcttgttgtttggagcgatctcgagaaaaactctgtaaacatgttggtttaggaggacctccttacaggtgatgagcttctctctgactccttccgttacaaggaaattgagaatggaatgctgtgggaagttgaggggaagtgggttgttaaaggagcagttgatgtagacattggtgcaaacccttctgctgagggtggaggagaagatgagggagttgatgatgcagctgttaaggttgttgacattgttgacacattcagacttcaagagcaacccgcattcgataagaagcagtttgttaccttcatgaagaggtttatcaagaatttgacttccaatcttgatgcacagcaacaagagttggttaagaagcacattgagggagca

SEQ ID NO: 272720 - DNA, 453 bp, Glycine max
cccacgcgtccgcccacgcgtccgcccacgcgttcgaagcaaatactaaaactgatatgtgggggctgaacctccgttatgtttttgtcattctcatgcaaagagattccgaggaaggatcagaaggtctctatagcctaaagttcacttctaaggaacaggaacaaagtgatgatgattcctatactgttgcttttgaggatcatgctgatgccaacaacttctgttttctattaaaatcgttttttgaagatttggggtcttttagtgctgatgcagttccaatgtcaatacaagaactgaatgaagaaataatatcacgtgccaagaaagtcgtagttgtgaaaaagaggcagcttcaactctatgctgggcaaccacttgctgatgttgaaatggcattgggctctataatagagcaagatcaaaatgcaccatcatcgccgtgatatg

SEQ ID NO: 272721 - DNA, 480 bp, Glycine max
cccacgcgtccgcttctttctctctcgctctttcttcaattccaagctttattcctcatgtcgttcagaggcctcagccggccaaatgcctcatcaggcatgggtgttgctgatcacagcaagaacaccttcatggaattgaagcagaagaaggttcaccgttatctgatctttaaggttgatgagaagaaaagggaagttgtggttgagaagactggtgacccggctgagagctatgaggatttcgctgcatctttgcctgagaatgattgcagatatgctgtctttgactatgatttcgtcacttctgagaactgtcaaaagagcaaaatcttcttcattgcatggtccccttcaacgtctcgaatccgagccaagatgctctatgccactactaaagacaggtttagacgagagctagatggtgtccattatgaaattcaggctactgaccccacagaaatggatcttgaagtactg

SEQ ID NO: 272722 - DNA, 308 bp, Glycine max
taaaatacattcctaaaataaaatagcagcagcaattatacgaattacttttttttgtttcctgtggttggatgaaacttaagagcagtggattatcatcattatcacatatgatgaagcaatatttcttcctttgtcgtccatcccgtaaccatgtctcagactgttgtcctcaaagttggtatgtcatgtgaaggatgtgttggagcagtgaagagagttctaggaaaattggatggtgtggaatcatatgacattgatttgaaggaacaaaaggtggtagtgaaaggaaatgtccagccagacac

SEQ ID NO: 272723 - DNA, 388 bp, Glycine max
atatagcccaagccctatacaaccaaaccctatcacacacccatttgattcagtttccatggctagcctcaaggttgcatttttggctgcagtgctctgcatggttgtggtgagtgcacccatggcacatgcagctatcacgtgcgggcaggtgacgagtagcctggccaattgcatcggttacctccagaagggaggaacgccgtcgtcgggatgctgcaacggagtgaagagcctcaatgccgccgccaagaccaccgccgaccgccagacggcgtgcaactgcctcaagtcggccgccagccaaatctccggcttcaacgccaacaacgccgtctcgctccccggcaaatgcggagtcttcatcccctacaagatcagcaccttc

SEQ ID NO: 272724 - DNA, 279 bp, Glycine max
accacgcgtccgcccacgcgtccgctggtttattatatcgtcactacttaactaaacatcagcttccttcctcccaaaaaaaaaaaaaaaaacaaaaaaaaaaaaaaaaacaaaaaaaaaaaaaacaaacaaacaacaaaaaaaaacataaaaaaaaaaaaacaaaaaaaaaaaaaaaaaaacaaaaaaattacaaaaaaaatgactataaaaacaactacgctacccaacataaaatcccttcataacaaactcctatttccaactatcccaataacc

SEQ ID NO: 272725 - DNA, 337 bp, Glycine max
agccttccgaaaaccgaagcacaaatggggatcgatcttttgccggaggtaaaagcaaaaaaaccaaaggaacagttcccaagtccaatgatatctatcttaagctcttggtcaagctttatcgcttccttgttcggagaactggcagcaaattcaatgccgttatactcaagagattgttcatgagcaacgttaacaagcccccattgtctttgtcaaggttgattaagtataccaaggggaaggaagataagattgctgtggtggtgggcaatataaccgatgatattcgtgcttatgaagttccagccttaaaggtcacagcactcacgtttac

SEQ ID NO: 272726 - DNA, 273 bp, Glycine max
cccacgcgtccgcccacgcgtccgcggacgcttgggcaaggccatcatcatggcagctgctgccccaatggcaagccaactcaagtccaccttcactaggactcttgtagctcccaagggcctctctgcctcttcaccacttcacctcgtgccttctagaaggcaattaaccttaactgtaaaggcactccatcagagaaacccacctatcaagtgattcaacccattcaacggtgacccattcattggaagcctgaaaaccccagttccatc

SEQ ID NO: 272727 - DNA, 375 bp, Glycine max
  unsure (1)..(375): unsure at all n locations
tttgttattgccaccatgcataggatcagcatcttatggtacattttttctgcagttttcagggggaaatctcagcctcactctgctgctttctccacctccttgctcttcgactaaactcagatacagtttaaggaaagtgttgctcaatttgcaacagaaaatattgcccctcatgcttccaaaatagaccacacaaattatttcccaaaggaggtgaacttatggaaaagcatgggagaatttaatctccttgggattactgcaccagaggaatatggagggcttggcctaggttacttgtatcactgtatagcaatggaagagattagccgtgcttcaagttctngtggtctttcttatggtgctcattca

SEQ ID NO: 272728 - DNA, 445 bp, Glycine max
  unsure (1)..(445): unsure at all n locations
tttaacaatgtcaaagtatattgtctcctgattagattaaaaaatttaagagaaattacggtggcctctattcagagaggaaaactaggtctagatattatgatgattcaaaatcagaagacattaattcatctaggcttaaggaaaaagataaataacacagttatgaaaaaagacatatttgatatcgaaccagttcgactgtgtagaaaaaacatttgacaattttttatgtatcaaaccataggtctttcattaattcagaagaataaacgaaaaatttatcacaaatacccagaaaaaattcatgttaataagaaaaatttttatgaatatattacaagaacaagagatcanaanataacaganaanaaagaaaaagataattctgatttacttgntcctgaaaacattttatccgctagacgtcgtagagaattgagaa

SEQ ID NO: 272729 - DNA, 326 bp, Glycine max
atctcattcacacattcacagttatactctctctctctttgtcgcttggatcactgatctcgtctcaattttcagatatgtcgacatctgataagccagaagtggtggaaaggggtagcaaggatgaaaaacacaaggaagatgatcaagaggaggggaagggtggattcattgagaaggtgaaggatttcattcatgacattggtgagaagattgaggaagctattgggtttgggaagccaactgctgacgttactgcgattcacattccatcgattaatcttcacaaggcagatcttgttgttgatgtgctcatcaagaacccg

SEQ ID NO: 272730 - DNA, 380 bp, Glycine max
ctgagtttccacactgcataccttaggtcttccgaattcgaagttaatttgcgggatggctaaggaaaaggctcagatcaacattgtggtggttggtcatgtggaccctgaggaggcaaccaccattaacgagctgaagaagcctgttgtggagaaagaagctccagggcatgccatatgaggtcatgcacgtactgtctcggagggtaaccagaaaattatgttaacaaaataatctggaaccctaatgtatcagtgtcatcatcagtgtgtagtttaagctagctttgctatggttacgttctttgagatgagagtcttgatgaacagtaccattctgatgtattgctttccttgaaagttaatgcatgcttcttatc

SEQ ID NO: 272731 - DNA, 416 bp, Glycine max
ctgcagttgtgtcttcttgccaagcaagcttaataggtagttcatcctctgcttgcaatgttcctggctacaaaaccacttctaatgtgatagcaatcaaagcaagaagagccaatctctgcatatacagcttcaatgctttgactttcagaccatccaagagggacatcaccttgtgtggtaattaaaagaagcagcttacacaagtaggcctagtactttggtcacttgtgtatacatacaaattccaagaaaataaaatgaaaaaaaaaactatatgttgtctttttgcagcccattaagggcatagaaccatagatctcttgtctctctctctcttcattgttttgctgcattattttgtttggtaacactgttttcatatcatgctatgttagaaaaaatatcatgctagt

SEQ ID NO: 272732 - DNA, 274 bp, Glycine max
gaaaatcctcaatcatctgtgtaaccaaacgctctctctatgtctctggaaaattctcggggtgtagataaaattttaatcatgtcacatcaagcgtatgctgacaatcaccattatgcttgacatataacgtcaccacctcactcacgctgctatcattctgcatcacggcatcgttcggtatcacagtaccatctagcatgacctcaaacctctcgagataactgccatcatgaatgactttaatgagactgaatcacttgctacaactgga

SEQ ID NO: 272733 - DNA, 248 bp, Glycine max
tgctgctgcattgaagggttcagatcatcgtttttcaacaaatgtcagtgccagactggatggtcaacaaaagaagctcaaccttccaatcctttcaaccaccactattggatccttccctcagactgtagaactgaggagggtacgccgtgagttcaaggctaacaagatctccgaggaagagtatgttaagtcaattaaggaggaaattcgcaaagttgttgaacttcaagaagagcttgatattg

SEQ ID NO: 272734 - DNA, 309 bp, Glycine max
aatttgtaggcatcccagctacttgcatttcttactatatcatcagaaggtacaaccaactgcttttattccaaagcaagttggaaacatgtacactgcgtctctttatgcagcatttgcctccctcattcacaacaaacatagcacattggcaggtaagagggtgatattattctcatacggaagtggcttaactgccacaatgttttctttgcaattactagacagtcaacatccgcttagcttgtcaaacatggctagagtgatgaatgtcgatggaaaattgaagtcaagacatgactttccccc

SEQ ID NO: 272735 - DNA, 292 bp, Glycine max
acctgtgtatgtgactctagcccaaaggaaataatataggagagctagactgcaagctcactgtactcaaatgcgacctgttggaatgccaccatctgttggtcctcgtgtgccaatgtatcccccaggtggtccacgtattggtcaacaattattttatagccaaggcccttctgctatcattccttcccagcctggatttggctatcaacaacaacttatgcctggtatgatgccatgtgcatctcctgtgccgaattttttcgtgccaatggttcagcatgtacaacat

SEQ ID NO: 272736 - DNA, 371 bp, Glycine max
ctctctccctctctctattttttatttttttttacgtttcctcttcaaatttatcactggcctcttttccatttcacctttacactctctccttcctttttttttttctttcactatccctttcgaactctctccgattagggcacacgcgatgcctctcttcctctccgacgaggagttcgcgtggtgctccggtgacggctctgccgtggccgcgaaggccgacgccttcatccgcggcctcttcaacgagctcgacaccgtccgctccaaggcccacgccgccgacatcaacgccgagcagaactgccttctcatcgagcagaagtatctctccctcaccgccgagttctccaaactcgagtcgaaca

SEQ ID NO: 272737 - DNA, 451 bp, Glycine max
  unsure (1)..(451): unsure at all n locations
gtcgctgctccgtaccagtttcactgcataaatttgagagaaaactctgcaaacatgttgggtggtcaggacctccttacaggtgatgagcttctctcggactccttccgttacaatgaaattgagaatggaatgctgtgggaagttgaggggaagtgggttgttaagggagcagttgatgttgacattggtgcaaacccttctgctgagggtggagaagatgagggagtcgatgacgcagctgttaaggttgttgacattgttgatacattcagacttcaggagcaacccgcttttgataagaaacagtttgttaccttcatgaagaggtttatcaagaacttgacttccaagctcgatgcanagaaacaagagttggttaagaagcaccttgagggagcaacttaatacctggtctctaagaataaggattttcaggtttttggtgggg

SEQ ID NO: 272738 - DNA, 420 bp, Glycine max
  unsure (1)..(420): unsure at all n locations
cccacgcgtccgcccacgcgttcgcgcatcgcttcggattatctagatctaaagaactaggcaaaacaaaataaaatataaaaaaagatatattatagcaactgaactattgtgaagcataaaagaacaaaaatcttatttagttgtaaagcaataaaaatatacagataaatgaagaggtgaaagaaagagagaaaaaaaatcaatgatatagaattctaatatgtaaaggtctatggattatctcataaaaggtagtgtaataaagcatcaatctaaatcaattcatatctatttatatatgaattaatttataacgtanacaaattaagagctctgaatcataaaaaactgagaatattgattcacgaaaaaacaaatcaatattcgaaaaaaaaaaagattattaattttaagata

SEQ ID NO: 272739 - DNA, 465 bp, Glycine max
cccagattcaaaaactcagctctgctctttcgtttggatctcaaaacatgtgcttcttcgattggttctatggcattctagcttccctcggtctctggcagaaagaagccaaaattctcttcctcggtctcgataatgcagggaagaccaccctccttcacatgctcaaagacgagagattagttcagcaccagccgacccaacaccccacttcggaggaattgagcattgggaagatcaagtttaaggcttttgatttggggggccatcaagttgcccgcagagtctggaaagactattacgcaaaggtggatgcagtagtttacctggttgatgcctttgacaaagagaggtttgcagaatcaaagaaggagcttgatgccttactttcagatgaatccatggcaaatgttccatttcttgtgctaggcaacaggattgacattccatatgctgcatcagaag

SEQ ID NO: 272740 - DNA, 328 bp, Glycine max
cccagacgcaaaaactcagctttgctcttgcgtctggatctcaaatcatgttcttatactattggatctatggccttctagctttcctcggtctatggcatacagaagccaaaatcctctttctgggtctcgataatgcaaggaagaccatacttcttcacatgctcaaagacgagagattagatcagtaccagccgacccaacacgactacttcggaggaattgatcattgtgaagatcaagtttaaggctgacgatttgaaggtgccatacagttgcctgtagagcctctaaagactattacgcacaggttgatgcagcattttac

SEQ ID NO: 272741 - DNA, 366 bp, Glycine max
gctgattggtgtggaaccagtttaaagtccagtgctctcaggaggaaagcctggtccacacaagattcaagggattggtgctggttttatccctggtgtcttggaagtcaatcttcttgatgaagttattcaaatatcaagtgatgaagcaatagaaactgcaaagcttcttgcgcttaaagaaggcctatttgtgggaatatcttccggagctgcagctgctgctgcttttcagattgcaaaaagaccagaaaatgccgggaagcttattggtgccgtttttcccagcttcggggagaggtacctgtcctccgtgctatttgagtcagtgagacgcgatactggaagcatgacttttgagccctg

SEQ ID NO: 272742 - DNA, 449 bp, Glycine max
  unsure (1)..(449): unsure at all n locations
taacagcacatttcaaaatgaagcattgcattttataacattttctaagttgtttcgctttggtgctgttgctagtcgcaacaacctatgccactgttgtccctaccaccacccaaaagccaccaagaagctttgcaaaccaattcctcatcccccagaacgcggcacgtgcggtgctgaggctgcggccattggtgtgggactccaaattagcacactacgcgcaatggtatgccaaccagaggcgcaacgattgtgccctagagcactccaacggaccttacggtgagaacattttctggggcagtggcacggngtggaagccagcacaagctgttagtgcattggtttgaagacgcccaatggtacaattattgcacaaatcttgtgccaatggacaaatgtgtggacattacactcagattgtgtggagcaccaccagaaaaatt

SEQ ID NO: 272743 - DNA, 296 bp, Glycine max
  unsure (1)..(296): unsure at all n locations
gtcgactccacgtccgtccgctcgctcgcaacctcacaactnngtcttccttctctattggtttttagcttcctccaaattcnttcgcgcgagcatggttncttcaaaantgatanttgatttgctaaatncccccggctgagcttgagaagaggaaacacaagctcaagcgtcttgttcagtcaccaaactctttcttcatggatgttaagtgccagggttgcttcaacataaccactgtctttaacccactctcagactggtggtggaatccggaaatgccagaccgtcttgtg

SEQ ID NO: 272744 - DNA, 251 bp, Glycine max
gatgaaaatgaaggtactcgttttcttcgtttctacaatattggtagcatggggtttccaagcggtcgatatgttccctctccgaatgaacactggctatggtgcccgtactccggaggtgaaatgcgcaagttggaggcttgctgttttagcacacaacatctttggctttgagaccattcctgtatagtgcgttgaagcaacaaaggaatacattcatgtcgaacaattataggtgagactccataaca

SEQ ID NO: 272745 - DNA, 313 bp, Glycine max
gttaccactcatggcagagcttgagagttcttatgttatgcctaagcttatatcatttgtcgcatctctcctcaaaagggtagctcaatctaatgatcttaaccagcaacaactcctacaccaaaaggtctcagctttccatggcttgactcgccccaccatctcaattcaaagctaccttgagagaattttcaagtatgccaactgcagtccatcatgcttcattgttgcatacgtctaccttgatcgcttcactcaaaggcaaccctgcttgcccatcaacttctttaatgtgcaccggatactcatcacc

SEQ ID NO: 272746 - DNA, 333 bp, Glycine max
  unsure (1)..(333): unsure at all n locations
tgctttctgacacctggaatgaacattcgccttgttggagaggctaatgattatgttgggaagggcattgctggaggtgagttggttatcactccagttgacaagaccggttttgaacctgaggatgcagctattgtagggaacacttgcttgtatggtgcaactggtggacaggtcttcgttagagggagagcaggggaaagatttgctgtgagaaactcgcttgctgaagctgtggttgaaggtgcaggagatcattgttgtgagtacatgactggaggctgtgtggttgtcttgngaaaagtgcgtagaaatgtagctgctggaatgact

SEQ ID NO: 272747 - DNA, 417 bp, Glycine max
gaagaggttgtcgaccttaagggcgagcttgttatgcttcgccttcagaaatcggctcgagcgagttcaagtccagcgaattcggtcgcatgcgcaagaggattgctcgcatgcttactgtgaagcgggaaagagaaattgaggagggtatcaataagaggttgtccagaaagcttgataaaaaatggaagaaaagcattgttgtaagaccacctccatctttaaagaagctccgggaggaagaagcagcagcagaagctgcagaagctgaaaaagctgcatgagcttacacataaatatgcaagttacagagttcaatggttaaaattattgttcagtcataattttcttggttaaatggatggtggttgtctcgtgccttatataatctaatccgaatgaattaaggttggtccc

SEQ ID NO: 272748 - DNA, 356 bp, Glycine max
gtgagggccttccatggcttccgcttgtgctatctctgcaattacagctgttgccatctctagtccgagttccgggcagaagaatggatcaggaggttgttttcttagtggaaggaaattgagggtgaaaaaggagagagcagcaattggaggacgatcgatgggcactacagtgtgcgcagttgctgagcctgacagacctctatggttcccaggcagcaccccttctccatggcttgatggcactctacctggagacttcggctttgaccctcttggtcttggatctgacccggagagtctgagatggaatgttcaggcagagctagtgcactgcagatgggcaatgttgggtg

SEQ ID NO: 272749 - DNA, 282 bp, Glycine max
cccacgcgtccgtgacaaactaaagttgtacttaataaaaaaaaaaaaaaaaaaaaaaaaaaaagaagaaaataaaaaaaaaaaaaaaaaaaaaaaaaaaaaaaaaaaaaaaaaaaaaaaaaaaaaaaaaaaaaaaaaaaaaatatcctcacttttaaaaaatccaaatttacttacccttacattcaacttaatatttattctatagagtaacctaaattaaattcactgtcaaacattttaaaactatttaactgaaaaaaccttgccttttcccaattt

SEQ ID NO: 272750 - DNA, 422 bp, Glycine max
  unsure (1)..(422): unsure at all n locations
gttaccactcatggcagagcttgagagttcttatgttatgcctaagcttatatcatttgtctcatctctcctcaaaagggtagctgaatctaatgatcttaaccagcaacaactcctacaccaaaaggtctcagttttccatggcttgactcgccccaccatctcaattcaaagctaccttgagagaattttcaagtatgccaactgcagtccatcatgcttcattgttgcatacgtctaccttgatcgcttcactcaaaggcaaccctccttgcccatcaacttctttaatgtgcaccggttactcatcaccaacgttattgggggctgcaaaattcatggatgacttgttagtatctcaatgtgatccatacacttgttaatntttgtttcttttttaaatctaatacccttaaagtcta

SEQ ID NO: 272751 - DNA, 389 bp, Glycine max
acctgccttccgtgtgaaggaaggggatcacgttattattggtcaatgcagggctctctctaagacagtgaggttcaatgtcttgaaagtgatcccagctggatcttctagtggtgcaaagaaggcttttactggaatgtgagcttcgatttccagtttttattgaagaaaaatgttaccttgttatttagtagatctgatttcttttctggaaggtgacatattaaaaccttatcaattttggattttctttgaggtttcgttctggctttatgtttaggattttgttatacattatgtttttcgaatactatttgccttttaatttttgaaactatgcagactcttcatttgctttaccagtaatatatttagtttactcgggtttc

SEQ ID NO: 272752 - DNA, 371 bp, Glycine max
cccacgcgtccggtttttatttctctcttctctctgcatcgcttcaggttcttctgaaaagaggtgtcgcgtgtatgttggtaacttggattcacgagtcaccgagagagatctcgaagacgaattccgtgttttcggagttattcggagtgtttgggttgcacgtagaccacctggttatgcttttattgactttgatgatcgcagagatgcacaggatgctatccgtgaattggatggcaagaatggttggagggttgagctttctcacaactctagaggtggaggtggtggtcgtggtggtcgctcttggtggttctgatttgaaatgttacgagtgtggtgaacctggtcattttgctcgtgaatgt

SEQ ID NO: 272753 - DNA, 329 bp, Glycine max
attcccgggccatgctatggcgacaatgtcggcgacacagtactattcggagacttttattctgcgtcgtcaaagcctaagttgtggacatacttgattaaagatgggaaagttgttggggtctttctggaaggtggaactcctgaagagaaccaggctattgctaaagttgctaaggtccagcctccggttgcagatgtacatcaacttgctaaggaaggcctttcctttgctagtaaaatataatggttttaatagggaaggataaaaatgcttggtggtttgcatagaagattgtatctgatctggctttattttactctgaatta

SEQ ID NO: 272754 - DNA, 347 bp, Glycine max
  unsure (1)..(347): unsure at all n locations
agccggtcacccttcccttcccacaagacccacagttctacttccacagccatcgaaatggtgacagcagcacagtcactctttctatattccttgctttctgctttcatcttcactctgtttttgggggtcagatcttaataccgaaggcttcgtattctgtttgaatattgatatctattgggagtggagtagtattgagatcgagcgtaaaagaaaggcgatgtttttgtttgattggttttatgggattctggcatcgcttggattgtggcagaaggaggccaagatcttattcttaggtctcgataatgccgganagaccaccttgcttcacatgctcaaag

SEQ ID NO: 272755 - DNA, 450 bp, Glycine max
gcgacgcctcgctcacaaagcgctccgatgggccgcgtgttgaacccgctgcgcgaaatgggcgtgcaggtgaaatcggaagacggtgaccgtcttcccgttaccttgcgcgggccgaagacgccgacgccgatcacctaccgcgtgccgatggccttcgcacaggtgaagtccgccgtgctgctcgccggcctcaacacgcccggcatcacgacggtcatcgagccgatcatgacgcgcgatcatacggaaaagatgctgcagggctttggcgccaaccttaccgtcgagacggatgcggacggcgtgcgcaccatccgcctggaaggccgcggcaagctcaccggccaagtcatcgacgtgccgggcgacccgtcctcgacggccttcccgctggttgcggccctgcttgttccgggcttcgacgttaccatgctcaacgtgctgatg

SEQ ID NO: 272756 - DNA, 368 bp, Glycine max
cccacgcgtcctcccacgcttccgtacgttattatataagactacagaacgaggattaagctgcaagatttactatgatggagacccacacctctaccaatttcacaagcactcttcaattgacctaatttccctcccaaaagatttcttcaagttcaactccatcaatatgtatcatatagtcatcaataaccccaatgtcttccatgtccggcataagtgagtcttcatttgttgatgtgccactatattatctcctatccattcaccttaattcctttctttgttggtggacttttttatacctttttttttaatatctattatttattgttctttaacttctcatcttgttgttttcttctata

SEQ ID NO: 272757 - DNA, 303 bp, Glycine max
cgaccgacgcgtccgcaagagagagagagcgagagagagagagtgaatggcttcacttggtggcaatcgttatgttggatgaatccaaaacagccttgacatcgatggtttagctcgctttgctgttgaagaacacaacaaaaaacagaatgcccttttggagtttgaaaaggtagtaagtgcaaaacagcaagtggtttctggtaccttgtacaccatcactttggaggcaaaagatggtggtcaaaagaaggtttatgaagccaaagtttgggagaaggcatggttgaacttcaaggatgt

SEQ ID NO: 272758 - DNA, 419 bp, Glycine max
ataacgcaaggcagaaagcaagctcatcctatatttttaaaaatggcagcagcctcctccattgcggtctcttccccatccttggctggcaaggccgtgaagctgggcccatcagcccccgaagtcgggagggtcagcatgaggaagaccgtcaccaagcaggcctcctccggaagcccatggtacggcccagaccgcgtcaagtacttgggcccattctctggcgagcccccgtcctacctcactggcgagttcccaggtgactacggctgggacactgctgggctttcggccgacccagaaaccttcgccagaaaccgtgagctcgaagtgatccactccaggtgggccatgctcggggccttgggctgcgtctttcccgaactattgtcccgcaacggggtcaagtttggagaaac

SEQ ID NO: 272759 - DNA, 384 bp, Glycine max
cccacgcgtccgaaagaaatatttctaatattctttagaataatcaaaaagaggattaaattcaaataaattttagatagaaaaaagacttaaaaaggaggatttgaaatgcgagatctaaaaacatatctttccgtggcaccagtagtaagtactctatggttcggggctttggcgggtctcttgatagagatcaatcgtttttttccagatgcattgatattcccttttttttcattctagttattgacacggaaaggggtgaagaagattatagatccaattaagtattaaatatatgtaattaatatgtaattaatctcctcttctttatttcgtcttttatttcttcttttttttacaattgtaatagaataagttagg

SEQ ID NO: 272760 - DNA, 467 bp, Glycine max
ccttgctcttgtttgttccttttattgcttctttcttgatcatgtcgcttgtgggtaaaattagtactgaaattggggttcatgcaactgctgcaaagtggttcaacctctttgcaacgcaactccatcatgttcaaaaccttactgatagagtgcatgaaaccaagctgcatcatggtgatgactggcatcacaacgagtcgatcaaacactggacttgtacaatagatggtaagattacaacatgtctggagagtattgaatccgttgatgaaccgaacaaaacaatcacctacaagctcttcggaagagatattggtcataagtataaagtctttaagctcatttttcaagctattgacaccgatcatgggggtgttattatcaaatggaccgttgaatatgagaagattgatgagaatgttgatcctccgtatggctacatcgaatacctgcacagtggcagt

SEQ ID NO: 272761 - DNA, 403 bp, Glycine max
cccacgcgtccggatacacatatctagaatcttggtactcgatatgaatggcggtgatctggttcttgctacaattgtggtagcatggcaattccaagcgtacgatatgttgcctctgcgaatgaacactgtctatgatgcccgtactccgcaggtgaaatgcgcagattctacgctatgctactcatactcacaatatacttagctaagagaccatgacacattagtgctgtgaattcccccaggtatacgctaattgcagagaacatatatcagactcccaaacaggtaacctacaagcttacttttatgccacagaccttgaagtccatgctcttgtacacttatgtgttcaatatctatggccccttactctgtaatatttcatacttcatgatacatg

SEQ ID NO: 272762 - DNA, 382 bp, Glycine max
caagtaggctatactaaggtgaaaaaggttttatggcagctgcaacatctagtgctgtgtggacggttttggatctcacttcttgtgtggaggaaagaggagccatgcccttcttgctgctagcattggagggaaagttggtgcttctgttagtcctaaaagagttattgtggcagttgctgctgcaccaaagaagtcatggatccccgctgtaaaaggtggcgggagtttcatagacccataatggcttgatggctcactaccaggtgactatggatttgacccactaagactagtaaaggacccaccattcctgaaatggtatagagaagctgaactcattcatggtaggatgacaattgctgcagctgtaggcatcttc

SEQ ID NO: 272763 - DNA, 315 bp, Glycine max
agccttgtgtcaaggcaactaaagcttctcttgctttgcaagagagggaggagtgagtgacgtggaaggagtgatacacagaacagtggaagtgaatggcataaaaatgcacatagcagagaaaggagagggtccagtggtgttgttcctccacggcttccctgagctctggtactcatggcgccaccagattctctctctcagctccctcggctaccgcgccgtcgctcccgatctccgtggctacggtgacaccgaggcaccaccttcaatagacagctacacttgctttcacatagtgggtgatctcgttgc

SEQ ID NO: 272764 - DNA, 286 bp, Glycine max
cacaactgtgatgttccacatgtgaatcgcactgactatcagcttattgatatctctgaagagggctttgtgagtctgttgactgataatggaaataccaaggatgatctgaagcttcctactgatgaggcattgcttgctcagattaaagatggattttctgaaggaaaagatcttgtggtttctgttatgtctgcaatgggagaagaacagatctgttcactgaaggacatcggtcccaaaaattaatatgatgctatggctgtagctatagctgatagcacgc

SEQ ID NO: 272765 - DNA, 446 bp, Glycine max
  unsure (1)..(446): unsure at all n locations
cacaagacatcatcatccatggctgcctccgtctccactgtcggagctgtcaacagagctctggggaacctgaatgggtctggacctggggtttcagctcccagttcatccttctttgggagcagcttgaagaaggttattggctcaagggtccccaacacaaagatttcctctggaagcttcaagattgttgctgtagaagagaagaaagagattgaagagacccagcagaccgacaaggacagatggaagggtcttgcctatgatatctcagacgaccaacaggacatcacangaggaaagggtttggttgactcccctttccaagctccacaggatgctggaactcactatgctgtcatgagctcctacgagtaccttaacacttgacttcgccagtacttggacaacaacctggatggattttaccttgcttcagcttttat

SEQ ID NO: 272766 - DNA, 342 bp, Glycine max
  unsure (1)..(342): unsure at all n locations
atggcctccactctctctatatcctcttcattcactccttgttgatgccaagcctccaactccganacaatgcgtcacccttcccactcttccccctccaccttttcactctcagactcgtccttggaagaccactgctttctgtcgtaggcttgctcgcaattttatggcaatggccaccacaagaaaagcagccgcaacaaaagtttgccgcaccacttgaccttcttatgcccaaacccccaaaaatgtgaagactattcaagaagcttgggaccaaggttaagattaatatgcagtgagttcactggcccgtgctggtgtggttgcattggtgggctc

SEQ ID NO: 272767 - DNA, 221 bp, Glycine max
tcgcccacgcgttcggatcgagatttctagaaactcttgtgatgaaaattaaagtccggtgtttcttctttgctacaatttttgtagcatggcaattccattcgtaccatatgttccctcttcgaatgaacacttgctattgtgcccgttactccgaagtgaaatgcgcaagttggaagctttgtttttaatcacacaacatctttggcttttagaccatt

SEQ ID NO: 272768 - DNA, 382 bp, Glycine max
  unsure (1)..(382): unsure at all n locations
cccacgcgttcggagagctcaggctagaattttggctgattatgttgataagaagatatgggatcttggaaggaagatttggacatcaaaaggagaagaaaaagaagctgccaagaaggagttcatagaagcccttaaattgttggaggaacagctgtgatacaagacttattttggaggagacaatctaggttttgtggatatagcgcttgttccattctacacttggttcaaagcctatgagactntgggcaccctcaacatatagagtgagtgccctaagtttattgcttgtgccaagaggtgcctttagaaagaaagcgttgccaagtctcttcctgatcagcttatagtttatgagttcattatggatctaagaaag

SEQ ID NO: 272769 - DNA, 436 bp, Glycine max
aagtagttgagaactaagaaggagaagcaaatggcttcctcaatgatctcttccccagctggtccactgtcaaccgtgccggtgccggcatggttgctccattcactggcctcaagtccatggctggcttccccaccaggaagaccaacaatgacattacctccattgctagcaacggtggaagagtgcaatgcatgcaggtgtggccaccagttggcaagaagaagtttgagactctttcctacctgccagaccttgatgatgcacaattggcaaaggaagtagaataccttcttaggaagggatggattccttgcttggaattcgagttggagcacggtttcgtgtaccgtgagcacaacaagtcaccaagatactacgatggacgctactggaccatgtggaagctgcctatgtttggttgcactgatgcttc

SEQ ID NO: 272770 - DNA, 386 bp, Glycine max
gagctggatggtcactttcccaaacatatatttgctcttagatccaaatccagcaccaggagagttatcaagtttgagtttgagaagttctccttcatggatgaaatggtccatagcccaactgggctggaagagttcatcaaacttggcagaggcagccaaccccaccaacagcaaaagtcccacaaacactcccaacatcttgaaccagcgccaagttgttttcctggtggatgagacgccaataagggtgcacacgaacctggaacacaagggcattcccttcccgaaggaccaagccatgggcgtgtacagctctatctggaacgcggacgattgggccacgcagggtggtcgtgtgaagacagattggagccacgcaccct

SEQ ID NO: 272771 - DNA, 323 bp, Glycine max
ctaagttattctgctgataatgatcctctagcatcttcaatgtcttctggccatttgttctagacagcatattcagaaagagggaacaattccatatccaacttctgtaattagtgttgtcgagaacatctgatccacttcagcttctacatctgttctcttggcaaatcgaccttttatacgaggtctagtctctgcataggccttccttgaggcatacctgattgtcttctcaaattttctcatcttctttttctccctgtaccttaggactctggcctccctgtccattggagaaaaatgggaaggcacctgaattggag

SEQ ID NO: 272772 - DNA, 408 bp, Glycine max
gccacgcgtacgaacaaaaaccctaaaaatgccgtcgatggggaggaagcgaatggtatcaggcaaatattgtatatccactcgagccacactttgaagcatcaacaaccgaaaaccgaatatgccgctcaagaatacgaagaaatctacgaggaagttgaggaagaagaggaagaggacgacgtctaagaggaagaagacgaagaataggaagaccaggaaaacgaggaaggggaagaagaataacaagcagaatacgacatactcaaacaacagcagccgcaacagctagacgaatacgacatgaccatatcgaaacttctggagacgcattgcaaggaccagcttatgaaacttctttgcgacacagtggataatcaccgcgacgtggatgagaggatccgacac

SEQ ID NO: 272773 - DNA, 457 bp, Glycine max
ctcacaaacacacactgaactaaaaaacatcaaaagagacatggctgagcaaaccttcatcatgatcaagcctgatggcgtccaaagaggccttattggcgagatcattagcagatttgagaagaaaggtttctacttgaaaggtttgaaacttgttactgtggaccgtccttttgctgagaagcactatgctgatttgtctgccaagcctttctttagtggtttggtggattacattatctctggccctgttgttgccatgatctgggagggcaagaatgttgttacaactggccgaaagattatcggagccacaaacccagctcaatctgagcctggaactatccgtggtgactttgccattgacattggaaggaatgttatccatggaagtgatgcagttgaaagtgctaacaaggaaattgcattgtggttccctgagggccctgctaactgg

SEQ ID NO: 272774 - DNA, 441 bp, Glycine max
aaagcgttggccatggcaaacatgattgtggcttccaccaaacctctggttccagtgctgcaccagttcccgttcccccacacccaaagtccccattctccaaatttcactccccaaagccccaaccttgaaactgaaactcccgatttcaaagccccagatgctgtccctccttggagggatagcaccactggtcttggccagaccctccctcgcagaagaaattgagaaagcagcactctttgacttcaacctcacccttcccataataatggtggagtttctgctgctgatggttgccttggacaagatatggttcaccccgcttgggaaattcatggacgagagggacgcggcgatcagggagaagctgagcagcgtgaaggacacgtcggaggaggtgaagcagctggaggagaaggccaatgctgtcatggcggc

SEQ ID NO: 272775 - DNA, 430 bp, Glycine max
ccggtgtccagggttgcatcttagccactttaattctccacgacgaggaaatcccagtcaccgctgagaagatcaacgctctgttgaaggcttctaatgtctccgccgagtcttactggcccagcctcttcgccaagctcgcccagaataagaacatcgaagacctcattttgaacgccggcggtggtggggccgccgttgcagttgccgctcccgccggcggtggtggtggtgccgctgctgcagccgcacccgccgccgaggaaaagaaggaagaagtgaaggaagaaagtgacgatgacatgggtttcggctcgtttgattagatctttttatatagttgtagccagattttgagtctttgaattgaaatcttgttctgttctatataattcttattgaagggattcttagctaatctactatcata

SEQ ID NO: 272776 - DNA, 333 bp, Glycine max
caaaagatggacctccaacctttgagcagcccaagatgactctggagaagcgcttgaggtatggtaacatgcttgtccaagaacaagagaatgtcaagagagtccaattggctgacaagtacttgaacgaggctgcacttggaaatgctaacgaggatgctattaacaggggaactttcttccaatcttgaattggaggcaaagcaaacttggcaagtaaatatttctgttcctgaaggttgtgctgatccaagtgctagaagttgtgatgggacttgcgtgtaacattcttagaattctcaatgtcttaggtgcaaagagaagatgccaagt

SEQ ID NO: 272777 - DNA, 336 bp, Glycine max
acgaagtgcagacacaagtagtttcgattaggaggaagaaaagtctgagacgtataggcataacatgacagaagccatgggtgctgttttgacttataggcatgaattaggaatgaactataatttcatccgtccagacttgattgtgggatcatgcctacagactcctgaagatgtagacaagttgcgtagaattggagtgaaaactatattttgcttacaacaagattcagaccttgaatattttggagttgatattaatgccatacgagaatatgccaagacatgcaatgacattcaacacttgcgtgctgagataagggactttgatgcatt

SEQ ID NO: 272778 - DNA, 337 bp, Glycine max
caaggtcactgatttgtgcaaatgatgtctttgcagaggaccaagttgttggcttttgtcattgtccttgtttccttcacatgtagtctctcccttgctatgtccagtaaccagttggagcagtttgcttcggaggaagaagtgtttcaactattccaagcgtggcagaaggagcataagcgtgaatatggcaaccaagaggagaaggcaaagaggttccagatattccaaagtaatttgaggtacatcaacgagatgaatgcgaagaggaagtcacctacgacgcaacatcgtttgggtctgaacaagtttgctgatatgagtcctgaggagttta

SEQ ID NO: 272779 - DNA, 453 bp, Glycine max
cacttcgctagtaataagagaagagagagagagagagagagagagagagaggagaatgttgagtctctcagttgcttcaccttcttcttcaaccatttcctttctcccaaagccattcaatggcattcagctccgtcgcactgccacatgctccatcccacccacgaagcgcagctcatttgtgccggtggtggtgatgtctaagaggacggaggaattgaaggaaattagacaaatgactacggaacgaattaacgaagaggttgtcgaccttaagggcgagcttgtcatgcttcgccttcagaaatcggctcgcaacgagttcaagtccagcgatttcggtcgcatgcgcaagaggattgctcgcatgcttactgtgaagcgggaaagagaaattgaggagggtatcaataagaggttgtctagaaagcttgataaaaaatggaagaaaag

SEQ ID NO: 272780 - DNA, 440 bp, Glycine max
cgacttcaccgccggaaacggaaccggcggcgagtcgatttatggcgccaagttcggcgacgagaacttcgtgaagaagcacaccggtcccggcattctctccatggcgaacgccggttccggaaccaacggatctcagttcttcatttgcacggagaagacagagtggctcgacggaaagcatgtcgtgttcggacaggtcatcgaaggattgaacgttgtcaaggacatcgagaaggtcggatccagctccggcaggacctccaagcccgatgtcatcgtcaactgcggtcaactctcttagacgacgttgacccgcggctttaatctctgaatctgcgttatttcttgtcgtgtcgattgtgccttgacagtctcttctgttctttctcgcagacgcgtttaggggattgaggtgttaaggatatcatttcgaaacc

SEQ ID NO: 272781 - DNA, 445 bp, Glycine max
cccacgcgtccgccatccaaaccttaaaaagattcagtgaagaacaacgttaatggcatctcgtggtgtgcaagcagttcatcctcctccattaacatccacctccgacccacctcctctttttgatggcactaccaggttgtacatcagttattcttgcccctatgcacaacgtgtatggatcgctcggaacttcaagggactaaaagacaagatcaatttggtccctataaaccttcaagacaggccagcttggtataaggagaaagtctaccctgaaaataaggtgccatccttggagcacaatggcaaggtgttgggagaaagtcttgatttgatcaaatatgtagatgaaaactttgaagggacacctttgtttcccagagatcctgccaagaaagagttcggagagcaattgatatcccatgttgatacattcagcaga

SEQ ID NO: 272782 - DNA, 456 bp, Glycine max
catccatagacatggccaccgtcacttctgcagccgttgctattccctcattcactggcctcaaggcaagcgcaggcaaagtgagtgccgcagttaaagtctcagctccccaagccacaaggttgggcatcaaggcttcgctgaaagacgttggagtcgctgttgtggccactgccgcgagtgcagtgctggctagcaacgccatggccattgaagtgttgctgggtggtgatgacgggtctctggctttcgttcccaacaatttctccgtggcctctggggagaagatcgtgttcaagaacaacgcaggtttcccccacaacgttgtgttcgacgaggacgagattcctagcggcgtggatgcaaggaaaatctccatgagcgatgaagaccttctcaatgcgcctggtgagacttacagcgttactttggatgctaagggaacctacagtttct

SEQ ID NO: 272783 - DNA, 423 bp, Glycine max
cccacgcgtccgcccacgcgtccgttcaaattctgcttcacctttcattcatttcacttcagagagagagagaacaaaacagaatgggcgtcgtggtgatcgacggcagcaccgtgcgcgacttcgtgaacgacgaaaccgccttcaccaagagcgtggacgagcagttcacggcgctggacctcaacaacgacggcgtcctctcgcgctcggagctccgcacggccttcgagtccatgcgcctcatcgagacgcacttcggcatcgacgtttccacgccgccggagcagctcgcgaagctctacgactccatcttcgacaagttcgacggcgaccggagcggcgccgtcgaccgccgcgagttccgcgacgagatgaggaagatcatgctcgccatcgccgacggcctcggatcgttcccca

SEQ ID NO: 272784 - DNA, 443 bp, Glycine max
caattactactttctctctctttgtaacttgtaagcatggagtcctcaaagatctatgcttacctcttcctttgcatgctcttcctctcctccgccactcccattctcggttgtggctactgtggcaaaccccccaaaaagcacaagcctggtaaaacaccaaagacacccacagtacccgttgttaagccaccagtcacaatccctcccattgttaagccaccagtcacaatccctcccattgttaatccaccagtcacaatccctcccattgttaatccaccagtcacaatccctcccattgttaatccaccagtgacagttccacccgttgtgcttccaccaatagtgaagcccccgggttttctccctccaattcttaacccaccaagtacaccaacaccgtcgacggtgaagagagggaacactccatgtccaccacc

SEQ ID NO: 272785 - DNA, 292 bp, Glycine max
gtacttaaactacgttccgagttgtttttgctttttgagatttcatcatcctgtatttttggtttctgttttcggacttcaatggaaattaatggatgagaactaatgaataagctattgtgttgtgttgctttgtttcaaaaaaaaaaaaaaaaaaaaaaaaaaaaaaaaaaaaaaaaaacaaaaataaaaaaataaaaaattgatcaaaaaataagaaaaaaaaaaaaaataaataaaaaaaaaaggggcggcccttttaaaggatccaagtttacttacccgtgcttgc

SEQ ID NO: 272786 - DNA, 333 bp, Glycine max
ccgtctccgtctccacctcctgtccttcgttgcacttcgctttttccaaaaccaatcgcatcagcatcactctcgtcgccgccgtcgtcgaccaccgcaagagccatcgcactccgccgtcatccgttagggcaaaaatgagtcgaggaagtggaggtggatacgatcgtcacatcactattttctcccctgaaggacgtctcttccaagtcgagtatgctttcaaggctgttaaggccgcaggaatcacctcaattggtgtccgaggaaaggattcgatttgtgttgttactcagaagaaggttccggataaccttttggacaacacaagtg

SEQ ID NO: 272787 - DNA, 359 bp, Glycine max
gaatccgggggccgacccacgcgtgcgctgacgttcattctaacaaagatgttttaattttgacagatgaaaaggccaccaggctctcgggtgcgtctatagatgatgcagctgtgattaatgatttaatcgtcaagttagaggggtgccgtacaaagctgcaaccagagttcatgatgaaaccagttcagtttgagaaggatgatgatacaaactaccatatggacctgatagctgggcttgcaaacatgaggtttcggaattacagccttcctgaagttgacattctgaatgccaattttattgccgtacggatcattccagaaattttaaaattcattgtcatggacatagggctt

SEQ ID NO: 272788 - DNA, 461 bp, Glycine max
cgatgccgtgcctcaacctctccaccaacgttaacctagacggcgtcgacacctcttccattctctccgaagccacctcaactgtcgccagcatcatcggcaaacccgaggcctatgtgatgattgtattgaaaggatcagtgcctatatctcatggtgggagtgagcagccagcagcttacggtgaattggtgtccattggtggtcttagccctgacgtgaacgagaaactcagtgctggcattgcttcaattctcgaaaacaagttgtctgtgccgaagtcccgattctacttgaagttttatgacactaagggttccaattttggatggaatggatctacattctgaattccgagttatcttggtaacgatgccatggatgtcggatgaactcgtgattctgttttagaactttttttatctgtaaaaagtactctgaatttcatataccccctttga

SEQ ID NO: 272789 - DNA, 433 bp, Glycine max
gccgacccacgcgtgcgcttacgatcagactaagatagatgttaaaattttgacagatgaaaaggccaccatgctctcggtctcgtctatagatgatgcaggtgtgattaatgatttaatcgtcaagataaatggtgtcctatacaaatctgctaccaaacctcatgattaaaccattttattttgaaaaggatgatgatacaaactaccatatggacctgatagctgggcttgcaaacatgagggcacggaattacagcattcctgaagttgacaagctgaaggccaagtttattgccggactgatcattccagcaattgcaacatcaactgccatggccacagggcttgtcttcctggagctgtacaaaactttggattgacggcacaaagttgaggactaccgaaacacatttgccaacttaacactttc

SEQ ID NO: 272790 - DNA, 459 bp, Glycine max
cccacgcgtccgcgaaatggctagcatatggtgagataatcaatggtcgttatgcaatgttgggtgcagttggtgcaatagcacctgaaattctaggcaaggctggtctgatccctcaggagacagcactcccatggttcagaacgggtgtgttcccacctgcaggaacctacaactactgggcagactcctacacactgttcgtgtttgagatggcactgatgggatttgcagagcacagaagattccaagactgggccaaaccaggctctatgggcaaacaatacttcctaggactagagaaggggcttggaggttctggtgagccagcttatccaggaggacctttcttcaacccactaggctttggtaaggatgagaagtccttgaaggatttgaagctcaaggaagtgaagaatggaaggttggctatgttggcaatcttgggttactttgttc

SEQ ID NO: 272791 - DNA, 455 bp, Glycine max
ctgactttcagcctaagaaagatgcgaaaatagtgacagatgaaaaggccaccagtctctcagctgcgtctatagatgatgcagctgtgattaatgatttaatcgtcaagttagaggggtgccggacaaagctgcaaccagagttcaggatgaaaccagttcagtttgagaaggatgatgatacaaactaccatatggacctgatagctgggcttgcaaacatgagggcacggaattacagcattcctgaagttgacaagctgaaggccaagtttattgccggacggatcattccagcaattgcaacatcaactgccatggccacagggcttgtctgcctggagctgtacaaagctttggatggagggcacaaagttgaggactaccgaaacacatttgccaacttagcactgcctctcttttccatggcagagccagttccaccaaaggtcatc

SEQ ID NO: 272792 - DNA, 458 bp, Glycine max
ctgggaaatatcttacaaataccacattcaattgaacaagttttcattgcacaaaaggtggagaacacaaggccaaatagaagtgacatccacctctcagcagaggaagaagccaccatagaggcaaagaccagagactactttgatggggttgcaccacaacgccacacaaagcctcaacgaagtgagtattcagctcaatatgtggatgctttctccaatgcccatcactcttcttcttcttcttctataccagaattcatgcaattccaacgcctcgagaatgatccccaagagaagaaattggagtacaatggaagtcaagtaccggaagaatttgtggaaacagagtattaccaagatctcaacagcgtggacaaacaccaccatacgacgggaacaggatttatcaaagtagagaaaaatggaaatgactttcacatagaaccagataatga

SEQ ID NO: 272793 - DNA, 371 bp, Glycine max
ctttggatgagattgtggaagtggaatgagtctaatttatttgtaattttgattctggtcagtgctatcgcagttactagcctaaggtttttttatgtcaaaaacaaaaaagaatttgtatcatattctctctgttatctacccccttgatttctattttctatgaaaaaaaaaaaaaaaaaaaaaaaaaaaaaaaaaaaaaaaaaaaaaaaaaaaagaaaaacaaattaaaaagaaaaaaagataaaaaaataaaacaaaaaaagaaataaaaaaaaagggggggccgttttaaaggacccaactttccgtccccttccatcgaacggaatggttattaatttggggaaccaaaatttaatcaactggcc

SEQ ID NO: 272794 - DNA, 449 bp, Glycine max
cccacgcgtccgggcagcaacattgatggcagcaacaacaagttctggtactcttaaagcaagtcctttccttggccaaggcaagggtgccaatgccaatgctcttagggatgttgtctccatgggaactgggaagtacaccatgggcaatgatttgtggtatggaccagacagagtgaaatacttgggacccttctcagctcagaccccttcatacttgaaaggagaattccctggggattatggatgggacactgctggcttatctgctgacccagaagcatttgccaagaacagggctcttgaggtgatccatgggcgatgggccatgcttggagcactaggatgcatcaccccagaggtgctagagaagtggttgagagtggacttcaaggagccagtgtggttcaaagctggagcccaaatattctccgaaggtgggcttgact

SEQ ID NO: 272795 - DNA, 338 bp, Glycine max
cagatcctgaaattcgattcgttccaaattttcttcacaaaatgtctggtcgtgtgagaggtggcaagggtttgggaaagggaggtgccaagaggcacagaaaagttcttcgtgataacattcaaggtatcacgaaacctgcgattcgtaggttagcgagaagaggtggcgttaagaggatcagtggtttgatctatgaggaaaccagaggagttctgaagattttcttggagaacgtgattcgagatgctgtgacctacaccgagcacgctaggaggaagacggtgactgccatggatgtggtttatgcgctcaagaggcagggaaggaccctctat

SEQ ID NO: 272796 - DNA, 339 bp, Glycine max
caatgagttattacaaccagcagcaaccgccggtcggagttccgccgccgcaaggttggccgccggaggggtacggaaaggagggatatccaccgccgggatacccgccagcgggatacccgccagcgggatacccaccgccgggatatccgccacaacaaggctatcctccgccgccctacccggcgcaggggtatcctccgccctacgctcctcaatacgctcagcctccgccccgtcaacaaaattcaactggccctggttgtttggaaggctgtttggctgctctctgctgctgctgtctattggatgcgtgcttctgagatgagatgacaaatt

SEQ ID NO: 272797 - DNA, 454 bp, Glycine max
gtgatgctaatcaaaacacgtcttggagaagcaatagcagctggaacactgcaaatgcctcaagcgatgatggtaatgaaggttcaaatgaaaattctgatggagtaggtggtgggaactggagaggtggttaccggggtagaggtggctccgacagagggggttttagaggtagaggttttcggggtagaggagagcgtggcggtttcggtggacgaggggagcatggaggctttggtggccgaggggaacgaggaggctttggtggtagaggtagatcagacagggaaggttttggtggtaggtggggatcagaaggaggacgtggaggccgaggcaggggaaggaacgatcaatctggtggttggaacaacagaagggattctggtgaagatgggccctctgactggaagaagggggcagataatggtggatggaagaatagtaatggatc

SEQ ID NO: 272798 - DNA, 415 bp, Glycine max
gccagtgccatcagcattctcaacacctactctctcactcactcaccagtggcctgaacaatatgatcagtgggcatgatcaacgccaaatgcgtgaacccaaagttacgcaaccccaccaagctcgtaccatgaaaaccttcccttcaggtgaaccttgcaaagggcctaatagcctcacgcgaaagcaccaaactttgcactgtgacagcaatcgcaggagcaatattgacaaccctgggaacctgctacgccgctttctccgttcaacagatagtcgacatagcagaaggcgacaaccgaggactggcactggagatgtgcataattcctgcaataacgtggattctgttcaacattctgcagccggcgctgaaccaactgaaccgcatgcgcagcaccaaatgcgtgatca

SEQ ID NO: 272799 - DNA, 409 bp, Glycine max
accacgcgtccgagagagcgtcctagtcgcaaccctaataagaagaaccacagcttcaagcgagtgacatccaccagccatgggtcgtatgcacagccgcggtaagggtatatcctcttatgctttgccctacaaaaggacaccccctagctggctcaagatctcttcgcaagatgtggaagaaaatatctgcaagtttgcgaagaagggtttgaccccgtctcagattggtgacattcttcgagattctcacggtattgctcaggtcaacagcgtcactggcagcaaaatccttcgcatcctcaaagctcacgggcttgcgcctgaaatttcagaggatctttaccatttgattaagaaggcagtttcaattaggaagcatcttgagaggaacaggaaggacaaggac

SEQ ID NO: 272800 - DNA, 458 bp, Glycine max
cccacgcgtccgcccacgcgtccgcccacgcgtccgcccacgcgtccgcccacgcgtccggagaactaagaaggagaagcaaatggcttcctcaatgatctcttccccagctgttaccactgtcaaccgtgccggtgccggcatggttgctccattcactggcctcaagtccatggctggcttccccaccaggaagaccaacaatgacattacctccattgctagcaacggtggaagagtgcaatgcatgcaggtgtggccaccagttggcaagaagaagtttgagactctttcctacctgccagaccttgatgatgcacaattggcaaaggaagtagaataccttcttaggaagggatggattccttgcttggaattcgagttggagcacggtttcgtgtaccgtgagcacaacaggtcaccaggatactacgatggacgctactggaccatgtgga

SEQ ID NO: 272801 - DNA, 238 bp, Glycine max
agatgccatggatgtaaggtgaggtaataatcccatttgtgcataaaaaaaaaaaaaaaaaaaaaaaaaaaaaaaaaaaaaaaaaaaaaaaaaaaaaaaaaaaaaaaaaaaaaaaaaaaaaaaaaaaaaaagaaaaaaaaaaagaaaaaaaaaaaaaataaaaaaaaaagaaacgaaccaaaataataaaaggggaaaatcaaaaaaaataataaccataaaaaaaaaggaggtaaat

SEQ ID NO: 272802 - DNA, 453 bp, Glycine max
cccacgcgtccgcccacgcgtccgcaatctacaataaacgatgattctcattatctccctcagtttttctcttctctctttctcccatgcttctgtcctagatttctgtgttgcagattatgcaggtcctattggacctgcaggatattcctgcaagaagccttcaaaggtcacagcagatgattttgcttacagtggccttggcattgctggtaacacctcaaacattatcaaagctgcagtgacccctgcatttgatgctcagtttgctggtctcaacggtcttggcatttccgcagcacgtttggacttagcagcaggtggagttataccacttcacactcatcctggagcttcagaattacttgttgtaattgaagggagcatcctagctggattcatttcttctgccaacattgtctacctcaaaactcttaagaagggggatgttat

SEQ ID NO: 272803 - DNA, 453 bp, Glycine max
gcttgatggatcgctaccaggtgactatggttttgatccactaggccttgggaaggacccagcattcctcaaatggtacagagaagctgagctcattcatgggaggtgggcaatggctgcagttctaggaatctttgtggggcaggcatggagtggagtgccatggtttgaggctggagctgacccaaatgcaattgctcctttctcctttggtactcttctgggaacccagttgatcctcatggggtgggttgagagcaagagatgggtggatttcttcaacccagactcacagtcagtggaatgggccactccatggtcaagaacagctgagaactttgccaatgccactggtgagcaaggctacccaggaggcaaattctttgaccctttgagctttgctggcactatcaaggatggagtttacattccggatacagagaggctggaaag

SEQ ID NO: 272804 - DNA, 339 bp, Glycine max
gacagaccaaagcaaacaaacaaaacagccaccgccattccaattcgaagaagaatagtagttcaagagtttgttggcaatcatggcgatgcgcgacctcgtttctggtgccgcggcatgtggcgactcttcttcttcttcctcaaaccctctcgcttccctcgccaacgcccttattggctcttcgtccaaaactcaggagaggctgaaggagattcccacatccactcctactgaccctgcttcccaattttactccacagctctccccgccaatcagcttcccggctccgaattcgataagcctctattgaatttaaactcccaggctttcggagt

SEQ ID NO: 272805 - DNA, 309 bp, Glycine max
ttacccaaataattgatgcctttaaagtttacctctcaattccaatttactcgattagttggaccaaaaaaaaaaaaaaaaaaaaaaaaaaaaaaaaaaaaaaaaaaaaaaaaaaaaaaaaaaaaaaaaaaataaaaaaaaaaaaaaaaataaaaaaaaaaaaaaaaaaaaaataaaaaaaaaaactgactcactttttaaaggaacaaactttacttacgcttacatgaaacttaatagttcttttataacatcactaaaataaaattaattgcactgagtttaaaaaatatacaatttgaaaaacct

SEQ ID NO: 272806 - DNA, 456 bp, Glycine max
gcaccacattcacctgaggcttccaaagcaatggcttcccttgcagcatccactgctgctgcttcccttggcatgtcagaaatgcttggaaaccccatcaacttcagtggtgccacaaggccagctccatctgcttctagtcctgcctccttcaagactgtggctcttttctccaaaaagaaggctacaccaacacctccaaaaaaagctgctgctgctgctcctgccaatgatgagcttgccaagtggtatggtcctgacagaaggatcttcttgcctgagggtctcttggaccgatccgaaatcccagagtacttgaccggagaagtccctggagactatggttatgacccatttggtcttagcaagaagccagaagactttgccaaatatcaggcatttgagttgattcatgccagatgggcaatgcttggtgctgctggattcatcattcct

SEQ ID NO: 272807 - DNA, 458 bp, Glycine max
cccacgcgtccgggtttttgagagttgcagtttgcactttgtaggatcatctcctagcattgatcgattgagatggcagacgaagctaacagaactgctttccttgaaattcaaagtcgcatgatcgatactactggaaaaataaaacaggtgcaaacccagatgcgttccaaagaagcagaaaaaaagcgtgcttttctgaccatggaggagctgaagcaagttcctgatgatacgaatgtttacaaatccattggaagaatgtttgtattggagaccaaggcaacattaatgaatgaacaggagaccaagtttaaggatggtgaagcttcaattactgcattacagagctcaaaagaatacttggaaaaacagatggcagaggtggaaaccaatttgagagaactgctacaacaagatcctggtcttgctaggcaaatcatgtctatgaatgtagt

SEQ ID NO: 272808 - DNA, 449 bp, Glycine max
ggccattttgtcattcagtgaatcaatgtgtatttctctcattataacaggaaagctgatgggttttagggaataaaggccgtaaagaaaacaacgaaataaaattctggagaatataaatattttgagaaacacaaaacaaaacaacattgttatgaaaggaataaaaacaagttgtccaacatggtgaggacactatctaacattgtatctcgcaagttggccctcactgttctcattgatgctgctgatgttgactataacgttgcacctgctgatgctgcctatcgagaatctgtcaatgtgtttggaaagccaaagacgaacactgacttacttccatacaatgcggatcgattcaaactctcaattacctgaaagtggaacccaagcaaatatgttgagtacccaagttaggttcttatagatgaggacaattttgaattaac

SEQ ID NO: 272809 - DNA, 456 bp, Glycine max
cccacgcgtccgcccacgcgtccgtccacgcgtccgcaaatccatggctggcttccccacgaggaagaccaacaatgacattacctccattgctagcaacggtggaagagtacaatgcatgcaggtgtggccaccaattggcaagaagaagttcgagactctttcctacttgccagacctcgatgatgcccaattggcaaaggaagtcgaataccttctaaggaaaggatggattccttgcttggaattcgagttggagcacggtttcgtgtaccgtgagcacaacaggtcacctggatactatgatggacgctactggaccatgtggaagctgcctatgtttggctgcactgatgcttctcaggtgttgaaggagcttcaagagttaagactgcataccccaatggcttcatccgtatcattggatttgacaacgttcgccaagtgcagtgcatc

SEQ ID NO: 272810 - DNA, 455 bp, Glycine max
cccacgcgtccgccaagagcaaagaaactaagaagattttgagcacaatggcatccacacaatgcttcttgcaccaccatgccctcaccactccaaccagagcttcatcacagcgcttagttgtgagcaccaaaccaaaccacattgtttgcaaggcacaaaagcaggttgtccaagagggtgaggacactactaacattgtctctcgcaggttggccctcactgttctcattggtgctgctgctgttggctctaaggttgcacctgctgatgctgcctatggagaagctgccaatgtgtttggaaagccaaagacaaacactgacttccttccatacaatggggatggattcaaactctcaattccctcaaagtggaacccaagcaaagaggttgagtacccaggtcaggttcttagatatgaggacaattttgactcaaccagcaatgttgct

SEQ ID NO: 272811 - DNA, 452 bp, Glycine max
tattacccaaccacttcacacaaaccaaacactcagctgttcctgcaagtagatcaggtgctccaagaaggaggagagtgcacttagcaacaacaagagcagagaccatgactactgtcatagaaaaactgggcattaagattgagaggaaccctcctgagtccaagctcactcaactgggtgttaggcaatggcccaaatggggttgccctccaagtaagttcccatggacatatgaagccaaagagacttgctatcttctggaaggaaaagtgaaggtctttcctagtgggtcgaatgagtcagttgaaattgctgctggtgacttggttgtgtttcccaaagggatgagttgcacttgggatgtgtctgttggtgttgacaagcactataattttgaataaatcctacaaggggtgcctaatgaatgaagaagaaacagaacttccatg

SEQ ID NO: 272812 - DNA, 453 bp, Glycine max
cccacgcgtccggttccgtgtctgtcagatatttctcaagtgcgaaaatgatgcacatgacattttactggggcaagaaggtgacgatcttgatcgattcatggaagacagattcctggacgagttactttctgagtctactcgcctgcctcgtcgctgccgcgttataccagtacctcgagaatcgtcggattcgcctgaagctcctcgccggcggccggaggccctcgccggcgccggagatccgcgctcctcttctccggtggggcgtcgccggcgacaaggagaagttgggggtcaagtttgcggaagcggttctgttcggggttaactcggcgatcgggtacttgttgatgttggcggtcatgtccttcaatggaggggtatttttggcaattgcggtgggtctcaccattgggtatttcttcttcaggaatgaaggagagaatgacg

SEQ ID NO: 272813 - DNA, 336 bp, Glycine max
aaagagagagagagagagagaaactgagagaaattcgcaaaccctaatttcggaaagagtcggcgatggctgcctccaaggatcgcgagaacttcgtctacatcgccaagctcgccgaacaggccgagcgatacgaagagatggtggaatcaatgaagaacgttgcgaatctcgacgttgaactgactgtggaggagcggaatttactttctgttgggtacaagaatgtgattggtgctcggagagcatcgtggaggatcctgtcttccattgagcaaaaggaagaaacagaagggaacgagttgaatgccaagcggattaaggagtacaggcaga

SEQ ID NO: 272814 - DNA, 322 bp, Glycine max
accacgcgttcggcggcggcgacgacgaagaatccgacacgtgctgctgcgtgtggggattcaacttgcgcgaattcaacgtcaacgaggacgtctttgccaacgactccatcgagctcttgcgccaaagcggcatcgatttcaagaggaacaacgaaaacggcatcgacgcccaccgttttggggagcttctcatgtcctccgggatcgtcttaaacgacaacattcattgggttactttccacagtggttacgatttcgggtacttgttgaagcttttaacgtgtcaggatttgcccgatacgcaagttgggttctttaa

SEQ ID NO: 272815 - DNA, 318 bp, Glycine max
cccacgcgtccgaggttatcggtgtgttttagagtgttcaaccatctgacagggattggggagcaaaggctccaaaggatgtcaagatccagggcatctggtatgctcagcttgagtcatagagtgttttgtcttctgttttgtttgttggctcagattttgttagtaacttcatgcatggtgttgctgcattatcccttgacccaactttcctagcactactgagagtactgtcatggttgtatattatatcgacctccaattacaatgtttaaaattcaaggtttaaattgatggtgtgtgtgagttttcgagctc

SEQ ID NO: 272816 - DNA, 334 bp, Glycine max
  unsure (1)..(334): unsure at all n locations
cttggaagtgttattaatgctagagatcgttggctcaaacctggtggtcttattctgccttcaagtgcaacgttgtacatggctcctgtcacacatacggacagatacagtgacagtgttgacttctggcgcaatgtttatggaattgacatgtctgccatggtatcacttgctaaacaatgtgcatttgaagaaccttccgtggagacaataactggtgaaaatgttttgacatggccacatgtggtaaaatatattgatagttattctgttaccgtccaagagttagaatcttgtaacagccaagtttaagttcaattncatgatgcgagca

SEQ ID NO: 272817 - DNA, 353 bp, Glycine max
  unsure (1)..(353): unsure at all n locations
gccgtttgctccccaaaaaggaaagaagcagattctgtcctttgaaatcaacaagaaaagatgtcaggtgaagaggtagctgttgcagttgaggtacctgctacttcaattccaggtgagccaatggacatcatgactgctctacagcttgtgctgagaaaatctctggcctatggtggtcttgcacgaggtcttcatgaaggtgccaaggtgatcgagaagcatgctgcacagctctgtgttctagcagaagattgtgaccaacctgattatgtgaaactggtgaaggctctttgtgcagagcacaatgttagtcttttgacagttncaagtgcaaagacccttggagaatg

SEQ ID NO: 272818 - DNA, 453 bp, Glycine max
cccacgcgtccgcggacgcgtgggtcacgggatgcctcgattatattatcctccgaggatgacgaggagattgtaaactccgtcgtggaaggcgtcacgccctcctacgcgctcgagtcccgcctgggcgactgtcgccgcgccgcggggattcgacgcgcggcgctgcagcgcctgacggggcagtcgcttgagggcctgccgctggaggggttcgactacgactccattttagggcagtgctgcgaaatgccggtagggtatgtgcagattccggtaggggtggcggggccgttgttgttggatggattcgaatacactgtgccgatggccaccacggaagggtgccttgtggcgagtaccaacagagggtgcaaggccatctatgcttctggtggggccagcagtgtggttttgagggattgcatgtctaaggcacctgtttgtagattc

SEQ ID NO: 272819 - DNA, 421 bp, Glycine max
caaggaagctcgttctttcgtcgtcgtcacaagtcacaactcgcaaaccacaatgcctaaggagatccacgagattaaggattttcttctgacggcgcggaggaaggatgcgaggtcggtgaaaatcaagaggagcagggatgtcgttaagtttaaggttcgatgctccaagtacttgtacacgctttgtgtctttgaccctgagaaagccgataagttgaagcaatctcttcctcccggtttgagtgttcaagacctgtagagctgttgagtgtggcagcatgcgtttgtttctctttttgttacctgatgctctagattttgtggcttggttttatatgttggtgatttttacgaggacatttttgttttaaattggtacgaaatgtgaaagtttgatattgagcacaattgaaatgaa

SEQ ID NO: 272820 - DNA, 354 bp, Glycine max
  unsure (1)..(354): unsure at all n locations
cccacgcgtccgcaaacacctcgtccgtcacaatgcagctagctgtggcggccaacgctgtcgtttcaccgtcgccgttccgacctcatccccttctccggtcatccttctccggcgtctccgttaagctcactccccaatccataacgttttcacgcttgaagcccctcaccgtcttcgccgccaccaagaaggccgtcgctgtcctcaaggggacctccgccgtcgaaggcgtcgccactctcatccaagaagacgatggcccgacgacagtttctgttagcatcactggccttactccggggcttcatggttttcacctacatgagtatggtgataccacanatgggtgta

SEQ ID NO: 272821 - DNA, 338 bp, Glycine max
atcttcatctccaacaagtgaatgtgataaaaaataaaaatcaaagagcatagtgtcggggatcattcacaagattggggagacccttcatgtgggagggcacaagaaggaggaggagcataagggtgagcaccatgctggagaatacaaaggggagcaccatggtgaacacagtagtgagtacaaaggagagcatcatggtgaacacaaagctggagagtaccatggtgagcacaagccagagcacaaagaggggttcctagacaaagtcaaggacaagatccatggtgagggcggcgccgccgagggcgagaagaagaagaaggagaagaagaaga

SEQ ID NO: 272822 - DNA, 338 bp, Glycine max
ctcccaagggtttaacctttctggctgtgttaatatgcgtttcagcactgtgactgagtccttctgttgcggaggaagggcaaaataatggccttgttatgaacttctacaaggaatcatgccctcaggctgaagacatcatcacagaacaagtcaagcttctctacaagcgccacaagaacactgctttctcctggctcaggaacatcttccatgactgtgctgttcagagttgtgatgcttcactgttgctggactccacacgaaggagcttgtctgagaaggaaacagatagaagctttgggttgagaaatttcaggtacattgagaccatcaaa

SEQ ID NO: 272823 - DNA, 292 bp, Glycine max
  unsure (1)..(292): unsure at all n locations
gtagttgagaactaagaagtttgaaatggcttcctcaatgatctcctcccgagctgtgaccaccgtcaaccgtgccggtgccggcatggttgctccattcaccggcctcaaatccatggctggcttccccacgaggaagaccaacaatgacattacctccattgctagcaacggtggaagagtacaatgcatgcaggtgtggccaccaattggcaagaagaagttcgagactctntcctacttgccagacctcgatgatgcccaattggcaaaagaaagtcgaataccttct

SEQ ID NO: 272824 - DNA, 456 bp, Glycine max
ctatttttcaagtaacttaaggtttcaaacctaggaagttggaagtcatggcagcaacattgatggcagcaacaacaagttctggtactcttaaagcaactcctttccttggccaaggcaagggtgccaatgccaatgctcttagggatgttgtctccatgggaactgggaagtacaccatgggcaatgatttgtggtatggaccagacagagtgaaatacttgggacccttctcagctcagaccccttcatacttgaaaggagaattccctggggattatggatgggacactgctggcttatctgctgacccagaagcatttgccaagaacagggctcttgaggtgatccatgggcgatgggccatgcttggagcactaggatgcatcaccccagaggtgctagagaagtggttgagagtggacttcaaggagccagtgtggttcaaagctggag

SEQ ID NO: 272825 - DNA, 462 bp, Glycine max
gcaaaagcaagaagaactagtctaagcagaaatggcctcttcagtgatggcatctgtggccctcaaacctgcccctttcactgttgagaagtcctcagttagaggccttccctccctctcaaggaactcctcttcattcagagttgtggccagtggtggcaagaagatcaagactgacaagccttatggaattaatggtggcatggctttgagggaaggagttgatgcatctggcaggaaaggaaagggaaagggcgtttaccagtttgtagacaaatacggtgctaatgtcgatggttacagtcctatctacgacaccaaggactggtctccaaccggtgatgtctacgctggcggtacgactggcttggctatctgggctgtgactctacttggtcttcttgctggtggtgcacttcttgtctacaacacaagtgctttggcgcaataaactttgcaaat

SEQ ID NO: 272826 - DNA, 446 bp, Glycine max
gtggcagatcagtcacttaaagcatatcagacagcttctaccactgctgagagtgaactacagcctacacatcctattcgtttgggtctggctctaaatttctcagtgttttattatgagatattaaattcacctgaaagggcctgccatcttgcaaagcaagcctttgatgatgctgtctcggagctggataccctgaatgaggattcttacaaggacagtaccttgattatgcagctgttgagggataaccttactttatggacttctgatatccccgaagagggtgaggacctaaaaatggaaagcgcagccagggttgatcaaggagaagatgagttaggccgctaacccatcattctgtcatatgtctaagatttgatgcattaatttttctcaatcatattttctccattgtagtgaagcctctatctgaatggtgcact

SEQ ID NO: 272827 - DNA, 464 bp, Glycine max
gcggcggcaacagggagagaagatgaagttcaatccacgtgtgtcgagcagccgccgcaagagccgaaaggctcatttcacggcgccgtcgagcgtgcggcgggtgcttatgagcgcccctctgtcggcggagctgcggtccaagtacaacgtgaggtcgatcccagtacggaaggaggacgaggtgcaggtggtgcgaggaacatacaagggtcgcgaggggaaggtgactcaggtctaccgtcgaaagtgggtgattcacattgagcgcataacccgcgagaaggtgaatggttccaccgtcaacgttgggattcacccctccaaggttgtgctgaccaagctcaaattggacaaggaccgtaaggccattctcgatcgcaaggccaagggtcgcgccgcctccgataaggagaagggtaccaagttcgctcccgaagatatcatgcaaaccgttgattagt

SEQ ID NO: 272828 - DNA, 283 bp, Glycine max
ctctctcatatactctctctttgtctttttctacgctttctcgttcgagagccctcgggggatccactaactgaaggagaaatggggttgacattcaccaagcttttcagccggctttttgccaagaaggaaatgcgaattctgatggtgggtatcgatgcagctggtaagaccaccatcctgtacaagctcaaacttggagacgatcgtaccacaattaccaccattgggttcaatgtggagactgtggtatactagaacattagtttcactggctgggatg

SEQ ID NO: 272829 - DNA, 437 bp, Glycine max
cccgcacgtgccgttgcagatgagctgaaatcgagaagaagaagaagaagaagaagatggagaagtatcagatctggagcaggagaatagcgttggcagcgtttgcgtttgctctgctgttccaatcggcctcagcagacgacgtcgttgtgctctctgaagataacttcgagaaggaagttggtcaggacagaggagctctcgttgagttctatgctccttggtgtggacactgcaaaaagcttgctccagaatatgaaaagcttggtagcagcttcaagaaagccaaatctgttttaattggcaaggttgactgtgatgagcataagagtttgtgcagcaagtatggagtctctgggtacccaacaattcagtggtttccaaaaggatctcttgaagccaaaaagtatgaagggccacgcactgctgaatcactt

SEQ ID NO: 272830 - DNA, 465 bp, Glycine max
cccacgcgtccggaactacagaacctctattgatgtctggtcagtagggtgcatttttgctgagattcttggtagaaagccaatcttccctgggactgagtgtctcaaccagctgaaactaattataagcgttcttggaagccagcatgaatctcatcttgagtttattgataatgcaaaagcaaggaggtttatcaaatcactgccctatactaggggcagacacttctctcagctatacccacaagcagatccattagccatagatttgttgcaaaaaatgcttgtgttcgatccaaccaagagaattactgtcttggaagctcttcaacacccgtatatggctagcctatatgatccaaggtgcgacccttctgctcaggttcccatcagtctcgacatagatgaacattggggagaaccgatgattagggaaatgttttggaatgagatgctacattatca

SEQ ID NO: 272831 - DNA, 433 bp, Glycine max
cccacgcgtccgcccacgcgtccgcacgaggagcagcctcaggaggagaaggatgtctcacaggaagttcgagcacccaaggcacggttcactgggatttcttcccaggaagcgtgctgctcgtcacaggggaaaagtgaaggcattccccaaggatgacccatccaaggcacccaagctcactgcattcttgggttacaaggccggtatgactcacattgttagagaggtcgagaagccaggatcaaagcttcacaagaaggaaacttgtgagcctgttacaattattgagacccctccaatggttattgttggtgttgtgggttatgtgaaaactccacgtggtctccgaacattgaacactgtctgggctcagcatttgagtgaggaattgaaacgtaggttctacaagaactggtgcaagtccaagaag

SEQ ID NO: 272832 - DNA, 456 bp, Glycine max
  unsure (1)..(456): unsure at all n locations
gcgcctttgatctctgtccccgctgcgtctctcgtaatcatgcctaagcaaatccacgagattaaagatttccttctcactggcagaaggaaagatgcgaagtcagtgaagatcaagaagagcagaaatgtggttaaattcaaagtcagatgctccaaagtcctctacacactttgtgtgtttgacccagagaaagctgataaattgaagcaatctcttcctccaggtttgagtgttcaagacctgtaaggtactgggcgagagatcaagaagaagcaattcattgattcttctgaagtttgattctctgtagttgaagcttgagatttttgtcagttggtcttttattatagattattgctaagacatggtttgttntatctggtttggaaaaatgaaacttgaatttatgtctaatggagtattctagtgcttgggaactatatatatgaattt

SEQ ID NO: 272833 - DNA, 457 bp, Glycine max
caaaagaagaagtatcactcatataatactctgtatcatttcatttcgataatcatccatagctactgaagaaaatggcaaccatctctgctgctatcacaaccccatcgatctcccgcgcaactcttgtgcaaaagcgggtctcatctcccgttcttggcttgccagcaatgggtaaggtgggaagagtgagttgctccatggaggaaaaaccttattctgtgaaggaaagcagctctagcatgttggggatgggggcatctctgatggcagctgccagcgctgcagccatgtcaggcccagccatggccttggtagatgagagactgagcactgaaggaaccggacttccctttggcctcagcaacaatcttcttggttggatccttttcggcgtctttggtcttatctggactctctattttgtctacacttccactcttgaagaggatgaaga

SEQ ID NO: 272834 - DNA, 260 bp, Glycine max
atttatcctcatcattattcattcaaattaaaaaaaaaaacaaaaaaataaggatagggtaatattaaaataaaggaaaaagaataaaaaaaaaataaaaaaaaaaaatattaaataaaataatacacatgaaaataaatactaaattaataaatatctacaggcactctttttttaaggatctatactttaactacccttttatattatagcttatttttattattgcaactctaaacattatttctctgtcacatttt

SEQ ID NO: 272835 - DNA, 242 bp, Glycine max
  unsure (1)..(242): unsure at all n locations
cacaaaaaaggacatttgctcaaagaagctgtgagggaagaggaagacgtgctgccaaaaangccttactctaggtccattgttggtgcgaccttggaagtaatccagaaaaagagagctgagaagccagaagttcgagatgcagctagggaagctgctcttcgtgaaattaaggagaggatcaagaaaacaaaggatgagaagaaggctaagaaagcagaagttgcttccaagtcgcaaaa

SEQ ID NO: 272836 - DNA, 319 bp, Glycine max
gccgtccgccgctccaccggcgcctcgggagtcatatatgtcagccaccgcagcctccagctacgcggctgccctggccgacgtggctgccgcgaacaacacgctcgacgcgacaaccgcggacatcgagaaaatcgacgagatattctcggaggcgcaggtgtcggactacttcgccaaccccaccttggccgtggagaagaagcggaagctgatagatgagattgcggaatcttcggggttccagccccacacgagaaacttcctctacatcctcgtggacgcgcagaggatcgacctcatcaacgagatcgcaaaa

SEQ ID NO: 272837 - DNA, 412 bp, Glycine max
aagaggtcgagtttcacagcagcaatggtgtacgtcaaggctcaaaatcaaaagcctacttcaagagatatcaagtcaagttcaagagaagaagagagggaaaaaccgattaccgtgccaggattcggttgattaatcaggacaagaacaaatataacactccgaaataccgatttgttgttcgctttagcaacaaggacattgttgcacaaataatatctgctagcattgctggcgatattgttcttgctgcagcatatgcacatgagctgccacaatatggtcttgaagtagggcttacaaattatgctgcagcttattgcactggtctcctgttggcccgaagagtcctcaatacacttgaaatggatgaggagtatgaaagaaatgttgaggctactggagaggatta

SEQ ID NO: 272838 - DNA, 426 bp, Glycine max
  unsure (1)..(426): unsure at all n locations
gtccgtttctttcggttccagaggtggtggtccttttattagtgaaaaccgggttcatgtaggtaatcgtgcttggggtgttgacgatgtancacttgagtctttgttccgtgaacaagggaagaaggtcttggaagctagggtaatctatgacagggaaagtggacgatctagaggctttggattcgtgactttcggtagccctgatgaggtcaaaagtgcaattcagtccttagatggtgtggacttgaatggcagagctatacgagtctcattagcagattccaagcccaagcggttctgaagcttttcatctatacccgagagaagatttccgtagttgggacttgggagttatacagctgcaagatgtcattggcaatcagtttggacaagaaatacacttacatgcattgagactagatg

SEQ ID NO: 272839 - DNA, 292 bp, Glycine max
gcccacgcgtccgcccacgcgtccggttaaagaacagcgtctctgcaatctgctgcaggcattgatggttgcagcttgtgttgctgctatgcctctcttgaagaagataccaacctcagtgctttggggttactttgctttcatggcaattgaaagcttgcccggaaaccagttttgggagagaatactatatcttttcactgctccaagtcgaagatacaaagtgatggaggaacaccatgcagcctttattgagaccgtgccattcaaaacgggtgccatgtttacctta

SEQ ID NO: 272840 - DNA, 405 bp, Glycine max
ctgaactaacaaagcaaccctatgttttatgtggtttgtgtcaccggagccagcggcgccgtcggatcatgggtggtcctcctcctcctccagcgtggttacaccgtccatgccaccgtccaagatatcaaggatgaaaatgagacgaaacatttggaggaaatggaaggagcaaagagtcatctccatttttttgaaatggatcttcttgacatcgactccattgccgctgccataaagggttgttccggcgtaatccaccttgcatgtcctaacatcattggtcaagtcgaagatcccgagaaacagatattggaaccggcgataaaaggaacggttaatgtgttgaaggcggcgaaagaagcaagggtggagcccgtggtggccacttcatcgatttcgtcg

SEQ ID NO: 272841 - DNA, 197 bp, Glycine max
agaactaagaaggagaagcaaatggcttccttatatgatctcttccccagctgttaccactggcaaccgtgccggtgccggcatggttgctccattcactggcctcaagtccatggctggcttccccaccaggaagaccaacaatgacattacctccattgctagcaacggtggaagagtgcaatgcatgcaagtgt

SEQ ID NO: 272842 - DNA, 428 bp, Glycine max
cttttatgagcaatttgatccagattttattaacattaggacaaaggctcgtgaagttctgcaaagggaagatgacctgaatgaaattgttcagcttgtgggcaaggatgctttagctgaaggagataagatcaccttagaaactgcaaagcttttgagagaggattatcttgctcaaaatgcctttacaccatatgacaaattctgccccttctacaagtctgtttggatgatgcgcaacattatccatttctacaatttggcaaatcaggcagtagagaagggagctggttcagatggtcagaagatatcttacacccttatcaagcatcgtatgggagatctgttctaccgattagtgtctcagaaatttgaggatccagcagaaggggaagctgctttggttgcgaaatttcagaagttacatg

SEQ ID NO: 272843 - DNA, 358 bp, Glycine max
  unsure (1)..(358): unsure at all n locations
agtgggaaggggcagtgatgtaatgcagcgtgagggcatcctaacagaaccggtgagacttgaaccctaccacaagagggtactagaagcttgtgaaagattgggagggactgtatcggataccgataaccaccctatngggctggatctgtggctgcaccacccgatgcaccattgatggattacattaagcctcttcgcggccatgtgatggagctcaacaagtatctggctcaagattcgaggatcgagatttgccagctccccgtgggtgatgggattaccctgtgccgccgcatcatctgatcattttctcttcatctagatttttcatgacagatattcctttcattaaaac

SEQ ID NO: 272844 - DNA, 439 bp, Glycine max
  unsure (1)..(439): unsure at all n locations
gagccacattctgtccctggtggactcaagtagattctttcataggacagntaaaattatagcttgcaaaaagggttcactagcaaacattgcaatggcctcaacctcttctgctctcactatatcctcttcttccacccttcttgatggcaaggctccaagacagtcaccagctgcttcccctcaatgtgtgagcctcccccctccccctttgcactctcagaaccgttcatggaagaccactgcttattgtcgcaaggttgctcgaaaagttatggcaatggccacaggagaggcaccagctgaagctaccccaactgaggtgccagagattgtcaagactcttcaagaaacttgggacaaagttgatgataagtatgcagtgagttcacttgccttggttggggtgattgcattgtggggctcagttggattgatc

SEQ ID NO: 272845 - DNA, 308 bp, Glycine max
  unsure (1)..(308): unsure at all n locations
gccgaccacgcgtccggagaacaaaaaaaaaaaaaaaaaaaaaatttgtattcgctcttctcttggaaaagtgaaggccggaagtacgaacgaaagagaagagcgatttanaagtgagagaagatggggttgtcgttcacgaagctgttcagcaggttgtttgcgaagaaggaaatgaggattctgatggtaggtctcgatgctgctggtaagacaaccatcttgtacaagctcaagcttggagaaatcgtcaccactatccccaccatcggatttaatgttgagactgtggagtacaagaacatcag

SEQ ID NO: 272846 - DNA, 323 bp, Glycine max
gtccgaaaaaggaggcggggtcaaccagttcatcttggttgttgcccgaatccccgggtcatcatgcgttttaaaacgtcggcgttgagtgcactgctttgttgttggcggaggagctgaagaacgaacgcagcgagcggcgagtaacgatgtgcggtgacgccacgaactgggacgaagacgcatacagagaaaccattctcaaggagagggaaatccaaacccgaaccgttttccgaaccgcttgggccccaccctacacctctaacctcgacactctcatccttgcctctagcgacggttccgtcgcatcctactccatc

SEQ ID NO: 272847 - DNA, 419 bp, Glycine max
cccacgcgtccggttgagaactaagaaggttaagcaaatggcttcctcaatgatctcttgcccagctgttaccactgtcaaccgtgccggtgccggcatggttgctccattcactggcctcaagtccatggctggcttccccaccaggaagaccaacaatgacattacctccattgctagcaacggtggaagagtgcaatgcatgcaggtgtggccaccagttggcaagaagaagtttgagactctttcctacctgccagaccttgatgatgcacaattggcaaaagaagtagaataccttcttaggaagggatggattccttgcttggaattcgagttggagcacggtttcgtgtaccgtgagcacaacagggcaccaggatactacgatggacgctactggaccatgtggaagctgc

SEQ ID NO: 272848 - DNA, 413 bp, Glycine max
  unsure (1)..(413): unsure at all n locations
ctgtttctcaaagagacagtttttgtgagggaatttnaagaatagtcgcaatggagtggtggctttaatcatcttaaaggaaccaacctgtcatnagttgctcacacgtgagaaccacctttgatggagagtggtgttaagagactattatccaacaagtttgaattggacaagactttgagctcagctatagagactttgcccaaagatcgaaatggaaagctttcaaaggagtatctaagggtgacattagacacggtggctccatctgctggtttacctcctgttggtgcaattgaagagatggacaaggttattggtgaagtctttaagatggtgaatgcagatgatgcgaaggtggtgaaagaagacgagttcaagaaactattaactgaaatactggggagcataat

SEQ ID NO: 272849 - DNA, 458 bp, Glycine max
gaggcttcaatttccaattagggtttcgcttatttttaccaattaccatgggagtcttcggcttggtcgttcgcaaatccggcgccgaatggagcgccaagcaacattccggcgacatcgaggcctccgccgactccacctacgatctccaaaggaagctcgtgcaagccgctctcgccgttgattcctccggtggagtccagtcctccttctctcccgtgtctcctacctccgctgtgttccaggtgatagtgggtggtgctgtattcgttggaggtggcggtggtgctgttgcagctgcacctgcaggtggtgctgctgcagctgatgctgctgcagctgatgctgccccggctgctgagaaaaaggaagaaaaggtggaggaagagtccgatgatgatatggggattgggactgtttgattagagattttctgcctttaattgagttttgatgga

SEQ ID NO: 272850 - DNA, 316 bp, Glycine max
gcgtccgcccacgcgtccgcctgaatcggtgtgaacattgtttgacgtacgctgcgatgaaacccaccgagcgagggttggaggagtcccaggaacagatccataagataaggatcaccctttcttccaagcacgtcaaaaacctcgagaaggtttgtgcggacttggttcgtggtgcaaaggacaagcgcctcagggttaagggacctgttaggatgcccactaaagttcttcacatcactaccaagaagtccccctgtggtgaaggtaccaacacatgggatagatttgaacttcgtgtccacaaaagagtgat

SEQ ID NO: 272851 - DNA, 410 bp, Glycine max
gagaactaataaggagaagcaaatggttttcctattgatctcttccccagctgttacgacggtcaaccgtgccggtgccggcatggttgctccattcactggcctcaagtccatggctggcttccccaccagaaagaccaacaatgacattacctccattgctagcaacggtggaagagtgcaatgcatgcaggtgtggccaccagttggcaagaagaagtttgagactctttcctacctgccagaccttgatgatgcacaattggcaaaggaagtagaataccttcttaagaagggatggattccttgcttggaattcgagttggagcacggtttcgtgtaccgtgagcacaacaagtcaccaggatactacgatggacgctactggaccatgtggaagctgcctatgt

SEQ ID NO: 272852 - DNA, 399 bp, Glycine max
attcctttctcacaagaacgttggttttactatctcagcaaaatcttcctttgttggctggcaattgccgcttccaaagctcacattatcttcttccgttcgaacccttctgccggcaacatcccgtgtccgttgccagcaagagtctactactgttacccctgtcgcagaagaagacccgcgcttcgcgtgcgtcgaacccgaaccccgattcaaaggcccggacatttggaacaagagctggtatccaaaagctgcagatcatgtgaatacagaaaaaacatggtatgttgttgatgccacagacaaagttcttggaagactagcatcgacgattgctattcacattcgagggaaaacttggcaacctacacacccagtgtggacaatggtgcgttt

SEQ ID NO: 272853 - DNA, 278 bp, Glycine max
gcgtacggcaggaagcaagctcattctagagttaaataaatttcttcagcctcctccaaggctcgctgttcctcatccttggctggcagggccctcaagctgggcccatcatcccccgaagtcgggagggtcagcatgaggaagaccgtcaccaagcaggccttcttcggaagcccatggttcggcccagaccgcgtcaagtacttgggcccattctttggcgagcccccgtcctacctcactggcgagttcccaggtgactactgctgggacactgc

SEQ ID NO: 272854 - DNA, 383 bp, Glycine max
cgtccgcccacgcgtccgaaattttccatctcatggtcttttaatattccccaagggcaagggagcaggtgacaccttgggggtcaagttctacaacgatctcattaatgagattatagcaaatggtaaacatgaattgatatttgagttacccatgcattcatttattttcaaccttttcgttgataactttgttttggattttatttggggcaggcttaaaaccatttgtcacgctgtttcattgggacctcccacaagctcttgaagatgaatatgggggatttctcaaacctgaaatagtgtaaataaatactcaattatatatgattcactatagtatttttaaataatgaaaaagaaaatatagtaaatgtttatgg

SEQ ID NO: 272855 - DNA, 382 bp, Glycine max
gccgacccacccgtccggtttcggagtcgttgcaaagctgcccgtttttctataaaaatggcaaggataaaggtgtagcgggggggaggaataagacgaaggcggagctactgaaccagctcaaggatctcaaggcggagctagccctgctccgcgtcgccaaggttaccggcggcgccccaaacaagctctccaaaattaacgtggtgaggctatcgatagcgcaggttttgacggttatttcccagaagcagaaagcggcgctgagagaggcttacaagaagaagaagtatttgccccttgacctccgtcccaagaaaacccgcgccattcgcagacgccttaccaaacaccaggtgtctttgaagaccgaacgtgagaa

SEQ ID NO: 272856 - DNA, 412 bp, Glycine max
agaaaaccgaccctctcctttccctcttcattattcaatggctcccccaaaggccgagaaggagcccgcggagaaaaagcccgcagagaaggctccggcggagaagaagcccaaggccgagaagaagatatcgaaggaaggaggaagcgagaagaagaagaagagaacaaagaagagcgtggagacctacaagatttacatcttcaaggtgctgaagcaggttcaccccgacatcggaatctcaagcaaggccatggggatcatgaacagtttcataaacgacatcttcgagaagctcgcccaggagtcgtcgcgattggctaggtataacaagaagcctaccattacttccagggagatccaaacggcggtgcgtttggtccttcctggggagttggccaaacacgctgtc

SEQ ID NO: 272857 - DNA, 237 bp, Glycine max
  unsure (1)..(237): unsure at all n locations
ccgggccgaccacgcgtncgaaaaaaaaaaaaaaannntaaaaannnnntattattgtgttctgncgctctaaaagaaccaagcggaggggcccgtccatgcaacggcttcactcttacatacgcgcacctaaaaccaattaactggccatcgtgttacaccaaatgtaactggaaaaaccctggcttaaaccaacttaactggcaaaaccacatcccccctaactcaactggctta

SEQ ID NO: 272858 - DNA, 369 bp, Glycine max
  unsure (1)..(369): unsure at all n locations
cccacgcgtccgcccacgcgtncgatccattcgtatccgctagctcgcgcaggcaccagcaggtgaggttattgtgatttgaatggagggaagtggaggtggcggtgcttcaccgtctgcaccgttgaagcaatacttacaggaattctcgaagctgtttcagtactatctggataaatccactccccatcccccctacaggtggattgggactttcgtcattgcatccatctacgttttgcgtgttgtttatgtgcaggggttttacattgtctcttatggcctcggaatctacctcctcaatctcttgattggctttctctcccctttggttgatccagaactcgatccctccaacgcccctatgct

SEQ ID NO: 272859 - DNA, 320 bp, Glycine max
cccacgcgttcgcccacgcgtccgctttaatcttactaccgcgacaccataaatatcggagggacttgctaggcagtccctgattaatgcacatggcattatagagaaatcatttttgcccggaaagtactccattgagatgtcttcatccgtctacaagaattgggttttcactgaccaagcattaccagctgatctcgttaagagaggattggcaattgaagatccctctgcaccccatggcctttccctcgtgatagaggactacccttatgctgtttgatgactttgaatatgggatgctattaagacatgggttc

SEQ ID NO: 272860 - DNA, 321 bp, Glycine max
ctacaatgtgaaggcacaagcatttatgattgtcattgaagccgcttgtatgcttctgaggattgatgatatagtgagtgggatcaagaagaagcaagcccctggagctgctccttcaaaacccaaggttgagaccgaggcagatgctgacagtgagcaaatccttcctgactgagaatctcggttcaacagacattgttttttggtagagttgatgatgtgcaaggttctttatcttccttaaatcttatcactattcttaggagttttgagtcctttattgggatgctgttttttgtgccttctctaactgttgcaaga

SEQ ID NO: 272861 - DNA, 311 bp, Glycine max
cccacgcgtccggtgatggttcaaatgtatttgctgattatcaaccgggttctctaggcagcacagaccaactcgtcaaggatttagaaaattatgacattgttttccacataggagacatgccttatgcaaatggatacatctcacaatgggaccaattcacagctcaagtgcaagaaatttcgtcaacagtaccatacatgattgcaagtggaaatcatgaacgtgactggccaaacacaggatcattctatgatacttcagattcaggtggagaatgtggagtccctgcaaaaaccatgtatttattt

SEQ ID NO: 272862 - DNA, 388 bp, Glycine max
tggcagcaacctcaacatccctcttcttctctaatctccattctctcaactcacaaccttgctcttcctcactctccttccgaaatgtccattccaccctctctttcccttcttctaaaccctcccgtggcgttgtagccatggctggctctggcaagttctttgttggtggcaattggaagtgtaatgggaccaaagactccatcagaaagcttgtctctgacttgaacagtgcaacattggagtctgatgttgatgttgttgttgcaccttcctttgtgtacatcgatcaggtgaaaaacttcattacagataggattgaaatttcttgccaaaattcttgggtgggaaaaggtggggctttcacgggagaaatcagtgtggagca

SEQ ID NO: 272863 - DNA, 403 bp, Glycine max
ctgtgacacacataccccccgtttccgtatttcttcgaaatttctgttagattgtttctgttgtgtgtcagagaaatcagtgcagcaaaaatggacgatgccgaaaccaaaggaagaatcgaagaaactgttcgcagggttttgcaagaatcggacatggacgaggttactgagtctaagattcgaaaacaggcctccgaacaacttggcctcgacctgtctcagccccattttaaagccttcgtcaaacaggtcgtgaaggcttttctccaagaagaagaacaaagacagcaacaacagcaacaagatgaagatgatgatgatgaagaagaagaacaaggaggagtttccaagggcaaggagtacgatgatgaaggcgatctcatcatctgcaggctttcag

SEQ ID NO: 272864 - DNA, 428 bp, Glycine max
gttgagaactaagaaggagaagcaaatggcttcctcaatgatctcttccccagctgttaccactgtcaaccgtgccggtgccggcatggttgctccattcactggcctcaagtccatggctggcttccccaccaggaagaccaacaatgacattacctccattgctagcaacggtggaagagtgcaatgcatgcaggtgtggccaccagttggcaagaagaagtttgagactctttcctacctgccagaccttgatgatgcacaattggcaaaggaagtagaataccttcttaagaagggatggattccttgcttggaattcgagttggagcacggtttcgtgtaccgtgagcacaacaggtcaccaggatactacgatggacgctactggaccatgtggaagctgcctatgtttggttgcactgatg

SEQ ID NO: 272865 - DNA, 243 bp, Glycine max
acacaatctctaatggcactgagggtgtgggcttcttccactgccaatgcactcaaactctcttctgtctccagacctcatctcttgcctcctttttctttctccagatgcttatcttccgtcttggatggacttaagtacgctgattcacatgaatgggtcaagcacgaaggctcagtcgccaccattggtatcactgaccatgcccaggaccatcttggagaggttgtgtatgtggagctg

SEQ ID NO: 272866 - DNA, 346 bp, Glycine max
ccatgatatcaacaccagctcttatctctcaagcaccaagcatctcaaaagcactcatctatttgaagcccatccaaccgtgtgcctttcaagggccttagaccttctcacaaaggttcacaactcaaagtgagcagcaccaccaaaagggttattccaaagggtggtgtcggtgttagagctgaactcaactcagcacttgtcataagcctcagcactgggctctccctcttcttggggaggtttgtgttcttcaactttcaaagggagaacgtgtcatagcaagtgcctgagcagaacggactcacacactttgaggctggtgacacacgtgccaaggagtatg

SEQ ID NO: 272867 - DNA, 198 bp, Glycine max
gaggtaatcaaattgggaagctccatggagtagtagaactagttagggacactcctcatcaaatctgtgggtggagtggagatagcagcagctatatgtggaaataggggtaactttatctgctttagaatgcgtatatattataataatatcataaatgtgaacagcatcatgcaagttctcaaaataaatataaat

SEQ ID NO: 272868 - DNA, 415 bp, Glycine max
  unsure (1)..(415): unsure at all n locations
ggccgccacacgcgtccggttttccacaattccactctatttcatggtaatttgtcaattgntattaggctgttctgcggtggaattaatgaaaaaaacactatgtatgtatgtacttatccgagaagaaaaagctaggctgagattcagttatgttgatacannnnanaaaaaaaaaaaaaaaaataaaaaaaaaaaaaaaaaaaaaaaaaaaaaaaaaaaaaaaanataaaaaaaaaaaaaaaaaaaaaaaaaaaaaaaaaaaaaaaaaaaaaaaaaaaaaaagggggggccgttttaaaggatcaaagtttacttccccgggcttgcgacgaaatattttttttatggggcccccaaaattaaattaacgggccggggtttaaaaacgccgggacgggaaaaaccttggggt

SEQ ID NO: 272869 - DNA, 408 bp, Glycine max
tctaagtgtagtagaggagaggaaccgcgctaattctctcttcttcttcttcttcaatccgttgataacatttatagtttcattcttaatcgttgggaaaaatgttcatcgagaattttaaggtagagagtcctaatgtgaagtacaccgagactgagattcagtccgtgtacaactacgaaaccaccgaacttgttcacgagaacaggaatggcacctatcagtggattgtcaaacccaaatccgtcaactaccaatttaaaaccaacacccatgttccaaaattgggggtgatgcttgtgggttggggtggaaacaacggctctaccctcaccggtggtgttattgctaacagagagggcatttcatgggctacaaaggacaagattcaacaagccaattactttg

SEQ ID NO: 272870 - DNA, 429 bp, Glycine max
  unsure (1)..(429): unsure at all n locations
atcaagttctttgaaactagtgcaaaaactatcattaacgtggaagaggtcttcttttcaagagcaagagatattaagcaaaggcttgcagacacagattcaagagctgagcctcagactatcaagattaaccaacctgaccaggcaaccagtggtggtcaacctgcgcaaaagtcggcttgctgtggttcatgaaaagaatcagtatctgtagaaagaggtgcacaggtttctgcaatagcactcatctgggtgctaatgttattctgatgacattataagtgggagcatgtatttgtccctctgtatctcccaactgcagatgtcttattttaaagttaatattttaaattctttgctcactgacttgggggaatttgttgtgactagtaaattgcttcaatttcctaannnaaaaaannannnnnt

SEQ ID NO: 272871 - DNA, 269 bp, Glycine max
acaatggctctgtcgtcatcatcattggctggccaagctatcaagctggccccctccacccctaagctagctgttggaagggttagcatgagaaaaacagcctccaagactgttacctcaggaagcccatggtacggcccagatcgagtcaagtactagggcccattctctcgtgagccctcatcctacctcactggtgaattcccaagagactatcgttcgggacactcgctggcttttctgctgacccaagatacctttgccaaaaa

SEQ ID NO: 272872 - DNA, 457 bp, Glycine max
  unsure (1)..(457): unsure at all n locations
attgaatcgactaaaaaatgaaatgaattatttcatattgatagtattgctatgcttagtgggcgactcgttagttttttagaacggttccaatttaacaaatttataaaccggttcatcgtataaatgaattaaaaaagaactaataaccaacgcatcgcttcggattatctagatctaaagaactagtcaaaacaaaaaaaaatataaaaaaagatatattatagcaactgaactattgtgaagcataaaagaacaaaaatcttatttagttgtaaagcaataaaaatacagataaatgaagaggtgaaagaaagagagaaaaaaaatcaatgatatagaattctaatatgtaaaggtctatgggttatctcataaaaagtagtgtaataaagcatcaatctaaatcaattcatatctatttatatatgaantaatttataacgtaaacaaatta

SEQ ID NO: 272873 - DNA, 484 bp, Glycine max
  unsure (1)..(484): unsure at all n locations
ccgggcggacccacgcgtccgatccatcatgtccaagggcttgacatcactanatttgcttcagcaatgtttcaagntcgctntctatttttattggtcaagcaatgtaacactgcatcttgctagcactcctcataatattaatataattcacttatagacttcaagtattttaatcctattatttcatttgcatgtcttaaaacagatttaggatgacactatctttgttgcttgtctattaattattgaaaggccttctccttaataaatattatattttttatttttttatttattttatcttatttaatttactattattgttattattttatattactatttttctttaatattattacttttatttttttattttttttctatttttttattttattatataattaatattattttgtccttttttttaataatatctcatttttttcttttcttttttaattattatttatttttt

SEQ ID NO: 272874 - DNA, 455 bp, Glycine max
  unsure (1)..(455): unsure at all n locations
gacccacgcgtccgncattttcataatcaaataaaaaaataaataatttttcaaaaaaaaaaaaaaaaagggaagaaattttaaaaaaaaaaaaaacctctcctctcattttaaaacaaccttttataacaaatcctatcaattcatccctcttctcctttttttctcctcctctttttttttttcttttccttttctcttctctttttgttttccccccctctttttattttcccaacttttcccccccttctattctccctttttttttttttttttttccccctcttttttttctcttccccccctttttttcccccttttttctctaaaaaccccttctctcccccctcttattttttttataaaatccccccctttttccatttctttatattacaaaaaacccccccccattcccccttctcaatatttgtccccttttttttcctttt

SEQ ID NO: 272875 - DNA, 454 bp, Glycine max
tgagagtgtttggttgaaagtagcaaagattttttctttcgggcaaaagggtcaaaagatgaaggggactatggtggttatgcagaagaatgtgttggatatcaacagcatcaccagtgttggagggatcgttgaccaaggcttaggcttcataggcagtgcagtcgatgcacttacttttgcagccaccaaaatctccatccagttgattagtgctaccaaggctgatggtgggaaaggaaaaattggaaagagtacaaatttaagaggaaagataacattaccaaccttgggagctggcgaacaagcatacgatgttaattttgaatgggacagtgacttcggaattcccggtgcattttatattaagaacttcatgcaaaatgagttctacctcaagtctctaattctcgaagacattccaaaccacggaaccattcacttcgtatgcaac

SEQ ID NO: 272876 - DNA, 460 bp, Glycine max
cccacgcgtccgggctgccgaaacacatattgacaacttatctgcacttatggtaacatatccttcaactcacggtgtttatgaggaaggtattgacgaaatttgcaagattattcatgataatggaggccaagtatatatggatggtgccaacatgaatgctcaggtgggactcacaagcccaggttggataggagcagatgtatgccatctcaatctccacaagacattttgcatccctcatggaggaagtggccctggcatgggtcctataggtgtaaagaaacacttggcaccatttttaccatcacaccctgtgatagcaactggtggaattcctgcccctgacaaacctcaaccacttggtaccatcgctgccgcaccatggggctcagcactcatattgccaatctcttacacttacatagccatgatgggttctaaaggactcaccgatgca

SEQ ID NO: 272877 - DNA, 405 bp, Glycine max
cttccttcgccgctttgtgctgctgctgctgcattacctagggtggagccttttgctcaggtgttcagcgcttctttcttacaatggttctacagaacgatattgatttgctgaatcctccagctgagttggagaagagaaagcacaagctcaagcgtcttgtgcagtcaccaaactctttcttcatggatgttaagtgccagggctgcttcaacataacaactgtgtttagccactctcagactgttgtggtttgcggaaactgccagactgtgttgtgccaaccaacaggcggacgggcaaggttaaccgaagggtgctcttttaggaagaagggagattgaatggtttgttaaccagacttttctttgtcaatgattgaaaattttcggttgttaggttttt

SEQ ID NO: 272878 - DNA, 427 bp, Glycine max
cactaaatgtattatttgcccatagagcctgttttggcccagtcttggaatcttctgtgcggtgcaaatcccatcagtgccatctcaaacacgaacagtgtgtaggagtctgcccaggagttgtaaattaagagcatggctgcacaagctcttgtatcatcatcatctcttaccttctcagccgaggctacaagacaaagtcttggaccaagatcactccaatctccatttggcttctcaagaaaagcctcctttcttgttaaggcagctgctactccccctgtcaagcaaggatcagacagacctttgtggtttgcatcaaagcaaagtctttcctacttggatggcagccttccgggtgactatggatttgaccctctgggactttcggaccctgaaggaacaggagggttcattgagccgaaat

SEQ ID NO: 272879 - DNA, 413 bp, Glycine max
  unsure (1)..(413): unsure at all n locations
cccacgcgtgcgnccacgcgtncgatcttattcctctaatcactctagctgttgcaaattgctaggatttttcaatggcttctgcagatgttgagttccgttgctttgttggtgggcttgcttgggtcaccggcaacgatgccctcgagaaagccttttcaatctacggcgacatcgttgaatcgaaggttatcaacgaccgtgagactggaaggtccagaggattcggatttgtgaccttcgcctcagagcagtcaatgaaagatgcgatcgcaggaatgaacggccaggaccttgacggcccgaacatcactgtcaacgaaacttagacccgcgccaaccgtggtggtggtggaagccgtggtttcngaagtggtggtggatacaacccgccgagccgtggatattgtggt

SEQ ID NO: 272880 - DNA, 480 bp, Glycine max
gacccacgcgtccgcttggttgcaatgtaaatttgaatatggttacgtctaaacaaaaaaaaaaaaaaaaaaagagggatttttaaaaaaaaaaaaacaccacacataaaaaaaaaaaataaatttcgtctcccttcttattatccattcttactaacttcttactttctcccttcttttttcttctattccccaacccttttttcaattaattatccttcttcttccaatcttctctactgtcaaacaccctttcatctcctctccctctttttcttttttcccatacctcctctcctcttttttgttcacaccacattattacttttatacccttcttcctttccttctctttttttaatattaaattccttattttgatttcttttctcaccttttttttttttaataatttaaaaatttttcctcctttcctttttttaaatttttatttcccatttccccttatcctctttttct

SEQ ID NO: 272881 - DNA, 328 bp, Glycine max
caattttcgatggcttcttcagatgttgagttccgttgctttgtcggtgggctcgctggggccactgacgaccaagctctcgagagagccttctctcagtacggcgaaatcgttgaaacgaagattatcaacgatcgtgagactggaagatccaggggttttggatttgtgaccttcgcctcggagcagtccatgaaagacgccatcgaagggatgaacggccaaaaccttgacggccgtaacatcactgttaacgaagctcagtcccgtggtggcggtggcggcggaagcggtggaggtggtggatatggtggtggtcgcggtggtg

SEQ ID NO: 272882 - DNA, 319 bp, Glycine max
cccacgcgttcgcccacgcgtccgagagtttgttgtgagctataagctagtttatcgtgaggagaatatgaagttgtttgttttctttgttgctgcagtagttttggtagcatggccatgccatggcgcaggctaccaaaggttccctctccgaatgaaaactggctatggtgagcgttcttcggaggtaaaatgcgcaagttttaggcttgctgtggaagcacacaacatccgagcctttaaaaccattcctgaagagtgcgttgaaccaacaaaggactacattaatggcgaacaatttacatcagactctaaaaca

SEQ ID NO: 272883 - DNA, 354 bp, Glycine max
  unsure (1)..(354): unsure at all n locations
caacatactagagccatgctaccatttccccgatgctgccacagccaaagaaaatggaaccttaccaaggagtttcaagcaattaggagttactgagaggcctctcccagtgagaaagagaatgtttggtagagcttggccttttagagcaccagtcaaacctggtcttgttccattatggccccaattggctcanactaggcacgtcgcatgtgttagtgatgaagtagcaagttcatggctaaacaacgttgcagtcaggaaagccattcatgctgaatcggaaaaagtggcgggtccgtgggaattatgttcgagtagggaagagtaccatcacaatgctggaagcatgat

SEQ ID NO: 272884 - DNA, 302 bp, Glycine max
gtgagagacggcaaagacggaggagaggtcgcaaacgcaaaaatggtgaagtttctgaaaccaaacaaggccgtcattgtccttcagggacgctacgccggcaagaaagccgtgatcgttcgaaccttcgacgaaggaactcgcgagcgcccctacggccactgtttggtggcggggataaagaagtaccctgcgaaggtgatcaagaaggactcggcgaagaagacggcgaagaagtcgcgcgtgaaggcgttcgtgaagctcgtcaactaccagcacctttatgcccacgcgctacacgc

SEQ ID NO: 272885 - DNA, 316 bp, Glycine max
acgcccacgcgtccgcccacgcgtccgaaaaactttcgaaagattttatccaattgaaattttaaaaatgactgggataaacttaagaattcaattattgaaattgaataagtaaacaatttaattggattggtcgaatggtatcaaaaaaatggagtactaactcccatttcttatttattattgaattaaccgatcaacttgctttgttatcgaacatttctttttgatttcaaaaattttccggaaaaaatttgaatctatttttatatgcgaatcaatcctactacttttggtcctgagggttctgcgcttg

SEQ ID NO: 272886 - DNA, 306 bp, Glycine max
acggcattattcaatggccaccacagcagctctattcggaaccatggtgagcaccttcttaggaggaagcaacctatgacgaccaagagcctaaagacaattcccaacgctctttttggtctgaaaggtggacgaagtggtcgtgtaactcgcatggcctcgttcaaggtgaagctcataaccccagaatgagaagtggagtttgaatgcccagatgatgctttcattgatgacaaggcttaagaaaaaggcattgaacttccctactccggcaaggcttgttcttgcggtaaatgtgttgggaaa

SEQ ID NO: 272887 - DNA, 220 bp, Glycine max
ctgttgcaaatttctactatttttcaatggcttctgcagatgttgagttccgttgcttgggtggggggcttgcttgggtcaggggcaactatgccctcgagaaagccttttcaatctacggcgacatcgatgaatcgaaagttatcaacgacctgtacactggaaggaccagaggattcggatttgtgaccttcgtctcacagcagtgaatgaaagatgc

SEQ ID NO: 272888 - DNA, 240 bp, Glycine max
ctttctcattccccatctcctcaccttattcagtcactgatcatttctagggttccgcaatggacgctggctgtaagatcacgaagggcgccgcaggaagaaagggcggcggccctaagaagaagccgctttcaaggtccgtcaaggccggtctccacattcccgtcggaagaattggccgatatttgaagaaaggaaggtactctcagcgtgtctgtaccggcgctcccgtttacttgg

SEQ ID NO: 272889 - DNA, 381 bp, Glycine max
gatggatccagacgcgttggcaaaggcattcgtggagcactactacagcaccttcgacaccaacaggaacggcttagcgaatctctaccaggagggttccatgctcactttcgaagggcagaagatccaaggcgcttccaacatcgttgccaagctcacctccctcccttttcagcagtgccaccactcaatctccaccgtcgactgccagccctccggcgtcaacgccggcatgctcgtcttcgtcagcggaaaccttcagctcgccggcgaacagcacactctcaagttcagccagatgttccatttgataccaacacctcaaggaagctattatgtgttgaatgacatattctcgttaaactatgcattgagatgtca

SEQ ID NO: 272890 - DNA, 220 bp, Glycine max
gagacattactggttattatcatacgatgcctggtacagatggacatgactggcacggctcaggactaggcgttcatgcatggtgagggacctgtcacacgagcgtatcttactgggggtggggcgctagctactacaatgtaagctgctggtgccagtagagcactgcacatcgccgtgcacataagcactcagaacaagtatctgtcctaaactgata

SEQ ID NO: 272891 - DNA, 365 bp, Glycine max
cccacgcgtccgcgacaaaattgtatgcaaattgtaatgtacgttacaatcaaaaaaaaggggagaataaaaaaagaaaagggggtgattataaaaaaaataatttaaaatggaatttttaaatattattatattttatataatatattatggggggccctttttaagtgtcttaactttcttttctcttgtatggaatttctttatttctctttttattggtctcctcttattttattattactgtcctgggcgttttataatattattttaatttgggtaaaattctatgcgttttcccctcatttatattttcttgtgagaattatatcctctttttgtcagattgtgttaatattttaata

SEQ ID NO: 272892 - DNA, 287 bp, Glycine max
  unsure (1)..(287): unsure at all n locations
cccacgcgtncgccctccctcctatccaaacctctccttctcctcttcgcaaccaccaccctcagagccaaaccctccgacgacatggacacatcgttcttcgacaacatcaacccgcaagacgacatcacattcaaccctccggagcccccggagggcttcgtggcgcctccgtccttcgacgacggccccctggagactgaggacgaaatcgccgcagcctacgaggagctctacggccccggctacagcggcgtcttggtcctcggcaacgacgtgtacgtgat

SEQ ID NO: 272893 - DNA, 294 bp, Glycine max
cccacgcgtccgccctccctcctctccaaacctctccccctcctcttcgcaaccaccaccctcgaatccaaaccctccgacgacattgacacatcgttcttcgacaacatcaacccgcaagacgacatcacattcaaccctccggagcccccggagggcttcgtggcgcctccgtccttcgacgacggccccctggagactgaggacgaaatcgccgcagcctacgaggagctctacggccccggctacagcggcgtctcggtcctcggcaacgacgtgtacgtgatggacgcg

SEQ ID NO: 272894 - DNA, 339 bp, Glycine max
agaatataccttgttgcagaaagatgtaaattgtccacttgggtggccacttggtgggtttcctggaccacagggcccatactactgtggaactggtgctgataaagcatatggccgtgatattgtagatgcacattacaaagcttgtatttatgctggcatcaatattagtggcatcaatggagaggttatgcctggtcagtgggaatttcaagttggtccttctgttggtatatctgctggagatgaggtgtgggcagctcggtacattttggagaggattacagagatggccggagtaattgtttcatttgatcccaagcctattccgggagattg

SEQ ID NO: 272895 - DNA, 406 bp, Glycine max
cttacctgaagatggcttcggtgtcctttgccgtgggacttttaccttacgcttcagttcgatttcccgtattgagcaacgccaactcactgaaactcagttcctcagctagcatctctactccaattcttcagcaaaagctctgctctcttctttcccccctccctctaagccctcgccctcgccctctcaccattgtatccgctaagggctacaaaatgaaaacccacaaggcatctgcaaagcggtttatggtgaccggacgaggcaaaatagtgcgtaggagagctggcaagcagcatttgctcgtcaagaagaataccaagcgcaaattccgactcttcaaaatgcacgctgtcagcaggagcgactatgacaacgtaattggagccttgccatatttgaa

SEQ ID NO: 272896 - DNA, 288 bp, Glycine max
gtgagtgtgtaacagtgataacaagtttgagattgaaaggtgaaatgggtgcgataacgagcgcggtgatagcagtggtgggagttcttctaggttggatcacaatagagattgcatgtaaaccctgtcttcaacaggctcgccaagccatcgatcggaatctcaatccagattaccatcccgactacgacgactccaccgtcattcgcgccccacttaaccccgccctcacagcatcttcttacgccgcctgtaaagccttttgagaatcgaatgcccttcttctca

SEQ ID NO: 272897 - DNA, 334 bp, Glycine max
ctcagttctctcacacactcattcggtgctcctaatctcagattctagggttagggttcccaatttctccaccgatcagaaaatgagttcaactggtggttctaccaagggcggaaggggcaagcccaaagccttcaaatccgcttcaagatcgcagaaagctggtcttcaattccccgttggaagaatcgctcgattccttaaggctgggaaatacgccgagcgtgttggtgctggtgctcctgtgtacctctctgcagtgctcgaatatctcgctgctgaggttttgaattggctgggaatgctgctagggataacaagaagaatcgtattg

SEQ ID NO: 272898 - DNA, 312 bp, Glycine max
cccacgcgtccggattctcacaaacatttcttgagaaagaaagaatggctgccaacacattgatgagttctgccatctcagccttcccatctctcctttcctcctcaaaatccagatttgccgcagcagttcctctttccagctttgttgtcaccaatgcctcttcttctcgcttttccatgagtgctgattggatgcctggccagtctagacccccctaccttgatgggtcagcacctggtgactttggattcgaccctcttcgtcttggtgaagtaccagagaatcttgagaggtttcaagagtcagaac

SEQ ID NO: 272899 - DNA, 356 bp, Glycine max
cccacgcgtccgaatggccaccacagcagctctatccggaaccatggtgagcacctccttcatgaggaagcaacctatgacgaccaagagcctaaagacattccccaacgctctttttggtctgaaaggtggacgaggtggtcgtgtaacttgcatggcctcgtacaaggtgaagctcataaccccagaaggagaagtggagtttgaatgcccagatgatgttttcattgttgacaaggctgaggaagaaggcattgaacttccctactcgtgcagggctggttcttgcgtttcatgtgttgggaaaattgtgaaaggtgacgtggaccaatcagatggtagctttcttgatgatg

SEQ ID NO: 272900 - DNA, 405 bp, Glycine max
  unsure (1)..(405): unsure at all n locations
cccacgcgtccggtctgaggggttacttccgttctgactaaaaaaaaaataaaaaaaaaaaaaagaaaaaaaaaaaaaaaaaaaaaagagataataaaattattaaagattaaaatattatgaatggaaaggggtatatatataattttatttaattttatataattttaattgtgttttttttttttatttttttgtgtgttatatgtnttaattggttgtaatggtggtgtttttcttttggatctaatttttttatttctgtgtgtttatattattatttttgttttttattgtttgttttttatttattttttatttgttctgtttttttatatgtgtttattgtatatttttgtagttttaatatattttatttgtatgtgggaatttttcttttttttt

SEQ ID NO: 272901 - DNA, 321 bp, Glycine max
  unsure (1)..(321): unsure at all n locations
cctccctcaaatcccaaaccagcaaaaacctttcttcacaaaatggcctcaacaactctaacaaccctcaccctccgcacgctatcttatcctacaccctcctcttcttaccctacgcacctctccgccaaaccctcctccctccaattccccaatctctcccaccgcgccgccaccacgcgccgnccccgtgtcgtcgtctccgccgttgaggcgccggagaaaatcaccaagctcggcgacgaaatcggcggactcacgctcgaggaggccaagaacctcgtcgacttcctccaggacaagctcggcgtcttcgcggcg

SEQ ID NO: 272902 - DNA, 298 bp, Glycine max
cccacgcgtccgaagtagttgtgaacttatattgagaagcaaatggcttcctcaatgatggcttccccagctgttaccactggcaaccgtgccggtgccggcttggttgctccattcactggccttaagtccatggctggcttccccaccagaaagaccaacattgacattacctccattgctagcaacggtggaagaatgcaatgcattgcatgtgtggccaccagttggctagtagaagtttgagactcttttctacctgccagaccttgatgatgcacaattggcaaaggaagta

SEQ ID NO: 272903 - DNA, 281 bp, Glycine max
tcgcccacgcgtccgcccacgcgtccggccaagttctgtgcatcagcttcatcgcctacaagcccccaggcttctaagcgtgaaaaatttgcaaagcatttgtagccgccaccccactttgtttgtttgtacttaaactacattcccatttgtttttgctttttgagatttcatcattctgtatttttgggttctgttttcggacttcaatggaaattaatggatgagaactaatgaataagcctttgtgtcgtgttgcttttggttaaaaaaaataaaaa

SEQ ID NO: 272904 - DNA, 337 bp, Glycine max
  unsure (1)..(337): unsure at all n locations
atcacaccaaccaaacctcactctccctttctcccctgaccctctccctgccatggtcatgggagcctttggccacttcgaaccgggctccaaatgcagcaccgagaaccggtctaaccaaaccgtggcctcggacttggacggcaccctcctggtgtcccccagcgcatttccttactacatgctggtcgccatcgaagccggcagcttcctccgtggccttgtacttcttgcctccgtccctttcgtgtacttcacgtacatattcctctccgagaccgcgggcatcaagtnccttgatcttatcggcttcgcgggccttaaagtcanggacctt

SEQ ID NO: 272905 - DNA, 297 bp, Glycine max
atagactatctttatataataatataaataagaataaaaaaataaaaaaaaaaaaagaatctatttaaatataaaattaatatatataaggtacaaatagtaaatcgaggacccaatttaaggaaaacctttctttcaattttggtcctttaagaaggctaagatttcccgccattgcgaaggcctttttatttctttataggcaaaaaaacaagagtttttttgatacacaaaacacaaagaaaatctggggggtttttatattccaaatatattactctaattataaaaaaggga

SEQ ID NO: 272906 - DNA, 339 bp, Glycine max
ctttttctttctctttctttcgcactttcattctctaaaaaaatctaagtccctttggtcttcatcttctgttctgatccaggtatggcttctaaacgcatcttgaaggagctcaaggatttgcagaaggatcctcctacctcatgcagtgcaggccctgtggctgaggacatgtttcactggcaagccacaatcatgggacctgctgatagcccatatgcaggtggtgttttcctagtttcaattcattttcctcctgactatcccttcaagccaccaaaagttgcttttcggactaaggtgttccacccaaacatcaacaagcatggcagtatatgt

SEQ ID NO: 272907 - DNA, 411 bp, Glycine max
ggtggtttaaaccctggttctatcagcatgcacagacggcactgaagaaaggagagtttgtagaatacattcctaccagagaatattatcacaggcacacgagatgcttgtactgggagggaaagcttatcctcccatttgctgatcaattttggtttaggtatctgtttggctggttgatgccacccaaggtttctctcctcaaggcaactcaaggtgatgctataagaaactattaccatgaaatgcatgtcatccaggacatgcttgttcctttgtacaaggtgggagatgctttagaatgggttcaccgtgagatggaggtataccccatttggctcttgccacacaaattgttcaagctgtctgtcaaaactatgatttaccccgagccaaggatcgaactacacc

SEQ ID NO: 272908 - DNA, 328 bp, Glycine max
gcaaagctcgtggaattgctagcaatggcgatgatcaaggtttacgagctgaggcagaagacgaaggctgatctgctgaatcaactgaaggacctgaaggcggagcttgccttgcttcgtgttgctaaggtcaccggtggtgcccctaacaagctttccaagataaaggtggtgaggttgaacattgcccaggttttgacggtgatttctcagaaacagaaggctgcgttgagggatgcctacaagaataagaaggacttgcctctcgatctccgccctaagaagaccagtgctattcgcaggaggcttacttagcaccaggcattat

SEQ ID NO: 272909 - DNA, 303 bp, Glycine max
ctcattcttcatccatagacatggctttcgttacttctgcagccgttgctattccctgattcactggcctcaaggcaagcgcaggcaaagtgagtgccgcagttaaagtcttagcttcccaagccacaaggttgggcatcaaggctttgctgaaagacgttggagtcgctgttgtggccactgccgctagtgcagtgctggctagcaacgcctaggccatttaagttgtgctgtgtgtgtgattaccggtctttggctttcgttcccaacaattttttctggtcctctggggagaatatcttg

SEQ ID NO: 272910 - DNA, 345 bp, Glycine max
tcgcgccgaagaaggtattgacgtcgatgatgaaaatgaaattggtgaaaacattactgctgctcctttgtgtgaaacatcttctgttatgcagtgattggtgctcctcaaacttgtcctgctaacaatgaggataaatgcggcgattcagatgaatggaaaggggagtttttccctgacattcccaaaattaaatatgagggtccgtcaagtaagaatgtgctttcatttaaatggtataatgcagaggaggaaattcttggtaagaagatgaaagaatgggtaagatttagtgttgcattttggcatacatttctttgaaaaaggtgctgacccaattttggt

SEQ ID NO: 272911 - DNA, 385 bp, Glycine max
tcgtgttgatcgagataactagaaacagtgtgatgaaaatgaaggtgcttgctttcttcgtggctacaattttggtagcatggcaatgccatgcgtacgatatgttccctctacgaatgaacactggctatggtgcccgtactccggaggtgaaatgcgcaagttggaggcttgctgtggaagcacacaacatctttggctttgagaccatacctgaagagtgcgttgaagcaacaaaagaatacatccatggcgaacaatatatatcagacttcaaaacagttaaccaacaagcttacttttatgccagagaacctcaagtccattccaaggacacatttgtgttcaagatataatggaccgtactctctagtttccatacttc

SEQ ID NO: 272912 - DNA, 283 bp, Glycine max
attcccttcacaccattctcacaaaacaactttcaaactctgagaaagaatggctgccaacacattgatgagtactgctatctcagccttcccatctctcctttcttcctcaaaatccagatttgccaccgcagttcctctttctagctttggtgtcaccaatgcctcttcttctcgcttttctatgagtgctgactggatgccaggccagcctatacctccttaccttgatggttcaacacctggagactttggattcgaccctcttcgtcttggtgaagta

SEQ ID NO: 272913 - DNA, 380 bp, Glycine max
  unsure (1)..(380): unsure at all n locations
aagaaatataactaatattctntagaattatcaaaaagaatattaaattcaaataaattttagggagtagaaagacttaaaaaggaggatttgaaatgcgagatctaaaaacatatttttccgtggcaccagtagtaagtactctatggttcggggctttggcgggtctcttgatagagatcaatccgttttttccagatgcattgatattccccttttttataattctagttattgacacggaaaggggttgaagaagatttttgatccaattaagtattaaaatatttgttattaatatgtaaattaatctcctcttccttaatttcgactttaaatttctttcttttctttacaattggtaatagaataagttaggg

SEQ ID NO: 272914 - DNA, 281 bp, Glycine max
  unsure (1)..(281): unsure at all n locations
cccacgcgtncgggcaggatgggtggggctccctatttaaagaaagtagaccttgagaatgactctacatatccagaattatgttctgctctagaaaagatgttcagctgttttactatgagtaaatgtggatctcatggaattcttggcagggagatgctgaatgaaaccaagctgaaagaccttcttcatggatcagaatatgttcttacatatgaggacacagagggcgattggatgctctggggtgatgttccctgggagatgtttattgaaacatg

SEQ ID NO: 272915 - DNA, 371 bp, Glycine max
  unsure (1)..(371): unsure at all n locations
aacatttttggtttggggatagatagagtgatacgcgtcacattttcataataataaagaaatggcagcggcagcngcagtgacggtgctactcccacctaggattccgaccaccaccaacgttacccgctgctctgctttgccttctctccctcctcgcgtctccaacaccaaaaccactttgttctcaccttccctcaacaacttttcagtgccccgaaaatcttctctgcttcagaccagagcttcttcagaggaatcatcctcagtagatgccaatgaggtgttcacagatttgaaggaaaagtgggatgctcttgaaaacaagtccacagtacttctttatggtggaggggctatagttgctattt

SEQ ID NO: 272916 - DNA, 313 bp, Glycine max
  unsure (1)..(313): unsure at all n locations
gctacattttnttgcatcactgtggagcctgatggcaagggtggagcccnaagcggcggagagagaatgaccatgtgaggtgtgtgtggttcttgcttaatttgactggctctatggtagcttttgtgtgttgtacggcttcttctagaggctataaacattgatttcatgtatttgattcaggttattatgtatctatccgttttacattttgttatgacaaattataatttattttttatttttttttttttttttttttttttaatgtttttttttttatcttatctttttttattgggttgtccttttt

SEQ ID NO: 272917 - DNA, 244 bp, Glycine max
atcgactaaaaaatgaaatgaatcatttcatattgatagtattgctatgcttagtgtgcgactcgttagttttttagaacgggtccaatttaacaaatttataaaccggctcatcgtataaatgaattaaaaaagaactaataaccaacgcatcgcttcggattatctagatctaaagaactagtcaaaacaaaaaaaaatattaaaaaagatatattatagcaactgaactattgtgaagcat

SEQ ID NO: 272918 - DNA, 388 bp, Glycine max
atcccgtaaccatgtctcagactgttgtcctcaaagttggtatgtcatgtgaaggatgtgttggagcagtgaagagagttttaggaaaattggatggtgtggaatcatatgacattgatttgaaggaacagaaggtggtagtgaagggaaatgtccagccagacacagttcttgcgaccgtttccaaaactgggaagaagactaccttctgggaaggtgaagcagcagcatccgaaactagcacagcaactgcctagaacatttcgctctattctgttcagaagaagtagctgcgtaaatcaaatactattttatggacttgaaataacgatgggacttgttatctggtgtattttagtgtgtcacaacaaagatggctgtatatgac

SEQ ID NO: 272919 - DNA, 336 bp, Glycine max
  unsure (1)..(336): unsure at all n locations
cccacgcgtccgcttcatcacatggcaaacgcagcatctggtatggcagtccatggtgactgcaagttgaggtttttggagctgaangcaaaaaggacacaccgtttcatagtttttaagattgaggagcagcagaagcaggtcattgtggagaagcttggtgagcctgcccagggctatgaagatttcactgccagccttcctgctgacgagtgccgttatgctgtttatgattttgagtatctgactgaagggaatgtccctaaaagcagaatttttttcattgcgtggtcccctgacacatcaagggtgaggagcaagatgatttatgcaagc

SEQ ID NO: 272920 - DNA, 328 bp, Glycine max
gcagaaagcaagctcatcctagagttttaaaaatggcagcagcctcctccatggctctctggtccccatccttggctggcaaggccgtgaagctgggcccatcagcccccgaagtcgggagggtcagcatgaggaagaccgtcaccaagcaggcctcctccggaagcccatggtacggcccagaccgcgtcaagtacttgggcccattctctggcgagcccccgtcctacctcactggcgagttcccaggtgactacggctgggacactgctgggctttcggccgacccagaaaccttcgccagaaaccgtgagctcgaagtgatcca

SEQ ID NO: 272921 - DNA, 358 bp, Glycine max
cccacgcgtccgcccaacacttccgaaccttgcattgtatctacccacttctcaacgaacgatggcaatggcaacccaagccggtctcttcaccccacccctctccggtctcaaacccagcgaccgagccaccgcgccatggaaacaatcctccaccctctccttctccacctcgaagcccctcaagttctcgcgaacaatcagagcagcagccaccgaccagaccacagaggcaccggttgggttcaccccaccggaactggacccaaacaccccttccccgaccttcggaggcagcactcggcgggctcctgcgcagggccaaagtggaggagttttatgtcatcacatgggactc

SEQ ID NO: 272922 - DNA, 359 bp, Glycine max
  unsure (1)..(359): unsure at all n locations
tctgccacgcgtntcgccacgcgttcggcaaggatgagattcatgttattgcaaaatatgttaatgactatggtggggatgtgaagacagagatcacaggggtgctgtatcatgaaatggtccacgtttggcagtggaatgggaatggtcaggctccaagtggattaattgaaggtattgcagactatgttaggctgaaggcaaactatgcacctagccactggaagaaagcaggggagggacagaaatgggaccagggttatgatgttactgctcgttttctggactattgtaatactctcaaaagtgggtttgtggcacaattgaacaagcagatgaggactggttatagtgatcaa

SEQ ID NO: 272923 - DNA, 316 bp, Glycine max
ggtcttctggctagctcatgcctagcacattccccaggtgctgcacccacacaaccacccactacgaccccatcaccaccaccaccgagatcagcacctgcaccagcacccaccccgccagcaacaccaccaccagcaacaccaccaccagcaacaccaccaccagcagcagcaactccttcaccagcaacatcaccaccagcaacaacaccaacgccaacaccaacagctgcacctacacctgctttttctcctgcaaccttaccagtcccttccgctagttctccaccagcaccaggcacacccggacccgttc

SEQ ID NO: 272924 - DNA, 224 bp, Glycine max
  unsure (1)..(224): unsure at all n locations
tcgccacgcgtncgggaatttcgatgctcagttaatctcttttaccatactcttctcttcttgctcttgcaagaaagagccatgtgcatgcatcgctacctgaggaagattattgggaagctgttttgccaaacacttccattcccactgcactgcgagagcttctaaagccttttcctgcatgtgttgaaattgaataacttcctaagccaattgatgattca

SEQ ID NO: 272925 - DNA, 219 bp, Glycine max
cccacgcgtccgcccacgcgtccgaaaaattaaaaaaaaaaaaaaaaaaaaaatgtggtggtcttaaaagaaaaagcggtggggattcataccttcctgatgaagattatagggaagctttttttccaaacactcccattcctacttctcttctagagctttttaaacctttccctgcatgtaaaaaaattgatgaactcccttagcttttttatgata

SEQ ID NO: 272926 - DNA, 451 bp, Glycine max
cccacgcgtccgggccaccaattggcaagaagaagttcgagactctttcctacttgccagacctcgatgatgcccaattggcaaaggaagtcgaataccttctaaggaaaggatggattccttgcttggaattcgagttggagcacggtttcgtgtaccgtgagcacaacaggtcacctggatactatgatggacgctactggaccatgtggaagctgcctatgtttggctgcactgatgcttctcaggtgttgaaggagcttcaagaggctaagactgcataccccaatggcttcatccgtatcatttggatttgacaacgttcgccaagtgcagtgcatcagcttcatcgcctacaagcccccaggcttctaagtcattgaaaaatttgcaaagcatctgtagccaccccacttggtttggtgtacttaaactacattcccatttgttt

SEQ ID NO: 272927 - DNA, 290 bp, Glycine max
atccaattgaacatttaaaaatgactgggattaacttaagaattcaattattgaaattgagtaagtgaacaatttaattggaggggtggaatggtatcaaaaaaatggagtactaactcccatttcttatttattattgaattaaccgatcaacttgctttgttatcgaacatttctttttgatttcaaaaattttccggaaacaatttgaatctatttttatatgcgaatcaatcctactacttttggtcctgaggcttctgcgcttgaaaaaataaatttgggacgta

SEQ ID NO: 272928 - DNA, 208 bp, Glycine max
  unsure (1)..(208): unsure at all n locations
nccgatttaagaagaaccgcaagaagcgctgtcacgtcagcgccggccactgccgtattggaaagcaccgcaagcaccccggcggccggggaaatgccggcggcatgcaccaccacaggatcctcttcgacaagtaccacccggggttcttcgggaaggtagaggattaagtactttcataagcctcccaacaaattctacttcccca

SEQ ID NO: 272929 - DNA, 403 bp, Glycine max
  unsure (1)..(403): unsure at all n locations
attacaatacattccatgtagattatacttaaagattgatacgaaaatggcctaactgaggctagtcaaaaaaagcgaggcggtntcattatttcatgaggaagattctatgaaatcaaatgaggagtctaatggtcttttctaattctttaatatatcattttaaagattataatgtttttttttaattatatattattttttttttttatttatattttataatatttttttatcatattattttattttattattattaatttaatattattgtatttttatattatttttttattattataattttttattctatttatttattttttataattatttataatattgtaattatattttttttgtattattaattttatattttatattttttatatta

SEQ ID NO: 272930 - DNA, 379 bp, Glycine max
cccacgcgtccgttttggatctcatgggcgtaatggcaattttgggtattcaactgaatgcggtgtctgttgtaaaccttattatgtcaataggaattgctgtggagttctgtgtgcatatagtacatgctttcacggtaagcttgggggataggagccaacgagcaaagacagcattgtgtaccatgggggcttccgtattcagtggaatcacacttacaaaattagtcggagtcctcgtcctttgcttctcaacatcacaaatttttgtggtgtattacttccagatgtatctggccttggttctcattggctacttacacggtcttgtgtttctacctgtggtttagagctcgtttggtccttcattaagatatac

SEQ ID NO: 272931 - DNA, 419 bp, Glycine max
  unsure (1)..(419): unsure at all n locations
gaaggattttggagaaggatatgaagggaaggatgtggtgtatgaaaatttgaggcagttgtgtgttcatagagttgccaatgagagcaaccgttcatgggtctggtgggattatgtgacagatttccatgtcagatgttctatgaaggagaaaagatacagcaaggattgtgctgaggaagtcatgaaatcattagatctgcctatggataaaattaagaaatgcatgggtgatcctgaagcagatgtggagaatgaagtgctaaagaatgagcaacaagtccagatcggtagaggatctcgcggtgatgtcaccatcttgccaacgtnggttataaacaatgtccagtatagagggaaaatgggagagaactgctgtactcaaggctgtattgtcttgattaaggagactactgaac

SEQ ID NO: 272932 - DNA, 376 bp, Glycine max
cccacgcgtccgaacagaaccaagcgagttgttgtgactgactcagtgagcgagcgagcaagcgagttactcatggcgaacgcggcgcttcggaacgtgaaggtgctcccgaactcggcaaatatggaggaagctcgtcaccgagtcttccaattcttcagaacggcttgcagatcgttaccctccgtcatggaaatctacaacctctacgacgtcgtttccgtctccgaactccgctcctctgtcttctcccagatcccgaagaacatccacgtcaccgatcccaaagtgatcgatatgctgcttttcaaggggatggaagagctgaaaaacgtcgtggaccattcaaagcagaggcatcatatcattggtcagt

SEQ ID NO: 272933 - DNA, 157 bp, Glycine max
gcaaatctttgttaagaccttgaccggaaagacaatcacccttgaggtcgagagctctgagaccattgacaatgttaaggcggagattcaggacaaagagggtatcccaccaaaccaacaaaggcttatctttgcaggaaagcagctagaagatggc

SEQ ID NO: 272934 - DNA, 222 bp, Glycine max
cccgatttaagaagaaccgcaagatgcgcgtccacgtcagcgccggccacagccggattggggagcaccgcaagcacggcgggggccggggaaatgccggcggcatgcaccaccacaggatcctcttcgacaagtaccacccggggttcttcgggaaggtagggatgaggtactttcataagcttcgcaacatattctactcccccatcgtcaacatcgaca

SEQ ID NO: 272935 - DNA, 367 bp, Glycine max
  unsure (1)..(367): unsure at all n locations
cccacgcgtncggctgaaatctgaagctaacttaagggaaatgagatggccaatggcaacgctagtcatcgcttcaagctcttgcttttccttctaactctgcactcttcattcgctgagattttcttcgaagagagattcgaagatggatggaagagccgttgggtgctatccgattggaaaaggagtgaaggaaaagcgggtaccttcaagcacacagcaggaaaatggtctggggatcctgatgacaaaggtcttcagacatataatgacgccaagcattttgccatatctgcaaagatacccgagctaagcaacaaggacagaacccttgtgctgcagtattctattaggtttgagcaggaca

SEQ ID NO: 272936 - DNA, 407 bp, Glycine max
  unsure (1)..(407): unsure at all n locations
ctcactgtcnttccttctctaggggtgtttagctcccttcatttcttcgctcaacatggttcggaaaatgatattgatttgcggaatcctccggttgagcttgagaagaggaaacacaagctcaagcgtcttgttcagtcaccaaactctttcttcatggatgttaagtgccaaggttgcttcaacataaccactgtctttagccactctcagactgttgttgtatgcggaaactgccagactgtcttgtgtcaaccaaccggtggccgggcaaggctaaccgagggatgctcctttaggaagaagggagactgagtggattgccatctttttttgtttgtgattggagcagttcagtaatgccttctttttgttttggttatgatgatatgttaattttgttaaat

SEQ ID NO: 272937 - DNA, 388 bp, Glycine max
  unsure (1)..(388): unsure at all n locations
ctagggagctctctccattggttcttcatctgcatgcacacactngcatagttttgggaacgcagaatttttgaagggtagcatcaacaagaagttctggaaatggagatcaccaatgtcagcgagtatgaagctattgcaaagcagaagttgccaaagatggtgtttgactactacgcatctggtgcagaggaccagtggactctgcaggagaacagaaatgccttttccagaattttgtttcggccacgtattcttattgatgtgagcaagatagacatcacaactactgtcctgggcttcaaaatatccatgccaatcatgcttgccccaacagccatgcagaaaatggctcattctgagggagaatatgcaacagcaagagctg

SEQ ID NO: 272938 - DNA, 303 bp, Glycine max
cttctcttctccggttatggcgtccgccttgggcacttcttcaattgcggttctgccttcgcgcgacttctcttcttcttcgtccaagccttccattcacactctctctctaacttcagggcagaactatgggcggaagttttatggaggaattggaatccatggcataaagggaagggctcagctctcggttaccaatgttgccactgaagttaactctgtagaacaggctcagagtattgcttctaaagaaagccagaggccagtatacccattttctgccatagttggacaagatgagat

SEQ ID NO: 272939 - DNA, 448 bp, Glycine max
  unsure (1)..(448): unsure at all n locations
cccacgcgtccgcgcaaagctgaagtgtctgcttcttccgattccggcacgcccccatcaccatggtgaacgttccgaaaacaaagaagacatactgcaagagtaaggagtgcaggaagcacaccctgcacaaggttacccaatacaagaagggtaaagatagcattgctgcccaaggaaaacgccgttacgatcgcaaacaatctggttatggcggacaaactaagcccgtcttccacaagaaggctaagaccaccaagaagattgttctgaggtngcaatgccagggttgcaagcatgtctccaacacgctattagaggtgcaagcactttaagattgtggtgacaagaaggcaaggaacatctttgtctagtttgcgaatangattcgcagctttttatgtttcagcaatgttggaatcttttagtttctctctgaatttttttg

SEQ ID NO: 272940 - DNA, 312 bp, Glycine max
ggtagaagctgaacccgtttcgctttcaatcgaagggaagaacaaacattcaattcatggcagctgcaaagcttcaagctttatggaatcacccagctgggcctaaaaccattcacttctgggcacctacctttaagtggggcatcagcattgccaacattgctgatttctcaaaaccacccgaaaaactttcctatcctcagcaaatagcggtcacagctactggaattatcttgtctcgttacagcactgtaatcaccccaaaaaatttgaacctgtttagtgttaacatttgcaatgcagggacaggct

SEQ ID NO: 272941 - DNA, 370 bp, Glycine max
cccacgcgtccggcaccacattcacctgtggcttccaaagcaatggcttcccttgcagcagccactgctgctgcttcccttggcatgtcagaaatgcttggaaaccccatcaacttcagtggtgccacaaggccagctccatctgcttctagtcctgcctccttcaagactgtggctcttttctccaaaaagaaggctacaccaacacctccaaaaaaagctgctgctgctgctcctgccaatgatgagcttgccaagtggtatggtcctgacagaaagatcttcttgcctgagggtctcttggaccgatccgaaatcccagagtacttgaccggagaaagtccctgagactaatggtatgacccatttg

SEQ ID NO: 272942 - DNA, 388 bp, Glycine max
aagacctcatggcccttcaatcagccaaagaaaaaggacaacttgtggaacaccagagccggttcacgtgttccccgaccacgctcttacacggcctcgccaagggtgccagaggcatggttggtctcggtaggtcccgcagctcgcttccttctcaggttttcgacaacttcagcacgcaccgaaaactcactctctgcctttcctcctccaaaggcgttgtcctcttgggcaacgtggcaacctacgagtccgaggttcttaaatctctcaccttcacaccccttgtcaccagctttcccacgcaggaatacttcatcaacgttaactccgtcaaaatcaacgggtagaggctgtccaacgagcatgagggtggtggaggggtttt

SEQ ID NO: 272943 - DNA, 265 bp, Glycine max
aaaaacatatctttccgtggcaccagtagtaagtactctatggttcggggctttggcggggctcttgatagagatcaatcggttttttccagatgcattgatattcccttttttttcattctagttattgacacggaaaggggtgaagaagattatagatccaattaagtattaaatatatgtaattaatatgtaattaatctcctcttctttatttcggcttttatttcttcttttttttacaattgtaatagaataagttagg

SEQ ID NO: 272944 - DNA, 316 bp, Glycine max
attgataatcatagctatggcaacggcgagtgcaagttgtgcggtatcatttaaaaacagcttcggtgtgagtaaaccctcggatcttgggttcttgagctctcgtctgaacggcctcagaatctgcttccccaaattgccacccacacccctcactgcttctcccttccccacaccccttcctatcgttgccaagagagtgtgtcccttcactggaaagaaatcaaacagggccaacaaagtatcattttcaaaccacaagacaaagaaactgcagtttgtgaaccttcagtacaagagaatttggtgggaagca

SEQ ID NO: 272945 - DNA, 356 bp, Glycine max
taattattttattattttatattttttattataataatataaatatataatattatttatctatttttattattatattataatattattttttttatatttatttatactattaaaattatttttatattaatattaatatataataatatatttatttatttaattataaattttcttttatttataaattttataattaattttttttttaaattttaattttatttttaattattattattatataatatttattataaattatattaattacttaatatctatatattaaatattatatatatattataattcatttataatataatttttttatataaaatttatatatt

SEQ ID NO: 272946 - DNA, 155 bp, Glycine max
ggcttattgtggatacctaggcacttagattcaaggaagggcttaataagcgacggggtgcttcttcaagttaaaaaggggcgtatatacagccattccctaaatcggtccacctttctaactgttggtgaatccactggcattcaagagacaac

SEQ ID NO: 272947 - DNA, 312 bp, Glycine max
ggcgacacctggatcatcgatggcgtcggcaatggcggcctcctggcgcctgaggcgccgctcgatttcggcaatgccgccacgggctgccgcctgaccatgggcctcgtcggggtctacgatttcgacagcaccttcatcggcgacgcctcgctcacaaagcgcccgatgggccgcgtgttgaacccgctgcgcgaaatgggcgtgcacgtgaaatcggaagacggtgaccgtctttccgttaccttgcgcgggccgaagacgccgacgccgatcacctaccgcgtgccgatggcctccgcacaggtgaag

SEQ ID NO: 272948 - DNA, 322 bp, Glycine max
gtgagtagtgagagggcgaagcgatgaatgccccacatcgttacgagcgtttcgtcgtccctgaaggcaccaaaaaggtttgttatgagagggacacgaagatcatcaatgcggcgtccttcaccatcgagagagaggagcacactatcggcaacatcctccgcatgcagctgcacagagaccccaatgtcttgtttgccggatacaagcttcctcatcctcttcaatacaaaattattgtcaggatacacaccactagtcagtcttcgccaatgcaggcatataaccagtctgttaatgatctggacagggaacttgatca

SEQ ID NO: 272949 - DNA, 262 bp, Glycine max
ggagggcaaaggtttcacggaagagcaagaagctctggtggtgaaatcatggaacgaaatgaagaagaattctcaagaactcggtcttaaatttttcaagaaaatattggagattgctccagcagctcagcaattgttctcattcttgaaggattcaactgttcctttggaggaaaaccccaagctcaagccccatgccatggctgtctttgtcatgacgtgtgaatcagcttgtcaactgaggaaaagctggtaagtcact

SEQ ID NO: 272950 - DNA, 305 bp, Glycine max
ggagggcaaaggtttcacggaagatcttgtttctctggtggtgaaatcatggaacggaaggaataataattctcaagggctcggtcttaaatttttcaagaaaatattggagattgctccagcagctcagcaattgttctcattcttgaaggattcaactgttcctttggaggaaaaccctaagctcaagccccatgccatggctgtctttgtcattacgtgtgaatcagctgttcaactgaggaaagctggtaaagtcactgtgagggaatcaaaccttgaaagaattgttgcctactcatttt

SEQ ID NO: 272951 - DNA, 351 bp, Glycine max
tcgcccacgcgttcgaattttctagggtttatacaattttcgatggcttcttcagatgttgagtaccgttgctttgtcggtgggctcgcttgggccactgacgaccaagctctcgagagagccttctctcagtacggcgaaatcgttgaaacgaagattatcaacgatcgtgagactggaagatccaggggttttggatttgtgaccttcgcctcggagcagtccatgaaagacgccatcgaagggatgaacggccaaaaccttgacggccgtaacatcactgttaacgaagcttcagtcccgcgtcagcttcgaccactacctacttacccaccggcgagagggtcctac

SEQ ID NO: 272952 - DNA, 244 bp, Glycine max
cccacgcgtccgggaaattgttgatgcttaaattaagtttcaaattatataccttttcttttctgttttgtctctgcttatgatttgaattttagaataaatttttaaaaatgtgaatgatgaaggagacaatacctgttgttacttctttgaaaaaaaaaaaaaaaaaaaaaataaataaaaatatccatataatataatataaatttttatatattttttttatttaatattatatattaaa

SEQ ID NO: 272953 - DNA, 442 bp, Glycine max
gttcttcttcgtcgttatcttcttcttttgttgtttgtgtgtttgttttttctctcaccggaaaatgtcttgctgcggtggtaactgtggttgcggaagcgcctgcaagtgcggcaacggctgcggaggctgcaagatgtacccagacttgagctacaccgagtcaaccaccaccgagaccttggtcatgggagtggcaccagttaaggctcaattcgagagtgctgaaatgggtgttcccgctgagaacgatggctgcaaatgtggagctaactgcacctgcaacccctgcacttgcaagtgaggtgttggagagctaaagcttcaagcagagatggcccttagaaataatgataaaaactatatgtaagttcaaaacttcaaaattatgtagtatgtattatgttgcactctggtgttttgtgtctaaacaaacaccctt

SEQ ID NO: 272954 - DNA, 252 bp, Glycine max
gaacctcattgagaaagctgagaaaacagccaaatctcactattggaattcttgtaccgggtgtgggtgcttcgtgtcaatggtctggatgctcatatttggtggcaagaaacctgtgagtagtgattttttttccctacgctcattcatagtatttctttcatggaattattattccgtattattttatttaaatcttgataccaagtctcttcttgtgcaggcaaaggtggagaagaaaccagaacgcac

SEQ ID NO: 272955 - DNA, 453 bp, Glycine max
  unsure (1)..(453): unsure at all n locations
aacaatcttaacgcgtgcaaagcttatagatacacatccatcggtccaacacctggggggtgtgatttgctatctgggaacgcaccatatccctagtcacggtatttgctctttcttactcgaaaattaaatcaagctttacttatattggtttttgttaaatactatatttttatgttttattattataattttttttttaatgttttgggtgggttctttttttaaatctatacttttttattttcttttcatatatttataatttttttttaaggcacctaaaataaattaaatggccgtctttttaaaaacttctggattggaaaaccccttgctttcccaaattaatatttttttgnggtttattttttttttttatttttatataatttaaaaagtttttattatttttttttttttaatattttttttttttttttatattttttt

SEQ ID NO: 272956 - DNA, 297 bp, Glycine max
ggccggtctccaattccccgtcggaagaattggccgttatttgaagaaaggaaggtacgcgcagcgtgtcggtaccggtgctgccgtttacttggccgcagttctcgagtacctagctgctgaggtgcttgagttggctgggaatgctgcacgtgacaacaagaagaacaggattattccgagacatgtgctgttggctgtaaggaacgatgaggagttggggaaattgcttgctggtgtcaccattgctcatggtggtgttcttccaaacattaaccctgttttgctacctaagaa

SEQ ID NO: 272957 - DNA, 377 bp, Glycine max
aaaattcttctccttttgtgcttccaactcttttctttgttatattattctctttgacttggtgccaacccttggaggcaacatgactatcctcattgagcaatctgatcactttggggctgaagtagaggcaaagactgaaccaataaatgagagagaactggtgttggatggtggatttctgataacacagaccaactcatttgggcacatgtttagggcttataatgatgctgaaagtgagaggcatgaaggagtggagaacttctacagaaaaaatcacacttaccaatcaattgatttcgtgaagaaaatgagagaggagtacgcaaaattgaacagggtagagatgagcatatgggaatgttgtgaactcc

SEQ ID NO: 272958 - DNA, 457 bp, Glycine max
cttattctacttgagacacattacttatgtttaagatccaccactccttatccttgggtaacaatctaaaactgaaggggtgccagatttacctaaacactataaacaacttttggatacctcgatcaatcatggcttacaccaaagtgtcaagtcgactacttaatatatatgtttcagatgcttacacctttagttgatttattttctcatacttgacttcacttcttttatattagctctattttttaacctcttctataaaattttttttttatttattattattttttttttttatatttttttttcttttttgttttttttctttatctattttttttttatttttttttatatttttttaatagtttttttttatatttatattttttttattcttttttttttttttttattttttttttttatttattattttttatgttcttttatt

SEQ ID NO: 272959 - DNA, 212 bp, Glycine max
  unsure (1)..(212): unsure at all n locations
cccacgcgtncgttccctnttaatggattccttgtgnttttgaccctctattttgttgtggtgagagaaccccaatttcagtgagtatgtgaggttcaacactatgcaagccgttgtccttgatgtgctcttgattttccctgacctccttgaaagaggggttaatcccaaagatgggttgggattggatttgataatgagtttggatagca

SEQ ID NO: 272960 - DNA, 446 bp, Glycine max
  unsure (1)..(446): unsure at all n locations
agttgagaactaagaaggagaagcaaatggcttcctcaatgatctcttccncagctgttacgactgtcaaccgtgccggtgccggcatggttgctccattcactggcctcaagtccatggctggcttccccaccaggaagaccaacaatgacattacctccattgctagcaacggtggaagagtgcaatgcatgcaggtgtggccaccagttggcaagaagaagtttgagactctttcctacctgccagaccttgatgatgcacaattggcaaaggaagtagaataccttcttaggaggggatggattccttgcttggaattcgagttggagcacggtttcgtgtaccgtgagcacaacangtcaccaggatactacgatggacgctactggaccatgttgaagctgcctatggttggttgcactgatgcttctcaggtgttgaag

SEQ ID NO: 272961 - DNA, 305 bp, Glycine max
ctaggcacccagagacgaggaagggcgtagtaagcgactaaatgcttcctggagtggaagagaagcctacatccggggattggcgatatacttcaacctttctaactgctgctgaatccacgggcatgcaagagacaacctggttaactgaaacatcttattagccagaggaaaagaaagcaaaaccgattcccgtagtatcggcgagcgaaatgggagcagcctaaaccgtgaaaactgtgttgtgggagagctatacaagtgtcttgcttctaagcgaagcatcatataatgctgcaccctag

SEQ ID NO: 272962 - DNA, 172 bp, Glycine max
gtccttgataactaacaacgagaaacgaattgctcgctcaatgaactattgcacggacgcgacaactgtcaaccccgccggtgccggcatctttgctccatttactgacctcaaatccattgctggctttcccaccacaaagaccaacaatgacatcacctccattgctagc

SEQ ID NO: 272963 - DNA, 399 bp, Glycine max
cgaataataacaaataaataaaaggatgtattatgataaaaaaaaaaaaatctaatggttgtgtgctttcgcaccaacggttgggtgctttaagcctttccagtgtgcatctgcagctggttcaatgattcaaaatttgtattttcttttttttggagcattcattatttctcttatttcattttttttataatattagcaacattttttgatagtttttaaatctatttgttttttcttgtacttcattttattgatcttttgtttttttatgttgaattttttttggtttttatttttcttttttcatttatatgatttatatttctttttcttatttttttatttccttattttatgttattgatgcttttttatcatatcattttattttttttt

SEQ ID NO: 272964 - DNA, 281 bp, Glycine max
gtttctgtaaccatggcatccaccactctatcccctacaaccccttctcagctatgctcaggaaagagtgggattttcagtccctcacaggcacttcttgtgaagccagtgaagaggcagatgatggggaagagcaagggaatgagaattgcatgccaagccaccagcattcctgctgatagagtccctgacatgggcaaaagacagctcatgaatctgcttcttcttggtgccatttcactcccctctgctggaatgcttattccctacacctacttttt

SEQ ID NO: 272965 - DNA, 453 bp, Glycine max
cctttctcctaaaacatctcaatgggttcttcttctattacaacatcgcccgcaaccatgaccatggctgcgatcgtgctcctgttcacggtctttgccgtttcctccgccctagacatgtcgataatctcgtacgacagcgcccacgcggacaaggccgccacgttgcgcaccgaggaggagctgatgtccatgtacgagcagtggctcgtgaagcacgggaaggtgtacaacgcgctcggcgagaaggagaagcgcttccagatcttcaaggacaacctgcgattcatcgacgaccacaactccgcggaggaccgaacctacaagctcggactgaaccggttcgctgatctcaccaacgaggaatacagggccaagtacttgggaaccaagatcgatcccaaccggaggctcggaaagaccccgagcaaccgctacgcgccacgtgtcggc

SEQ ID NO: 272966 - DNA, 408 bp, Glycine max
gtagaattaggccagtgcttttctagcattgggagggcaaagacaaggatgtgctagtttatgagaaactcccagacggagttccataccatgagacaatgaagaagagcaagtattgcatttgtccaagtgggtttgaagtggcaagtccaagaattgttgaggcaatctatgcacaatgtgtgcctgtgataatatcacaacaatatgtgcttccttttagtgatgttctgaattgggactctttctcggttcagattttagtgagtgatgtacccaagcttaaggaaattttgttgggtatatcggaggacaaatacatgagattgcaagagggagttaagcaagtgcaaagacattttgtggtgaataatcccccaaagaggtatgatgtattccatatgatta

SEQ ID NO: 272967 - DNA, 457 bp, Glycine max
ttttaagttaaatagtttttcattgtttcatttaatctacaatggctgcttcaacaatggctctctcttcatcatcattggctggccaagctatcaagcttgccccctccacccctcagcttggtgttggaagggttagcatgaggaaaacagcctccaagactgtttcttctggaagcccatggtacggcccagaccgtgtcaagtacttgggcccattctctggtgagcccccatcctacctcactggtgaattcccaggtgactatggttgggacactgctgggctttctgctgacccagagacctttgccaagaaccgtgaacttgaagtcatccactccagatgggccatgttgggagccctgggctgtgttttccccgaactcttggcccgcaacggtgtcaagttcggtgaagccgtgtggttcaaggccgggtctcagatattcagtga

SEQ ID NO: 272968 - DNA, 438 bp, Glycine max
accggtctcggaattgacccacgcgtccggccagtcacacaccttttacctcagaaaatttaaattattcccttagagaaaacaaaagcacagaatcgaaagaagagttattttttgagagagattgggatggcttcgacgaagaagatcacactgaagagttcggacggcgaggccttcgaggtgtatgaggcggtggcggtggagtcccagacgatcaagcacatgatcgaggacaactgcgccgacagcggaattcctctccccaatgttaccagcaagattctggccaaggttatcgagtattgcaagaagcacgttgaggccaattgcgctgatgagaagcccagtgaggatgaactcaaggcttgggacgctgatttcgtcaaggttgatcaggccacactctttgatctcattctggctgcaaattacttg

SEQ ID NO: 272969 - DNA, 450 bp, Glycine max
ggaatctaagcctaaatgggaaggtaaatttgtgacttagctaccaggcacggatgcagaacaagtatggactgcgttagaggatttctgcaacctacacaagtggtggcccatagaatcatgttaccaactagagggtgtaccaggtcaacctggtctaatccgctactgtgcttacaccgttgaagaagctgttgttggtgctcagaagacaacaacaaccatcaagtggaccaaagagaagctactcgcgatcgatcccgtgcaacgttgtttgtcctatgaaattgtggaaaacaacatgggatttaagtcctatgtggcaacactcaaagtgctgccaatgaatggagatgggtgcaagatagattgggggtttgtctgtgatccttgtgaagggtggagtttccaagacttgaagttataccttgagtcttctcttcagtccat

SEQ ID NO: 272970 - DNA, 388 bp, Glycine max
cccacgcgtccggcgcggcataacctaaacctatctttcttctctctctgtgtgtgcgcttcaacggcaaccagaagcagccatggccactgcaaggactgtgaaggatgtttcacctcatgagttcgttaaggcgtactcctctcaccttaagcgatccggcaagatggagctgccagagtggactgatattgtgaaaactgcaagatttaaggagttggctccttatgatcctgactggtactatgtcagagctgcttccatggcaagaaagatctacttgagaggaggacttggtgttggtgcctttcagaggatttatggtgggagcaagaggaatggtagtcgcccttcctaatttttgcaagagcagtggtgccattgctcg

SEQ ID NO: 272971 - DNA, 451 bp, Glycine max
cccacgcgtccgcccacgcgtccggcaaagttcaaaatttacaaggaccctgctttgtgttatattttcttgatgaacaatgggaggtacattgttcagaagaccaaagatagtgaattgggaaccctcttgggagaagattggatcagaaaacacgctgcaaaagttaggcaattccatgtgcactatcaaagaagctcgtggaataagctattagggattctgaagttggatagtaatgggtcaatgccccatattaactaggcaaagtcaatgaaggagaaactcaagtcgtttaacacagtttttgaggagatatgcaaggaacagtcttcatggtttgtctttgatgagcagcttatggaagaaataagaatttcgcttgagaaaatcttgcttactgcgtatggaaactttgatgcaaggtttcagagtgttcctgagcttggaa

SEQ ID NO: 272972 - DNA, 426 bp, Glycine max
cccaattcttccccctccacccacccagcatatttctctattcctatttattagcacgcgctcacattaccttgtgtcaccaactactttgactcctttaccataccattacaataattatcaaacctaaccagtaaaaatggtgaccgtggaggaaatccgcaacgctcagcgttcccatggacccgccaccatcttggccttcggcaccgccacgccgtccaactgcgtctcccaagccgattaccctgactactacttccgcattaccaacagcgaacacatgactgatctcaaagaaaagttcaagcgcatgtgtgaaaagtccatgataaagaagcgatacatgcacctgacggaggaagttctgaaagagaacccgaacatgtgcgagtacatggcgccatcgctggacgtgagacaaga

SEQ ID NO: 272973 - DNA, 396 bp, Glycine max
gtgatatgcaaaacatgtctctaatagcttcactcttctccacaacttcacaactcactgcccttcgttccctcccttcttcctcctctccactttctcgcaaatttcccctcactttccgggaaaaaaacagaactccaatcacacctcacaagctccctttttcagcaaggcctaccaccaccagagtggtgttggtgaagtctcaggccacagcacctgcttcttctgaggctgtggcagtgacacctgtgtcttctgagatgaaggcatgggtctatggggaatatgggggtgtggatgttctgaagctggactccaatgttactgtgcctgatgtgaaggaagatcaggttctaatcaaagttgttgctgctgctcttaaccctgttgatg

SEQ ID NO: 272974 - DNA, 441 bp, Glycine max
gaagaagcagagggagtagcggcattaaaaatgcagatcttcgtgaaaactctgacagggaagactataaccctcgaggtcgagagcagcgacaccatcgacaatgtcaaggccaagattcaagacaaggaaggcattcctccggatcagcagcgtttgattttcgccggaaagcagcttgaagatggaaggaccctggccgattacaacatccagaaggaatcaacccttcatctcgtcctcaggcttcgtggtggcatcattgagccttccctcatggctttggctcgcaaatacaatcaggacaagatgatttgccgcaagtgctacgcccgtctgcatcctaaggctgtgaactgccgcaagaaaaagtgcggtcatagtaaccagttgaggcctaagaagaagatcaagtgaattctgtgtgatattgttggtctc

SEQ ID NO: 272975 - DNA, 290 bp, Glycine max
gtgaaaactctgacagggaagacggtaaccctcgaggtcgatagcagcgacaccatcgacaatgtcaaggccaagattcaagacaaggaaggcattcctccggatcagcagcgtttgattttcgccggaaagcagcttgaagatggaaggaccctggccgattacaacatccagaaggaatcaacccttcatctcgtcctcaggcttcgtggtggcatcattgagccttccctcatggctttggctcgcaaatacaatcaggacatgatgatttgtcgcaagtgctacgc

SEQ ID NO: 272976 - DNA, 454 bp, Glycine max
cccacgcgtccgaaaactgtttcttcaggttggccatcttcactgcacttgattggtaaggatattctacgcttccatgctgtttactggccagctatgctaatgtctgctggactaagccttcctaaaatggtatttggccatggattcttgacaaaggatggaatgaagatgggcaagtcactagggaatatacttgaaccaaacgatttggttaataaatttgggacagatgcagttagatacttcttcctcagagaggtggaatttggcaatgatggagactattcagaggaacgcttcatcaatattgtgaatgcacatcttgccaatacaattggaaatcttcttaatcggacactaggacttctgaaaaagaactgccaatcaattctggtggtggattccactacagctgctgaaagaaatgaattcaaggacaatgtatagaagc

SEQ ID NO: 272977 - DNA, 449 bp, Glycine max
  unsure (1)..(449): unsure at all n locations
cggacgcgtgggcgaggagagtagcatcatagaaggtggtgcttcgcttccatcgtcgggttcagacgccaagaagcgaagagtgacctacttctacgagcccaccatcggcgattactactacggtcaggggcacccaatgaagccgcaccgaatccgcatggcgcacaacctcatcgtccactactccctccaccgccgcatggagatcaaccgccccttcccggcctcccccgccgacatccgccgcttccactccgacgactacgtcgacttcctctcctccgtctcccccgagaccctcgccgattccgccttctctcgtcacctcaagcgcttcaacgtcggcgaggactgccccgtcttcgacggcctcttccccttctgccaggccttcgncggtggctcccttggcgccgncgtcaaactcaaccgcgctgacgccgaca

SEQ ID NO: 272978 - DNA, 454 bp, Glycine max
cccacgcgtccgcaaaaatggtaaccattgtgggttcttacaatgtcactcctaatcaaccaactccaaaggatccttcatggctatccgatagtgaccaaatcggtgtcctaggtcatgtagccattgtctacatatacgaagcaaatcccaacagcaacaccattgagagattgaggaactctcttagcaagcttttggtgtactactatccattcgctggcagattcagcttgacaaaaagtggtcgcatagaagtggattgtaacgcaaagggagtgacattgattgaagctaaaacctcacacacacttgatgattatggagacttttcaccttcaaagttgaccgaggaacttgttccagatattgattatactccacccatagaggagattcccctattactacttcaattcacaaggttccattgtggtaaaggccttgccattgg

SEQ ID NO: 272979 - DNA, 361 bp, Glycine max
aaaacacgtagttgagaactaagtagaatgaaatggcttcctcaatgatctgggaccgggctgttaccaccgtgaaccgtgccggtgccggcatggttgctccattcaccggtctcaaatccatggctggctttcccacgaggaagaccaacaatgacattacctacattgctagcaacggtggaagagtacaatgcatgcatgtgtggccaccaattggcaagagaaagtcgagactcttttctacttggcaaaaccttgttaatcccaatttgccaaaggaggtcgattccttttaaggaaaggatggattccttgcttggaattcgaattggaacacggttttctttaccgggggccc

SEQ ID NO: 272980 - DNA, 144 bp, Glycine max
gcaactgatgtcattatcttctgcttaaaaaatttaaaaaaaaaaaaaaaaaaaaaaagaaaaaaaaaaaaaaaaaaaaaaaaaaaaaaaaaaaaaaaaaaaaaaaaaaaaaaaacaaaacataaaaaaatacataaatacaaa

SEQ ID NO: 272981 - DNA, 409 bp, Glycine max
  unsure (1)..(409): unsure at all n locations
cccacgcgtccgtgagaactaagtagaatgaaatggcttcctcaatgatctccgctcgagctgttaccaccgtcaaccgtgccggtgccggcatggttgctccattcaccggcctcaaatccatggctggcttccccacgaggaagaccaacaatgacattacctccattgctagcaacggtggaagagtacaatgcatgcaggtgtggccaccaattggcaagaagaagttcgagactctttcctactagccagacctcgatgatgcccaattggcaaaagaaggtcgataccttttaagaaaggatggatttctngcttggaattcgagttggagcacggtttcgtgtaccgtgagcacaacaggtcacctggatactatgatggacgctactggaccatgtggaag

SEQ ID NO: 272982 - DNA, 348 bp, Glycine max
cccacacgtccgcggacgcgtgggtcagtatacgtctattttggatcggaacctcttcggcggcgtatcaatgggacactccaacgtttggaattctcacccaaaaaactacggtcctggttctcgcacttgccgagtgtgtgggaatccacatggattgatcagtaagcatcgccttatgcgctgcacgcagtgcttccgtagcaatgccaaggaaattggcttcatcaagtatcgctaatatagctgttgacacctacggaccaatatcatgttcttgcactaggatgtcttgaagactttatgtttcaagaaacttttgactaacgacggttatgtattctatta

SEQ ID NO: 272983 - DNA, 412 bp, Glycine max
gttctttcctcacttcaaacttgccaaaaatggcaacagaattggcatcatctcccaattgggttccaagcgcagccacatgtttggcagcctttgccgccctccttctcctcttcctccgcggtctccgccgccgccgatacaacctccccccaggcccaaagccctggcccatcataggcaacctaaacttaattgggtcccttccacatcggtcgatccacacgcttggcaaaaaatacgggcccatcatgcacgtatggttcgggtcgagctccgtggtggtgggctcgtccgttgaaattgccaaggccgtcctcaaaacccacgacgccaccctcgccggcaggccgaagttcgcggcgggcaaatacacaacctacaactactcggacatcacttggtcccagta

SEQ ID NO: 272984 - DNA, 442 bp, Glycine max
cccacgcgtccgatcgtattacttaatcttcaatggctgcttcaacaatggctctctcgggatcatcattggctggccaagctatcaagcttgccccctgcacccctgagcttggtgttggaagggttagcatgaggaaaacagcctacaaaactgtttcctcaggaagcccatggtacggaccagaccgtgtcacgtactcgggcccattctcaggtgagcccccatcctatctcactggtgaattcccagctgactatggttggaacactgctgggctttctgctgacccagaaacttttgccaaaaaccgtgaactggaagtcatccactccagatgggccatgttgggagccttgggctgagttttacctgaactcttgtgccgcaacggagtcaagtttggcgaggccatgtggttcaaggccgggtctcagatatt

SEQ ID NO: 272985 - DNA, 328 bp, Glycine max
cccactcgtccgaacgtttgacttaagcgtctatggctgccgcaacaatcgcggtatcgggatcatcattggctggccaggctataaagcttgccccctgcacccctgaactcggtgttacaagggttagcatgacgaacacagactacacaactgtttcatcaggaagaccatggtacggaccagaccgtatcacgtactcgagcccattctcaggtgagccctcattctatctaactgatgaattcccaactgactattgttagaacactgcaaggctcattcctgacccagagacttctgccaatcaccgtgaactggaagtcat

SEQ ID NO: 272986 - DNA, 449 bp, Glycine max
gttgagaactaagaaggagaagcaaatggtttcctcaatgatctcttccccagctgttaccactgtcaaccgtgccggtgccggcatggttgctccattcactggcctcaagtccatggctggcttccccaccagaaagaccaacaatgacattacctccattgctagcaacggtggaagagtgcaatgcatgcaggtgtggccaccagttggcaagaagaagtttgagactctttcctacctgccagaccttgatgatgcacaattggcaaaggaagtagaataccttcttaggaagggatggattccttgcttggaattcgagttggagcacggtttcgtgtaccgtgagcacaacaggtcaccaggatactacgatggacgctactggaccatgtggaagctgcctatgtttggttgcactgatgcttctcaggtgttgaaggagc

SEQ ID NO: 272987 - DNA, 390 bp, Glycine max
cccacgcgttcgagtagctctagtatatgttcaaatgaatgaaccgcccggagctcgtgtgagagttggtttaactgccctgactatggcggaatattttcgagatgtcaatgaacaagatgtacttctatttatcgacaatatctttcgcttcgtccaagcaggatctgaagtatctgccttattgggtcgaatgccttctgctgtgggttatcaacccactcttagtactgaaatgggttctttacaagaaagaatcacttctaccaaagaggggtccataacttctattcaagcagtttatgtacccgcagtcgatttaaccgatcctgcgcctgctacgacatttgcacatttagatgctactactgtactatcaagaggattagc

SEQ ID NO: 272988 - DNA, 348 bp, Glycine max
cttgtctctctctcggatttcttgcgcttattatcatgggggatagtcagtatgctggttctctcaccacatttagcccttctggaaagcttgttcagattgagcatgctttgacggctgtcgggtctggacaaacgtctttgggaattaaagctgcaaatggcgtcgtcattgctaccgagaagaaattgccatctatattggttgatgaagcatcagtccagaaaattcagttattaacaccaaatatacgtgtcgtatatagtggcatgggtcctgattttcgagttttggatcggaaaagcaggatacacgccgagcagtatcaccgtttatataaagaaccaa

SEQ ID NO: 272989 - DNA, 428 bp, Glycine max
atctgttcagagatcatgaagagttccttttgttgtcctggtacatctcccactttcggtatgacttgagccatttcctgaaagtcattggaagcaagggtgcgaattagctcctatatttaatgaacttgttgatcgggtgagtttggatgggaaatttctccaggaatctctctccagaactaagaatgcggatgaatttacctcaagacttttagatattcattctaagatgctacagattaacaaaaaagaggacatacgcatgggaatagttcgttcagattatatgattgatgagaagactaaatcacttttacaaattgagatgaacactatttccacttcatttgctttgattggttgtcttatgactggacttcataagagcttactttctcaatatggaaaattccttggactaaatt

SEQ ID NO: 272990 - DNA, 447 bp, Glycine max
  unsure (1)..(447): unsure at all n locations
ggttctggtttatagatctctgtgaagtctctntattacactcaacctaagatgcagaacgaggaaggacagatcaccgagctttacattcctaggaagtgctctgccacaaaccgattgattaccgctaaggaccatgcttcggttcaggttaacattgggcatgtggatgagaatggcgtctacaatggccatttctccacttttgctctctgcggcttcatccgtgctcagggtgatgctgacagtgccctagatcgcttgtggcagaagaagaaagttgaagttaagcaacagtagacacccatgatagtttgttactttgctatgtattaaattctactcttgctagagatatttgagtactatgatttgccgtcttgagcaaatacttagtctaaattttcgttggtatttggtaccggcagttaaattggcttttttgac

SEQ ID NO: 272991 - DNA, 457 bp, Glycine max
cggacgcgtgggtgaggttatagaacacattccgtatgatcacaaggctgatgtatttagttttggaattgttttatgggagttgctcaccggaaagcttccatacgaatatttaacccccctacaggcagctataggagtggttcaaaagggtttgcgacccaccatcccgaagaacactcatccaaagtttgtggagcttcttgagaggtcttggcagcaagatcctacattgagacctgatttctccgaaattatcgagatcctgcagcagttagcaaaggaggttggagatggagaggagcggcacaaggataaatctggaggactcctgtctgtcctcagaagaggacatcactaaaaggtttctttgaatagatgatgtccgtaacatggtcataggtaggatcaatcgcagcacaagggccatttcccatttgtttctaaattgtcatgt

SEQ ID NO: 272992 - DNA, 408 bp, Glycine max
cccacgcgtccgatcccaagaagtatgcattatttcctgaaatcaacttggtaaatggggagacaagaggtcttatcggtgggtaccctccatgtaaccgaacaattttggccttctttgcagggcaaatgcatggtagaattaggccagtgcttttccagcattgggagggcaaagacaaggatgtgctagtttatgagaaactcccagacggagttccataccatgagacaatgaagaagagcaagtattgcatttgtccaagtgggtttgaagtggcaagtccaagaattgttgaggcaatctatgcacaatgtgtgcctgtgataatatcacaacaatttgtgcttgcttttagtgatgatcttaaatgggactctttcttggcttaaaattttaatagtgatg

SEQ ID NO: 272993 - DNA, 112 bp, Glycine max
caacaaacaaagtggggtggctacagatgctttatgagatttcatcatcctgtatttttggtttctgttttcggacttcaatggaaattaatggatgagaactaatgaataa

SEQ ID NO: 272994 - DNA, 454 bp, Glycine max
cccacgcgtccggcaacgcactgaattcgttcaatcaatccatcttcaattgctttgttgcgatcggaggaaaatggccgatcagttatcgaagggagaggaattcgagaaaaaggctgagaagaagctcagcggttggggcttgtttggctccaagtatgaagatgccgccgatctcttcgataaagccgccaattgcttcaagctcgccaaatcatgggacaaggctggagcgacatacctgaagttggcaagttgtcatttgaagttggaaagcaagcatgaagctgcacaggcccatgtcgatgctgcacattgctacaaaaagactaatataaacgagtctgtatcttgcttagaccgagctgtaaatcttttctgtgacattggaagactctctatggctgctagatatttaaaggaaattgctgaattgtacgagggtgaacagaat

SEQ ID NO: 272995 - DNA, 358 bp, Glycine max
cggacgcgtgggctgggactttcggactttgaaggaacaggagggttcattgagccgaaatggctagcatatggtgagataatcaatggtcgatatgcaatgttgggtgcagttggtgcaatagcacctgaaattctaggcaaggctggtctgatccctcaggagacagcactcccatggttcagaaccggtgtgttcccacctgcaggaacctacaactactgggcagactcctacacactgttcgtgtttgagatggcactgatgggatttgcagaacacaaaagattccaagactgggccaaaacaagctctatgggcaaaccatacttcctaagactagaaaagggtcttggaa

SEQ ID NO: 272996 - DNA, 404 bp, Glycine max
  unsure (1)..(404): unsure at all n locations
cgatgaaattcaagaggcttctcagatgttgtcttgttaggctgactttgtgggctgcgcggtctgtgcatgcatgcagactcagcacaagattgagatggacaagcgagacgggaaatatggaccccaaccagcaatggcagtgcctcctatgcagcagatgtcacgcattgatcaacaagtacctccttcggttgggtatgcaccacaaccagcttatggacagcctgctcaaggatatcctgctccgggttatactcctactggttacccccctgctgcttattctncaccaagatattccccttctggctaccctaagtgattggtctacagcgcaccaattgatcgtgcttcatagaacaagggaacatgtttgtggtgaaatacaacagttcgattga

SEQ ID NO: 272997 - DNA, 464 bp, Glycine max
gaaaactttggacaaaaaatggagtgctactcaaggtcaaacaggagtgacatccacctgtcagcagaggaagaagccaccatagaggcaaagaccagagagtactttgatggggtcgcaccacaacgccacacaaagcctcaacgaagtgactattcagctcaatatgtcgatgctttctccaatgcccatcactcttctttaactataccagaattaacacaattccaactcctccagaacgatccccaagagaagaaattggtgtacaatggaagtcaagtaccggaagaatttgtggaaacagagtattaccaagatctcaacagcgtggacaaacaccaccatacgactggaacaggatttatcaaagtagagaaaaatggaaatgactttcacatagaaccagataatgacactggttgccatcactcttgcaagggcaatccagcaaccaatgattg

SEQ ID NO: 272998 - DNA, 450 bp, Glycine max
cccacccgtaccagaaaccggattaagatttttctacgaaaagagccatggcaacaacagcgccctcaaaccgatcattagaggcgtacgctctcatggcaatcctcagcactctgctttgcacggcggtggcggcgaatgagagcgtgtacgagatactccccaagtacggcctaccgagcggtctgttaccggacaccgtcaccgactacacgctcgacgaggaccggcaattcgtcgtccttttggcgaagccctgctacatacagttcgattacttagtttactactagaccaagatctccggcaagctcagctatggctccatcaccaacctcaagggcattcaggaccagcgcctcttcatctggttcaacgtctatgagatcaacgtcgatttgcctcccttcaacagcatctacttccaggtcggtatcatcaacaagaaac

SEQ ID NO: 272999 - DNA, 455 bp, Glycine max
gttgaacaagggtttctctgtctgcttcttcactttctctcgtttcaatcgaaaccaaagcaaaatcatgggcagaaaattcttcgttggtggcaactggaaatgcaatgggaccactgaggaggtaaagaagattgttactactttgaatgaggctaaagtccctggagaagatgtcgtagaagttgttgtgagccctccttttgtgttccttcctgttgtaaaaagtttgctgcgccctgatttccatgtttcggcacaaaactgttgggttcgcaaaggtggtgcttataccggtgaggttagtgctgaaatgcttgttaatttgggaattccttgggttattattggtcactctgaacggaagcagcttttaaatgaatcaaatgagtttgtgggagataaagttgcctatgcacttcaacaaggtctaaaagttattgcatgcattgggg

SEQ ID NO: 273000 - DNA, 425 bp, Glycine max
  unsure (1)..(425): unsure at all n locations
cttggaggctagggtttccggattcttgctttttaatctttgcaattcaaaagcatggggcactccaatgtgtggaactctcatccaaagaactacggacctggttctcgcacctgccgtgtgtgtgggaatcctcatggattgatcaggaagtatgggcttatgtgttgcaggcagtgcttccgtagcaatgccaaggaaattggcttcattaagtatcgctgaaggattagtgtccaactgccccactcggtttggattcttgcattaggctgggttgattttactgtctgaagaacctataagaatttttgtgacatttagtgaagttaattatcaaaactcaatttgtggaactaagaatatttttgttttttatataattgttttgagctatctacatcaaaaaaaaaatanaatataac

SEQ ID NO: 273001 - DNA, 227 bp, Glycine max
acgcaggcccatcatggcttcagagaatcatttgggtctcgccgtcactccctctgatgcggatgctcctaccatatttgacaagatcatcaataaggagattccttctactgtggctcatgaggatgacaaggtgcttgccttcagggacataactactcaagctcctacacatattcttatcattcctaaattcaaagacggcttaagtagtctatccaaagctg

SEQ ID NO: 273002 - DNA, 335 bp, Glycine max
acgctgacgcgtaccacaacactttcaatcattagttcccaatgggtcaaatctgatgacggagaggcttctgctgagctaaaagggaatgaactcaacaacggtagattggccatgatctctatgtacgggttctctgatcaagccattgtcacctgcaagggtccattggacaacctcgctgatcaccttgcgaacccagacaacaacaatgcctgggcctacgccaccaactacgtccacctcaagcgagcatcaaacaaaaggatgacttgtggactcttgagaggttttagaattgcgtatcgtgaagactaatatattgcaatgtactt

SEQ ID NO: 273003 - DNA, 425 bp, Glycine max
gaactaagaaggagaagcaaatggcttccttaatgatctcttccccagctgttaccactgtcaaccgtgccggtgccggcatggttgctccattcactggcctcaagtccatggctggcttccccaccaggaagaccaacaatgacattacctccattgctagcaacggtggaagagtgcaatgcatgcaggtgtggccaccagttggcaagaagaagtttgagactctttcctacctgccagaccttgatgatgcacaattggcaaaggaagtagaataccttcttaggaagggatggattccttgcttggaattcgagttggagcacggtttcgtgtaccgtgagcacaacaggtcaccaggatactacgatggacgctactggaccatgtggaagctgcctatgtttggttgcactgatgct

SEQ ID NO: 273004 - DNA, 446 bp, Glycine max
gtgatatgcaaaacatgtctctaatagcttcactcttctccacaacttcacaactcactggccttgcttccctcccttcttcctcctctccactttctcgcaaatttcccctcactttccgggaaaaaaacagaactccaatcacacctcacaagctccctttttcagcaaggcctaccaccaccagagtggtgttggtgaagtctcaggccacagcacctgcttcttctgaggctgtggcagtgacacctgtgtcttctgagatgaaggcatgggtctatggggaatatgggggtgtggatgctctgaagctggactccaatgttactgtgcctgatgtgaaggaagatcacgttctaatcaaagttgatgctgctgctcttaaccctgttgatgccaagacgaagcagggaaagtttaaggccactgattcttcccttgcgact

SEQ ID NO: 273005 - DNA, 158 bp, Glycine max
tatatataaaattctatcctttcgttcgttatcattcttttttccttttaagataggaaaaatgctaaagaatcgcgaaagaaatcaaaaacttatgtataaatatttataaataaaaagattactaatcaaataaataaaagtaaaggggcaatatc

SEQ ID NO: 273006 - DNA, 420 bp, Glycine max
atcaattttggtttaggtatctgtttggtttgttgatgccacccaaggtttctgtccgcaaggcaactcaaggtgatgctataagaaactattaccatgaaatgcatgtcatccaggacatgcttgttcctttgtacaaggtgggagatgctttagaatgggttcaccgtgagatggaggtataccccatttggctctgcccacacaaattgttcaagctgcctgtcaaaactatgatttaccccgagccaggattcgaactacaccgcaagcaaggagacacccaaactgctcaaatgtacacagatgttggagtttattatgcaccaagtcctgttcttaagggtgaagtatttgatggggcagaagcagtgcgtaaaatggagaactggttgattgaaaatcatggttttcagccac

SEQ ID NO: 273007 - DNA, 353 bp, Glycine max
cataactaaactatcaagtatccctgtatatacaagttgtctaaattgtgaaaaaaaaagaaaaaaaaaaaaaaaaaaaaaaaaaaaaaaaaaaaaaaaaaaaaaaaaaaaaaaaaaaaaaaaaaaaaagaaaaaaaaaaaaaaaaaaaaaaaaaaaaaaaaaaaaaaaaagaaaagaaaaaaaaaaaaaaaaagagaaaaaaaaaaaaaataaaaaaaaaggaaaataaaaaggggcgcgtcaagggaaaaccctgttttgacccatcaaaattggcctagcagcttattttccttattgcgacttgaaaaaatgccggaccggggtttttaaaaattcgggattgggaaaa

SEQ ID NO: 273008 - DNA, 406 bp, Glycine max
gaacaggataaagctcattgcccttttcatttaaaatcaggagcatgttgttttggcatacgctgtagcagagtccatttttaccctgataagtcgtccacttttcttatcaaaaatatgtataacggtcctggccttgcttgcgatcgggaccaagatgagggccttgagtataaagatgaagaggttgaacgctgttttgaagaattttacgaggatgttcacacagagttcctgaagtttggggaagttgtgaacttcaaggtgtgtaaaaatggttcatttcactggcgaggaaatgtctatgtacagtataaatctcttgattctggtctgcttgcttataactcggggaatggtcgctactttgctgggaaacaggtaagttggtaatttttaacttaac

SEQ ID NO: 273009 - DNA, 461 bp, Glycine max
ctgcctgtaagagtgaaaaaaccttctcttttccttttctcaagtctcaagagatttcatcatggctccaaagaaggacaaggctccaccaccttcctccaagcccgccaaatctggcggtggcaagcagaagaagaagaagtggagcaagggaaagcaaaaggagaaggtgaataacatggtgctgtttgatcagggcacctatgataagctcctttctgaagctcccaaattcaagctcatcactccttccattctttctgatcgtttgaggattaatggatcacttgcaaggaaggctataagagaattgatggctaggggttcaatcaggatggtgtctgcccatgcaagccagcaaatttacaccagggcaacaaacacctaggtgtggaactgatcttagcttacggagtattggtaggaatagtaatgaagtattggtcttttgcactttggga

SEQ ID NO: 273010 - DNA, 455 bp, Glycine max
caaaatttttgaattcaaagatgctggggtgaattgtgtggctgtgggaagttccccaaggtttaaagtttatgacattgattttggatgggggaagccagagaatgtgaggagtgggactaataacaagtttgatgggatgatttatttgtatccggggaaaagtggaggaaggagcattgatgtggaactaaccttggagcctgaggctatggggaagttggagcaagacaaggattttcttttggaagcataaaattgctagagcaagtgcaataaaaaaaatggctagaaaaagtacgttgagcaaatttggaaagtagtactgctcagattgttgaaggggtcgacttcaatgcccaattatgaattctgatgtgattcatggatgcaatttaatttaaagttgtgctgctttaggattttatatatgttgtggttctacgtttgattga

SEQ ID NO: 273011 - DNA, 450 bp, Glycine max
  unsure (1)..(450): unsure at all n locations
cttgcactctgccctttgggaggagtttgtaacatggctgctctactctactgcggagcttagtgatgcaaatgcaacacatgtagcaagtggtgatgtgagggtgctgcatccagtgttcaaggtttatggccaggccacggcattctccggccccattgtcaccgtgaaggtgtttgaagacaacgtgttggtgagggagcttgttgagacgaaaggcgaaggaagagtattggttgttgatggaggaggaagcttgaggtgtgcattgatgggagggaatttggtacagattgcatataacatggggtgggctgggattgtggtgaatggttgcgttagagatgtggatgatatcaatgcgtgtaatattggcgtcagagccttggcttctcatccactcagatccaacanatagcgcaactgtgaaaagaatgtccctgtttatgt

SEQ ID NO: 273012 - DNA, 421 bp, Glycine max
aaattgttaaaaaaaaaaaaaaattaaaatttaaaaaaaaaaaaaaaaaaaaaagaaaaaagaaaaaaaaaaaaaaaaaaaaaaaaaaaaaaaaaaaaaaaaaaaaaaaaaaaaaaaaaaaaaaaaaaaaaaagggggggccgttttaggggtccaaagtttacgtccgcgtgcttgcaaggtaaaagtttttttatggggccactaaatttaaattaatgggccggggtttaaaaaggagggaatgggaaaaacctgggggttcccaatttaaatggcttggaagaaaatccccttttggcaagttgggttaataccaaaagggcccgaaccgatggcttttccaaaaagtggcgaaccctaattggcaaagggaacccgccttgtatggggcattaaagcccgggggttgtgggggtta

SEQ ID NO: 273013 - DNA, 399 bp, Glycine max
acgcttatggtggatacctatgcacctagagtctatgaagggcgtattaagcgacgaaatgatcaggagtatgaggaccaggaggacgatgatgttgaagcagaccacatgtgaagagactgaatgtgaaagatgcctgtgtcttacttatgctatgtgatgcgtaagtgtgattgctctgctctgcaacgtgaagaagattgtaattactaatagcgtatgtacggttagcgggataaaactttgatgagcttgatgtggagaatggaaaaaatatggggttagtgcgagtggagtttgggaacaatgttatgcggcacctatctgtttgttcttatattggcttgcttttatgttgttatattgagtcatgtttccgtaatatttgttgttcttaag

SEQ ID NO: 273014 - DNA, 426 bp, Glycine max
ctctttgatacccttttgttctttttggtgctttaatttgcactagcaagggggttgggtttatttctgtttgcttgcaacaatggctgtggctaataagttactttctgttttgatcattgccctcattgccatttccatgcttcaaacagtggttatggcatctcatggacatggaggccaccactacaatgacaagaaaaaatatggacctggcagtctcaaaagcttccaatgcccatcacaatgctcaaggaggtgtggcaagacccagtaccacaagccctgcatgtttttctgtcagaagtgttgtaggaagtgcctatgtgtgccaccggggtattatgggaacaaagcagtgtgcccttgctacaacaactggaagaccaaggaaggaggacccaaatgcccttaaataacctatgc

SEQ ID NO: 273015 - DNA, 390 bp, Glycine max
tcgaagagaatggctacacaaacacaatctctaatggcactcaggatgtgggcttgtgccactgccaatgcactcaaactctcttctgtctccagacctcatctcttgcctcctttttctttctccagatgcttatcttccgtcttggatggacttaagtacgctgattcacatgaatgggtcaagcacgaaggctcagtcgccaccattggtatcactgaccatgcccaggaccatcttggagaagttgtgtatgtggagctgccaaaaccaggtggcacagtttccaagaagtctggcttcggagccgttgaaagtgttaaagcaacaagtgatataaactctccaatctcgggggagatccgtgaggttaacaaaaagctcacagaa

SEQ ID NO: 273016 - DNA, 418 bp, Glycine max
tctaccactcgttcgcttcgacgaccgtcttacccaatcgcctgcgtctctctctgtattgacgagcttaaagacaaagtcttatatggctggtccaaggattgcccatgctaccttgaaaggtccgagtgtggttaaggagataataatcggaataacacttgtcttacctgctggtagcgtgtggaagatgcaccactggaatgaacagatgaaaaccaggaccttctacgaattactggatatgggagaaatcagtggtgatgcagaggaacagtgaaaatgtgcttgaaaagttgcctatgctatccatacataggcatggtttaccatgcattattccatgggatcttaaactgtacatgagccatcttactatgatatagaaaagaactattttcttacactgaatgagtac

SEQ ID NO: 273017 - DNA, 378 bp, Glycine max
gcggacaaagggagatgtacaatacacacagcaaccaccgatcaaagaagagggagccgggcagatctccctttctcgccaaacaaacacaatatggatttctttatcggcgactaaaccgcacctttctttggcttcctcagaaccgccagatgcctcgttttttcctgtatgggagccgcatacaaaacccggaagagcacgcgaccgggttgcgtcgatgggcgtatacgatgcctgacctgcgtatgaaatcaatcgtgcccgatgtgatggatggcgcgatgggtattcaccgcttgatcatcgaagatatgatcaagtcttgcattgaccctaaaggcaaatcgtactttccttttgactggtacgcccacc

SEQ ID NO: 273018 - DNA, 356 bp, Glycine max
  unsure (1)..(356): unsure at all n locations
ggaagattctgtggtgagcacctacagagatcatgttcatgcattgagtaagggggtcccgtctcgggaagtgatgagtgaactgtttgggaaggcaacagggtgctgccgaggtcaaggtggttcaatgcatatgttctcgaaagagcacaacttgctcggtgggtttgcctttattggtgaaggaattccggtggccaccggggctgcattttcgagcaagtacagaagagaggttttgaagcangcagattgtgatcatgtgacgttggcattttttggagatgggacttgtaataatgggcaggtctatgaatgncctgacatggcagctctgtggaaattgccaattgtgt

SEQ ID NO: 273019 - DNA, 445 bp, Glycine max
gtttgttgatcgagataactagaaacagtgtgatgaaaatgaaggtccttgttttcttcgttgctacaattttggtagcatggcaatgccatgcgtacgatatgttccctctccgaatgaacactggctatggtgcccgtactccggaggtgaaatgcgcaagttggaggcttgctgtggaagcacacaacatctttggctttgagaccattcctgaagagtgcgttgaagcaacaaaggaatacatccatggcgaacaatatagatcagactccaaaacagttaaccaacaagcttacttttatgccagagacctcgaagtccatcccaaggacacatttgtgttcagtatagatggcaccgtactctctaatattccatactacaaaaaacatggatatggggtggagaaatttaactcgaccttgtatgatgaatgggtaac

SEQ ID NO: 273020 - DNA, 414 bp, Glycine max
ttgatcgatattacttgtaacagttttatgaaaatgaatgtccctcatttcttgggttggggaataatggaagcatggcaatgccatgcataccatatgtttcctcttctaatgaacactgtctatggtgcccgtactccagaaagaaaatgcgcaagttgctggcttgctgtggaagcacacaacatctttgtcttttaaaccatccctgaaaagtgtcgttgaatcaacaaaagaatacatccatggcgaacaatatagatcagactcctaatcatataacctacaagctgacttttatgccagagacctcgtaatccatcccaaggacacatttgtgttcaggatatatgagaccgtactcttttatattccattcttcaaaaaacatggctattgtggggaaaaattaac

SEQ ID NO: 273021 - DNA, 326 bp, Glycine max
gcggatttggtggaggtggaggtggtggcggaggtggtggaggaggaggtgcgggtggcggatttggcggaggagcaggaggagggtttggtgcaggaggtggatttggcggaggaggtggtggtggtggaattggacaccactagagcgttgccaacgttgcatgcatgacaaagtgatattttaacgtccttgtattagccatgataattggtttattgaaaaatattgtgcgagtaagagaattaattattaatgttggtttcataatattaatgtgctctgtttttatttatagttaacgttgaaggaaagaatcggagata

SEQ ID NO: 273022 - DNA, 395 bp, Glycine max
gccagtggcaagaagatcaagactgacaaaccttatggaattaatggtggcatggctttgagggatggaactgatgcatctggcatgaaaggaaagggaaagggtgtttaccagtttgtagacaaatacggtgctaatgtcgatggttacagtcctatctacgacaccaatgactggtctccaaccggtgatgtctactctagctgtacgactggcttggctatctaggctgtgactctacttggtcttttagctagtggtgcacttcttgtatactacacaagtagcttgagtcaatagactttgcaaatcgatgtttaagttataacatattccatgtaactatctaagaatgaagaactattcgtgaagtactttgtggatatgttccttct

SEQ ID NO: 273023 - DNA, 276 bp, Glycine max
tccacgcgtccgtctttttgttcactaaattaaaaaaaaaaaaaaaaaaaaaaaaaaaaaagaaaaaaaaaaaaaaaaaaggggaaaataaaaaaaaaaaaaaaataaaaaaaaaaaaaataaaaaaaaaaaaaaaaaaaaaaagtgaaaaataaaattaattaaaaaggtagaggttttaaaaaaatattaattgttaaaaaaaataggaataaaaaataaattgtttatatgaaaatttatatttatttaaaaggaaataaatttaaaaggaat

SEQ ID NO: 273024 - DNA, 415 bp, Glycine max
ctttgctattacctctttttccaaactctaaaaatttttagttccacaaatccggaccaggatggcagcagcctcggcctcatccaccatgatatcaacaccagccttatctccaagcacaagcatccaaaagcaccatcatttgaagccatccaacgtgtgctttcaaggccttagacccctcacaaggttcacaaccaaagtgagcagcaccaccaaaagggttattccaaagggtggtgtcggtgttagagctgaactcaactcatcacttgtcataagcctcagcactgggctctccctcttcttggggaggtttgtgttcttcaacttccatagggagaacgtggcaaagcacgtgcctgagcagatcggactcacacactttgaggctggtgacacacgggccaaggag

SEQ ID NO: 273025 - DNA, 359 bp, Glycine max
cttggaccgatcccaaatcccatagtacttgaccggagaagcacctggagactattgctatgaccgatttggtcttaccaagaagccatacaactttgccaaatatcaagcatttgatttgattcatgccatatgggcaatgcttgctgctgctggatacatcattcctgaagcctccaacatacatggagcatactgtggtccagaagctgtttggctcaagactggaactctgcttcttgatgggggtacgctgaactactttgggaaacccatcccaatcaatcttattgcggctgtcattgctgagattgatcttgtgggaggtgcagagtcctacagagtgattaatggcctga

SEQ ID NO: 273026 - DNA, 452 bp, Glycine max
cttcccccctttgctctcaaaccttatcacctaatccttatcctcccaaaccagaaaacgatgtctgcctccgcagcttccctcgcactcccaaccctcactctccgaacccgacaacctctatgttctccccaatgcttctcctcgtccctctccctcacacccaacaacaaacccatttccatttctgctgtttttctcaaaccaacaactctgtcgtcgtctcgcttcgttccccacgtcgtggtgtcgtcggatttggggcaggaggaggacaccttcagtgacggagacggccccagcttctcccccgaccttaagctctttgtcgggaatcttccgttcaacgtcgacagcgcgcagctcgcggagctctttgagagtgccgggaatgtggaggtggttgaggtgatttatgataagactactgggaggagcaagggcgttgggtt

SEQ ID NO: 273027 - DNA, 412 bp, Glycine max
gtacctcatttgttttactatttctgcacttatccacaagagagcacaaatgatttcatgcacaaatatatatcaaaaccatgcacaagatgtttcttttcataacatgacaacatactgttttataatcatcaagaacaatgcatatgatgatacctcatatgtggaattacattcacgtgcgcattccatttttgctcatgcaaaatattattttaactgttttgtttctccaaccatattcattcatcttttattcttttacatgatgtcatcacttaatattttgacacatgtttttcatttttcttcataacattaacttcatttatttaaaatataatccattcttctttcatctaattattaacactcctccttcttttttttttaattacaacaaaaaattaat

SEQ ID NO: 273028 - DNA, 417 bp, Glycine max
ctcttcttcgtctcaaatctcttcgttccttcgattcgttccatttcttccaaaatggccaaagacccagttcgcgttctcgtcactggagctgcagggcaaattgggtatgctcttgtccctatgattgctaggggagtgatgttgggtcctgaccagcccgtgatcctccacatgcttgacattcctccggcagcagagtcattgaatggggttaaaatggaattggtggatgctgcattccctcttcttaaaggtgttgttgccacaactgatgtggttgaggcatgcactggggtcaatattgccgtgatggttggtggattcccaagaaaagaaggtatggagaggaaggatgtgatgactaagaacgtctccatttacaagtcccatgcttctgcccttgaaaagcatgct

SEQ ID NO: 273029 - DNA, 365 bp, Glycine max
cgcgtcgctccgcaccagtttcaccgcacgaatatcctgttgtttggagcgatccgagaaaaactcgctaaacatgttggtttaccaggacctccttacaggtgatgagcttctctctgactccttccgttacaaggaaattgagaatggaatgctgtgggaagttgaggggaagtgggttgttaaaggagcagttgatgtatacattggtgcaaacccttctgctgagggtggaggagaagatgagggagttgatgatgcatctgttaaggttgttgacattgttgacacattcatactttatgtgcaaccctcattcgataagtatcagtttgttaccttcatgaagaggtttataaagaatt

SEQ ID NO: 273030 - DNA, 453 bp, Glycine max
aaaaactgtaagtgaaagtttctgtctcacatacattaattgctggaaaaatatcgtacgcatcgatatgaaaagaaaatatttgatacgcgaagacataattgaatgtatttttcaattatttctataagataaaatcgatatagatagatcggacgcgtgggggtttggatagcttggacaatgtggaaattgtaatggcactagaagaggagttcaagctagagatcccagacaatgaagctgataaaattgactcttgtcatcttgctattgagtacatttctaaccatcccatggctggttaactaatgtgtcctttttcctatttggcttcatgttgaacttaaacacagtgcaaccttgaaccttccccttactttcactggatgtttctggaatctggtgttgttggtatgttttcctttttccatttaaattgagtaaaggggg

SEQ ID NO: 273031 - DNA, 384 bp, Glycine max
cttccatcggcaacgaggtcctcaaggccgtcgtcgcgcagttcaactccgagcagctggtcacggagcggtcacaggtctcctccctcgtccgtgacagcctcattcgtcgcgccaaagacttcaacatcgttctcgatgacgtcgcgattactcacctctcctacggcggggaattctcccgcgcagtggatcagaagcaggtggcgcatcacgaggcggagagatcgaagtttgtggtgatgaaggccgagcaggagcggagggccgccattattagtgctgagggtgagagcgatgcggccaatctgatctcggacgccactgcctctgccgggatggggctgatcgagctaatgaggattgaggcgtccagggaggtgg

SEQ ID NO: 273032 - DNA, 440 bp, Glycine max
aacagtgttgccattggacgagaaggaggtgttgcacctctgattgcacttgcacggtctgaagcagaggatgttcatgaaactgccgcaggagcactatggaatcttgctttcaatgctagtaatgctctaagaatagtagaggaaggtggagtatctgcacttgttgatctctgttcttcatcagtatcaaaaatggcacgattcatgtctgcgttggcattggcatacatgtttgacgggagaatggatgaatatgctttagtagtcacttcatctgaaagtatttctaagagtgtgagcttggatggagctagaaggatggctttgaaacacattgaagcttttgtccttatgttctctgatctacaagcatttgcggctgctgctgcatcatctgctcctgcagcattagcacaggttactgaaggtgcgcgcat

SEQ ID NO: 273033 - DNA, 279 bp, Glycine max
gaaggcctgaataggctactcaccccgacacgttgaaggcggggttggctgagttcatcgccaccttgatcttcgtgttcgcctgttcatgttccggcatctcctacaacaagctcacctacaacggcgccgccactcccgccggcctcatctccgcttccatcgcccatgctttcgccctcttcgtcgccatctccgtcggcaccaacatctgcgtcggccacgtcatccccgccttcactctatgagtgcctttattgttcttcatcatctcccttt

SEQ ID NO: 273034 - DNA, 431 bp, Glycine max
cccacaccttctaataataaaccttatcattcttattcttatcctcccaaaccataacccgataatcgtccaactctactttcctactaactccctacccttactcctctaacccttcaacctctatcttctctaaaatctatatctactactctcttctcactcatcccaactaactcattttcattttcacctttttctcaaaccaaccacttttacatcttttcactttcttttcctactcctttttttcttactacatcctttccccaacatcactctttttttaatatttttttcccctctttcttcattctcacttttctttatttattaatttttactttcaccttttaatatgtctctttttctcccatcattattattacttcccctttttttttaaccacttcttaattactacattatta

SEQ ID NO: 273035 - DNA, 418 bp, Glycine max
tttgaacacaaattgaatgggctgggttattactaataattattgcaaacacaacaacagggtacaacacaaaaatgccacaataaatagaaaagcaatcatacacgaccatattaatctatgaacaaataaattaaagagatcactaaaaatggactgtacttttcacatttacttggcatttacatttcaaatctctctttcctgtttggatttgtccgtcacttgaacacaataagatcaggacgtgcaagatggccatcaaacaaatagaatcaacctgatctgaatcataaacattgtagcatagagatgacacattcagacttttattcaaagaacttagacaggaagatagatgtttcacttggctcaaaatagagcttgcctttattcctcgatgaaaactagaacatga

SEQ ID NO: 273036 - DNA, 452 bp, Glycine max
gaaaaaaggggaatttcaatggcgtcaagggtttctctgaaggcgaaggggaagagttcaaagggatcgaaggctgcggaagatcgatccgcgagcgagtgcctgaaggagtggacgacatgggcgatgcgaaaagcgaaggtcatcactcactacggtttcatccctttggtcatcgtcatcggtatgaactctgaccccaagcccccactttcccagcttctcagccccgtctgatccacctcttcaattcttccaccatcaacgcgacgtcgttctttttttcctcttattttgccccctttctacatttgtaagtttctttatggatcaattttcacttgcacatctcatgtggcatggtgtgttcaaagtggattagcttgtctgtttttggataattttggaagacgcagtagtaaataatcccgtttttttataattattacaat

SEQ ID NO: 273037 - DNA, 427 bp, Glycine max
agcttcgaatcgaaactcagaagtagaaagaaacacatatcacaatcgctatggctaggtacgaccgagcaatcaccgtgttctcccctgacggccatctcttccaggtcgagtacgccctcgaagcagtccgcaagggcaacgccgccgtcggcgtccgcggcaccgacaatgttgtcctcggcgtcgagaagaaatccaccgccaaactccaagactccaggtcggtgaggaagatagtgaatctggacgaccacattgcgctggcctgcgcggggctgaaggccgacgcacgcgtgctcataaacagggcacgtgtggagtgccagagtcacaggctcaccgtggaggatcccgtcacggttgagtacataacgcggtacattgcggggctccagcagaagtacacgcagagcggcggcgtgag

SEQ ID NO: 273038 - DNA, 454 bp, Glycine max
cccacgcgtccgaaactaagaagattttgagcacaatggcatccacacaatgcttcttgcaccaccatgccctcaccactccaaccagagcttcatcacagcgcttagttgtgagcaccaaaccaaaccacattgtttgcaaggcacaaaagcaggttgtccaagagggtgaggacactactaacattgtctctcgcaggttggccctcactgttctcattggtgctgctgctgttggctctaaggttgcacctgctgatgctgcctatggagaagctgccaatgtgtttggaaagccaaagacaaacactgacttccttccatacaatggggatggattcaaactctcaattccctcaaagtggaacccaagcaaagaggttgagtacccacgtcaggttcttagatatgaggacaattttgactcaaccagcaatgttgctgtcatggtcac

SEQ ID NO: 273039 - DNA, 439 bp, Glycine max
caagtagttgagaactaagaaggagaagcaaatggcttcctcaatgatctcttgcccagcgtgttaccactgtcaaccgtgccggtgccggcatggttgctccattcactggcctcaagtccatggctggcttccccaccaggaagaccaacaatgacattacctccattgctagcaacggtggaagagtgcaatgcatgcaggtgtggccaccagttggcaagaagaagtttgagactctttcctacctgccagaccttgatgatgcacaattggcaaaggaagtagaataccttcttaggaagggatggattccttgcttggaattcgagttggagcacggtttcgtgtaccgtgagcacaacaggtcaccaggatactacgatggacgctactggaccatgtggaagctgcctatgtttggttgcactgatgcttc

SEQ ID NO: 273040 - DNA, 450 bp, Glycine max
actggtgttacatggcttgacgccggaaaggtggagctagtggaaggttcatcataccgagggcatccacttccattctcaatcaccacactgatctggatcgaggttctcgtaattggctacatatagttccagaggaacgcagagctggacccagaaaagaggctgtacccaggtggcagttacttcgacccactgggcctgtcctcagatccagagtagtaagccacccttcaactgtcggagatcaagcacgcccgtctcgccatggtgggcttcttgggctatgcagtccaagctgccgtcactggcatggtcccgctcaacatctgttccacccactagagtgacccactgcacacaaccatcattgacaccttctcatcctcctcttaagaagaagcgaaagaagatgaattgtctttcttgtgcctggtcattctagatata

SEQ ID NO: 273041 - DNA, 393 bp, Glycine max
  unsure (1)..(393): unsure at all n locations
agggtttggagctggtggtggagatggaataggaggaggaggatttggcggtggtggaggaggtggatttggtggaggtggtggctttggagctagtggtggttttggtggtggcggtggtgctggatttggtggcggagttggtggtggccactaggttgaatgttgatatgaatatggtatccacgagtcattatattcaaattgttttacttccatctgtttctgttaaaaagacagttaattaatggtataatattatttctgttaagttatagtggctgctacgtcttcttgttggaattaattatgcatgggaaacataactttgttacctgtaatgtctctctcactattaattgntgccaataatatagtagtatcgtctttttt

SEQ ID NO: 273042 - DNA, 452 bp, Glycine max
gtcttatttatatataccttgtgaccgaccgcgtgtcacacaacattgccacgcggcaccgggcaagtctccagctgcaaccagtaccttcatgaacctgcttatctatgagcaccacaccataccacattgttcgcaacgcacaaaagccggttgtgcaaaagggtgaggacactactaacattgtctatggcaagtcggccctcactgatctcattggtgctgctgctcgtggctctaacgttgcacctgctgatgctgcctacagagaagctgacaatgtgtttggaaagccaaacacaaacaccgacttgcttccatacaatggggatggattcaaactctcaattccctcaaagtggaacccaagcaaagaggttgagtacccacgtcacgttcttagatatgatgacaactttgactcaaccagcaatgttgctgtcatggtcact

SEQ ID NO: 273043 - DNA, 339 bp, Glycine max
tctctccactcgtccgaaaaaaaaaaaaaaaaaaaaaaaaattttaaaaaaaaaaaaaaaaaaagggaaaaaagaaaattaaaaataaaataaaaaaaaataaataatttaaaatataatattataaataaaataaaaaattattttatttctttattttttattattaataaataattatattttatatataattaatattaaataattgttgggtcttttttaaaatttccatttttgttaagaattatataaaattttttttttttttttttgcttatttttataattttttaatgccgattttttttttttttttttctttttaacttttttttt

SEQ ID NO: 273044 - DNA, 447 bp, Glycine max
  unsure (1)..(447): unsure at all n locations
tcgcccacgcgtccggtgaagactcttacgggtaagactattaccctcgaggtggagagctgtgacaccattgacaatgtgaaggccaagattcatgacaaggaaggcatcccaccggaccagcagaggctgatttttgctggcaagcagctcgaggatggaaggaccctcgctgactacaacatccagaaggaatcaacccttcaccttgtcctccgtctccgtggggggttttaagctcgttgtgtaatgttggatgtgttcccaaaacatttgaagaactttgatgtttaatggggctgtaataatgtcccttgaaaataagttcggcttgtgttgaactcaattgtgtcccattaataatagtactctaatatcccccgnnaaaaaaaaaaagnaaagactaanatataaggacaatntttacttaaccaacaatgttgctgt

SEQ ID NO: 273045 - DNA, 421 bp, Glycine max
cccacgcgtccggccagacccttcgccaacctctcgtgagatgtaacccttcctcagcatgagctctcaccatcaaagctgcttcctatgctgacgagctcgtcaaaaccgccaaaacagtggcctcaccggggcgtggtattttggcgatggatgagtcaaatgcaacctgcgggaagcgtttggcatctattgggttagagaacacagaagctaatcggcaggcataccgtaccctacttgtgacagtacctggtcttggtgaatacatctctggtgccattctctttgaggaaactctctaccaatccactgtcgatggaaggaagatcgtcgacgtacttgttgaccaaaacattgttcccggtatcaaggtcgacaagggtttggtgcccctagctggttcgaacgatgagtcatg

SEQ ID NO: 273046 - DNA, 438 bp, Glycine max
gccagcatctgccatccctgatggctggatgggattggatattggtccagattctgttgaatcattcagtgaagcattggatactacccaaaccatcatatggaatggaccaatgggagtgtttgagtttgacaagtttgctgttggtacagaggctattgcaaagaagctggctgacctcagtggaaagggggtgaccacaattattggaggaggagattctgttgcagctgtggagaaagtaggagttgctagtgtcatgagccacatatctactggtggtggtgccagtttggagttattggaaggcaaagagcttccaggagtccttgctcttgatgaagccgtcccagtcgctgtgtaagacacttttcatcttggaaaattttcccatcctcaggtgtcagtgttgtcaatcttgtaaaagagcatatgttg

SEQ ID NO: 273047 - DNA, 402 bp, Glycine max
cggcctcctggcgcctgaggcgccgctcgatttcggcaatgccgccacgggctgccgcgggaccaggggcctcgtcggggtctacgatttcgacagcaccttcatcggcgacgcctcgctcacaaagcgcccgatgggccgcgtgttgaacccgctgcgcgaaatgggcgtgcaggtgaaatcggaagacggtgaccgtctttccgttaccttgctcgggccgaagacgccgacgccgatcacctaccgcgtgccgatggcctccgcacaggtgaagtccgccgtgctgctcgccggcctcaacacgcccggcattacgacggtcatcgagcccatcatgacgcgcgatcatacggaaaagatgctgcatggcttcggcgccaaccttaccagtttgacgga

SEQ ID NO: 273048 - DNA, 385 bp, Glycine max
acgcttcttagtaccagatcccggtggccttttccctctctttctctggaaaatgggcccgagggtctcgagaaagtgaaacgggattatgagctttcatgacatcgaggctgggcggcccttcggttcgaggcgcggcttgatgaacgggaagcaagacccgtctcaagcggaggctgccggaatattccagatcaacaccggcgtctccacctttcagagactcgtcaacaccctcggaacccccaaagacacccccgacctgcgcgaaaaactccacaggacgagacttcatattgggcaattggtgaaagatacatcagcttaacttaagcaagcccgtgacattgttcaccgtgctgtttttaatgcaagcaataagatt

SEQ ID NO: 273049 - DNA, 434 bp, Glycine max
gatcaatatgggagtcgatttattcaacaaaagcttgaaacagctactacagaagaaaaaaacatggtttatcaggaaatcatgccacattcccttgctttgatgactgatgtctttggtaattatgtggttcaaaagttttttgagcatggacttgcatcccagagaagagaattagccaacaaacttcttggtcatgttctgacacttagccttcaaatgtatggttgccgcgtcatccagaaggccattgaagttgttgatctggatcagaagatagagatggttcaagagcttgatggtaatgtcatgcgctgtgtacgcgatcagaatggtaatcatgtcattcagaagtgtattgaatgtgtccctgaagatgctatccactttattgtctcaacattttttgatcaagttgtgaccctatcaacaca

SEQ ID NO: 273050 - DNA, 430 bp, Glycine max
ctagtttatcgtgaggagaatatgaagttgtttgttttctttgttgctgcagtagttttggtagcatggccatgccatggcgcaggctaccaaaggttccctctccgaatgaaaactggctatggtgagcgttcttcggaggtaaaatgcgcaagttttaggcttgctgtggaagcacacaacatccgagcctttaaaaccattcctgaagagtgcgttgaaccaacaaaggactacattaatggcgaacaatttagatcagactctaaaacagttaaccaacaagctttcttttatgctagtgaacgcgaagtccatcacaacgacatatttatattcggcatagataacaccgtactctctaatatcccatactatgaaaaacatggatatggggtggaggaatttaatgaaaccttatatgatgaat

SEQ ID NO: 273051 - DNA, 436 bp, Glycine max
cccacgcgtccgggatgatgcccaattggcaaaggaagtcgaataccttctaaggaaaggatggattccttgcttggaattcgagctggagcacggtttcgtgtaccgtgagcacaacaggtcacctggatactatgatggacgctactggaccatgtggaagctgcctatgtttggctgcactgatgcttctcaggtgttgaaggagcttcaagaggctaagactgcataccccaatggcttcatccgcatcattggatttgacaacgttcgccaagtgcagtgcatcagcttcatcgcctacaagcccccaggcttctaagtcattgaaaaatttgcaaagcatctgtagccaccccactttgtttggtgtacttaaactacattcccatttggttttgctttatgagatttcatcatcccggatttttgggtt

SEQ ID NO: 273052 - DNA, 257 bp, Glycine max
cccacgcgtccgcaaggaactcactggcaagctcttccaggatatcagcaatctggatcatgcagcaaaaattaagagcagcccagaagcagagaagtactatgctgctactgtatcttctctgaacgatgtccttgccaaacttggttaatgtgattaatttcttgctttcttgtgtaagctttgtgcatcattttctcagacactttgttgactgatattttaagaaaatcaaatgatgagggaaaattttctat

SEQ ID NO: 273053 - DNA, 346 bp, Glycine max
tttttatttttttgttttgtttattatattttttttatttatttttatttttttattttttttatattattttttttttaattttttataaatcattatttatataaagaataaaaaatttttaataaaaaataaaaggtacaaaaaaaatatttcaacgcttttaaatatatgcaaaaaaaaaaaaaaaattggatgcgccttaactaataaataaacaaaatctttcaataacctaaaaaaaaattcttttaaaatacactacataattaaattactgatctttccttaaaatccatcaaatttataaaaaattttgaaattataatatataatataattaata

SEQ ID NO: 273054 - DNA, 383 bp, Glycine max
ggcctccactctctctatatcctcttcatccacccttgttgatgccaaggctccaactccaagacaatgcgtcacccttcccactcttccccctccaccttttcactctcagactcgtccttggaagaccactgctttctgtcgtaggcttgctcgcaattttatggcaatggccaccacaagagaggcagccgcagcagaagttgccgccacaactgacctctctattgccgagacgccagagattgtgaagactattcaagaagcttgggacaaagttgaagataaatatgcagtgagttcactggccgttgctggtgtggttgcattggtgggctcagctgggatgatctcagcaatggataggcttcctttaaattcct

SEQ ID NO: 273055 - DNA, 131 bp, Glycine max
cactcccagtgagaagggtggccaactctatgatgcaggccttggagaagcattgggaacctggtttaactaagttgtaaggcttaaatgtctttaggggtgattttttatgttgttgaaagcttgtaaaa

SEQ ID NO: 273056 - DNA, 398 bp, Glycine max
cccacgcgtccggagatagagagatagaggagaagatgaacggtggtgagtcttacggtgctattgagacacaatacataaggaggcatcacaaacatgaaccaagggaaaaccagtgcacctctgcacttgttaaacacataagagctcctgttcaccttgtgtggtcactggtgagaagatttgatcaacctcagaaatataaaccatttgttagcaggtgtatcatgcaaggggatcttggcatcggaagtgttcgagaagtgaatgttaaatctggccttcctgccacaacaagtactgagaggttggaacaactggatgatgaggaacacattctcggcatcaggattgttggaggtgaccataggctgaggaactattcttccataatcacc

SEQ ID NO: 273057 - DNA, 397 bp, Glycine max
  unsure (1)..(397): unsure at all n locations
ggctcgcatacacaggctgaatgatggacgagactatctactatggtcaatcggactgtgctatggcaacacggcccatatcactgcatgagagacattaacgcagtangacaacgacatgcacctgtggacttggtaaacacatataagctggtggtcaccttgggtggtcactggtgagacgatttgatcaacctcagaaatataaaccatttgttagcaggtgtatcatgcacggggatcttggcatcggaagtgttcgagaagtgaatgttaaatctggccttcctgccacaacaagtactgagaggttggaacaactggatgatgaggaacacattctcggcatcaggattgttggaggtgaccataggctgaggaactattcttccataat

SEQ ID NO: 273058 - DNA, 397 bp, Glycine max
cccacgcgtccggagatagagagatagaggagaagatgaacggtggtgaggcttacggtgctcttgagacacaatacataaggaggcatcacaaacatgaaccaagggaaaaccagtgcacctctgcacttgttaaacacataagagctcctgttcaccttgtgtggtcactggtgagaagatttgatcaacctcagaaatataaaccatttgttagcaggtgtatcatgcacggggatcttggcatcggaagtgttccagaagtgaatgttaaatctggccttcctgccacaacaagtactgagaggttggaacaactggatgatgaggaacacattctcggcatcaggattgttggatgtgaccataggctgaggaactattcttgcataatcac

SEQ ID NO: 273059 - DNA, 389 bp, Glycine max
ctcttgtcaaagctgccgtcgccggtcgtcgccgacactgttgcttcactctgtgcctcttcgtgcgaagtactaggatcagatggctttgcgaggggtttggcaacttaacaagctgattgtcagttattgcaactggggcggaagtagcagaggtataagggcatttatggagtctcatttgccagcatttaaggagaagaatcctcaattagaggtggttactgaactcatccgtggtcagcatccacatctgaagggttattacaagaacaagaatcagcgagtgatatgtgtgaagaatatggatccagaagacatacttttgcatgcaaccaggctaagaaatgcattgggaaggaaggtagtgaaattgaggacaagacatg

SEQ ID NO: 273060 - DNA, 383 bp, Glycine max
  unsure (1)..(383): unsure at all n locations
tgagntcaatcactctacctgttgcaaatttctactatttttcaatggcttctgcagatgttgaggtccgttgctttgttgttgggcttgcttgggtcaccggcaacgatgccctcgagaaagccttttcaatctacggcgacatcgttgaatcgaaggttatcaacgaccgtgagactggaaggtccagaggattcggatttgtgaccttcgcctcagagcagtcaatgaaagatgcgatcgcaggaatgaacggccaggaccttgacggccgtaacatcactgtcaacgaagctcagacccgcgccagccgtggtggtggtggaggcggtggtttcggaagtggtggtttatacaaccgcggtagcnttggatatggtggt

SEQ ID NO: 273061 - DNA, 235 bp, Glycine max
  unsure (1)..(235): unsure at all n locations
ggcgggaaagacaaaggcgtcancggccaggagcnagaagaagcaggaaggcccccaaacgggacgacgggcgcttcagaagcattgtttgattttatagcagcagctctggcaaagtttgttggttcagaacctgaaggctttcatcctccccctggcagacaaatgtaactgggttttacattctcattcccagtgaggcaaacatcgattgcatctgggactctaataaagt

SEQ ID NO: 273062 - DNA, 395 bp, Glycine max
cccacgcgtccgacaagatcttcccaatgcaatgaatgctgctgaaatgagctgacaagctgggactccactctctcagacagcgccactggtacatccagagcacctgtgcaacctctggggagggtctctatgagggtttggactggctttccaacaacatagccaataaggcttgatgctttttgggtgtcttgtggatgcaggggtgaatattatctggttttgttttttggttctcttctgagacacattggctttatgttcatgttttctggtttaggacatcttgatggctaaaattatagcaagaatttgtttcatgggatgtctaatacttttgagtctttgtattgagctaggattcaacggttataactgcaattgataccaat

SEQ ID NO: 273063 - DNA, 391 bp, Glycine max
cttctctactagctgcacttgactactatgttggcttgcatagtgacatggttatctctgcttccccaggaaacatgcacaatgcattggttggacaccggacatacttgaacttaaagactataaggccaaatatggcattgatgggtcagcttttcctgaataaaaccatagagtggtcagagtttcaggatgcagtggttgaaggtcaccaaaatagacaaggcgaaccaaggctgaggaagccaaaacaatcaatatatacatatccagctcctgattgcatgtgccaagcttagtgcctagtagtatacttaaataataattgttaacaatgtacccggggaatttataagtcggtggcttaatatttaaccttatatatatctag

SEQ ID NO: 273064 - DNA, 348 bp, Glycine max
cagggacggaggagaaggaggttaaacttcagaagggaatcgcggagtggtacgacgagtcttgtggcttatgggagaacatttggggcgaccacatgcaccttggcttttatgacccggattccactgtttcgctttcggatcatcgtcttgctcagatccgaatgatccaagagtctcttcgctttgcctctgtttctgaggagcgtagtatatggcccaagagtatagttgatgttgggtgtcgcataggttgtagtttcagatacctggctacttaatttggagcataccagcttatgctttactttgattactgttgatgctcatatagcttatgctcttgct

SEQ ID NO: 273065 - DNA, 299 bp, Glycine max
  unsure (1)..(299): unsure at all n locations
caaaccaannaagaagccaccagcgaacaagccaccagagnacaagccaccagcgaacaaaccaccgngaaataagccaaaaccaccggnagacaagccgaaaccaccggnnnacaagccaccagagaagaagccaccagacaagaaaccaccggagggaaaggacccnccagnagaggacaacacccaaagccaaagcaagcaangaggncgaaaancgacgcaagaaagaagaggaaccgcatggaagagacgagcatagtgatttacaacttcgtagcnttgcatattcttgactc

SEQ ID NO: 273066 - DNA, 368 bp, Glycine max
tgcaaaaatggcatcattcaccatgacagcttccatccttggcagcccagccgtcaccaaccggtcggcagtagcaacgcagaggagatcactcgtagtgaatgctgccaaagctgttgaagcagaaaaggtcagttatgacaatgacatggatggtagcaatggaaggaggaacttgatgttcgccgcggcggcggctgctgtttgctctgttgctgggatggcagtggcagatgagcctaaaccaggaaccccagaagccaagaaaaagtatgctccgatttgtgtcaccatgccaactgctaggatttgtcgcaattgagggactttggtttttattttacttctgatgattggaaatgtacaat

SEQ ID NO: 273067 - DNA, 383 bp, Glycine max
gcttcaacgggccttaccttacctgaagatggcttcggtgtcctttgccgtgggattattaccttgctcttcttcttcttgctatacccgcgtctcttatggttcagttcgatttcccgtattgaacaacgccaactcactgaaactcagctcctcagctaacatcttcagtccaattcttcaccaaaagctttgcactggtccttcttcccttgctctaaggcctcgccctctcaccattgtatccgctaagggctacaaaatgaaaacccacaaggcatctgcaaagcggtttagggtgacggggcgaggcaagatagtgcgtaggagagctggcaagcagcatttgctcgttaagaagaataccaagcgcaaatcccgac

SEQ ID NO: 273068 - DNA, 350 bp, Glycine max
gaaaaacaagcagttgagaactaagaagaaggaaatggcttcctcaatgatctcctccccagctgttaccaccgtcaaccgtgccggtgccggcatggatgctccattcaccggcctcaaatccatggctggcttccccacgaggaagaccaacaatgacattacctccattgctagcaacggtggaagagtacaatgcatgcaggtgtggccaccaattggcaagaagaagttcgagactctttcctacttgccagacctcgatgatgcccaattggcaaaggaagtcgaataccttctaaggaaaggatggattccttgcttggaattcgagttggagcacggtttcg

SEQ ID NO: 273069 - DNA, 215 bp, Glycine max
  unsure (1)..(215): unsure at all n locations
gctaaagctggaagggagggactcaggcttgcagactggngaccctgctggcttcacccttgctgacaccttggcctgtggatctgttggccacatcattggggttggggttgttcttggtctcaagaacattggtgccctgtaaaaagcaactatataagtttagtgcttgatgcatctgtaatcaatgttattatgtacttcattttcacatc

SEQ ID NO: 273070 - DNA, 390 bp, Glycine max
cccacgcgtccggcaggtttattgcacaacgttgtgttcgacgaggacgagattcctagcggcgtggatgcagggaaaatctccatgagcgaagaagaccttctcaatgcggctggtgagacttacagcgttactttggatgccaagggaacctacagtttctactgttcgccttaccaaggagctggtatggtgggaaaagtcaccgttaatgaattatatattgtctcctacgtctaagttctcatatgctaggtttcctagaagagcctaattcatctttcttgctagggcctatgggatgaatcaacaatataatgcctttgtgtaattcatttacctgctttgctttcttgtgttatatcggactggacatttattcttatcata

SEQ ID NO: 273071 - DNA, 392 bp, Glycine max
gtgagggccttccatggcttccgcttgtgcttcctctgcaattacagctgttgccatctctacgccgagttccgggcagaagaatggatcaggaggttgttttcttagtggaaggaaattgagggtgaaaaaggagagagcagcaattggaggacgatcgatgggcactacagtgtgcgcagttgctgagcctgacagacctctatggttcccaggcagcacccctcctccatggcttgatggcactctacctggagacttcggctttgaccctcttggtcttggatctgacccggagagtctgagatggaatgttcaggcagagctagtgcactgcagatgggcaatgttgggtgctgctggcattttcattccagaattcctaacaaaga

SEQ ID NO: 273072 - DNA, 393 bp, Glycine max
cccacgcgttcgcatgcatagacatggccaccgctacttatgcaccactgtctatatccttactcactggcctcaacgcaagcagcaggccaagagagtgccgccgtagttaaaaggctcagcgtccccaagccacagggatctgcggcatcaaagctctactcaaagacgctggagtctgtgctgtggccactgctgacagcgcagtactagctagcaacgccatggccattgaagtgttactgggcactgatgacggatatctgggcttctctcccaactctctctccgcggaccctgaggaaaagatcgtgttcaagaacaacgcacgattgcaccacaacattgcgttcgacgaggacgatattcctagcggcgtggatgcacggaaaa

SEQ ID NO: 273073 - DNA, 336 bp, Glycine max
cccacgcgtacgatcatgtctgtactgagagaaaaacccttcgcgttgtgtcctttttctttcccgcagaaacccaaaacctgcttggtaaaactaccattcctgttttggaaaccattggattaatggtatatttttctatttttatttaaattatattttttatattttttatcattttttttatctagtttaattttttatttattcataattattatttttattttttctttttttttatattattttttaatattttatttttttcttattattttttttattttatttttatattttttttttttattctttttttttttttttttcttt

SEQ ID NO: 273074 - DNA, 344 bp, Glycine max
gaaaatggcggtgcgtgtactctcgaagaagatcgcgaagcagagggtgaagaagttcaagaggcctcagagtgacaggaaaattgctgtcaagacaaactggcgcagaccaaagggtatcgatttccgtgttaggagaaagttcatgggatgcactttgatgccaaacattggttatggttcagacatgaagacccggcactatctccctaatggatttaagaaatttgttgttcacactgtgaaggacttggaactgctcatgatgcacaacaggacttactgtgctgagattgcccacattatatgcatatgaaagaggaaagatttagttgatagagcct

SEQ ID NO: 273075 - DNA, 369 bp, Glycine max
gtatttgtgtagtaaattaaaggcacttggatgtaccaaacttcatgctttttgtaggagtgcgtaggttttaaaaattttctgatgtatctttcatgtgtttgttggttttgtaacagaatatttcctatattatacatatatttgagtcactagtaaaaaaaaaaaaaaaaaaaaaaaaaaaaaaaaaaaaaaaaaaaaaaaaaaaaaaaaaaaaaaaaaaaaaaaaaaaaaaaacaaaaaaaaaaaaaaaaaaaaaaacaaaaaaaaaaaaaaaaaataacaaaaaaacataacatctaacttaaataaggggcgctctttttaagggccccattttttggacacgtttgtttaaactataaattt

SEQ ID NO: 273076 - DNA, 157 bp, Glycine max
cccacgcgttagtaaattaaaggcacttggatgtaccaaacttcatgctggtcggaggagtgcgtaggttttaaaaattttctgatgtatctttcatgtgtttgttggttttgtaacagaatatttcctatattatacatatatttgagtcactagt

SEQ ID NO: 273077 - DNA, 388 bp, Glycine max
cccacgcgtccgctcaaaaggccaaggtagctgatgtttctaaatttggaagagcggccaagatgaggagttcatcctggtgggtcaagtttttcctccagattaacttagaggagaatgaagctgctgttaagaagtttgaacaggcttcaaccaagagttcatatgttccaaaatgccagatattccacttgaagtcactccattgactcgtgggatggttcagcattggagctctgattgctgcttctccgttttcatttaaaacactttcttctctataaaggcaatttaattctttgaaatatactcgccatagatggtgtatcgcttttgttgatagatttttattctttgaattccagcccctggctgtaaaagacaaatc

SEQ ID NO: 273078 - DNA, 339 bp, Glycine max
ctcatacgtgcgactgtatgatctcatttctataatcatccatggctagggaagaaaatggcatccatctctgctgctatcacaaccacatcgatctacagtgcaactcatatgcaaaagctgttctcatctaccgttcttgacatgccagcactgggttaggatataagagtgagttgctccatggacgaagtaccttattctgtgaaggaaagcatctatatcatgttggagatgagagcatctctgatggcatctgtcaatgctgcagccatgtcaggcccagccatggccttggtagatgagagactgagcactgaatgaaccggacttcacttt

SEQ ID NO: 273079 - DNA, 390 bp, Glycine max
atttttcctctccctaatggcttctcaagttcttcttcagcaggcactgtttgcccccaagctaagtttcccttcttcttctcgtaacgtggcgttaatttctagggttccttccaccccaatttcatggcgttgcactcccctcattgctaagcctagtttcgtagtgagagctgacaccaacctcgatggcggtggtgaagccaccgaggatgttccttcggataatgctgaaaaagtttcggaaggcgaagcagaacaagtttcggattctgaagctccgaaatcgcctagaaaaccccgagtcaaactcggagacattatggggatattgaatcagagggcaattgaggcatccgagaagcaaagaccaactccagacattaggac

SEQ ID NO: 273080 - DNA, 273 bp, Glycine max
caatcaggcagttgacagctacgatggaggcgctgacggcttcctcaacgatcgatgtctctgccgcttgctctggcgcccgtgcttgttgctcactggatgcatgcttcactggcctttcagccatgaactgcttgaatactaacaaggcacgacgggtcatcgccgctgttgctcgtaactgtgcaagcttgcagagcgtaccagctctgccagcaaatgtcaaggctgatagagtgactacttcctagcctgcagcacgtagcatacgaa

SEQ ID NO: 273081 - DNA, 377 bp, Glycine max
cccacgcgtccgcccacgcgtccggcccagccctaaccatttccaaggtccttttgtcaatttgctcattgttgacggatcccaaccctgatgatccactcgtaccagagattgcacacatgtacaagactgacagggccaagtatgaggctacggcccgcagctggacccagaagtatgccatgggatgaccatatagagctgtttttcaatgaagcagcaaaatcataatttatgtaaaagaacaaaagatattttgaatgaatttgaatgctttattttatattagtggaactccacagtggtaagaagagacctggtttgccaatttgtgaatattttctttgctatacactggtgatggaagaaaaaaaata

SEQ ID NO: 273082 - DNA, 279 bp, Glycine max
gctattgtcactggcaagggccctattcagaacctttacgaccacgttggtgatcctgttgccaacaatgcttgggcttatgccactaactttgtccctggacaatgaggatgcctacatgcaatgcaatcttctgctcccttttgcagttcccttgtgtttaactccattttcactaatgtaactacacctgtgtagcagaaaaatctgtatgagaaccattatatttttatatattagaaatttgggtccccagaaaaaaaataaaaatacataatt

SEQ ID NO: 273083 - DNA, 392 bp, Glycine max
ggatggtggtagtcatggggattctggaagtgatcgatattatggtgagcgttcaggaccatatgagcgggagcgacggggatcgggaggctttcgttgatataatatagtctttcaatgagatatgaaattgaagaggtcgctgttaatgtttcaactttccttttcatttgcacttgacaatgctctttggacttctgggattgttgtttggatggatcattgataccagtattttgatatgcaatactcaacacattatgcaaaaaaaaaaaaaaaaaaaaaaaaaaaaaaaataaaaaaaaaaaaaaaaaaaaaaaaaaaaaaaaaataaaaaaaaaattatataaaaaataaaataaaataaaaaaaaaaggggcggcctttttaaa

SEQ ID NO: 273084 - DNA, 392 bp, Glycine max
cacgcactttgtgacgctcatcttagcaagttacgaggtccttgtatgatgcaatttgattcaccgctctacttccaattgaagaagctctcaaccatcgtctcacacaacactctcaaacttcaaaccaattgtgctcatcaatctacacttccaccaatggttccttcacttctatccttgagttcacagctcacaatctaaggtacttgttgccctcagtgccaaaacctgacttcatattcaccccactcgatgactgtaacgtgcaagcagtactgatttgtgcaaaaaagcttggaattcacatgagagcgcgcactggaggacatgactatgaatggctctattatgtttcccttattgagaagccattcatgatcctagacttg

SEQ ID NO: 273085 - DNA, 359 bp, Glycine max
gaagattttccacagctgcagtttgaggcagcttgggctttgacaaatatagctgctggaacatctgaaaacactaaggtgataattgatcatggtgctgtcccaatttttgtaaagctacttggttctcccagtgatgatgtccgtgaacaggctgtttgggcattaggaaatgttgctggagattcacctagatgccgtgatcttgttctcggtcatggagctttgcttcctctattggcacaattgaatgagcatgccaagctttctatgctaagaaatgctacctggacactatcgaatttctgcagggggaaaccacagcctgcttttgatcaggttaaacctgcacttcctgc

SEQ ID NO: 273086 - DNA, 387 bp, Glycine max
cccacgcgtccgcaaaaagaatgtctacaccaacacctccaaaaaagagctggtgctgctgctcctgccaatgatgagcttgccaagtggtatggtcctgacagaaggatcttcttgcctgagggtctcttggaccgatccgaaatcccagagtacttgaccgtagaagtccctggagactatggttatgacccatttggtcttagcaagaagccagaagactttgccaaatatcaagcatttgaattgattcatgccatatgggcaatgcttggtgctgttggattcatcattcctgatgcctttaacacatatggagcaaactgtggtccataagctgcttggttcaagactggagctctacttctggatgggcgtacgctgaac

SEQ ID NO: 273087 - DNA, 388 bp, Glycine max
atcaagccatgccgtggaatttctgtttcctatgcccccctcactcctggtggacttcgatgggatcgagaatgggtcgcggagaattcccaagggagggcatgcactcaaagagttgatccaaagcttgctttggctgaagttgaattgccaaatgatgcacttgtcgaagactgtgaacctacaagcgattcttacatggagtcactaccttcatattacagtgttgaaagcacctgggatgaaacctatgaatatttgtcagagtaaacatcatgaagtaacagatgctgtgacagtctgggaatggactgcgtctgcttgggatgaaagagctgaagcatcacaacggtactcagattttttaggaaagccccgtcaactatac

SEQ ID NO: 273088 - DNA, 396 bp, Glycine max
tgatttgagagatgtatgccatgagagtcttctagaagatattgacacgcagaatgtacttgataggctccaaaatgcatctatatatcagctgatgaaactgaacatgagttgcatgcgatatcttgtgaagcttggtaaaatatatgaaattcgtgaagatttcaataccttcctgcgaaatgcagatagggatctgattgctgaggtcttccatgaagttcttgatgcttggaaaggattctgaagatcttgcaacttcaaagaaagataggaaggcttgttgttattcaacatacctaagaataggttgtttcaatttggtgtgcaagatttgctttgatgaacctaattctttcgctcagatgaatgtcttatgatcttatgtacatactt

SEQ ID NO: 273089 - DNA, 411 bp, Glycine max
  unsure (1)..(411): unsure at all n locations
cttcaaaccaggatattctcttatgctgattcacaaaggcacagacttggaccaaactatctgcaacttcctgctaatgctcccaagtgtgctcaccacaacaatcatcatgaaggtttcatgaatttcattcacagggatgaggaggttaattacttcccttcaaggtatgatcctgttcgtcatgcagaaacgttccccatacctcctgctatctgcagtggaaggcgtgaaaagtgtggaattgagaaggagaacaactttaagcagcccggagagagataccgatcttgggcacctgacaggcaagatagatttaatcgccgatgggttgatgctttatctgacccacgggtcacccatganatccgcagtgtctggatatnctactggtctcangctgaccgttct

SEQ ID NO: 273090 - DNA, 317 bp, Glycine max
cccacgcgtccggaaaaggcattcaaagttgtgtctggctcttctgatagcgtgaagaaaagggaagtgaggactcgttctaccactcttcggtttgggaatgttattttccaaagggaggttgaaaaaaaagttgcttccttgagtgattctgagaggatggaaggtgcaatcttctgtgatagcaaaccaaccaccgctgcttgtggcattagggccatttgggttgctccctctaacagaagaaaaaggattgcaagcaaattgcttgatgccgtgaggaagagtttctgcaaggatcttgagcttgaacgttc

SEQ ID NO: 273091 - DNA, 396 bp, Glycine max
  unsure (1)..(396): unsure at all n locations
cccacgcgtccgctcaccgattgctagaatggaatttcgatgctcagtcatctcttttaccattctcttctctcttgctcttgcaggagagagccatgtccatgcatcgctacctgaggaagattattgggaagctgtttggccaaacactcccattcccactgcactgcgagagcttctaaagcctctccctgcaggtgttgaaatcgatgaactccctaagcaaattgatgatacacagtacccaaaaacattcttctataaagaagaccttcatccaggcaaaacaatgaaagtacaattcaccaagcgtccctatgcacaaccttatggtgtatatacatggttaacggatattttaagacacctctaaagaaggatatagtnttgaagaga

SEQ ID NO: 273092 - DNA, 385 bp, Glycine max
gaaaagtgcagcactttttaggccaaaattaatagttgctggtgctagtgcttatgctcgcctttatgattatgcacgtgttcgcaaggtctgtgataagcagaaggcagttctgttggctgatatggcacatatcagtggattggttgctgccggtgttattccttctccttttgattatgcagatgttgtaacaaccacgacacataagtcacttcgtggaccacgtggggctatgattttcttcaggaagggtgtgaaagagataaacaaacaagggaaggaagtgttgtatgactatgaagacaaaataaaccaggctgtttttcctggacttcaaggtggtccacacaatcacactatttcaggcttagcagttgcactg

SEQ ID NO: 273093 - DNA, 397 bp, Glycine max
cagcaagtgcgttttggaagcagagaccgaaatacttcgagatggcccgtacaaagcaaactgctcgtaagtcaactggaggaaaagctcccaggaagcagcttgcaaccaaggctgcacgtaagtctgcaccaacaactggtggtgtgaagaagcctcatcgttatcgccctggaactgttgctcttcgtgagattaggaaataccagaagagcactgagctcctaatcaggaagcttcctttccagaggttggttcgtgaaattgcccaggatttcaagactgatctgcgtttccagagccatgctgtgcttgcattgcaagaggctgctgaggcataccttgttgggctctatgaggacactaacttgtgtgccattcacgccaagcgtgtgac

SEQ ID NO: 273094 - DNA, 310 bp, Glycine max
gctccttattactggaaatgctgctttcttcttctcgcgctcatcttcactgactacttctctctctgcaatttccattgttgaagaaggagagaggttttgaggtgtggggtcggtgatggacggtggtggagtgaactacaaccctcgcaccgtggaacaggttttccgggacttcaagggccgtagagctggcatgatcaaggctctcaccactgatgttgaagaatttttccagcagtgcgatcctgaaaaggataatctttgtctgtacggattccctaatgagcaatgggaaggtaatttacct

SEQ ID NO: 273095 - DNA, 373 bp, Glycine max
atccgatgtgaatctatttgtttagttttctatcggtatgtatataggtgaataatccaacatgcctttttgtgaagtaaaaaaaactaccctcgatccatgcctcaaaagggttgataataagtaaaaaaaatcaatgaattcatgataaaacccttctgcgtttttttattataaatttttttgtcaataaagggatcaaggggttgggggatcaaatggtaaagttcttttgttggtaaattggaggattagaaacatgactattgctttccaattagctgtttttgcattaattgctatttcatttattttattgattagtgtacctgttgtatttgcttctcctgaaggttggtcgaataacaaaatg

SEQ ID NO: 273096 - DNA, 418 bp, Glycine max
aaaagaaaagccttccatagcctccctaaaaatgaagagcactaccttgttcgctctctttctactttgtgccctcacttcatcatacctaccttcagccaccgctgatgtggtgctggacatggatggtaatcctcttggaaacggttggcaaaatgaatatttcatgttgccagttacaagaggaagcggtggtggaatagcactagctgcaactggaaatgaaagatgccctgtaactgtcgtgcaatctcacattgagcgcgataaggggtatgcggcaacttttagagctccattccacctcccttttatcgcagaaggccttcctttgacgatttcattcgataactttgaagtgttaccgcggtgtgtcctcactcctctttggtgggctattgtggatggtctagctgaa

SEQ ID NO: 273097 - DNA, 294 bp, Glycine max
gatgaatttgagtgtgatcattaaagttgccatggttgatatcttcaaacaaaaaaaaaaaaaaaaaaaaaaaaaaaaaaaaaaaaaaaaaaaaaaaaaaaaaaaaaaaaaaaaaaaaaaaaaaaaaccaaaaaaaaaaaaaaaaagggggggccgttttaaaggatcaaagttaacttacgcttgattgcaacttaatagcttttcaatagggtaactaaattaaaattaattgccctccttttaaaaaggtctggactggaaaaaccttggcgttaccaacttaaacggctt

SEQ ID NO: 273098 - DNA, 151 bp, Glycine max
gtcactgctgcgtctctcgtaaccatgcctaagcaaatctcacgagattaaggacttccttctcactgctagaaggaaggacgcatggtcggtgaagatcaagaggagcagagatgtggttaagtttaaggttatattgctttaatgtatt

SEQ ID NO: 273099 - DNA, 358 bp, Glycine max
aacacgcgtccgacttggccttattcgaaataatgaccgggatcatccactagattgaggagaccctgcatgtgctagggcacaagaaataggagcacacaggagatcaccatggtgagcacataggtgaactcaaaggagacctccttggtgagcacaatggtgatctcaaaggatatcaactccatggggtgcacaaggagggacttgtcgataagatcaaggacaagatccatggtgatggccatgtcaagggtgagaaaccgaagaagaaggacaagaagaagaaggagcatggacatgaccatcatggtcatagcagcagctgtgacagtgatcagatcttatatgttaagca

SEQ ID NO: 273100 - DNA, 348 bp, Glycine max
caaccatctccgctgctatcacaaccccatcgatcacccgcgcatgtctagtgcaaaaacgttctcttgggttctcatctcccgttcttggtttgccagcaatgggtaaggtgggaagagtgagttgctccatggaggaaaagccttcttctgtgaaggaaagcagctcaagcatgttggggatgggggcatctttgatggcagcggccatcgccgcagccatgtcaggcccagccatggccttggtggatgagagacttatcactgaaggaaccgggctacccttcggcctcagcaacaaccttctcggttggatcctgttcggcgtcttcggactcatctgggctc

SEQ ID NO: 273101 - DNA, 387 bp, Glycine max
cttagctttgattctctgttctctgttttgttctgtttcgcgtgtaagttcccctgttcctcttttcctctttctaagattgtcttcatacaggaacttgaacaatgaagaatgcaaagggcaagggagcagcaagggcctcaaaagaatcactgaagcccgttgatgaccgaaaggttggaaagcggaaggcttccggtaagcctgggagaagtagtgcaccaaagaaggagaagaaggccaagaaagaccccaacaagcctaatagaccacccagtgctttctttgtgttccttgaggagttcaggaagacctttaaggctgagaatcctaatgtgaaggctgtatcagttgttggggaaagctggaggagaggaaatggaaatc

SEQ ID NO: 273102 - DNA, 389 bp, Glycine max
agaaaaatggggtgtttccatctcactgtgactagtctgtgctttgtagtggttgtggttggagtgcttccactctccttagatgcacaactagatccctcgttttacagagacacgtgtcccaaggttcactccattgttcgcgaagtggtgaggaacgtttccaagaaagatccccgcatgcttgccagtctcattagacttcactttcatgactgttttgttcaaggatgtgactcatcagttttgttgaacaacactgccaccatagagagtgagcaacaagctctgccaaacaacaactctctaagaggtttggatgttgtgaacgacatcaagacagcagttgaacaggcttgcccccgcgtggtttctggtgctgatattct

SEQ ID NO: 273103 - DNA, 334 bp, Glycine max
ccttacctttgtggtgtggcttttcatggccacatcgtccctagcccaatacgttctcgacacaaaccgcgaacgcgtcgacagcgatgatgagtactacatccggccagccataacggacaacggagggcgtttcacattgatcaacagaaacaggtcgtgtcctttgtacgttggtctcgaaaacaccgacacgccactaggctatcctgtgaaattcacccctttttcccgcaacatcaacgatgatgacgacgacgacataagggtgaatagggacctcagagtggcgttcgatgaagtttccacaacgtgtgtgcaatccacagaatgg

SEQ ID NO: 273104 - DNA, 397 bp, Glycine max
cccacgcgtccggtttgcattgcagagagagagagaatggcgaccacacccggtttgtgtggcagtgtgttgttgagcacctcgttcctgaggaagcaggcaatggcatcagtgaacatgagaatgctgaaggctaatgctggtgtttttggcttaaagggagggcgtggagggcgtgtgagtgcgatggcaagttacaatgtgaagctgataaccccagaaggagaacaagaatttgaatgcccagatgatgttttcattcttgaaaaggctgaggaatttggcattgacctttcctactcatgcaaggctggtgcttgctctttctgtgccggcaaagttggttctggcaaagtcgaccaatctgatggtagttaccttgatgatacccaaaatc

SEQ ID NO: 273105 - DNA, 272 bp, Glycine max
accacgcgtacggaataaaaagattctcacgaaatataactaatattctttagaataatcaaaaagaatattaaattcaaataaattttagatagaaaaaagacttaaaaaggaggatatgaaatgcgagatctataaacatatctttccgtggcaccagtagtaagtactctatggttcggggctcaggcggatctcttgatagagatcaatcgcattgtttttttccagatgcattgatattcccttctgattcattctagatattgaca

SEQ ID NO: 273106 - DNA, 430 bp, Glycine max
caacgtggttgtcaccatcactccgactgataagaagtctatcactgactatggttcacccgaagagttcctctctaaggtggattatttactaggaaaacaggccttcttcggcgaaacacaagccgagggtggttttgatccaaatgcggtggccacggctaacatcttagagacggcaacacctgtgattgatgggaagccgtactattttctgtctgtgttgacaaggactgctgatggagatgaaggtggcaagcaccacataattagagcaactgtaaaagatggaaaactgttcatttgcaaggctcaagctggagacaagaggtggttcaagggagcaagaagatttgtggagagtgcatcaaggttctttcagtgttgcttaaaaaatcttcaataatagctggttatatatatctgctat

SEQ ID NO: 273107 - DNA, 375 bp, Glycine max
cggacgcgtgggaaaaaccttcccttctcttctcacccccacactcccatctcacacacccctcgcatccaacaatgtctctcaccattccctccaacctctccaagcccgccgccctccgccccaaactaagcccaaagctaaggtccgccgccacaaccaccatcgtctgcagcaccaccaacaacaacaacaacaacaacgtgtcctccgacctgaaggcgttctccgccgcgctggccctctcctccatcctcctctccgcccctctccccgccggcgccgacatctcggggctcaccccatgcaaggagtcgaagcagttcgcgaagcgtgagaagcagtcgataaagaagctggagtcgtcgctgaagc

SEQ ID NO: 273108 - DNA, 313 bp, Glycine max
aaaaaaaaaaaaaaaaaaattaaaaaaaaaaaaaaaaaaaaaaaaaaaaaaaaaaaaaaaaaaaaaaaaaaaaaaaaaaaaaaaaaaaaaaaaaataaaaaaaaaaaaaaaaaaaaaaaaatacaaaagaaaaaaagaaaaaaaaataaaaaagaaaaaagaaaacggggtcgcctgctatacggttaccagatgtagcgaaggcgaagtcgtacttataactgtttggtgtgggccaccgaagttagattgatatgcacgagtattaaaaaacatatccagggaaactgatagatatcggaaattattcatt

SEQ ID NO: 273109 - DNA, 389 bp, Glycine max
  unsure (1)..(389): unsure at all n locations
gttccagttgagaccgaggaggtggtggcaattgagacagaggaagagaagccagcagaagagaaatcagaggagaaaactgaagaagtgaaagaagaagcagaggagcctaaagaaactactgaaacagaatcagcagcagcagcaccaccagcaaccacagaggaagagaacaaaccagctgagtcagttgaaaccccagtagaggttcctgttgagaagactgaagcttagacctatggacagtgtgagtgagaaaaacaagtttaaaaatggtcctagttgtggngatcaggtctaccattttgcatgccatgttgaaaagcctcttnttttttttttttccttttatttctttagtttaccttaataatnataatatatgatgc

SEQ ID NO: 273110 - DNA, 322 bp, Glycine max
cccacgcgtccggtgttcggattgcggcgacttgagcggttcgctgcccgcgacgttgtgagaagtccactgaaccttatcatttagaggaaggaagggagggaagaatagaatgggatctggaagtggaaaacacactggagagttcttcaggagaagggatgcatggaggaagcatccgatgctcaccaatcagctccgccacgccacccctggccttggcatcgccgtcgtcgccttcgattgattgctcttgcaggtgaaagccggggatcaccactaaacgtttggacggacgcactccattccatcatcacttaat

SEQ ID NO: 273111 - DNA, 392 bp, Glycine max
agaggacaaggtggcaggtgcattctcatacatttcatttggagggggcagacatggatgccttggggagccatttgcatatctgcagataaaagcaatatggactcatctgcttaggaattttgagctggagttggtgtcaccttttccagagatcgattggaatgccatggttgtgggagtgaaggggaaagtgatggtccgatataagctgaaggagctttcagttaatcaataggaccacataattcagtgtctggcatgattttattttaagcagttattgttagtcttttctggttcagcttctgtcaaagttcgtcggttatttggcaatgaatatctagaatcttgattttgatttttttttcttcaaatctattaagtgattt

SEQ ID NO: 273112 - DNA, 355 bp, Glycine max
cccactcgtccgcaattttctagggtttatacaattttcgatggcttcttcagatgttgagtaccgttgctttgtcggtgggctcgcttgggccactgactaccaagctctcgagagagccttctctcagtacggcgaaatcgttgaaacgaagattatcaacgatcgtgagactggaagatccaggggttttggatttgtgaccttcgcctcggagcagtccatgaaagacgccatcgaagggatgaacggccaaaaccttgacggccgtaacatcactgttaacgaagctcagtcccgtggtggcggtggcggcggaggcggtggaggtggtggatatggtggtggtcgccgt

SEQ ID NO: 273113 - DNA, 331 bp, Glycine max
ttctcagccgcctcggctagggttcggaaacgtatagaagggttctgttttcttttcgcgatgagggccaagtggaagaagaagcgtatgaggaggctgaagaggaagcgccgaaagatgagacagagatccaagtagtgcgttaaacctagtttgtttccgttgcttttacaattgcttatgttgtcaaataggacacccagttgttagtggcactggtctctcctttttgatgttttgatacattttgttggattttatttcgtcttatgttcttagctgaaaacaatgctgttactgcgtttgcgaatcaacaggatatcttgtttgc

SEQ ID NO: 273114 - DNA, 364 bp, Glycine max
tcgcccacgcgttcggcccgtttcgccatatggcgtactgttgtgagcatccccaacggtccctctgctctggcagttaaggaagcagcctgtggtctggctcgctatgctgcaattgctcaggacaatgggttggtcccaattgtggagccagagatcttgcttgatggggagcatggtattgatagaacttttgaagtagcccaaaaggtctgggcagaggttttcttctaccttgctgagaacaatgtcctttttgagggtattctccttaagcctagcatggttacacctggagccgagtccaaggacaaggccagtcctcagacagttgcttgatacaccctcaagctccttcacagga

SEQ ID NO: 273115 - DNA, 338 bp, Glycine max
gcatgattgatagcgttcctggaatgtataggctttggatatgaatgctgcagaggatgctattgtgaggctcacgagggagattgtgcccggcatgattgtcaccggcatggaggtggcagaaattgatggctccccaaggatgggtccgacgtttggggcgatgatgatatcagggcagaaggcggctcatttggcgttgaaggcgttggggaggaacaatgcaattgatggaacgtgtggagttggaagggaagaaccccagcttattttcgcttctgcagacactgaggaaattgttgatgcttaaacttactttcaaattagctagatatata

SEQ ID NO: 273116 - DNA, 183 bp, Glycine max
gcatgattgatagcgctcctggcatgtaggcgctgcatatgaacgctgcagacgaggctatcgtgaggctcacgacggagatcgtgcccgggatggatgcgacctgcatgaaaggggcagaacttgatggctccccaaggatgggtccgacattcggagctattatgaaatcatggcataaag

SEQ ID NO: 273117 - DNA, 368 bp, Glycine max
tctcagtcagcttctggagattgtcttttctgatccgaaaggctttggaatcggaccagatggcaggtatagatgtgaggatccaaaattcactgaaggcacagctcatgtctaatctttcagtattgtatgagtgttcttttcatatggcttatttagtgatcaaatgttacacaatgtctaatataaacaggatttgttctttaggttggtaatttggttttacgtgtcttatatttatcattgtttgtggaactagtggcaagaatgacaatctccagaattagattgtagcctctaccaacgctgtataataaaattttagttgttcctcaaaaaaaaaatcattttaaaaaaaaaaagggcgg

SEQ ID NO: 273118 - DNA, 341 bp, Glycine max
gagaggggcagtagccgagattccgtgagttgcaaaaatgaagacgattctttccaccgagaccatgaacatcccggacggcgtgagcatcaaagttcatgccaaggtcatcgaagttgagggcccccgcggaaaattggtgcgagacttcaagcatttgaatctcgattttcagctcattactgacgaaaacggtaaaagaaagctgaaaatcgacgcgtggttgggttctcggaaaacatccgccgccattcgcaccgccttgagccacgtggagaatcttatcaccggcgtcaccaagggctaccgttacaaaatgaggttcgtttatgcccattttc

SEQ ID NO: 273119 - DNA, 347 bp, Glycine max
gtggaaaactcgtgcgagacttccaccatctgaacttggacttccaacttattaccgacgatggcggtaaaaggaagctcaagattgattcttggtttggttctcgtaaaacctccgccgccatccgcaccgccctcagccacgttgagaatttgatcaccggcgtcaccaagggataccgatacaaaatgagattcgtgtacgcacattttccgatcaacgctagcattggcaacaacagcaagtccatcgagatcagaaatttcctcggcgagaaaaacgtgaggaaagtggacatgcttgaaggcgtgtcagatggtagatctgaaaaggtcaaagatgaattg

SEQ ID NO: 273120 - DNA, 365 bp, Glycine max
  unsure (1)..(365): unsure at all n locations
cccacgcgtccggatagatagagtgatacacatcacattttctcaaagtaatttattaattaataaataaatggcggcggcggcggcagtgacggtgctactcccacctaggattccgaccgccaccaacgttacccgctgctctgctttgccttctctgcctcctcgcggcaccaacactaaaaccactttgctcttatcttccctcaaccacttctcagtgtcccgaaaatcttctctgcttcagaccagagcttcttcagaggaatcatcctcagtagatgccaatgaggtgttcacagatttgaaggaaaagtgggatgctcttgaaaacaagtccacagtactttnttatggtggtgggg

SEQ ID NO: 273121 - DNA, 328 bp, Glycine max
cccacgcgtccgcaggaactagaaaatccatacaatcttcaccaccaaaaagaaaataatggcaatggccagtgcaacaactctagccacaatcactgttgtggcggctagccccagtgttggcagcagaaggagtgggaagaggaatgtgaacttcatcagagggttgaattcttttggagggttgaaggctcagaacaatgtgacattactaggccttcctgtgtgcactgagcagtgctttgcaaaggtggtgagctcattgaaatatccatcatcatcatcacgtaaggggagaagtggaagtgctggcttttcaacatgcaat

SEQ ID NO: 273122 - DNA, 407 bp, Glycine max
atattcatttatttgtgagaaggcctgtgaggagatctccaatcattaatcgtggttactttgctcgttgggctgcatttcggaaacttctctatcagtttcttgatgttgagaaaaagacagatggagatgccccaattaagaagcagatattatcacttggagcaggctttgacacaacatattttcagttgcaggatgaggggaaaacaccatatatgtatgtggaagtggattttaaggaggtaactagtaaaaaggcagctcttattgagaattacagtcaattgaagaataaacttggtgaaattgcaaccatatcaagagagaaaggagaagtggtcagtgctcactataagctagtccctgcagatttgcgtgatatacaacaattaaataaatatttt

SEQ ID NO: 273123 - DNA, 314 bp, Glycine max
tttttgaaacagagaaacaaaaaaaaaaaaaaaactcttccaaagtagaggcagagaatctgaaagctagggtttgggatgccgaagaacaagggaaagggaggaaagaaccggaagcgcggtaagaacgaggcggacgacgagaagcgggagctggtattcaaggaggacggacaggaatacgcgcaggttctccgaatgctcggaaacggtcgctgcgaagcgatgtgcatcgacggcaccaagcgcctctgccacatccgcggcaagatgcacaagaaggtctggatcgccgtcggcgacatcatcctcgt

SEQ ID NO: 273124 - DNA, 318 bp, Glycine max
aaaaaaaataaaaaaaaaaataaaaaaaaaaataaaaaaaaaaaaaatataacaaaaaaaaaaaaaaaaaaaaaaataaaaaaaaaataataaaaaaaataaaaaaaaaaaaaaaataataaaaaaaacccctaaataaataatgggggggccctttttagggccccatttttacctccctctcctttcctccttattcctttttttttgggccccctaaattcatttcattggcccccttttttccacctcttatctgggaaacccctttcttttccccttttattccctttttgaacaatccccttttccccattt

SEQ ID NO: 273125 - DNA, 354 bp, Glycine max
ggtaaactgttagttgcgaggttagtgatgctgggatggcacttgcaaggtttaacaaatacatgtgaaagctgtagctgcaccagtcatttttgagtttgtttaactagtctttctttgcttaataaagcttcttaagcttttttttccctatgtgccatataatcttagactttatttttgcctgctgccattgtaatttatatgtattaatgggtcttttagtattggatgctggtgtagctaaacgttgccttgcgtcttgatcagttgtataatccgaatctacatggatgttctcaataaaagagcatttattttttatcattaataaaagagcactttgagatttct

SEQ ID NO: 273126 - DNA, 397 bp, Glycine max
gcgcgcgcggaggcgctgtttgtgccggcgattaaagcagatatagagaccatgcgccatgagattcaacgaggaaggaatgctattgagtttgagaagaagacacatgctagtaaccttgagcacagacggactatggataataatatgattattatggaccacgaggttgaaaagttacgtgctgagttggccaatgaagaaaaaagggctagggctgcgatggctgctgatacaaaaccaagtcctggatatcctgctaactatgacaatcctgagatgggatatggaggaaccacatgccctcctgattcttatagcacgcatcagatgcaagctgtggttgacacacattcttcacatgaagctggagcaccattacatcatccgaatgacc

SEQ ID NO: 273127 - DNA, 373 bp, Glycine max
ccggcgccatatcgcgtatctttctctgttctatacctacgatggagttttggggtgccgaggttaaggttggtgagtctgttaaggtagatccagccgaattcgaggcatgcatacacctttctcaggctgctcttggtgaggcacagaaagacaaatcagatgaaccagttgatctctacttgaaagttggtcaacagaaatttgtcttgggaaccctttccagggagaaaattcctcaaatacctatggaattggttttggaaaaggagtttgagctttgccacaactcaaagaatgccagtgttcatttctgcggatacaaggcattttatgatgctggcgatgatagctatgaggatgaatttactga

SEQ ID NO: 273128 - DNA, 318 bp, Glycine max
cccacgcgtccggcaattctctcccctgaacagtttcggatcctcaggcaaaagggcaccgagttccctggaacaggagagtatgacaagttctatgaagagggagtttacaactgtgctggttgtgggactccactctacaggtccataacaaaattcaattcttattcttaataaaattgagtctgcagtttggacgtgactacttaagtacccaacatcggtaaaaaaattatgcaatgtacttatattatgaatgaagttaaaaaaaaaatgatggctaaataacaatgttgataatttgtacctttattcctc

SEQ ID NO: 273129 - DNA, 347 bp, Glycine max
gaacaatgtggatttgggcactgcatgtggaaaatattacagagtgtgctgccttagcattattgatcctggtgattctgatatcatcaagacactgcctggcgaccagtaaagtagtattgaagttccttgcttgatattttctatttttagttgattccagacattgttgaaagaatatctgattaagttctagactttggtgtaaggtgcatggtttttgggtattctagctgagcatcaagtgtttttgaccttgcaaattttttcatgatgtttcattatgccaatttctatagagatgatataattatagtttgatcacacgcttgctgttaacagcaagc

SEQ ID NO: 273130 - DNA, 391 bp, Glycine max
  unsure (1)..(391): unsure at all n locations
cttgcggctactgcagcaaggtcactagcgattgggaagtgtgatgtggcgcttgtggtgggagcgagactcaactggcttctacacttcggtgaaccaccgaaatggtctaaggacgtgaaattcatcttggtggatgtgagcgaagaggagattgagctgaggaagcctcacttagggttaattggtgatgccaaacacgtgattgaggttttgaacaaggagattaaggacgatccgttttgcttggggagcacgcatccttgggtggaggcgatttcgaacaaggcaaaggagaatgtggcgaggatggaggttcagctgaagaaggacgttgtgcccgttaatttcttgacgcctatgangattataagggatgccattgcgggtt

SEQ ID NO: 273131 - DNA, 445 bp, Glycine max
cccacgcgtccgttaatttctggcaaagaagatgctgctaataactttgcaaggggacactacactgttggaagagaaattgtcgaactatgcctcgatcgtatcagaaaattagcagacaattgcactggtttgcaaggattcttggttttcaatgctattggcggtggtactggttctggtttgggatcattgctgttggaacggttatctgtcgattacgggaagaagtctaaacttggttttaccatctatccttctcctcaggtatctactgcagttgttgagccttacaacagtgtcctttccactcattctcttcttgagcacactgatgtggttgtgcttttggacaacgaagcaatatacgatatctgcagaagatcattagatatagaaaggccaacttacactaacttgaaccgtctgatatctcaaattatct

SEQ ID NO: 273132 - DNA, 375 bp, Glycine max
cccacgcgtccgcccacgcgtccgcccacgcgtccgtggattagtgtttctcgtgggtattcttaattctctcatttcttgaagctctatttattctagatcaaaaacgaaatgacccctcccccagaattctttcggattgtcgggcacattaaaaaaggaatggataagttcctaaaaataaagaaaactataacacattataaggaggggtcaaatattaattaagataaaagatatagaatatctatctgtatatatatatatatagatataatttattaataattagaactttcttttttcttaaaaaaaaaaaaagtaaataaaaagatttgatagaatcgtaatttcaattcgattatatagatacat

SEQ ID NO: 273133 - DNA, 447 bp, Glycine max
  unsure (1)..(447): unsure at all n locations
cccacgcgtccgcccacgcgtccgctgatttccgatgttgagaaccttgcggatgccgaaatccccgacaccgcacatcaaattagcaccgattcatggtttcaagtggggttcgtgctgacgacgggaatcaacagcgcctatgtgcttggatattctgggaccatcatggttcccctgggttgggcagggggtgtggttggtttgattctcgccactgcaatatcgctctacgcgaatgctcttattgctaggctccatgaatatggaggaacaaggcatattcgatacagagatcttgctggatttatctatggtagaaaagcttattccctcacatgggctctgcagtatgtcaatcttttcatgataaatgccggctacatcattttggctggttcggctttaaaggctgcttatgttctatttanggaagacgatgggatg

SEQ ID NO: 273134 - DNA, 165 bp, Glycine max
cgccattccggtcgccacctcgtggcttcacaaggaaccccggtttttcctccattcttaaccaccaggacaccaacaccgtcgccggggaagggagggaacactccatgtccaccaccaaagtctcgtgcacaggctacatgccccattgacacgctaaaacta

SEQ ID NO: 273135 - DNA, 450 bp, Glycine max
gccacgcgtgcgtccacgcgtgcgggcgctttttcccaaaaccaattgcatcactctcgtacgctaccgacgctgacctagaccaccgtacgcgacgttgaacaccgtcttcattcgatcgggcaaaaatgagtcgaggaagtggacgtggatacgatcgacacatcactatttactgccctgaaagacgtttcttttaagtggagtatgctttcaaggctgacaaggctgcaggaatcacctgaatgggagtacgatgaaaggattcaactgtgtgtcgttactaacaagaaaagttcggataagctgttggacaacacaagtgttacacacctgtgagcagatgacgaagtacactggataattggctactgacatgacaggtgatgctaggacactggtgcaacatgcaagaaatgacacagctgatggtcgatgtacatatagata

SEQ ID NO: 273136 - DNA, 439 bp, Glycine max
cccacgcgtccgctttttttttttttttttttttttttaatagcaaatatgagttccaatgtcattttaatgtggtgatataaaccacgacaaaatgcccaaataacctttcatatatggacacaagagttaacatacaaggggtcaaataaggctatgtggacaggtccagaactggaggtttggaagttgcaagccatgaaaggaagaaactacttggtcttgtcttcaatttttgtcgatgttgatgtaaaagtaacggggttcgttggatggtcctttacagttaagctaagcacttcaggccttgaatagtgtccaaccacatcaaaatcaaacttagctcttgcaatttctccaagatcaaggtctgctgagattagcgcctccccgtcataatttggtccaagcagaacagcccctaatggtgatataatga

SEQ ID NO: 273137 - DNA, 457 bp, Glycine max
gaaagagaatccgaggcgaagagaagagaaaaattaagatggaggggaaggagcaggatgtgtcgctgggagcgaacaagttcccggagagacagccgattgggacggcggcgcagagccaagacgacggcaaggactaccaggagccggcgccggcgccactggttgacccgacggagtttacgtcatggtccttttacagagcagggatagcagagtttgtggccacttttctgtttctatacatcactgtcttaaccgtcatgggagtcgccggggctaagtctaagtgcagtaccgttgggattcaaggaatcgcttgggccttcggtggcatgatcttcgccctcgtttactgcaccgctggcatctcagggggacacataaacccggcggtgacatttgggctgtttttggcgaggaagttgtcgttgcccaaggcgattttctacattgg

SEQ ID NO: 273138 - DNA, 426 bp, Glycine max
  unsure (1)..(426): unsure at all n locations
ctgaagtgtctgcttcttccgattccggcacgccctcatcaccatggtgaacgttccgaaaacaaagaagacatactgcaagagtaaggagtgcaggaagcacaccctgcacaaggttacccaatacaagaagggtaaagatagcattgctgcccaaggaaaacgccgttacgatcgcaaacaatctggttatggcggacaaactaagcccgtcttccacaagaaggctaagaccaccaagaagattgttctgaggttgcaatgccagggttgcaagcatgtctcccaacacgctattaagaggtgcaagcactttgagattggtggtgacaagaagggcaagggaacatctctgttctagtttgcgaattangattcgcagctttttatgtttcagcaatgttggaatcttttagtttctctctg

SEQ ID NO: 273139 - DNA, 187 bp, Glycine max
ggtactataaaacacctgagcttatattagccgcaactgaatacaccaccgacattgatatctggtcagccggtcgagaactgagagaactattgcttgagcaaccgatattacatgtggagagagagatgtaacagcttgttgacattattaacgtgttaggaacctacactagggaagaaattaa

SEQ ID NO: 273140 - DNA, 432 bp, Glycine max
gttgagaactaagaaggagaagcaaatggcttcctcaatgatctcttccccagctgttaccactgtcaaccgtgccggtgccggcatggttgctccattcactggcctcaagtccatggctggcttccccaccaggaagaccaacaatgacattacctccattgctagcaacggtggaagagtgcaatgcatgcaggtgtggccaccagttggcaagaagaagtttgagactctttcctacctgccagaccttgatgatgcacaattggcaaaggaagtagaataccttcttaggaagggatggattccttgcttggaattcgagttggagcacggtttcgtgtaccgtgagcacaacaggtcaccaggatactacgatggacgctactggaccatgtggaagctgcctatgtttggttgcactgatgcttc

SEQ ID NO: 273141 - DNA, 164 bp, Glycine max
  unsure (1)..(164): unsure at all n locations
cttgagagaggtgagaagggaattggggatggaactgttagctatggaatggatgatgctgatgacatatacatgcaatcttggactgggactatcatcggtcccnctagtactgttcatgaagggcgtatctaccagttgaaattgttttgcagcagggatta

SEQ ID NO: 273142 - DNA, 379 bp, Glycine max
cccacgcgtccgcaatacacctactggaacttgtgctgtttgtgtggttggcggtgaaaggtcccttgttgccaacttatcagctgcaaattgctataagtctgagcatttgacgagaccggaaaattgggcattagttgaaaaggccaagtatttctacatttctggctttttcctcactgtatctcctgattccatacaattagttgctgaacatgcagctgcaaataacaagttcttcatgatgaacctttctgccccatttatctgtgagttcttcaaggatgcactgaataaagttctgccatatatggactacgtttttggtaatgagactgaagcaagaacattttctaaagctcaaggctgggagactgat

SEQ ID NO: 273143 - DNA, 436 bp, Glycine max
cccacgcgtccgaatcaactgtgataatggcgtctgggatgtgtgctagcgtagtcctgtttatggcactggttccagctggtggacatcttgtgaccactacggattgttataggaagactagaatattcattgagacttttcttccaaagatggggatcacgaccactgtaattgatccagcagatgttggagccttggaatctgcattggagcagcacaatgtgtctctattcttcactgagtctcctaccaatccattcctgagatgtgttgatattaagctggtttcagagctttgccacaagaaggggactttgctctgtattgatggtacatttgcaactccattgaaccagaaggcccttgcccttggcgctgatctgattctgcactccttaacaaaatacatgggtggacatcatgatgtccttgg

SEQ ID NO: 273144 - DNA, 404 bp, Glycine max
gtttcagtgagtgatcggtgttcacttgatccttcataagtcgtcatcatcatcatcatcatcaccgttgattgaagaagatgccgatcagaaacatcgccatcggaaggcctgaagaggctactcaccccgacacgttgaaggcggggttggctgagttcatctccaccttgatcttcgtgttcgccggttcaggttccggcatcgcctacaacaagctcaccgacaacggcgccgccactcccgccggcctcatctccgcttccatcgcccatgctttcgccctcttcgtcgccgtctccgtcggcgccaacatctccggcggccacgtcaaccccgccgtcaccttcggcgccttcgtgggcggcaacatcaccttactccgcggcatcgtctacgtcatc

SEQ ID NO: 273145 - DNA, 457 bp, Glycine max
cccacgcgtccgcccacgcgtccgggagactcaatgcaggttgatagcccaacaacggagaagaaatcagagcctgagccatcgtttgagattctgactaatcctgcaagggtggttcctgcacaggagaagtttattaaatttttgcaggacagcagatatgttccagttaagttggcaccatcaggatttgtgcttctcaaagacttgcgtcctactgagccagaagtgcttgctctcactgacacaccttcatctaccacttcggctgctggtgggtcagcaacaggattgcagagttcttcatcagccatggctgtggatgaggaacctcagcctcctcaaccatttgaatacacctcatgagtttggtcctgattcattaagttcaaatattcatcatggtgcttatgaaaattggttcttctgaggagagtagctacccgaatggatcaac

SEQ ID NO: 273146 - DNA, 450 bp, Glycine max
  unsure (1)..(450): unsure at all n locations
cgtttaacaaaattgcattctctatttctcttcccctctcatcattttaatcacgcgcacatcagcacaacacaacaattcactaagctaaaatcacttcatcatggcttcctcgtgtgcttcctctgccattgcagctgttgccatctccacaccaagttcccagaagaatggatcactcttgggaagcacaaaagcttcttttcttagtgggaggaaactgaaggtgaacaactttacagcaccagttggagcacgatccagcactacagtttgcgcagttgctgagcctgataggcctctgtggttcccaggcagcacccctcctccatggctagatggcagtttgccaggagattttggctttgatcctctaggtcttgcatctgatcctgagagcctgagatggaatgtccaagcagagcttgtgcactgcanatgggccatgtt

SEQ ID NO: 273147 - DNA, 414 bp, Glycine max
aaagaaaaaaaaaacccttagccaacacaaccattatggccacctctgctattcagcaatcagcattcactggtcaaactgctctgaagcagctcaatgagttcgtccgcaagaccggtggcgccggcaaaggtcgcactaacatgcgccgcaccgtcaagagtgctcctcagagcatttggtatggccctgaccgtcccaagtacttgggtccattctcggagcagattccatcatacctgaccggagaattccctggtgactacggatgggacactgctggattatcagctgacccggaaaccttcgccaggaaccgggagctggaggtgattcacagcagatgggcaatgcttggtgcccttggctgcaccttcccagagatccttgagaagaatggtgtcaaattcggcg

SEQ ID NO: 273148 - DNA, 382 bp, Glycine max
gcctcactacaagctgcagctaccttcatgcaacccaccaaggttggcatagcctctcgcaacctcaaatctacacaatgcatttctaaggcttttggcttggaacctgctgcagctaaactcacttgctcccttcagcctgatctcaaagaatttgctcaaaaatgtgtcgacgctaccaaaattgcaggattcgcccttgccacctctgctctcgttgtttctggagcaagtgcagaaagtgttccaaaaaggctaaccttcgacgaaatccagagcaagacatacttggaagtgaagggaactggaactgctaaccagtgcccaaccattgaaggtggagtggactcattcgccttcaagccagggaaatacaacgccc

SEQ ID NO: 273149 - DNA, 383 bp, Glycine max
aaaaaagattctaaagaaatataactaatattctttagaataatcaaaaagaatattaaattcaaataaattttagatagaaaaaagacttaaaaaggaggatttgaaatgcgagatctaaaaacatatctttccgtggcaccagtagtaagtactctatggttcggggctttggcgggtctcttgatagagatcaatcgtttttttccagatgcattgatattcccttttttttcattctagttattgacacggaaaggggtgaagaagattatagatccaattaagtattaaatatatgtaattaatatgtaattaatctcctcttctttatttcgtcttttatttcttcttttttttacaattgtaatagaataagttag

SEQ ID NO: 273150 - DNA, 412 bp, Glycine max
cccacgcgtccgcggacgcgtgggttcacctcctcagcagtcgtcagaaagactccataacccaaaaatgcctttcaagaggtacgttgagattggaagggttgctcagatcaactatggcaaagagtacgggcggctcgtgatcattgtcgatgtcattgaccagaatagggctcttgttgatgctcccgacatggtgaggtcccaagtgaacttcaagaggctctcgctcactgacatcaagattgatattaagaggattcccaagaagaaggatctcattcaagccatggaggctgctgatgttaagaacagatgggagaagagttcttggggcagaaaactgattgtgcagaagaggagggcatccctcaatgactttgataggttcaagataatgttggcaaagatc

SEQ ID NO: 273151 - DNA, 312 bp, Glycine max
cagatatttcatgtatgtgctattgttgtatgtattttttgtctagaactctccatatgtaaactaaaaaataggcaaatggaaaaaaattcagacgattttgatatttataagttctttcattatgttcaaaaaaaaaaaaaaaaaaaaaaaaaaaaaccaaaaaaaaaaaaaaagggcagacaataaaaaaaaaaaaaaaattcatacccgtacatgcaaaaaaataattcttatatagtgataccaaaatttaattcattggtcggggaattaaaacaaaataactggggggaaccctttaaagaccca

SEQ ID NO: 273152 - DNA, 372 bp, Glycine max
ctcatcttcctctttttctcaacaaaaggtgttcaattctagctagttctattacgtcgtccgcgaccatgaacatggcgatcgcgcttctgttcatggttttcgcagtttcatcagctttagacatgtcaataatatcacacgacaacgctcatgcggatagggccacgaggcgcaccgacgaggaggtgatgtcaatgttcgaggagtggctggtgaaacacgacaaggtgtacaacgcgctcggtgagaaggagaagaggtttcaaatcttcaagcacaatctgcgcattatcgatgaacgaaactctctgaaccgaacctacaagttgggactcaacgtgttcgctgatctcaccaatgcggagtaca

SEQ ID NO: 273153 - DNA, 426 bp, Glycine max
gtgaaagtcattcctgcacatcgaatggcgtttcacggtgacgatgacaccatggtgatggtggttcccaaactctctccgcccaacacctacgaagccgtcgtcaatggtggcaccttcgaccgattgcacgacggccaccgcctcttcctcaccgcttcagcggagttggcaaggcgccggattgtaattggagtttgcgatggacctatgctggcaaaaaaacagtttgctgaactgatacagcccattgaggaaaggataaataatgtcaaaactttcataaagtctatcaagccggagttggaagtgcaagctgtgccaatcacagatccatttggcccttccattacagatgagaacttggaggctgtgattgtaagcaaagagacattaccgggaggattggctataaacagaagaaga

SEQ ID NO: 273154 - DNA, 423 bp, Glycine max
ctctctctctctctacgctttctcgtttgagatccctcaagggatccactaactgaaggagcaatggggttgacatttaccaagctttttagccggcttttcgccaagaaggaaatgcgaattctaatggttggtcttgatgccgctggtaagaccaccatcctgtacaagctcaaacttggagagatcgttaccacaattcccaccattgggttcaacgtggagactgtggaatacaagaacattagtttcactgtctgggatgttggtggccaggacaagattcgtcccttgtggaggcactacttccaaaatacacagggtctcatttttgttgttgacagcaatgacagggacagagttgttgaggccagagatgagttgcacaggatgttgaatgaggatgaactgagagatgcagta

SEQ ID NO: 273155 - DNA, 249 bp, Glycine max
cccacgcgtccgattggatccaaccaaactgcactttttagttataactaagaaaatgtgcataatcccgcgaattacttctgaaaattacttctgaattaatgaaattttttcaataatttaagaaaaaatatttaagaactatagcatttcgcgatttattggtaatccactttgattctctattaaccaataattttggactattaccatggttaaagtgaatagtttgaagtctagacgcagtgt

SEQ ID NO: 273156 - DNA, 395 bp, Glycine max
gtccgaaaccactcataacacaaagcacaaagcaaagctcatccttgagttaaaaaatggcagcagcttcttccatggctctctcatccccatccttggctggcaaggccgtgaagctgggcccatcagccccagaagtgggaagggtgagcatgaggaagaccgtcaccaagcaggtctcctcaggaagcccatggtacggcccagaccgagtcaagtacttgggcccattctctggcgagcccccgtcctacctaaccggtgagttcccaggcgactacggctgggacactgctgggctttccgcagacccagaaaccttcgccaagaaccgtgaactcgaagtgatccactccaggtgggccatgctcggagccttgggctgcgtcttcccg

SEQ ID NO: 273157 - DNA, 455 bp, Glycine max
caaagtttcttcctttctctgctctttgtcttctctgacacatttggggccttgttgagtgtgtttttgcaagagggtatggcgaacgacgttgaggttgctgagcgtggctccttctctgggaaggactaccaggaccctccaccagcaccactcattgatgctgaggagctcacaaagtggtccttttacagggctcttattgctgagttcattgccactttgctcttcctctacattactgtgctcacagttatagggtacaagcaccagacggatcatgctgatgcgtgtggtggggttggcattcttggcattgcatgggcctttggtggcatgatcttcatccttgtctactgcactgctgggatttcaggaggtcacattaacccagcaatgacatttgggcttgttttggctcgcaaggtgtctttgatccgagccatcatgtacat

SEQ ID NO: 273158 - DNA, 457 bp, Glycine max
aaatttacactgtttgaaaaatgacccttgttattgaactgaggaacacgcaaactgctcccacggaagggtttttagcgcgcactgttgtttcttgtggcgatataggtaaactgtgaactcagttggttataacttgctaacaggcagaaagttgttgaagtccctcaattgtgcttccctgcatcctttcccaaagtctctgtctggtgcaatggtttatataactgagtgggacaagtttgtggagcaatccattgagctgttccgtgcagatcctgattctacacggtacgtcatgaagtacaggcactgtgatggaaagttggtactcaaggtcactgataaccaacagtgtctaaagtataagacagaccaagcacaagaagctaagaaaatggagaaactgaataatatgttctttgctttgatggctcgtggtcctgatgttgatcta

SEQ ID NO: 273159 - DNA, 381 bp, Glycine max
aagaaaatcctcacccattttcttcgtagccaaacactctgaaattctcagttatgtcgtggcaagcgtatgtggatgatcacctactgtgtgaaatcgaaggtaaccacctcactcacgccgctatcatcggccaagacggaagcgtttgggctcagagcaccaacttccctcagttcaaacctgaggaaataactgccatcaataatgactttaatgagcctggatcacttgctccaactggattgtatatcggtggcaccaaatacatggtcatccagggtgagcctggtgctgtcattcgagggaagaagggtcctggtggtgttactgtgaagaagaccggtgcggccttgatcattggcatttatgatgaaccaa

SEQ ID NO: 273160 - DNA, 269 bp, Glycine max
tttctttgttcaggctattgtcactggcatgggccctattcagaacctttacgaccacgttgctgatcctgttgccaacaatgcttgggcttatgccactaactttgtccctggacaatgaggatgcctacatgcaatgcaatcttctgctcccttttgcagttcccttgtgtttaactccattttcactaatgtaactacacctgtgtagcagaaaaatctgtatgagaaccattatatttttatatattagaaatttgggtccccag

SEQ ID NO: 273161 - DNA, 423 bp, Glycine max
cccacgcgtccgcccacgcgtccggataaatcgccatgaatcccaaaatcctcttcgtgtttgctcttcttctgaatctcgtatccaattcgttccaaaaccctaaccctaaaacccctaaatcaacgccgtcgcaggctcacgtggagctcgtcaactacggcttacccgtcggtcttctccccgccaccacggtctcgggctacgccgtgaaccgtacctccggcgagtttaccgtcaagctcagcggcgcgtgcaagatcacgctcccgccggacaactacgtcgccacctattccgacaccatcaccgggaagatcgtgaagggaaaaatcgcggaactcgagggaattagggttcgcgcgttcttcaagtggtggtccatcaccggaatccgctcctccggcgacgacatcgtcttcg

SEQ ID NO: 273162 - DNA, 424 bp, Glycine max
acaagatcaaaggccgacaatttagcagctcaaagagccagagactttcatgttggatggttcattcatccccttgtttatggagagtatccaacaaccattcaaaatattgttgggaatagactccccaaattcactagtgaagaagttaaaatcgtgaagggttcaatagattttgttggaatcaaccaatatactacgtactacatgtatgatcctcatcaagcaaaacctaaagtcccaggctatcaaatggactggaatgcaggatttgcttatgcaaagaacggagtgcctattggtccaagggcttattcttattggctttacaacgtaccatggggcatgtacaaatcattgatgtacataaaggaacgttatggaaacccaactgtgttcttatcccgaaatggcatggatgatc

SEQ ID NO: 273163 - DNA, 404 bp, Glycine max
cccacgcgtccgcccacgcgtccgcccacgcgtccggtaccctgaaactgaacacaagctttttgttgggaacctgtcatggtcagtaactaatgagatattgacacaagcctttcaagaatatggaacagtggttggagcaagggtcttgtatgatggagaaactggaagatcacgtggctatggtttcgtttgctattcaacacaagcagagatggaagctgctgttgcagccttgaatgatgtggaactagaaggacgggctatgcgtgtaagcttggctcaaggaaaacgtgcataaggttaatagaaatttgggaaggcttagatgttcaacaatggtgccatagaaatgagaagaggatgcacttgatgtaattttctgaggaattccttttcatttc

SEQ ID NO: 273164 - DNA, 428 bp, Glycine max
gtggccagcgtaagaagaatggcttctcaaagtttgagtttaccaccaacacatattccttacaataggataattgggaagcttgattccaagtttttgttgtggccttcttgtgctcatatcaaacccagaagaatttctacctcaattcgagcaatgggttcctccgcttcttcccactcccagtcacaatatgcagacagcgttgaatctgaagcaggagctgatactattgactataaatctttaaccgatgaagagtggaagaagcggctcacaaatgaacagttctatattactcgtcagaagggaactgaaagagctttcactggggagtactggaatactaaaaccccggggatttaccattgcatatgttgcgacacacctttattcgaatcatctactaagttcaatagtggaactgg

SEQ ID NO: 273165 - DNA, 337 bp, Glycine max
gctgcaccaagggaaacagctatggtgttattgtagagactgagaagagttacatcgagactgttgtcatggatgttccagcagctgagcatgatgggaagtgcaagtgtggcactaactgcacttgcacggactgcacctgtggccattaaggaatatgtatgaaaatgtaattgccatgtgtttggcaatacaaatatccaaataatgtaatcttcgtatgaataaatgtgtgtgctgttatcctacttcaggtctgtgtagtcatgcagtctgaatcatttcaagttcctgtcttagttaatataacagccatggttgtggcattctatggttt

SEQ ID NO: 273166 - DNA, 438 bp, Glycine max
  unsure (1)..(438): unsure at all n locations
aagagaaagccgtcgctatcctagtctcttcttcccctctacccatttcagtttcaggatggaatctcaggtgaagcacgcccttgttgtcaaagttatgggtcgtactgggtctagggggcaggtgactcaggttagagtgaagtttttggatgatcaaaaccgacacatcatgaggaacgtgaagggacccgtgagagaaggagacattctcaccctacttgagtctgaaagagaagcaagaaggttgcgctagaggatctcttcatggtttggctcangacttaaacaaaacatcgttgtttttgttgtagttaaaggatgtcaaatgttaattgtcatggacctgaattatgcacctactatgtttgacattatgccattatgtttggggctgacttatgactaaatttatgctttgactatatgaggtgtttc

SEQ ID NO: 273167 - DNA, 433 bp, Glycine max
gccagtcacatctgtacccccgtcattttattgattgggtgtgaaggcagtaaacctacatcaactatttaccattcatgtaactgaagcttagaaacattcacttgtaacatttgacaaggagataccaggatttatctgcaatgatgctctccttcatggcgtagagactaggactagttccccaatccaaattccacgcaatggtgacacttatgaatgcacttcggtaaaaggactatatccagttggtgaaggagcaggctatgctggagggatcattagcgcagcaatagatggaatgcatgctggttttgctgtggcaaaaaaattcagcttgtttcatggagatgttgagtctgttctgggcaaggctcaaaatgttggagttgtcaagtactaggaagatctaactttcttcagacactgtctt

SEQ ID NO: 273168 - DNA, 404 bp, Glycine max
tgggagcagagggagcgaagagaaaaacaaatatggagactcctcctccccaacaaggcgtcgtgaagaagaaggagacaaggggcgcgaaacccaaaccaaaggacgaacacgggaagggtttgaaggaaggtaggaaaacacaacaacaacaacaacatcatcatcagcagcagcaacagcaacaagatcaaccttcggtggacgagaaatacacgcagtggaagtcccttgttcctgtcctctacgactggctcgccaaccacaacctcgtctggccctctctctcttgcaagtggggcccccagcttgaacaagccacttacaagaatcgccagagactctacctttctgagcagactgatggtagtgtgccgaatactctggtgattgcgaattgcgag

SEQ ID NO: 273169 - DNA, 430 bp, Glycine max
  unsure (1)..(430): unsure at all n locations
cccacgcgtccgaatcaactgtgataatggcgtctgggatgtgtgctagcgtagtcctgtttatggcactggttccagctggtggacatcttgtgaccactacggattgttataggaagactagaatattcattgagacttttcttccaaagatggggatcacgaccactgtaattgatccagcagatgttggagccttggaatctgcattggagcagcacaatgtgtctctattcttcactgagtctcctaccaatccattcctgagatgtgttgatattaagctggtttcagagctttgccacaagaaggggactttgctctgtattgatggtacatttgcaactccattgaaccagaangcccttgcccttggcgctgatctgattctgcactccttaacaaaatacatgggtggacatcatgatgt

SEQ ID NO: 273170 - DNA, 446 bp, Glycine max
  unsure (1)..(446): unsure at all n locations
gtttgttgttgtaactcgttcttcttcttttgttgttctgtgtttgtgtttgttttttctctcacctgaaaatgtcttgctgcggtggtaactgtggttgcggaagctcctgcaagtgcggcaacggctgcggaggctgcaagatgtacccagacttgagctacactgagtcaaccaccaccgagaccttggtcatgggagtggcacctgttaaggctcaatttgagggtgctgaaatgggtgtgcccgctgagaacgatggctgcaaatgtggaccaaactgctcctgcaacccctgcacttgcaagtgaggtgttgggagagcaagcttcaagcagagatagcccttaattaggaataatgataaactattaatgtgtagctaanaacttatgtattatgtctgtgatggttntcgtgcactctggtgtttgtgtaaacaaaca

SEQ ID NO: 273171 - DNA, 454 bp, Glycine max
gtgagcaaagaaagatagtgagtgaagtaactgaagagaagaaaaaatgccgtgcctcaacctcagcaccaacgtgtccctcgaaggcgtcgacacctcttccatcctcgccgaagccacctcctccgtcgccagcataatcggcaaacccgaagcctatgtgatgattgtactgaaaggatcagtacccatagcttttggtgggaatgagcagccagcagcttatggagaattggtttccattggtggtcttaaccctagtgtaaacaaggaacttagtgctgcaattgcttcaattctggaaaccaaattgtcagtgccgaagtcgcggttcttcttgaaattctatgacaccaagggttccaacttcggatggaatggatctacattctgaaatccgaattccatgttacattggttgtggtaccttgaatgttggatggagtgttcatta

SEQ ID NO: 273172 - DNA, 411 bp, Glycine max
cccacgcgtccgggtacagaaaatggtgaagattattggatagcaaagaattcatatagtgataaatggggagataatggctatatcagaataaaaagaaaactgagcacttgtaaatttggaatcgagggttactatcccattataagagtcaccgatcaacaagcccccaaatattcgtgacaatggcatcggctaactgagcccattgaggctttggaagtaattaataacgaggccaaagtttgatggagactatctttgagctattttatctttatataagtattgtaatttctgttccctaaatcatctggttgctgcacgtgttggccccagattgagtatctgtttagtctatctacagtatctatctaaataaaggtgcgatggctctatgggcatcattat

SEQ ID NO: 273173 - DNA, 395 bp, Glycine max
acacccaggggcttgtgcataatccaacctatgacgatgtgtgtacagggaccacccaccactcagaggttgtaaggattcaatatgatccaaaaaattgcagctatgagactctgcttgacatgttctggtctagacatgatcctaccactctgaatagacaggggaatgatgtgggaacacagtacagatctggaatatactactacacgccggaacaagagaaggcggccaaggagtcgttggaacaacagcagaagcagttgaacaggaagattgtcactgagatccttcctgccaaaaagttctacagggcagaggagtaccatcaacagtaccttgagaagggtggccgatttggtttcaagcaatctgcttctaaaggctgcaatgat

SEQ ID NO: 273174 - DNA, 440 bp, Glycine max
  unsure (1)..(440): unsure at all n locations
cccacgcgtccggtctctctctgtccctctgcgtttttgacaccgtgtttgttgttgtgtgtgttttccgcggaaaatcaaaatgggtatcattgaaaagatcaaagaaattgaagccgagatggctcggacccagaaaaacaaagccacagagtatcatctcgggcagctcaaggcaaaaatagcaaaactgaggacacaattattggagcctccaaaaggttctagtggaggtggagaaggatttgaagttacaaaatttggtcatggacgtgttgcactgattggatttccaagtgtggggaagtctactcttttgacaatgttaacgggcacacattctgaagctgcatcttatgagtttacaactttgacctgtattcctgggattatacactataatgatactaaaattcagntacttgatcttgctggaatta

SEQ ID NO: 273175 - DNA, 456 bp, Glycine max
atcttggaggtatagataaagattcaattttggatttggtgctagcatcccttcccgaagaaacacgaagcaacggcacagacacacaactgcagttaaagcagaagtttgatgccttaaaaggtagtgtaagacacttcagcttcttcccaccaggagggggaggtatgttggcacattctttggcacatctagcatcctggttgaaggttagggaagacgatcaatcaggtgatgggatcgaatctgtgatcaataaagttgaagtttatttggcagaaggaaaacttgctgaagcagcagattgtctagaagaaagtgtgagaagcacacaagctgcagaaattgttgcaggttgggtgagacaagcaagaaacagggctatttctgagcaagctgtgctgcttcttcaatcctatgccaattcccttagccttaacatgatctcaaatttga

SEQ ID NO: 273176 - DNA, 429 bp, Glycine max
  unsure (1)..(429): unsure at all n locations
cccacgcgtgcggagagatcgaagagaacgttttttttttcttctttctttctgaaactttagtggatttggtcatggagaaaagcaagtcattccctgaatactcctgctcctacactgaatttggcttcagtgaaaggtccaactcatataattttaatggtccaaaccagaagggaaatgggttttctgcatcaagtgatccagaaatcaagagaaagaagaggatcaaggcctacaatgtattgacagtggagggaaaacttaaaacaaatgtcagaaacagcttcaagtggatcaagaacaagttcagcgacattcgctacggtgtgtgaactaggatcaaccataagacttgcttgccttggggctagcatgtgttgntcagtaatatcaactttaaaggtaaggcctttataaaggaaaata

SEQ ID NO: 273177 - DNA, 412 bp, Glycine max
gtagagaagcactcttcgttcttcgactgtctacgatctgctttctctgaattgtgaaaatgtcgctcggagaaactgcttgttcatacgcagctctcatccttcatgaagatggaattagtgtaactgctgacaagatcagcaccttgttaaaaactgcaaaggttccagtagactcttattggccaaccttgtttgctaaacttgctgagaagaaaaatcttggcgatttgatagcaaatgcggcaggcggtggtgcaccagttgctgttgcagctgccccacttgctgctgctgctggtggtgctgctgccgcagctccagctgctgaggagaaaaagaaggaagaaccggaagaagagagtgatgatgatatgggattcggcttgtttgattagggacattctcaatg

SEQ ID NO: 273178 - DNA, 328 bp, Glycine max
  unsure (1)..(328): unsure at all n locations
ttgagtccattgaatctacctgntgcaaatntctactatttttcaatggcttctgcagatgttgagttccgttgctttgttggtgggcttgcttgggtcaccggcaacgatgccctcgagaaagccttttcaatctacggcgacatcgttgaatcgaaggttatcaacgaccgtgagactggaaggtccagaggattcggatttgtgaccttcgcctcagagcagtcaatgaaagatgcgatcgcaggaatgaacggccaggaccttgacggccgtaacatcactgtcaacgaagctcagacccgcgccagccgtggtggtggtggag

SEQ ID NO: 273179 - DNA, 350 bp, Glycine max
  unsure (1)..(350): unsure at all n locations
agagaacctaagacacacaacacaacacanacacacagagttagaggagaaatcatcatggcatcagcagcatctgggtttgtgttgtcacttaatgttgcagctgccaccacaaactcaagggtggtcatgttcaacacaaagaacaacgcttctaggcttgttgtaagggcttcagatgagcctgcagcggcggcacccgccaccgccacacccccagctgaagctgaagctaaaccaaagccaccacctattggccccaagagaggtgctaaggtgaagattcttaggaaggaatcttactggtactattgcactgggtcagtgattgctgttgatcaggaccccaa

SEQ ID NO: 273180 - DNA, 456 bp, Glycine max
  unsure (1)..(456): unsure at all n locations
tgttgatcgagataactagaaacagtgtgatgaaaatgaaggtccttgttttcttcgttgctacaattttggtagcatggcaatgccatgcgtacgatatgttccctctccgaatgaacactggctatggtgcccgtactccggaggtgaaatgcgcaagttggaggcttgctgtggaagcacacaacatctttggctttgagaccattcctgaagagtgcgttgaagcaacaaaggaatacatccatggcgaacaatatagatcagactccaaaacagttaaccaacaagcttacttttatgccagagacctcgaagtccatcccaaggacacatttgtgttcagtatagatggcaccgtactctctaatattccatactacanaaaacatggatatggggtggagaaatttaactcgaccttgtatgatgaatgggttaacaaggggcatgcac

SEQ ID NO: 273181 - DNA, 451 bp, Glycine max
cccacgcgtccgctcttccccagctgttaccactgtcaaccgtgccggtgccggcatggttgctccattcactggcctcaagtccatggctggcttccccaccaggaagaccaacaatgacattacctccattgctagcaacggtggaagagtgcaatgcatgcaggtgtggccaccagttggcaagaagaagtttgagactctttcctacctgccagaccttgatgatgcacaattggcaaaggaagtagaataccttcttaggaagggatggattccttgcttggaattcgagttggagcacggtttcgtgtaccgtgagcacaacaggtcaccaggatactacgatggacgctactggaccatgtggaagctgcctatgtttggttgcactgatgcttctcaggtgttgaaggagcttcaagaggctaagactgcatacccctacggc

SEQ ID NO: 273182 - DNA, 419 bp, Glycine max
cggacgcgtgggcggacgcgtggggtgctggacaaacttaaggctgagcgtgaaagaggaatcaccattgatattgctttgtggaagtttgaaacaacaaagtattattgcacagttattgatgcgcctggacatagggatttcattaagaatatgattactgggacatcccaagctgactgtgctgttcttatcattgattcgaccactggtggttttgaagctggtatttccaaggatggacagactcgtgaacatgctctgctttcattcacccttggtgtgaaacagatgatttgctgctgtaacaaaatggatgctactacacccaagtattccaaggccaggtatgatgaaattgtgaaggaagtctcttcctacttgaagaaagtaggatacaacccttgacagattccttt

SEQ ID NO: 273183 - DNA, 321 bp, Glycine max
aagacaggaggttttaccaggccgggcgattacggcaaccgcgaccacgaacaaggcgagcgcgctgccgctcaaggagcacgcggttgcatcaacagcagacacgccaagcaaatcacgcggcaacacacacgcagagagggccaccaggcgcaccgacacggaggagacggcaatgtacaaggagaggccgatgaaacacgacaaggcgtgcaacgcgcacggtgagaacgagaacaggatgcaaaactataggcgcaatcggcgcagagaacgtgaacgaagaggtgagaaccgaacggagcagatgggactcaacgt

SEQ ID NO: 273184 - DNA, 409 bp, Glycine max
cgcattctttcttcgacgagcttcgtgatccaaatactcgcttgccaaatggcctattgcttccaccactatttaatttcaaatcccatgaactgaaaggagtcccatctgagattttggtgaaattggttccagagcatgcaaggaagcaatgcccgtctctaggctcgtgaagtgttgtttccatatgagaatgctgcgctttccttttctatttaatatgatatttttgttggtatctttattgtattcggttgccctgtaaaagcatatttagagatacatgcttctcattaacacccagcccccgatggttatgtataataccctgttttctgtatcacagcagattgtaacttacaataatacgactaaatttctgcctttatctagatgtttcatctttatt

SEQ ID NO: 273185 - DNA, 403 bp, Glycine max
ctagacaagactctcacacacaactctggagatagaaagactggctctcaacacatagatgagtgctgccatctgagcctatcgatctatcatatcctcctcaaaatccagacatgtcgaagcacatactctatccagctttcatgccagcaatgcctcttcttctcgctgtaccatgagtgctgattggatgccttgccatcctactcccacatacctcgatggttcaccacctgttgactgtggattcaaccctattggtcttggcgaagtaccagagaactcttgagaggctcaaagagtcagaactcatacactgcagattgtccatgcttgctgttccagtgattctggatccagatgcatatggcttaagcaactgggtaaaggcttacgaatgggc

SEQ ID NO: 273186 - DNA, 463 bp, Glycine max
agagaagaaactttcgaacccaatgaggttgatataagtgcataagctcgatctcaatatctacgatggcgagagatgagtatcgtcatatcatgaccttcaaggggtgagaacatcgatcatagccaaacttgaataacatccatagcatggtactctaatgaatgatgatagtaaaggagcacctaatgacacatatgctgtgtttactggatggtatgctgatgtttcctgaccagtagaagcacacacatatgaaatagaaaagattctattccacgggaaatcagaatttcaagagcttgttgtatttgagtcttctagacaaggcaaggttgcaattcttgatgagcatatacagctgacagataacgatgaatttgcttaccaagagatgctcactcaccttgcactctgttccattccagatccaaagaaggtgctgcttattgtagggggagat

SEQ ID NO: 273187 - DNA, 455 bp, Glycine max
ttttaatttcctagatctcccaaacaaattgtagcataagtcccatggccaaagagactagtgttgtttatctatatcccagcaaatcacaagtttggggtgagaattttgatcataaaaaacttgtaataacaacactagctgctaatggaaagaaggaggagagtaatggagcacctaatgacacatatcctgcgtttcccgggtggtatgctgatgtttcctggccaggagaagcacacacatataaaatagaaaagattctattccacgggaaatcagaattccaagagcttcttgtatttgagtcttctagacaaggcaaggttgcaattcttgatgggcatatccagctgacagaaaacgatgaatttgcttaccaagagatgctcactcaccttgcactctgttccattccagatccaaagaaggtgctgcttattggagggggagat

SEQ ID NO: 273188 - DNA, 384 bp, Glycine max
ctcgctcgtgctgccttcgtttgcgtttttatcacacaggaattaacatatatatagcgtgcatggcagtcacactctacaaccttagctcttcctctgggttgaagaaacttgatgagtaccttctaccacgcaattacatcacggggtaccaagctacaaaggatgatcttactgtttatgcaactttgccaactgctccatcagatgaatatggaaatgtttccaggtggtacaagcacattgatgctctgttgataatctctggtgttactggcgagggatctggtgtaattgttgagggatctctagttgcatagcctgttgcaactccccctgctgcaaacacaaaggctgctgaagctgaggatgacgatgatgatg

SEQ ID NO: 273189 - DNA, 456 bp, Glycine max
tgtttccaaggctgaacttaaggagaagctagctaggatgtatgatgtgaaagaccctaatactgtatttgtcttcaaattccgaacacattttggaggtggcaaatccactggatttggtttgatttatgacacagtggaaaatgctaaaaagtatgagcccaaatacaggcttatcaggaacggccttgacactaaggtagaaaagtcaaggaagcaaatgaaggagagaaagaatagagctaagaagattcgcggagtaaagaagaccaaggcttccgatgctgccaaggctggaaaaaagaaataagttttgagacaccctgttactcctaaggttaaattggttttggtgctttgtaatagttatttttatcttatgctagatttatagaatgagatgtcttggcccaagtgttgatccttgttttaatttatgttcgatcgcttataact

SEQ ID NO: 273190 - DNA, 462 bp, Glycine max
cccacgcgtccgctaatggctgcaataagggaaggagcagatgtgagaggttactttgcctggtctttgctcgacaactttgagtggctatatgggttttcagtgagatttggacttcaccacgtagatttttccacgctgaagagaactccaaaattatcagcaatttggtacgagcatttcattgaaaactataaactaactgatagcattgtgcccgaacatggcagagaaaagggaatctggaacaagccaactacccaactcagaaccttagtaagtccagagcctagaatgaataacttggattaatttgcaatgaaataccatatgctttctcttttgaatctttatatttgatccaccacttttcggacttgaacaagattgttaacgacaactaagtcctttcaatcgttcttagcattttttagtgtataaattatactaattatgattaaa

SEQ ID NO: 273191 - DNA, 452 bp, Glycine max
atttttctcactgtcttgtctctccagataactgtatagagagagatggcagctgcaacatctggtgctgtgttaaatgggttgggatcttccttcttgagtggaggaaacaggagccaaacccttctggccactgctattggaggcaaagttggtgctgctgctgttactgttagtcctagaagactcattgtggtagctgctgctgcaccaaagaagtcatggctccctggtgtcagaggtggtggcaacctcgtcgacccagaatggcttgatggatcgtgagtccacccttattcctccttccctagcattactctccatgcctattcagcaatcagtttttcatcctctgaagattgcttctgaactaagtgttttagaatagaaacggttgagagatgttttggcattctcttcttctgtttgtggtctttagcttaagggtgagt

SEQ ID NO: 273192 - DNA, 481 bp, Glycine max
gccacgcttacggttttcttgatataattcttgtctctgcccgtgtgtctcgggcatggccaccgtcaccactcaagccttcgtcgcatttttccggccatgtacctttaaatcgaggtttttgacctgctcttttctgattacttaaccttctatgtactattctgttctctttttctctcttttaagtttttattcaatgttgattgtttttatttcttttattttttttatttaattttttcttcttatttttttctcttttttaactttttctttttttcattttttttgtttatttatttatttattttgtcttatttcttttattcttttgacttttatttttgtttttatttcatttttttattttatcttatttttattatttcttttttttagtatttatatttacttatttatttctttcttttttttattatttattttttttattttattttattatttattttttttt

SEQ ID NO: 273193 - DNA, 464 bp, Glycine max
aacttactatatttctcaacaaaaaaggggttacaaatctagctagattctattacgtcgtgcgcgaccaatgaacatggcgatcgcgcattatgttcatggttttcgcagtttcatcagctttagacatgtcaataatatcacacgacaacgctcatgcggatagggccacgaggcgcaccgacgaggaggtgatgtcaatgttcgaggagtggctggtgaaacacgacaaggtgtacaacgcgctcggtgagaaggagaagaggtttcaaatcttcaagcacaatctgcgcattatcgatgaacgaaactctctgaaccgaacctacaagttgggactcaacgtgttcgctgatctcaccaatgcggagtacagagccatgtacctgcgaaccttggacgagggtccgaagttgggcttggatacaccgccaagaaaccactacgtgccacgtgttggagat

SEQ ID NO: 273194 - DNA, 393 bp, Glycine max
gccaaacgtacgctcatgctagagttttaaaaatggcagcagcctccttcatggctctctcttacccatcctcggatggcaaggccgtgaagctgggcccataaaccctcgaagtcaggagggtcagcatgaggaagaccggcaccaagcatgcctactacggaagcccatggtacggtccagaccgcgatgagtacttgggcccattctctggcgagcccccgaactacactactggctagatcccaagtgactacggttgaaacactgctcggctttctgccgacccataaacctttgtcagaaaccgttagcttgaagtgatccactccaagtaagccattgctggggccttgggctgacgcttacccgaactattgtcccgcaaccggg

SEQ ID NO: 273195 - DNA, 455 bp, Glycine max
cagagatcggagcgcggaacctctctctctctatctctctctgcggaaaccggaatatgtcagttctgtgatcagatccatccgacgtcgtttcagcgataatggctccgttcagcggcgatgagacggcaccgtttttcggcttccttggagccgcagctgccctcgtcttctcctgtatgggagctgcctatggcacagcgaatagtggcgttggcgtggcttcgatgggtgtgatgagaccagagctggcgatgaagtctatcgtgcctgtcgttatggctggagatttgggtatttatggccttattattgctggcattatcagtactggcattaatcccaaggccaaatcttattacctctttgatggttatgcacatctatcctctgggcttgcctgtgggctggctggcctctctgctggcatggctattgggattgttggtgatgct

SEQ ID NO: 273196 - DNA, 449 bp, Glycine max
ctttggtggccacagcaacaataacaatggcagcctcactacaagctgcagctaccttcatgcaacccaccaaggtgggcatggccactcgcaacctcaaatctacacaatgcatttctaaggcttttggcttggaacccgctgcagctaaactcatttgctcccttaagcccgatctcaaagattttgctcaaaaatgtgtcgacgccaccaaaattgcaggattcgcccttgccacctcagctctcgttgtttctggagcgagtgcagaaggtgttccaaagaggctaaccttcgacgaaatccagagcaagacatacttggaagtgaagggaactggaactgctaatcagtgcccaaccattgaaggtggagtggactcatttgccttcaaggcagggaaatacaaggcccagaagttgtgcctggaaccaacttccttcacggtg

SEQ ID NO: 273197 - DNA, 444 bp, Glycine max
tccacgcgttcggtgttagatagccagctacgtcgatcttttctattccctcgccaacggaccgttgatcaatttcaatttcaatttctcggcagccattgccatgttctttcacggctcaagtgagaagaagagggaaagggaaagtggtaatgagcatggaggcaggcattggagtgatgggcaccaagttgggtatgatgagctatttcgaatccgacggagaggttgttcctgtcactgtcgtgggtttcaaagaaggcaacatcgtcacccagatcaaaactgaagccaccgatggatacgacgccgtccaggttggttaccgaagggtcagagatcgcaaattgaccaaacccgaaatcggtcatctccagaaggtcggcgccattcccatgcgccatcttcaggagttccgtcttcaagccgtcgatggcttcgacc

SEQ ID NO: 273198 - DNA, 289 bp, Glycine max
  unsure (1)..(289): unsure at all n locations
gcaaagccaaaaccagcacccaanggccccaagagaggggcnaaggagaagaaccccaggaaggaagccnaccggnacaaaggcacaggagcagnggacgctgnagatcaggaccccaacactcgctaccctgttgtggttcgattcaacaaagtcaactatgccaatgtatcaacaaacaactatgcttaggatgacatcgtggaagtggaatgagtccaatttataggtaattttgattctggtcatgctatcgcatgtactagcctaaagttttttcatgcgacaa

SEQ ID NO: 273199 - DNA, 410 bp, Glycine max
cccacgcgtccgcaccactcaatgtctcactccctgttcattttcttctctctttctcaaaaccctcactttaaggtcctgcacgccgtttcagcgtctttcttttgcgtcacaaccactgcgcaggctcatggctcgcgccaccctcggcctcactctaccagccaacaccgaatcccttaaggtttctttcgcggcaaaggagcttgacgtggcggaatggaaaggggaccttctcgccgttggcgtatcggacaatgacgtcacgagaaacgtggaatcgagattcgagaacgcgattctgagcgcgttggactccaagctgggcggcttgttgggccatgtctcgtccgaagaggacttcatcggcaaacttgggcagtccacgggtctaagaatcgcttccggac

SEQ ID NO: 273200 - DNA, 377 bp, Glycine max
gccacgcgtacgctcatgctagcgtgagaaagattttttcggcacccttcatcgcgtggtcttacacatcctcgtatgtcgaggccgttaaattcttcccataaacccgacggagacgataggagaatatatgaggttgaccgaaaccatacatatatactatggaagcccatcgcacggtacataccgcgatgagtctacgggcccattatctggcgaggcccacaactacatcaatgacgagattccaattgactacgattgaagcactagtcagctagctaacgaccgcataaacctatctcagatgccagtcgcacgaatggaatcactcgaagtagtcgcatctttgcttatttgagctgattcttaatacg

SEQ ID NO: 273201 - DNA, 390 bp, Glycine max
gcaaaacgcaagctcatgctaaaggtgtttaaatggcagcagcctcctgcatggctctgtctttcccatccttggctggcaaggccgtgaaactgggcccatcagcccacgaagacatgagggtcagcatgaggtagaccgtaaccaagcaggcctcctcctgaagcccatggaacagtccagaccgcgttaagtactatgggcccattctctggcgagccctcatactacctcactggcgagttcccaggtgactactactcgtacacagctgggctttccatcgacccagtaacctatcacagaaaccgtgagctccaatggatccactccaggtgggacatgctcggagccttgagctatgtcttacccgaactattgtcccgtaac

SEQ ID NO: 273202 - DNA, 436 bp, Glycine max
gaatcaagcttaggacttactgggtgcccttgatagaggattcctgcaagcagatattagatgctgcaaggactaccaacgcgaaaacaatgggacccgtgccattaccaaccaagaagcgaatctactgtgttcttaaatccccgcacgtacataaggatgcccggttccatttcgagatcagaactcaccagcgtatcattgatattctatatcctacagctcaaacaatagattctctgatgcaacttgatcttcctgctggtgttgatgtggaggtcaagctgtagagatatttgcttttcaggttgctaactgtcttgaatttgagtgaggatcaactggctatcaatagccaaaatatattggcagatatcatgtgcttcactgtctaaacttgatttctaagaacaatgcttaaagtccttacgtttgc

SEQ ID NO: 273203 - DNA, 395 bp, Glycine max
gttggcgctaacattttgttggttggggccttctccggagcagccatgaaccctgctgtgacatttgggcctgctgtcgtgagctggacctggaccaaccactggatctactgggccggccctctcatcggaggtggaattgctgggcttatctacgaggttgtcttcatcagccacacccacgagcagcttcccagcactgactactagaggggaaaaatgaaataataaaaaaaaaaaatgtgtattattgaatttctccggaatcttcttctgtgtatggttttccttcctttgtgttttctttcctgttgaatcggtggccgttgatctttggttggatggttgatgatcctgaagttttcttttaagttaatttaattatcattttgtgc

SEQ ID NO: 273204 - DNA, 348 bp, Glycine max
  unsure (1)..(348): unsure at all n locations
caaaatnctcttccggttcaggattagggttttaccgntacagtgaaacatggcaaaaccaaagcgaatctctctgcgtatctttgcgctgctcctcttgatttccacctcttcgtttcagcttctccgcgcttccgatgacgccgatgatgatgcgatcttctatgattcgttcgacgaggattgtgaagaccgttggggtgtgtctcagaaagatgagtacagtggtgtctggaaacatgccaagagtgagggacatgatgattatgggcttcttgtcagtgagaaagcaaggaaatatgctatagataaagaacttgatgaggccgtgagtctcaaggatgaaac

SEQ ID NO: 273205 - DNA, 393 bp, Glycine max
ctcgaactgttgtttggtctcttctctcttatccatggcatcaacgtttctcaccctagcaactcccttcctacacaaaaccaatgccatcagtttctctaacaagagaccctcatttttgcagaggagctctctgaagattcatgcaattaccaaaaaatgggaacccacaaaggttgtgcctcaggctgatagagttcttattcgtttggaggagctttcagataaaacagttggtggagttttgctgcctaaatcagctgttaaatttgagcgctatcttgtgggagaaatcctaactgttggtgctgaggctggagaactaaaggctggaacaaaggtactattcactgacatgaatgcttatgaggtggatttggggactgatgcaaa

SEQ ID NO: 273206 - DNA, 398 bp, Glycine max
agaaaatacatatccaatacatatggatttatacgctctaaaatcctcaagactatcgtggcaagcgtatgtggatgatcacctaatgtgtgaaatgagaagtatcctcataactcacgcggctttactacactaacaccgaatcgtttgaactaagagcgccatctatcatcaaatgacacatgacgtaataactgccatcaataatgacttgaatgatgctgaatcaattgatacacctgtattgtatatcagaggctactaatacatggatatccattgcgagacctggtgctatcatgagagggtagacagggcctggtggcgatactgggtagacgactggagctgacataatcagaggcatttatgataaacgaattactcactgacaatgc

SEQ ID NO: 273207 - DNA, 253 bp, Glycine max
agaaaatcctcacccattttcttcgtagccaaacactctgaaattctcagttatgtcggggcaagcgtatgtggatgataagctactgtgtgaaatcgaaggtaaccacctcactcacgccgctattatcggccaagacggatgcgtttgggctcagagcaccaacttcaattgtaaggagaacctgttgaaatatctgccatcaatattgactttaatgagcctggatcacttgctccaactggattgtata

SEQ ID NO: 273208 - DNA, 452 bp, Glycine max
aaacccactaagatggcttcctttgtatccttcctagtgctgcttcttgcagcccttagcctcatgcctcaagggcttgctacttactacaaaccaattaagaagccaccagtgtacaagcctccagtgtacaagccaccagtgtacaaaccaccggtttataagccaaaaccaccggtttacaagccgaaaccaccggtttacaagccaccatataagaagccaccatacaagaaaccaccttatggaaagtaccctccagtagaggacaacacccatgcctaaagcaagcaatgaggtctattatctacttaataaataagaggaactgctttgtgttttctagcattgtgatttacaacttcgtagcaatgcatattcttgactcttgcatgcacttcaatccttcgtagcattaatgatgtggccaaatcattatgagcatcatactt

SEQ ID NO: 273209 - DNA, 410 bp, Glycine max
attcattttggcatcgaggtttaatctcatcggagagagaaaaaccataaccatgtctggaagaggaaagggaggcaagggtctcggaaagggaggagcgaaacgacaccgtaaggttctgagggataacattcatggcataacgaagcccgcaattcgccgtctcgcgagacgtggcggcgtgaagcgtatcagtggtctcatctacgaagaaacccgcggtgttctcaagatcttcctcgagaacgtcattcgcgacgctgtcacctacactgagcacgctcgccgcatgaccgtcactgccatggacgttgtttacgccctcaagaggcagggcaggaccctctacggtttctgctgttagagaattaccgatttctgcattgcgtcgtggattatggttccttata

SEQ ID NO: 273210 - DNA, 323 bp, Glycine max
atgagtacgttgtacttcctcttttgttgttctgtgtttgtgtttgttttttctctcacctgaaaatgtcttgctgcggtggtaactgtggttgcggaagctcctgcaagtgcggcaacggctgcggaggctgcaagatgtacccagacttgagctacactgagtcaaccaccaccgagaccttggtcatgggagtggcacctgttaaggctcaatttgagggtgctgaaatgggtgtgcccgctgagaacgatggctgcaaatgtggaccaaactggtcctgcaacccctgcacttgcaagtgaagtgttgtgagagcaagc

SEQ ID NO: 273211 - DNA, 403 bp, Glycine max
gccacgcgtccgcccacgcgtccggagaaacaaagttagaagtaaagaagatcatggcggctctagcaaccttggctgctgttcaaccagctacgatcaatggccttgctggaagttccctctctggaactaagctctctttcaagccctctcgccacagtgtcaaatccaagaacttcaggagtggtgccgtggtatcatagtatggtgacaagagtgtgtactttgatttggaggatctgggcatcacttcagggcagtgtgacttgtatggcttatatgcaccttcactctacaaccctctttagagcaagtcctttgagaacattgctgctcctttcacaaagaggggattggtactcaagattctgatattggtaggtgtttctactcttgtaaactt

SEQ ID NO: 273212 - DNA, 290 bp, Glycine max
attattcttgattctgagtttaatgtgaagggaaggtgggagaaaccgggtcacagggcactatttgggtatgacttttggtaccaaccacgtcacaataccatgattagcacatcatggggagctcctagtgcttttacaaaaggttttaacttacagcatctatctgatggatcatacggtaggcatttgcatgtatatagctggcctgggggcgaactgagacatacattggaccttggggattcagggcttatacccttatagataaggtttttgcatgatcctgc

SEQ ID NO: 273213 - DNA, 386 bp, Glycine max
ctgaccactacatccttagctataatccaacctgtctatattcccgaaatccaaaatatacaatgtttgttcagcgtctattccaatctataacactatttatccacctctctatcttatcttcaaatatatcattcatccattattaatattaatttttaatataatttgtatatacatttacattccaattaatgcctttcatctattgctttctccatacaaatgatcttagaccattcttactattattcttactatcctgtatttaactacatctattcacacatttaaccttttatggagcctttcttattaccttttttcctttcttcttctttaaattttaacccaattctgatattattttttatctattttttatt

SEQ ID NO: 273214 - DNA, 101 bp, Glycine max
ctgacgcgtgggcggacgcgtggggagatttcatcatcctgtatttttggtttctgttttcggacttcaatggaaattaatggatgagaactaatgaataa

SEQ ID NO: 273215 - DNA, 432 bp, Glycine max
  unsure (1)..(432): unsure at all n locations
gtactggtcgcggtcgtcccaggcggacgcacgcgtgcgtccactcgtccgctagggtttacagagaagctaagaggcgcagccgtagcaaaagctcgtggaattgctagcaatggcgaggatcaaggtttacgagctgaggcagaagacgaaggctgatctgctgaatcaactgaaggacctgaaggcggagcttgccttgcttcgtgttgctaaggtcaccggtggtgcccctaacaagctttccaagataaaggtggtgaggttgaacattgcccaggttttgacggtgatttctcagaagcagaaggctgcgttgagggatgcctacaagaataagaagtacttgcctctcgatctncgncctaagaagaccagggctattcgcaggaggcttactaagcaccatgcatcattgagacagagagggag

SEQ ID NO: 273216 - DNA, 420 bp, Glycine max
atggcttctctggcaagcttagctgttgttcaaccatctactgtcaagggccttgctggaactaagctctctttcaagccctctcgccagagcttcagacccaagaatttcaggagtggtgccgttgtagcaaagtacggtgacaagagtgtgtactttgatttggaggatctaggcaacactactggtcagtgggacttgtacggctccgatgcaccttcaccctacaaccctcttcagagcaagttcttcgagacattcgccgctccattcacaaagaggggattgttactaaagtttttgatcctgggaggtggttccaccctggcatacttgagtgccacagcgtcaggtgacattctaccaatcaagaagggcccacaacttccaccatagccaggtccccgtggcaagatctaa

SEQ ID NO: 273217 - DNA, 356 bp, Glycine max
ccgagattgatcccatctgtgcccttcaggctctcatggaaggccttcgggttctgaccttggaggatgtcgcttctgaggctgatatctttgtcaccaccaccggtaacaaggacatcatcatggttgaccacatgaggaaaatgaagaacaatgccattgtttgcaacattggtcactttgacaatgagatcgacatgcttgggctggagaactaccccggcgtgaagcgcatcaccatcaagccccaaactgacagatgggtcttccctgagaccaacaccggtatcattgtcttggctgacggtcgattgatgaacttgggatgcgccacttgacaccccagttttgtgatg

SEQ ID NO: 273218 - DNA, 402 bp, Glycine max
cccacgcgtccggcgagacgagtccgtttctaattaatgataggtgtcaagtggaagttcagtgatgtatgcagctgaggcatcctaacagaccggcagacttggctattttggatgaaattgattctggtttggatgttgatgcgctcagggatgttgccaatgcagttaataggattctcaccccagaaaagtccttgttgatgataactcattataggcggattcttgatcttttgaatcctacacatgtccatgttatggacaaagggaaaattgcaaggtcaggcgacatatcgatgggagaagctattgaggctgatggatatgaaacagtctctgctttaacataatacagctagtatcgatggcagtattgcatgggctggcattcagtaattg

SEQ ID NO: 273219 - DNA, 422 bp, Glycine max
  unsure (1)..(422): unsure at all n locations
cccacgcgtccgcccacgcgttcgaacatgtccaactctgatggagccagtaacgccgtccctcccaacgacgccaacaacaacacaatcgttgagtaccagcagcgaaccaccaccaccaccaccgtcgtcgccgccgccctcgccgtcaagaaaccgccttccaaggaccgccacagcaaggtcgacggccgcgggcgccgcattcgcatgccgatcatctgcgccgcccgcgtcttccagctcacgcgcgagctcggccacaagtccgacggccagaccatcgagtggctcctccgccaggcggaaccctccatcatcgccgctaccggctccggcaccactccggcgagcttctncactgtctccgaccacaagcccctcctccctccccctacccccttcatcctcggcaaacgcat

SEQ ID NO: 273220 - DNA, 314 bp, Glycine max
cccactcgttcttccactcgtccgctcctcctcactatatattgcttgggtcgctggagtccatcgcttagaaaccaaaaggctctctcacgcagtcgcagtgagtgaaaaggaaaaccctaattgcggtattctcagtgccttcgagagaaagaaaaaatggcagataatcttgttctccgtggcaccatgctcgcccacaccgacgttgtgacggcgattgccactcccatcgacaactccgacatgatcgtcaccggctcacgcgacatatccatcatcctctggcatcttaccaaggaggacaagactta

SEQ ID NO: 273221 - DNA, 415 bp, Glycine max
atggctgcacaagctcttgtatcatcatcatctcttaccttctcagccgaggctacaagacaaagtcttggaccaagatcactccaatctccatttggcttctcaagaaaagcctcctttcttgttaaggcagctgctactccccctgtcaagcaaggatcagacagacctttgtggtttgcatcaaagcaaagtctttcctacttggatggcagccttccgggtgactatggatttgaccctctgggactttcggaccctgaaggaacaggagggttcattgagccgaaatggctagcatatggtgagataatcaatggtcgttatgcaatgttgggtgcagttggtgcaatagcacctgaaattctaggcaaggctggtctgatccctcaggagacagcactcccatggttca

SEQ ID NO: 273222 - DNA, 410 bp, Glycine max
  unsure (1)..(410): unsure at all n locations
gtactattgatgccaaggagctgaatgttgctatgagggcccttggatgggagatgacagaagagcaaatcaatcaaatgatagcagatgtggacaaggatggaagtggagcaattgattatgaagaatttgagtacatgatgacagccaaaataggagaaagggacactaaagaggagctcatgaaagctttccatattattgatcatgataaaaatggaaagatatccgcattagacatcaagcgcattgcaaaagagctaggtcaaaatttcactgacagagagattcaggagatggttgatgaagcagaccaagataatgatcgagagttagtgcggaggagttcatcacgatgatgaacagaactcgctttcatcactagtnctatctatatgggggcagttgat

SEQ ID NO: 273223 - DNA, 417 bp, Glycine max
aaaacacaagccaagtgaaagtgagaaaaaataaaaatcaaagagcatggggtcagggatcattcacaagattggggagacccttcatgtgggagggcacaagaaggaggaggagcataagggtgagcaccatgctggagaatacaaaggggagcaccatggtgaacacagtagtgagtacaaaggagagcatcatggtgaacacaaagctggagagtaccatggtgagcacaagccatagcacaaagaggggttcctagacaaagtcaaggacaagatccatggtgagggcggcgccgtcgagggcgagaagaagaagaaggagaagaagaagaaggagcatggccatgagcatggccatgacagcagcagcagcagtgacagtgattaaactgctgcatcacctatatatttaaa

SEQ ID NO: 273224 - DNA, 377 bp, Glycine max
ctgcctctcacccgcagggtttagagaaaatttaacaattagggttgctgctcctttgccgacccatggctcccaaagctgatagttcaaagaaggctgatccaaaggcacaggccttgaaaactgccaaggcagttaagtccggtgctaactttaagaagaagaccaagaacatccgaacatctgttaccttccatcgaccaaggactttgaaaaaggataggaaccccaaatatccacgcattagtgctccacccaggaacaagcttgatcactatcagatattgaagttttctctcacgactgagtctgcaatgaagaagattgaagacaacatcactttggttttcattgttgacttgcgggccgacaagaag

SEQ ID NO: 273225 - DNA, 382 bp, Glycine max
tccacgcgtccgcgcaaagagtttacatctgcctcctttttgcttcccagatcaaatctatctctgcttgaagttgaaaatggggctgtcgttcaccaagtcgttcaaccggctgtttgccaagaaagagatgcgcatactaatggtgggtctcgatgctgctggtaagaccaccattctgtacaagctcaagcttggagagattgttaccaccattcccaccattgggtttaatgtggaaactgtggaatacaagaacatcagcttcactgtctgggatgttggaggtcaggacaagatccgtcctttgtggagacattactttcaaaattcacatggactcatctttgtggttgatatccatgacagggaccgagttgtt

SEQ ID NO: 273226 - DNA, 298 bp, Glycine max
gaaaatgagtgcatcgaggttcattaagtgcgtcaccgtcggcgacggcgctgtcttcaaaacctgcttgttgatttcctacaccagcaacacttttcccacggactacttgcccacggtttttgacaatttcagtgctaatgttgtggtggatggaagcaccgttaacctgtggttgtgtcatactgctgttcacgaagattatcataaccttagacccttatgttctaggttagctgatgtatttatactcgccttttctctcataagcaacgcttactattaaaatattgcatag

SEQ ID NO: 273227 - DNA, 427 bp, Glycine max
tcgcggcgacgtgagcggttcgctgtccgcgacgttgtgagaagtccactggggcttatcatttagaggaggaagctaagagagccacggttttgtttccaaacaagaaatgatgtagatgtgcttgatgattgttacaaatgtaagaagtatggttagaaagttgtgaagaatagccttcacccaagcaaaatgaaaagaaagatgactccaatgaagtgccaagtagcaattatacagggattgagacagaaaaggatttttaggttgacacaataagccttagtgaggactcatctatacaataatgtatactagtggaactactggtgaaatgacattatgcaactttggttattcatagtaagtgttgcttttgtaaatagcttctttagtaaaagttaaatgatgacatacttgcaatgaa

SEQ ID NO: 273228 - DNA, 422 bp, Glycine max
ctcctgactggaatgagctaactgcagatgaggttatacacaagtttgatgtggttgaagtacttgaggattttactgtagggcatggtatagatgttattcctctggtcaaagtggctggattcaggacagtgtttcaccaccacttacatccaaaagaaattaggatcattccgagggaagagatgtttcgattctctcatcaaataccttcatatgtactcactggtcaagaagctccagaggctccaaagggttgcagggtgctggatccagctgctactccatttgaacttcttcaggtaatagaagttgtgaagaatggagacggggcatacaatgaagatagtgatgttaaaaagacaagtgatgacatgaaaaaagataacaatgaccaaatgatcgatgctatgggaaaacat

SEQ ID NO: 273229 - DNA, 403 bp, Glycine max
cacagagtgagatatagaatcactgaagagcttccttcaatggcgggttcttctctgtgtggtacttcactatggatctaccattaacgagctgaagaagcctgttgtggagaaagaagctccagggcatgccatatgagggcatgcacgtacggcctcggaggggaaccagaaaattatgttaacaaaataatctggaaccctaatgtatcagtgtcatcatcagtgtgtagtttaagctagctttgctatggttacgttctttgagatgagagtcttgatgaacagtaccattctgatgtattgctttccttgaaagttaatgcatgcttcttatcttctgtctaaaaaaaaaggactaaaaaaaaaaaataaaaatcaaacttaagactaatatgatgat

SEQ ID NO: 273230 - DNA, 200 bp, Glycine max
ctctttcctacctgccagaccttgatgatgcacaattggcaaaggaagtagaataccttcttaggaagggatggattccttgcttggaattcgagttggagcacggtttcgtgtaccgtgagcacaacaggtcaccaggatactacgatggacgctactggaccatgtggaagctgcctatgtttggttgcactgatgct

SEQ ID NO: 273231 - DNA, 397 bp, Glycine max
ccacgcgtccggcaagatggctaaggaaaaggctcagatcaacattgtggtggttggtcatgtggaccctgaggaggcaaccaccattaacgagctgaagaagcctgttgtggagaaagaagctccagggcatgccatatgagggcatgcacgtacggcctcggaggggaaccagaaaattatgttaacaaaataatctggaaccctaatgtatcaatgtcatgatcagtgcgaagacaaagatcgatttaccggagatggcccttctgacaagacagtggatatgaacagtgccaaaagggcaaagtgcttaaattgaaagctaatgcatgcttcttatcttctgactaaagaaatcatcatcaaattttattatttacatctatcattgccaaaa

SEQ ID NO: 273232 - DNA, 390 bp, Glycine max
cactttcgtggccacagcaccagtaacagtggcaggctcactacaagctgcaggtaccttgatgctacccaccaaggagcacatggacactctgaccctgaaatgtacacatttgcataatgtaacagctgtttgacttggaacccgctgcagctgaactcagtcgctcccttaagctcgatctcaaagatcacgctaaaaaatgcgtcgacaccatcaatgttgcatgattcgaccttgccacctaatatatccatggttatgaagctagtgcagactgcgttccaaagaagctaaccgttgactaaatccacagcaagacatacttgcaagtgaagggaactggaactgctaatcagagcccaaccattgaatgtagagtggactcat

SEQ ID NO: 273233 - DNA, 394 bp, Glycine max
cccacgcgtccgcccacgcgtccggccgaagaaggttcatccaatccccgaagcccttcaccgcattgcaaccatgtcgaggagaaaggtcagagagccaaaggaagaaaacgtgactctgggcccagctgttagagatggtgaacatgtctttggcgtcgctcgcatctttgcctccttcaatgataccttcattcatgtcactgatttgtctgggagggaaacgcttgtccgcatcactggtggaatgaaagttaaagctgacagagatgaatcatctccttatgctggtatgcttgcaacttaagatggtgcttgcagatgccagggacttggcataactggtcttcatattaaggttcgtgccactggtggaaaccagaccaagacacct

SEQ ID NO: 273234 - DNA, 317 bp, Glycine max
attgacttttcacttacaagtccccttggtggtggtcgccctggaagagtgaagagaagaaaccaaagggctgctgctaagaaggccgcaggtggagatggagatgaggaagacgaggattaaacttttaatcatgtctttttctagtgctattagaccttatgccaccttttactttgcgtacctagtttattgcttttttattggtatacattttcatccttccgttccttgtttgagataatattgagtgacattatgttttgtgaactagatatttaaatatttaaatttcattaataatttgattgtcgtta

SEQ ID NO: 273235 - DNA, 347 bp, Glycine max
cccacgcgtccgcttaataccaattttctagggtttatacaattttcgatggcttcttcagatgttgagtaccgttgctttgtcggtgggctcgcttgggccactgacgaccaagctctcgagagagccttctctcagtacggcgaaatcgttgaaacgaagattatcaacgatcgtgagactggaagatccaggggttttggatttgtgaccttcgcctcggagcagtccatgaaagacgccatcgaaaggatgaacggccaaaaccttgacggccgtaacatcactgttaaccaagctcagtcccgtggtggccgttgccgccgaagccgttgaagtggtggata

SEQ ID NO: 273236 - DNA, 280 bp, Glycine max
  unsure (1)..(280): unsure at all n locations
cccacgcgtccgagaaactttcctattcacatctgaatcagtgaacgaggggcacccttgaacaagctctgggaccagatctccgatgctgtgctcgatgcatgcttggagcaggaccctgacagcaaggttgcctgtgaaacctgcaccaagaccaacatggtgatggttttcggagagatcacaaccaaggccaacgtggactatgagaagattgtgcgtgacacatgcaggaacattggttntgtctctgatgatgttggtcttgatgctgacaact

SEQ ID NO: 273237 - DNA, 407 bp, Glycine max
cctgcaatagatttcaatgcagattatggcatgcggagatcatttagcgaaggagatataaagactcttggtaatggtaacatgaacatcgtccaatcaccccttgagaggcccttacttatcagcaactgcaccagtgaggaacgctttcaaaagctctcaagatacaggaataagaggacaaagaggaattttgggaggaaaatcaagtatgcttgcaggaaggctcttgctgacagtcagccaagaatccgtgggagatttgcaaggactgaagagtctgatgtcaagagggaatgaatgacttataactgaattagtatgaagaaagtacagttgagtagctatatctgatcaagctatatggaaaaactcagcagtaatatgtgaatagaacttatgtgggg

SEQ ID NO: 273238 - DNA, 386 bp, Glycine max
agaagatggcgtcgagcggagctttgccgttttggagggcagcggggatgacatacatcacatactcaaacatatgcgcgaagctggtcaggaattgcctcaaggaaccctacaaggctgaagccatctctcgtgagaaggtccattttgctctctccaaatgggtcgacgccaagcctgaaaaacctactattcgttcagacaccccagagcagtgatccggaatagttggaagctataaatgcataaatctttgagatctggaagttcattgtcattttgaacctttctgtgatgtttaattcctttgcttctttttttttcattccatgaaatggaacatacactggattttgatttgcatgattaatcttggaataataaaa

SEQ ID NO: 273239 - DNA, 412 bp, Glycine max
  unsure (1)..(412): unsure at all n locations
atacattgcaaaaatggcatcattcaccatgacagcttccatccttggctgcccagccgtcaccaaccggtcggcagcggcgacgcagaggagatcagtggtagtgaatgcagccagcaaatctgttgaaggggaaaaggtcagttatgacaacaatggtagcaatgcaaggaggaacttgatgttcgccacggcggcggctgctgtttgctcttttgctgcagggatggcattggcagatgagcctaaaccaggaacctcagaagccaagaaaaagtatgccccggtttgtgtcaccaatcctacaggtaggatttgtcgcaattgaggaactttnttgnttcacttttggaatttggaaatgtacaatgaatttgttgtaaggctttgatgatttcatttcatcctcact

SEQ ID NO: 273240 - DNA, 405 bp, Glycine max
gacccacgcgtccgcggacgcgtgggcggacgcgtgggttctagagagagcccatgagctactctacttgggaaccttgtatggattatacccaggtttgcacaacaaaactgtcgaagaatggtgtttagacgttcggtcattgtcggttggtgcagctctaactgcactggaagagtggatgtggacactcaccaaaatcgttaagcgggaggagacactgcctgagttattcctagcccatactggtactggtgctcataagtttgcccaaggactcaacatttcttttgcctctcatttgagaaaactagctggttcatttaagcagagtgaggaaaaagtaagctggtttattgcaagttgagaggatttaggctcttgggtgcaatcaaagtctactgc

SEQ ID NO: 273241 - DNA, 224 bp, Glycine max
gttggattcaacattgttgatgtcttggcttggggctccattggccatgttgttgcttactacatcttggccaccactagcaatggctatgaccctgcattctttggctgatttaatttcatcatcatgttgttccaactgtgtttcttgcttactttttagtatgtaatgtaatcaatgtcatgatgtataggttctctctaaagatccaacaagttcagcat

SEQ ID NO: 273242 - DNA, 322 bp, Glycine max
gaagatccgaacttctgtcactttccacaggccgaagaccttgaagaaggacaggaaccccaagtaccctcgcattagcgccccgccgaggaacaagcttgatcattatcagatcctgaaataccccctcaccactgagtctgccatgaagaagattgaggacaacaacactttggttttcattgtcgacctgcgtgccgacaagaagaagatcaaggatgcggtgaagaaaatgtatgacattcaggcccaaaaaagtgaacaaccttcttcaggcctgatggaaccaaaaaggattttttaaggtggcaaccggattcca

SEQ ID NO: 273243 - DNA, 405 bp, Glycine max
acccagaaaaacctgcacttctgattgacccagttgataggacagtagacagggacttgtcgatcattgagcaactggggttgaagcttgtgtatgccatgaacacacatgtgcatgcggatcatgtcactgggactggccttatcaagagcaaagttccttctgtaaaatctgttatttcaaaagcaagtggtgcaacggcagatctttatgtggagccaggtgataaggtccaaattggtgatctttttctagaagttcgtgcaactcctggtcataccaaaaggtggggtacctatggtactggagaagcacctgatcaaccttaacctaagatggcattcactggagataccctattaatacggggatgtggtaagacagattttcaaggtgggagttcaa

SEQ ID NO: 273244 - DNA, 408 bp, Glycine max
atttggatgaaccacaaatacaacatttgttgcagtccgctgaagccattagaaaagactatcctaatgaagattggttacatttaactgctcttattcatgatcttggaaagatccttatgcttccaagctttggtggccttcctcaatggtctgttgttggagatacatttcccctcggatgtgcttttgatgagtcaaatgttcaccacaagcatttcaaggacaatccggataacacaaatcctacttataacacgaaaaatggaatctacaaagaaggaattggactagacaatgttgtgatgtcatggggacatgatgagtatatgtatttgtttgcaaaggaaaacggcaccactttgcctccagtagcattgttcattatcaaataccattctttttacg

SEQ ID NO: 273245 - DNA, 274 bp, Glycine max
cgatccctttggggagataagaaaatgtggcttgtgcagctctcaaccccatttctgaacggccatggccatggctccagccttctctggaaacccagttcggcggtgactcagacccactgggccccgccgagtttgctgcctcaaatcaatgcgatgaagacgatgcagggaaaagtggtgtgctccacgaacgacaagacggtggcagtggaggtggtgcggctggcccctcacccaaagtacaagaggcgcgtgaggaagaagaggaagt

SEQ ID NO: 273246 - DNA, 257 bp, Glycine max
aagcgttcggtttgcgggcttactgcatcatgaacgctctttccattcttgtcttgttccgtgtcgtttgggcattagtttatgcgaagaaaactggcgatgtgactgagttgcaaattggcgtgaagcatagaccagcatcatgtgaagttctggcacacaatggtgacagagtcaaagtacactatcggggaaaactcactgatggaactggcttcgattctagctctggagaaatcatacaattgaatttgagc

SEQ ID NO: 273247 - DNA, 414 bp, Glycine max
cccacgcgtccgcacaaggcagaaagcaagctcatcctagagttttaaaaatggcagcagcctcctccatggctctctcttccccatccttggctggcaaggccgtgaagctgggcccatcagcccccgaagtcgggagggtcagcatgaggaagaccgtcaccaagcaggcctcctccggaagcccatggtacggcccagaccgcgtcaagtacttgggcccattctctggcgagcccccgtcctacctcactggcgagttcccaagtgactacgggtgggacactggtgggctttcggccgacccagaaaccttcggcagaaaccgggagctcgaagtgatccactccaagtgggccatgctcggggccttgggctgcgtcttccccgaactattgtcccgcaacggggtca

SEQ ID NO: 273248 - DNA, 248 bp, Glycine max
  unsure (1)..(248): unsure at all n locations
ctccgaattagggttttccaattcgcagagcaactcaacacaacgaaccaaaccaacaatgtcgcagccgcagcctcagtcgcagccgcaacacgggcaagcggcgctggagcaggtgcagtgcttcggtcgcaagaagacggcggtggccgtgacctactgcaagcgcgggcgcggcctcatcaagatcaacggctgccccatcgagctcgtcgagccggagatcctncgctttaaggccttcgagc

SEQ ID NO: 273249 - DNA, 398 bp, Glycine max
cccacgcgtccgcccacgcgtccgtttcgtttcatagggtttgcttttgtctacatggaagatgaacgtgatgctgagtatgcaatcagaaggcttgatagaacagaatttggtagaaagggtcgccggattcgtgttgagtggactaagcaagaacgtgacagtagaagatcaggtggtgattccagaaaatcttcatctaattcaagaccatccaaaactttgtttgttataaattttgatcctgttcatgccaggacaagggatctggagagacattttgattcctatgggaaaatattaaatataaggatcagaaggaattttgcttttattcagtttgaatcccaagaggacgctactagagctttggaggccaccaacctgagcaagtttat

SEQ ID NO: 273250 - DNA, 399 bp, Glycine max
ctcgtgccttgctgaaggtgagcgaatatcatagagtacctttgagacaggaaggacttcttacaagagattccagagtggttgagaggaagaaagttggtctcaagaaagctcgtaaagcccctcaatattccaagcgttgaggttgggatgttacatttgtaggtttttcgggttaggaaaagtaaagagaaattgaaaaatatccgaaggcgtatgtattcagaatcctgctccctgttttcccatctcttgtttccttgatctgtatggaattgggaattttaggtatgtaatatttgtctctcccttttacccccaaccaaaatcacatgttttactatattgcacgtttcttttcaagacctaaattttgtggtcttttactcttcatttctt

SEQ ID NO: 273251 - DNA, 362 bp, Glycine max
  unsure (1)..(362): unsure at all n locations
ccctttctcccttgtcttctcttttctcaatttcgctctctattgtcatcaattcacacatccaccgttcagttaaaaaccacccaaatccgatggcggcgtcgcggcgtctccgggacctccaatcccaaccggcgaacaagatctgcgtggactgttcccagaagaacccgcaatgggcctccgtatcgtacggcgtcttcatgtgcctagagtgctcaggcaagcaccgcggcctgggcgtgcacatctncttcgtgcgatccgtgacgatggattcgtggtccgaaatccacatcaagaaaatgggagcccgaagcaacgacaaactcaacggctttctcacgccataccggattccc

SEQ ID NO: 273252 - DNA, 387 bp, Glycine max
cccacgcgtccggaaaaaatataactttcgttcttccgaattttcgatgaggaaaatacatggagacgacctgaactgaagagacaataagagggtggatatggagctggtggtgggagtggtgaaggtggtggccacggtggtggatactacccttgagattaattgataaattacccaagaaaataacctagctagctccttgtggctatagtaacaataataacaaatgtatgggtacgagtacgtggattggtaaaactatttatgtattggattttacttttttatttttatggcttacatatatgtcgaatggattcaagacttacatcgatgtaaacgtattaatatagtaatacatattttgcaatatttttagattcc

SEQ ID NO: 273253 - DNA, 283 bp, Glycine max
ctaatccctatttttcttcctcagtagtttcatttacgcttctcttctctgcagcaactatgcctaaccctaaggtcttcttcgacatgaccattggcgggcaatctggtgggccgcatcgtgatggagctctacgccgacgtcactccccgaaccgccgagaacttccgggcgctttgaaccggcaagaaggccgtagggcggagcggcaagcccctccactacaagggctcgtccttccaccgcgtgatcccgagtttcatgtgtcaaggtggcgacttca

SEQ ID NO: 273254 - DNA, 259 bp, Glycine max
aagccttccgtggcacctattaatcaagatttgacatttaaagagaattttttttgctgggcaagtatttgacggacatggagggaagagcgctgcacaattcgttcgtgatcatctgccacgggtgattgttgaggatgctgactttcctttggaattagagaaggttgtcacaaggtcatttttggagatcgatgcatagtttgcaagatcatgttctactgagtctttcctgtcttctggtacaactgcactgact

SEQ ID NO: 273255 - DNA, 386 bp, Glycine max
cccacgcgtccgctctttgcgcagttccctacctctcctttcaagatgcacatcttcgtcaagaccctcaccggaaagaccatcacccttgaggtggaaagctctgacaccatcgacaacgtcaaggccaagatccaggacaaggaaggaattcccccggatcagcaacgtctcatcttcgccggaaagcagctcgaggacggccgtaccctcgccgactacaacatccagaaggagtcaacccttcaccttgtccttcgtctccgtggtggcatgcacatcttcgtcaagactctcactggcaaaaccataaccctagaggtcgaaagctctgacaccattgacaacgtcaaggccaagatccaggacaaggagggaatcccccc

SEQ ID NO: 273256 - DNA, 364 bp, Glycine max
gcgggcatcattcaccatgacagctttcatccttggcggcccagccgtcaccaaccggttggcagtagcaacgcagaggagatcactcgtagtgaatgctgccaaagctgttgaagcggaaaaggtcagttatgacaatgacatggatggtagcaatggaaggaggaacttgatgttcgccgcggcggcggcggctgatgtttgctctgttgctgggatggcagtggcagatgagccaaaaccaggaaccccagcagccaagaaaaagtatgctccgatttgtgtcaccatgccaactgctacgacttgtcgcaattgagggactcggcttttattttacttatgatgatcggaaatgtgcatt

SEQ ID NO: 273257 - DNA, 285 bp, Glycine max
gttctctctccccctccccgattcgttttgcccctttcgttgccctaatttcaaccatgcctcgccgtagctccggtggaagatctgcccgtcctgctcctcgtgcagcacctcgtcctgctccagttcaccatgctcctcctccagcccctgctcagagcggtggcggatctatgcttggtggcattggttcaaccatagctcaaggtatggcttttggcactggaagtgcagtggcacacagggctgtggatgctgtcatgggtcctcgtaccattcaacatg

SEQ ID NO: 273258 - DNA, 193 bp, Glycine max
  unsure (1)..(193): unsure at all n locations
cccacgcgtccggtttcagtgagtgatcggtgttcacttgatccttcataagtcgtcatcatcatcatcatcatcaccgttgattgaagaagatgccgatcagaaacatcgccatcggaaggcctgaagaggctactcaccccgacacgttgaaggcggngttggctgagttcatctncaccttgatcttcgt

SEQ ID NO: 273259 - DNA, 296 bp, Glycine max
cgtccgctctccgcagcagccacacttcttcgccgtttcagctgaagagccatccgcaggtaagcaatggttaagcataataatgttatccccaatgggcacttccggaaacactggcaaaactatgtgaagacttggtttaatcaaccagcccgaaagaccagaagacggttggctcggcagaagaaggctgtcaagattttccccaggcctactgctggatctctcaggcctattgttcatggccagactctgaaatacaacatgaaagtcagagccggtagaggattttcact

SEQ ID NO: 273260 - DNA, 387 bp, Glycine max
cccaaatcaatttctctctctctctctctctcgctctctgatctgttttgtttcaggagccacccgctcctgcagttttcttttgcggttggagtggaaggccattctcgcaacgtttgagttcagcagatccagaatttttcagaaaacaggtttaggagaatgaagaatacggaacgaattgccaatttggctttagcaggtttaaccttagcgcctcttgttgtgaaagtagatccgaatttaaatgttattttgactgcttccctcactgtgtttgtgggctgttaccgctccgttaaaccaaccccaccaactgagacaatgtccaatgaacatgccatgcgttttccctttgttgggagtgcaatgttattgtcactcttc

SEQ ID NO: 273261 - DNA, 400 bp, Glycine max
tcgacccacgcgtacgaagctttccaaaagtcttacttcaacaagtatggtggtggggctaattccctggctgatgggtacagcacaggtactggattgggtgctgagatcattggcacctttgatttggtgtacactgtcttctctgccactgaccctaataggaatgctagacattcccatgttccggatttggctacacttaccattggatttgctgtgttcatggttcacttggccaccatcccagtcactggcactggtatcaaccctgctaggagtcttggagctggtgttatctacaaccaagataagccatgggatgaccattggatcttttgggtaggaccatttattggggcattcattgcagccttctaacatcagttgattttgagag

SEQ ID NO: 273262 - DNA, 246 bp, Glycine max
aacgagtggatatacgatagtataaataatggtgtttataaatgtgggtttgcaaagaagcaagaaccatacaatgaggctgcaagacaattgtacggggctttggacaaatgtgaggatatactaagcaagcaacgctatatatgtggcaatacactaactgaagcagacattcgtttgtttgtcactcttattagatttgatgaggtttatgctgttcacttcaagtgcaacaagaagctgcta

SEQ ID NO: 273263 - DNA, 340 bp, Glycine max
acgttgtgagaagtccactgaaccttatcatttagaggaaggagaagtcgtacacgtttaaacggagttctaaatttccggcgagttttcctctctcgaatctgcgacaccgacgaatctcactcaccggaatttcggattcagaaaatggctttaggtggaacagctcccccaagaggaagtgcagcggctactgcaagcatgacgagaaagagaacacccggggggcggctctgaggagcagctggaactatgctccaattttacacagatgatgcccctggactcaagatcttcccaaatgttcgtctttgtatgagcattggcttcatagcatttg

SEQ ID NO: 273264 - DNA, 406 bp, Glycine max
ggctattttcctaatcgaccgaacattgttagaaccaaaatacctacagaagatccttctaaggaagagtgggaaacttttctaaacaatcctgagcaaactcttttggagtctttcccatcacaaatccaagcaactacaatgatgttagtttttaacatactatcatatcattccccagatgaagagtatattgggcaatacttgaagccatcatgggctgaggatccaactataaaggcatcctttgaaaggttcaatgggagactcaaggaaattgaaagtattatagactcaaggaatgcagattgtaatatgaaaaatagacatggtgttggggtggtgccttatgagcagatgaagccattttcaggacctggaatcactggaaaaggaattccatata

SEQ ID NO: 273265 - DNA, 223 bp, Glycine max
cccacgcgtccggaagaagggatacgaggttctttatatggttgatgccattgatgaatatgctgttggtcagctcaaggaatttgagggcaagaagcttgtctctgccaccaaggaagggctcaagcttgacgagagtgaagatgagaagaagaagcaagaagagttgaaggagaagtttgacaacctctgcaaggtgatcaaggatgttttgggtgacaag

SEQ ID NO: 273266 - DNA, 435 bp, Glycine max
accggtccggcagtcccggtcggcccgcgcgacccacgcgtgcggccacgcgtccggtacattctaaggaaactcctcagatcgacctcgaaaccagggggcggagactcttctcttggtcaaacctcaaatccctacacacaggactctctccttctcgtccccgactcgccggccctctcctcacccgccacgtgaccgctcattcaggtgcttcttccgtcaaaaggagggttgaagatgtcgggccaattgctaccggccacgagcgtgaggagattcaggctgatcttgagggaagggatattcttgaaataaaccatcccgtcggaccttttggcacaaaggaagcacctgctcgcgttaaatcttactttgacagaaggatagttggatgcccaggagatgaacgcgaagatgagcatgatgttgtct

SEQ ID NO: 273267 - DNA, 352 bp, Glycine max
cccgctctaacaagaactgcaagcagcgcggtcacgttagcgccggccgctgccgtattggaaagcaccgcaagcaccccggcggtcggggaaatgcctgctgcatgcaccaccacaggatcctgattccacaagtaccagccgaagttcttcataaaagtatggatgatgtactttcataagctccgcaacaaattctactcgcccatcgtcaacatcgacaagctatggtctctgataccccaagacgcgaaggacaaagccctaaaatcgaaggacactgaccctctaatcgacgatactcaacacggttacttcaaggttctaggaaaatgtgtgctgccccaaaacc

SEQ ID NO: 273268 - DNA, 404 bp, Glycine max
cccacgcgtccgcccacgcgttcgcttaatcgatcatcacttcacttcggtaatacatcatggcagacgagacccagaacaagtatgagagctctgaggttgaggtccaggatcgtggtgtttttgactttctcggtaagaaaaaggatgaagaagacaagcctcatcctcaggaggaggtcatcgccaccgagtttcaaaaagtcactgtctcagaccaaggagagaacaagcacagcctcttagaaaagcttcaccgatctgacagcagctctagctcttcaagtgaggaggaaggagaagatggagagaaaaggaagaagaagaagaaggaaaagaaagggctgaaagagaagatcgaggagaaaatagagggtgatcatcatcatcacaaggatgaggac

SEQ ID NO: 273269 - DNA, 395 bp, Glycine max
gtgagtttggaacttgaaagaaactagaatggccactttagacgaacgcgcttctgcgaaaaggtggcttcctctcgaagctaaccctgacgtcatgaaccagttcctttggggtcttggccttccagtggatgaggcagagtgcggtgatgtgtttggcttagatgaagagcttctggaaatggttcccaagccagttctcgccgtgctttttctttatccaattaccgcgaagtctgaagaagaaaggttgcaacaggaaaacgtaaaaaaggattatagcagtaaagtatatttcatgaagcaaaccgtgggtaatgcttgtggtacaatagggctgcttcatgcacttgggaacataacctctgaagtcaagcttgttgagggttcattct

SEQ ID NO: 273270 - DNA, 398 bp, Glycine max
atataatgtcacaagatggaatcgtgcaccatagctcctgttgaactcggttgattacactgcactaatagatgtatgggctcgtaagttgtatttctcatggaactgatggatcgcaagcctttgtttgactggcaaagatcattgtcatcagttgcgactacttatggagctgataggcacatcattaaaggctgatttgcggtagctgaatgaaaatgctaacagatacattaggcaactacctatttaccgctgtcaatctatccaggaaaagtgcacacatgtacatcctgaagctatatatcttgttcgatagatggtaacttttgatcctcagcagaggattactgttgaagatgcactggcccatctgtactcgacatctctgcatgaca

SEQ ID NO: 273271 - DNA, 397 bp, Glycine max
gcaagtgatcgaagcgaaaagagagaaattcatcgtcgcagtaatcatgggtaaggttcatggatcacttgcacgtgctggtaaggttagagggcaaaccccgaaggtggccaagcaggataagaagaagaagccacgtggccgcgcccacaagaggatgcagtacaatcgccgattcgtcaccgccgtggtgggattcggcaagaagaggggacccaactcgtctgagaagtgaggccgaggcttgaggaatatgttgctactctatttgatttatctttgttgttttttatttatttttaatttgtatgttttgattgtgttctgtgaacggtttttgttagctttatatcaaacttgaaattttgcatacaatatctaactatctaagttcatt

SEQ ID NO: 273272 - DNA, 401 bp, Glycine max
cccacgcgtccgatcacaagaacaagcagcattagcaaccaagcaagagaatggcgacgacagcagccttgtgcggcactatgatgagcagctccttcctgaggagaaaagcagtggtcacaagcctgaaggcattccccaatgctaacgcagtgtttggtgtaaagggtggacgtggaggtggtgtgactgccatggctagcttcaaggtgaagctgataaccccagagggagagaaagaatttgaatgcccagatgatgtatacattcttgaccaggcagaggaggaagggcttgagcttccctactcatgcagggctggttcttgctctgtgtgtgctggcaaagttgtatctggcaaagttgacaattcagatgccaccttccttgaggatgaacaa

SEQ ID NO: 273273 - DNA, 403 bp, Glycine max
cccacgcgtccggaatgggtcaagcacgaaggctcagtcgccaccattggtatcactgaccatgcccaggaccatcttggagaggttgtgtatgtggagctgccagaaccaggtggcacagtttccaagaagtctggcttcggagccgttgaaagtgttaaagcaacaagtgatataaactctgcaatctcgggggagatcgttgaggttaacaaaaagctcacagaaacgcctggcctggtcaactcaagcccatacgaacatggatggatgatcaaagtgaagccaagcgatccatctgaattagattccttgatgggtccaaaggagtacacaaaattttgtgaggaagaacatgcaagtcattaaagtttgaattgaattggctcctgcagttatgtgt

SEQ ID NO: 273274 - DNA, 401 bp, Glycine max
cccacgcgtccgatggcaacttgtttcgctccgttctccgtttcaggtggatctgatgagctgtggttaacaaagcgagttggacctaagctcactgttcaaaggagatcaaaccttgtgatcaagaggaaccacacttcttcaattagtgcagaataccgtgataatagaggaggtggaggtggggattttgttgctggctttcttctgggtggtgcagtttttggaactctagcttatatctttgctccccagatcagaagatctctgctaaacgaagatgagtatgggtttcgcaaggccaaaagaccaatatattacgatgaagggttagagaggaccaggcagaccttgaatgagaagataggccaactaaactctgccattgataatgtatcttc

SEQ ID NO: 273275 - DNA, 405 bp, Glycine max
gaaaaaataaaaatcaaagagcataatgtcagggatcattcacaagattggggagacccttcatgtgggagggcacaagaaggaggaggagcataagggtgagcaccatgctggagaatacaaaggggagcaccatggtgaacacagtagtgagtacaaaggagagcatcatggtgaacacaaagctggagagtaccatggtgagcacaagccagagcacaaagaggggttcctagacaaagtcaaggacaagatccatggtgagggcggcgccgacgagggcgagaagaagaagaaggagaagaagaagaaggagcatggccatgagcatggccatgacagcagcagcagcagtgacagtgattaaactgctgcatcacctatatatttaaaaggtttatggga

SEQ ID NO: 273276 - DNA, 396 bp, Glycine max
atttaatgcctaaagacccattcttcttccataactcctctgcactgccgtcattctcaactttctcacacggttacaaggactaaagagtcgtgccaccatgtccgacgatgaaagggaggagaaagagttgcatctgtcttgtgccgaagttgtcactacatacacaactgctgctgacatcgttaacaaggccttgaacctaggcatatcacaatgtagaccaaatgctaagattgcggctatttgtgagaaaggagattcatacattagagagcacactggaaatgtgtacaagaatgtgaagaggacgattgagagaggcgttgctttcccaacatgtttatcaatcaacaacatggactgccatttctgtacactagccagtgatgaggc

SEQ ID NO: 273277 - DNA, 248 bp, Glycine max
aaaaaataaaaaaaaaaaaagaatctatataaatataaaaataggatatgtaaggtacaaatagtaaatcgaggtacccattttatgataaactttccttccatttttgttcctctagtaggcctagtatttccggcaattgcaatggcttctttatttctttatgttcaaaaaaacaagattttttagatacagaaaacaaagtaaaattctggggttttttattccccaattataatactaaattc

SEQ ID NO: 273278 - DNA, 407 bp, Glycine max
agcaatttcccttatctctctccatcttaactccaagcacaaggatcagcttcccattacgtttctgaccaatggcttccctcactgtcccaaaccattgtattcccactttgcttcgcactcactctctcaactacccatcttcccaaaacctcccacttacttccgcgccatcaaattctcaattttttggcctcaagctatctcattcttccttttccacaattccctcttcttcttcttcactcaaaggctccattttcgccaaggtgactaaaggttcaaagccaccgaattttacgctaaaagatcataactggaagaatgttagcctcttcaacttcaaaggaaaaccagtagttgcgtatttctaccctgctgatgagacccctggctgtaccaaacag

SEQ ID NO: 273279 - DNA, 404 bp, Glycine max
gaaggaaatggcttcctcaatgatctcctccccagctgttaccaccgtgaaccgtgccggtgccggcatggttgctccattcaccggcctcaaatccatggctggcttccccacgaggaagaccaacaatgacattacctccattgctagcaacggtggaagagtacaatgcatgcaggtgtggccaccaattggcaagaagaagttcgagactctttcctacttgccagacctcgatgatgcccaattggcaaaggaagtcgaataccttctaaggaaaggatggattccttgcttggaattcgagttggagcacggtttcgtgtaccgtgagcacaacaggtcacctggatactatgatggacgctactggaccatgtggaagctgcctatgtttggctgca

SEQ ID NO: 273280 - DNA, 404 bp, Glycine max
ctcctctcttgtctgtgcaatcaaaacaacaacattcattcatactgatcacttgcttgcctattgcacattcttcatcacttcattcaacatttctctctcccttagctagtttttaccaatggctgctgcggttagtgctgcagtctcttttccatccaccaagtctacctctctcccaagcaggacctccatcattaccccagagagagttgtattcaagaaggcttcattgcaatacagagatgtttgtagcagtggaagggtagtttccatcagagctcaagtcaccactgaggctccagccaaggttgaaaaagagtccaagaaacaggatgaaggtgtggttgtgaacaagttcaaacccaagaccccttacgttggtagatgcctgctcaacacaa

SEQ ID NO: 273281 - DNA, 394 bp, Glycine max
gggtttttgagtgcggtgcggcgatcctagcactctcttgcagctttcgccgacagcttcattcaccatggctgagcaaaccgagaaggcttttttgaaacaaccaaaagtgtttctcagctcgaagaaaactgggaagggaaagagacccggaaagggtgggaaccgcttttggaaatccattgggcttggatttaagactcccagggaagccatcgaaggaacctacattgacaagaagtgccccttcactggcaatgtttccatccgtggccgtatcttggctggaacatgtcacagtgctaagatgaacaggactattattgttaggaggaattatctccattttatcaagaagtaccagaggtacgagaaaaggcactccaacattcct

SEQ ID NO: 273282 - DNA, 407 bp, Glycine max
atggctacttcatcaaccacattattgctatcatcactcatacctgcgggcattccatcattcaactctggaaaccattcagtttttttgcttcaaaaccgttctttgaatcgacccaagaagagagtttacttcgttgttcaagcagccaagccccctattggtgtggaaattccaaaggtgcagcctcaatttaagccttcgtttcttgggttcactaagactgcataagtatggaactctagagcttgcatgattggaatcattggagtttatattgtagagcttataataaacaagggcatacttcaagtgattggggttgatgttggctaaagccttaatattcctctctgaacattatttttggctgtgctcgtaaatgttgacatatattaagtcaatgt

SEQ ID NO: 273283 - DNA, 408 bp, Glycine max
ctgatgccagggtttgtccactatgaggggcatggctgctaaaccggcgagtacggatcggtgcgttggcctgaacaagggctacggctttacctataaggactatgttgctctcccattatatcgtagggggataaccagcaagagggtgcactttgtgagggaccttgttagagaggtagccattattgcaccctatcaatagtgtataactgaggtgctgaaggttgggaaggataagagggcactcaatgttgcagagagaaagctacgtacacacacacgcgcagagatgaatcgtgtgtaaatgtacagtagttctaatgaagatgacggctggtgacgctggagacactaagaaataagtcttatttactgacttacagattcactaaatggacctgtgta

SEQ ID NO: 273284 - DNA, 327 bp, Glycine max
ctcagacgtgcgtttctgcattatctagaacccagctgataaaaccgggggccgtgccagggccgtcatcgttgcctaatgcaccggcctcacttccatggatgtctttcttacgtggaactctaacagtgacattacctgcattgctatcaactttgtaagagtgcaatgcatacaggtttggccactaattgtctagaaaaagtgcgtgactcttttctacttggcagacctcgattataccgcatttgcaaaggaagtcgtatacctactaacgaaaggatgcattcctagcttgcaattctagattgagcacgctttcatgta

SEQ ID NO: 273285 - DNA, 401 bp, Glycine max
ctttgacattcaacagttgcagagtgaaacgatgccgtgcctcaacctctccaccaacgttaacctagacggcgtcgacacctcttccattctctccgaagccacctcaactgtcgccagcatcatcggcaaacccgaggcctatgtgatgattgtattgaaaggatcagtgcctatatctcatggtgggagtgagcagccagcagcttacggtgaattggtgtccattggtggtcttagccctgacgtgaacgagaaactcagtgctggcattgcttcaattctcgaaaacaagttgtctgtgccgaagtcccgattctacttgaagttttatgacactaagggttccaattttggatggaatggatctacattctgaattccgagttatcttggtaacg

SEQ ID NO: 273286 - DNA, 399 bp, Glycine max
cccacgcgtccgattaacctttctcattccccatctgctcaccttattcagccactgctaatttctagggttccgaaatggacgctggcggaaagatcaagaagggcgccggaagaagaaagggcggcggccctaagaagaagccggtttcaaggtccgtcaaggccggtctacaattacccgtcggaagaattggccgttatttgaagaaaggaaggtacgcccagcgtgtctgtaccggtgctcccgtttacttggacgcagttctcgagtaactagctgctgaggtgcttgagttggctgggaatgctgcacgtgacaacaagaagaacaggattattccgagacatgtgctattggctgtgaggaacgatgatgagttggggaaattgcttgctg

SEQ ID NO: 273287 - DNA, 407 bp, Glycine max
cccacgcgtccgaagaatattgttgtgcctctactctcgaagaagatctgtaagaatagggtgaagaagttcaagaggcctcatagtgacaggaaaatttctgtcaagacagtactatcgctgactataagtgtattgattccagttttagtagaaagcacatgggattcactttgatcccctatattgcttttcttacactattttaaacgactttctttcatgattgtcgtgttaatagttttggtgatttacttgtcatattctttgtcatatttactatgcttattgtttgtacttatgtttatgtttctatactgttttttatattttttactgattattttatttatctttccttttcttactattttttttttttttttgatatatttcatttttttttt

SEQ ID NO: 273288 - DNA, 388 bp, Glycine max
ttaactcgcacaagcaaccatttacagatataaaatcctaagggtatagggaacatattattaagctggtaactattttgaacaccatgtgaaggagttaaaagaccagtgttattaatgttgatggagaaacgtttaagctgaatacttcagtcatagcatacgacttacttttattattattctgtgtttctatttgttttatttttatgtgtttatacattttttgcttatttccttatctttttattctttattgtttttttatgttgaaattgatttactttacacttttgttaccaatattttttgttttatatgtatttatctttgtttctttatttttttttttattatttttatatttttttttttttctttttttttt

SEQ ID NO: 273289 - DNA, 228 bp, Glycine max
cccacacgtccgtccacgcgttcgggtggctgtccagttggcagcaaggggagcttttagggaaggaataacaaatgctggaccgaggatgcttgagcctataatgtacgtagacgttgctactcctgacgaacatgtaggcgatgtaatcatggatctcaactcaagaagagtacagatcaacagttttggtgacaaacctgttggtcttaaagtggttgagttcct

SEQ ID NO: 273290 - DNA, 403 bp, Glycine max
agtgtacctgttgtatttgcttctcctgaaggttggtcgaataacaaagatgttgtattttccggtacatcattatggattggattagtgtttctcgtgggtattcttaattctctcatttcttgaagctctatttattctagatcaaaaacgaaatgacccctcccccagaattctttcggattgtcgggcacattaaaaaaggaatggataagttcctaaaaataaagaaaactataacacattataaggaggggtcaaatattaattaagataaaagatatagaatatctatctgtatatatatatatatagatataatttattaataattagaactttcttttttcttaaaaaaaaaaaaaagtaaataaaaagatttgatagaatcgtaatttcaatt

SEQ ID NO: 273291 - DNA, 403 bp, Glycine max
cccacgcgtccggatcgagataactagaaacagtgtgatgaaaatgaaggtccttgttttcttcgttgctacaattttggtagcatggcaatgccatgcgtacgatatgttccctctccgaatgaacactggctatggtgcccgtactccggaggtgaaatgcgcaagttggaggcttgctgtggaagcacacaacatctttggctttgagaccattcctgaagagtgcgttgaagcaacaaaggaatacatccatggcgaacaatatagatcagactccaaaacagttaaccaacaagcttacttttatgccagagacctcgaagtccatcccaaggacacatttgtgttcagtatagatggcaccgtactctctaatattccatactacaaaaaacatgga

SEQ ID NO: 273292 - DNA, 347 bp, Glycine max
ggctttctttattctctccttcctcttccttcttcttgtttcatgtgccgctgcttgtgatcgctgcttgtatcaatccaaggcttcctatttctccaaagcttctgctctttcatctggggcatgtgggtatggctctttggcactagacataagtggtggacaccttgcagctggtgtggattctctcttcaaaaatggagcaggttgtggtgcctgctttcagataagatgcaagaacccaactctatgtagcaaagaaggtaccaaagtggtattgactgatcttaatcacaacaatcaaactgattcagtgctaagcagcacagcctttgcggtcatggctc

SEQ ID NO: 273293 - DNA, 403 bp, Glycine max
cccacgcgtccgcagccatgtcgatcttttctattccctcacgaacgtgccgttgttcaatttcaatttcaatttctcggcagccattgccatgttctttcacggctcaagtgagaagaacagggaaagggaaagtggtaatgagcatggaggcaggcattggagtgatgggcaccaagttgggtatgatgagctatttcgaatccgacggataggttgttcctgtcactgtcgtgggtttcaaagaaggcaacatcgtcacccagatcaaaactgaggccaccgatggatacgacgccgtccaggttggttaccgaagggtcagagatcgcaaattgaccaaacccgaaatccgtcatctccagaaggtcggcgccattcccatgcgccatcttcaggagtt

SEQ ID NO: 273294 - DNA, 402 bp, Glycine max
cccacgcgtccgcaagatccaggacaaggaaggaattcccccggatcaggaacgtctcatcttcgccggaaagcagctcgaggacggccgtaccctcgccgactacaacatccagaaggagtcaacccttcaccttgtccttcgtctccgtggtggcatgcagatcttcgtcaagactctcactggcaaaaccataaccctagaggtcgaaagctctgacaccattgacaacgtcaaggccaagatccaggacaaggagggaatccccccagaccagcaacgtctcatcttcgccggaaagcaacttgaggacgggcgcaccctcgccgactacaacatccagaaggaatcaacccttcacctcgtcctccgtctccgtggtggcatgcagatcttcgttaa

SEQ ID NO: 273295 - DNA, 405 bp, Glycine max
  unsure (1)..(405): unsure at all n locations
cagtgactgacttttcgagaaagacaaacanagatgagtttccgtcattggatgatgaacgctcttcccattctcctcttcttcctcttcggttctgcattagtttctgcgaagaaaactggtgatgtgaccgagctgcaaattggcgtgaagcataaaccagtatcatgtgaaggtcaagcacaccaaggtgacagagtcaaagtgcactatctgggaaaactcactgatggaaccggtttgagatctagctctgagagagatatattccaatgagaatgagctctggactcggcacatgagctcaagggttgacaccagggattattgggaatgtgtcttggtgagaagcggaagctgaaaataccatcaaaacttggctatggagagcagggttccccaccc

SEQ ID NO: 273296 - DNA, 394 bp, Glycine max
ctcattcttcatccatagacatggccaccgtcacttctgcagccgttggggttccctcattcactggcctcagggcaagcgcaggcaaagtgagtgccgcagttaaagtctcagctccccaagccacatggttgggcatcaaggcttcgctgaaagacgtcagagtcgctgttgcggccactgccgcgagtgcagtgctgtctagcaacgccatggccattgaagtgtcgctgtgtggtgatgactgctctctgtctatcgtacccaacaatttcttcgtggcctcttgtgagaagatcgtgttcaagaacaacgcaggtttcttccacaacgttgtgttcgacgaggacgagattcctagctgcattgatgcatggaaaatctccatgagcga

SEQ ID NO: 273297 - DNA, 266 bp, Glycine max
caacatggcacatgggatacatacgcttaatcccaattccaattgccagtgaaccccaagttcctaaatccacaagtgcactaggtgttggatgtattaagctgaatcatatagctcattctaagctggctttgaaaaaagattcaatgcttatgcaaaatggtacgtctctctactactacagcttaacaattttctgcctgcgtgcttaacatagttggtatgtcttagtggtgccagacactatataattgccgatgatttta

SEQ ID NO: 273298 - DNA, 403 bp, Glycine max
cccacgcgtccgccttcacccaatcactgggttagtacggacacaaacgaagaagccatactcacatcacacaacacaaccatcctcaagccaacaacaccttctcagatcttacaatgatatttcaatcgtgttttatgatgactgcaactctgctattatttgttatagcacaatgtgttgtgggagttaattcactttcacaagctgataagataagcactttgccagggcagccaccagtcaaattccagcaatatgctggttacattacagtggacgacaagcagaagagagccttgttttactactttgttgaagctgaagtggaaccagcttcaaagccactagttctatggttaaatggagggcctggttgttcttctgttggagctggagcttt

SEQ ID NO: 273299 - DNA, 393 bp, Glycine max
ggcccttcttctggtgctggctctagttctggtgctggtaattctggagcccgttatgctgcacccagaaatgattatcgtcctgggtatggtggtggtggtggacgtacaggtggatggggaaacaaaagtggtggatgggatcgtggcagggagcgggaagtcaatccctttgaagaagaggataacgctgaagaggcattcagtgagcaggagaatacaggaataaattttgatgcatatgaagacattccagtggagaccagtggtgacaatgtgcccccacctgtgaatacgtttgcagagattgatttgggtgaagcacttaatcagaatataagaaggtgcaaatatgtgaagccaacacctgtttagcggcatgccataccgata

SEQ ID NO: 273300 - DNA, 402 bp, Glycine max
agcaaaacaaaagccataggttactactcttcgccttttcctttgcaagtgttaccaaacaattcttgcttagcccttacaagcaagcattaacaacaatgaagaaagtagtgttaaaggtgggcttacatgatgatagaatcaagcgaaaagttatgagaacagcatctggtctttcaggggttgaatcagtttctattgacatgaaagacgagaaaatgaccttattagggaacattgatccagtgaatgcagtgtgcaagctactaaagtgttgtcaaactgaaatagttacagttggtccagcataagaggataaggagaaagagaaggtggagccagtaaaagaacctgttcctatcaaactctatgatgcctatccgtattattatcaaatgacac

SEQ ID NO: 273301 - DNA, 399 bp, Glycine max
  unsure (1)..(399): unsure at all n locations
gtttgcagtcactgctctgtttcaccgagtttgggcgtttagatcagaaccaaatcgtgttctcttccattggcaaacatggcaactcaaatgagcaagaagagaaagtttgttgcggacggagtgttctttgccgaactgaacgaggttctgacacgtgaattggcggaggacggttactccggcgtcgaagttagggttacgccgatgcgcaccgagatcatcatcagagccaccagaacccaagccgttctaggtgagaagggaaggagaattagggaacttacctcagtggtgcagaagaggttcaaattccccgaaaacagcgtcgagctttatgctgagaaggtcaacaacagaggcctgtgtgccattgctcangccgagtcgcttcgctac

SEQ ID NO: 273302 - DNA, 396 bp, Glycine max
cttctgccaatgctgggatcattgatgattaccttgagaggagcaaggctaacgaggaattgaatgacaagaagaggttagctactactggagcaaactttgcaagagcatacaccgtggaattcggtagttgcaagttccctgagaacttcactggttgccaagatcttgccaaacaaaagaaagtgccattccttagtgacgatttggagcttgaatgcgaaggaaaggacaaatacaagtgcggttctaatgttttctggaaatggtgaaaggaggcaaccttttatgaccaactgcgaattattcgctttgcgatgtacctaactgcttgaatatataccatatttttctgcattgctttcagttattatattgttggtgttggattttagt

SEQ ID NO: 273303 - DNA, 402 bp, Glycine max
agcaattcgaattcccaatccaaaaccctaataccttcaaagaacctaggagtgaatcagtgatggcacctaaggcagagaagaagccagcggagaagaagccggtggaggagaagaagtcgacggtgggagacaaggctccggcggagaagaagccgaaggccggaaagaagcttccgaaggagggaggagccggcggagaaggggggaagaagaaaaagaggaacaagaagagcgtggagacatacaagatatacatattcaaggttctgaagcaggtacactctgacattggtatctcaagcaaggccatgggaatcatgaacagcttcatcaacgacatcttcgagaagcttgctcaggaatcttgcagacttgcccgctacaacaagaagcccatca

SEQ ID NO: 273304 - DNA, 325 bp, Glycine max
cccacgcgtccgatgagacaagaccacttcgtaagtgacactggagatgttgtttattatcagactgattctctgctcctccactcgcaacgagactgagtttcaaactttttgggttattatttattggattctagctactcaaattactttctttttaatgttatgttttttggagtttaacgttttctgaacaacttgcaaattacttgcatagagagacatggaatatttatttgaaattagtaaggtagtaataataaattttgaattgtcagtttaaaaaatatatgtaatcaacacatttataaaacttaactatttt

SEQ ID NO: 273305 - DNA, 402 bp, Glycine max
ctaattctgcgtggtgagtgaaaatggcggtacccttgctctgcaagaggatcgtgaagaagcgcgtcaagaagtttatacgcccccagagtgatcgcaagatctccgtcaagccaagctggcgcagacccaagggtattgattctcgtgtcaggagaaagttcaaaggatgcactttgatgcccaacattggttatggctcagacaagaaaacccgccattatctaccaaatggtttcaagaaatttgtcgtgcacaatgtgaaagacctggaacttctcatgatgcataacaggacatactgtgctgagattgctcacaatgtatccacatggaagaggaaagacatagttgagagagctgctcagcttgatgatgtcttgacgaacatgacggccagac

SEQ ID NO: 273306 - DNA, 369 bp, Glycine max
gtttggaaggaagtggctactttgacgtgcgggacaaggatgatcgctggattcgcattttgatcaaggctggtgatcttatcattttaccagcaggaatttatcatcgcttcaccctagacccaagtaactatgtgaagttaatgaggctgtttaagggcgagccagtgtggacagcatataatagaccacaggaagacaatcctgctagaaaggaatacattaagggcctaactgagaaatttggagtgccacttgcagctcattagggccctgaaatacactagtatatcttgtttcagatattaatcacagcttaaggtctgtgatgtaattgttggtataatatttgtgtagttttaccatgag

SEQ ID NO: 273307 - DNA, 221 bp, Glycine max
ggttatcggtggaggtgatggaggggtcatggcgaggagtgcacaccattcttgagttggaaagatagacatttgtgaaattgacaagatggttgttgatgtctccaaacaatacttccctgatgtagctgctgggtatgatgatcctcgtgtgacacttcatattggtgattgagttgcattttctgaaagaagttccttgaagaacttatgatgctgtt

SEQ ID NO: 273308 - DNA, 487 bp, Glycine max
  unsure (1)..(487): unsure at all n locations
accgggtaggaacngccgggacgacccattcgttccggttgcaaaagaacaacaaagggggaaatcaaaagagttaagtgaattaaaaacccaagggaggttcatggccaaaggtggagatatccgagtaattgttattttggaatgtaccggttgtgataaaaagagtgttaataaggaatcaacgggtatttctagatatataactaaaaagaatcgacagaatacgcctagtcgattggaattgagaaaattttgtccccgttgttgcaaacatacaattcacgcagaaataaagaaatagatcaaattgatcgcttgtgtgttacccttcgaaccaaagaacttaacatgtaaaatgatctatttttcttatctatatagatagatctatctgtattctatcatttacagttgaatatatacaaatatcagtatataacaacatatattaaaaaaataacaacatatattaaaaagtcagaat

SEQ ID NO: 273309 - DNA, 296 bp, Glycine max
ggcacacccaacccttcaccagatctcactttgttgcgttcagtgcagagaagaaaatggcggtgatggccgttcaccaattcgcgcaatgcatcacttgccacgcttggagccccgatcaatccatggtggctttatgtccaaacaataatgaagtgcacatctataggttggttgaagacaaatgggaaaaggtgcatgttcttcaaaagcatgaccaggtaatttctgggatagactggagcacaagatcaaatagaatagttactgcatcccatgatcggaattcatatgtc

SEQ ID NO: 273310 - DNA, 384 bp, Glycine max
gacacaccatccgttctagtctcaacttctggggttccaactcctacaacgcttttctctgcactcatgggcaaggtcaagatcggaatcaacggatttggaagaattggccgtttggttgccagagtcgctctgcaaagagacgatgttgaactcgttgccgttaacgaccctttcattaccaccgattacatgacatacatgtttaaatacgacagtgttcacggacactggaagcatcacgatgtcaccgttaaagacgagaagacccttctcttcggtgacaaggcagtcactgtttttggacacagaaaccctgaagagatcccatgggggtcaactggagctgacatcattgttgagtccaccggagttttcaccgat

SEQ ID NO: 273311 - DNA, 399 bp, Glycine max
gttcaaagcaaggagcttttcgagacgatggtgaggcacccttgcttcaaagacacccctttggtgctagtccttaacaagtatgatatctttgaggaaaagattagcagggtgtccctaaatacatgtgaatggttcagcgatttttgtccagttcgtgcacaccataataaccaatcactggcccatcaagcctacttctatgttgccatgaaattcaaggacctttatgcatccctcacagggaaaaaactctttgtggcacaagccatggcaagggaccgagtaactggtgatgaggcattcaagtacataaaagagatcctgaaatgggatgaaaagaaggaggagaatttctatggtccacctgaggattcattttacagcacagacataagc

SEQ ID NO: 273312 - DNA, 412 bp, Glycine max
tgggtaagttggaaagcaaacctatttggagaaagatcttccttcattaccagccttgggagacaggcaagatgcattcagcgtttattttgaatgggataatgattttggaattccaggagcattttacatcaaaaattttatgcaatctgaatttttcctcgtgagtgtcactcttgaagacattccaaatcatggaaccattcactttgtttgcaactcatgggtttacaatgcaaaaagttacaaaagggatcgcattttctttgctaataagacatatcttccaaatgaaactccaactccactagtgaagtacagaaaagaagaattggaaaatctaaaaggagatggaaaaggagagcgcaaggaatatgataggatctatgattatgatgtctataatgatttg

SEQ ID NO: 273313 - DNA, 405 bp, Glycine max
gagcaaagagtgaagagcgaacagaatggctcccaagggtataatctttatggctgtgttatgcttttcagcactgtcactgaatctatgacttgcagaggataatggactctttatgaacttctacaaggaatcatgccctcatgctgaagacatcatcaaagaacatgtcaagcttctctacaagcgccacaagaacactgctttctcctggctcagaaacatcttccatgactgtgctgctcagagatgcgatgcttcactgttgctggactccacaagaaggagcttgtctgataaggaaacagatagaagctttgggttgagaaatttcatgtacattgagaccatcaaagaagctttggaaagggaatgcccaggagttggttcctgtgctgatattct

SEQ ID NO: 273314 - DNA, 436 bp, Glycine max
aaacaccacagagggggtttcgggtttgggcccagaaaatccctccttggaatctgccttaaaaagtttggggtaaagtggccattgtcaatcttcgacctgaccctgaaccagatgaagtatatccacaaataactttgcttcctgaagcaaatcaaagtgaggtgacaagccctgatgatcccctgcctgaatctccaaggtgtacagtccattcattttgcaagacactcactgcttctgacactagcactcatggaggtttctctgttcttcgaagacatgcagatgattgtttgccaccactggatatgactcagcagcccccatggcaagaattagttgcaactgatctgcatgggaatgaatggcattttagacatatttttcgagggcaacccaggcgccacttactgaccacttgggtgagtgtctt

SEQ ID NO: 273315 - DNA, 398 bp, Glycine max
gtccgcccgcccgtccgaacggatccaagaggacaacataaggggtacccaaagtcattgaaacggtgataacattttaaggagcggtggttatgactctgtacaaaggccctgccttccaaatcataaagggtggaggagccatcagcaaccatagcaactctagcagtactagtaccaccgaaccctctgaccagcactggatagttggaactgtttatctcatatcaagttgtgctagttgggctggcttcttcattttgcaatcattcactttgaagaagtacccggcagagctctcactgacagctcggatttgtgtgatgggtattattgaaggttcaatcgcatcccttatatttgaacgagacttcagtgtatgggccataggctgggac

SEQ ID NO: 273316 - DNA, 319 bp, Glycine max
gagaacagagtgtgataatagtaagacagagcacctgctcactcgtaaatggcgaggaagaagatcagagagtaccactccaagaggcttctcaaggagcatctcaaacgtctcgcctctatcgacctccaaatcctctcagctcaggtgacagaatctacggatttcactgagctgacagaccagcatccatggctttcgtcaaccagattggtcgtcaagccagacatgctgttcgggaagcgcggcaagagtggcttagttgctctcaatttagacatagctcatgtcgccgagttcgtcaaagcacgcctcggcg

SEQ ID NO: 273317 - DNA, 363 bp, Glycine max
gacaccataaatcacacttaactaccaactacgtaagaaactaacaaaagtgttagtggttgtgataacatggctcttacacttcaacgtgcattatctgaactactcaccctaatagctattctctcaatattcctagtgatcccttccttttgtttcaaccccaaaaagctttataatgcttcatattattctccatctagttcagattggtcacctgcagtggccacttggtatggacctgccaatggagatggaagtgaaggtggagcttgtggatatggtaacgctgttgggcaacctccattttcttctttaatatccgcgggaagccctcttatatatgactctggcaaaggatgt

SEQ ID NO: 273318 - DNA, 389 bp, Glycine max
ggttctagtgtgtgattgtttgttgttgtaactcggtcttcttcttttgttgggctgtgtttgtgtttgttttttctctcacctgaaaatgtcttgctgcggtggtaactgtggttgcggaagctcctgcaagtgcggcaacggctgcggaggctgcaagatgtacccagacttgagctacactgagtcaaccaccaccgagaccttggtcatgggagtggcacctgttaaggctcaatttgagggtgctgaaatgggtgtgcccgctgagaacgatggctgcaaatgtggaccaaactgctcctgcaacccctgcacttgcaagtgaggtgttgggagagcaagcttcaagcagagatagcccttaattaggaataatgattaactat

SEQ ID NO: 273319 - DNA, 370 bp, Glycine max
aaggtcaggaggtggagtactagaacatggatggggtgccttcgaattcgcatggaaacctcgatgagcagatttctcagctcatgcagtgcaaacccttgtccgagcaagaggtaagggtcttgtgtgataaggcaaaagaaattttgatggaagagagcaatgtccagcctgtgaaaagtcctgttacaatttgtggtgatattcatgggcaattccatgatcttgcagagctttttcgcattggagggaagtgtccagatacaaattacttgtttatgggagattatgttgatcgtggctattattctgttgaaactgttacgcttttggttgcccttaaagtgcgttatcgtcagcgtattactat

SEQ ID NO: 273320 - DNA, 218 bp, Glycine max
gattgagagtggcgtcattgagcttgatgataagcagagtgaaagcaagtgtgctcttgtgtatggcaaaataaataacccccttgtgcccctgcccctggttggcctaactggcctaactggggttaaccacttccgggatgttaaaggccagaagctgttttttttcgtaaccacatttttcggtttaaccaaggttaattaaaaggttttggttt

SEQ ID NO: 273321 - DNA, 211 bp, Glycine max
gacacacaactggtttcaaagaaacaggctcgggttggattacctctgggactggtgttaatggtcactcatgtcaaggcatatcggtttggaagatggaccaatgcacatgccaccttatatcgacgtagagatccttctgtcacaatggatggagcatgtcattatggaaatctacatagccaacgatatggaactgatacatcagaac

SEQ ID NO: 273322 - DNA, 280 bp, Glycine max
gatcgtaagtggggtcctcgcttgacaaaaccggggggggttcctccagtggctggaaaatttgaagtcattgaccaatattgcattgtacctgatgaggaggatgtgcgaaggaagatgagggtttcattacctgatgactatgctgagaaactgagtgcacaaaagaatggcactgacgagtcagatatggaacttcctgaagtaaaagattacaaacctagaaagcagctaggaaatgaggttatcgagcaagaagtttatggaattgatccttata

SEQ ID NO: 273323 - DNA, 408 bp, Glycine max
ggaggaagaggaggagtaacaaaacaagtatgtgaggatcaaacgcaattgcggatggtttggctggtgcaggtggtggaattattgctcaaatcataacttatcctcttcaaacggtaaacacgcgccagcaaactgagagaacactcaagaggaacaagcaaagtttgccctccaactcaaccactgctcctggcactcttcttcagatctttcaggtcattggaactgagggttggggtggactctatagtggcctcaagccttctcttcttggaactgctgcttctcagggaatttactactatttctatcaagtttttaagaacaaggcagttgccattgcagctgcacggatggtgaaagggcgtggagatggtactgttgggatgtttggttggcttgttg

SEQ ID NO: 273324 - DNA, 324 bp, Glycine max
gatccaagggaggcacgacctggtatcagggaggtccactttcttccattcaatcctgtggacaagaggactgctctaacttacattgattctgatggaaattggcatcgatctagcaaaggtgctcctgagcagatattgaacctctgcaactgcaaagaggatgtaaggaaaagggttcatggaacgattgacaagtttgctgagcgtggactccgttctttaggtgttgctagacaggaagtacctgagaaaaacaaggatagtcctggtgcaccatggcaatttgttggtctgctaccactttttgatcctccaggcatg

SEQ ID NO: 273325 - DNA, 351 bp, Glycine max
  unsure (1)..(351): unsure at all n locations
acggccaggcgtncgaacacgtgtgagaaggactacaaaagggctggatacaaacaacagagggatgattaacattgatggattgcgattcaggttgcataaacttggtcattaagttcccgaattagatgtacaaactcttatggaagctggtgatgtaaatggtgatgggcacctacattatggaaagtttgtaaccatttctgctcatctaagaaagatgggaaatgattagcatgttcgcaaaacctttcaattttttgatcactacaaaagttaggatattgtgaacgaggagctgcttagcgacttatctgatgatcttgaccccaacagcgattaagttatcag

SEQ ID NO: 273326 - DNA, 326 bp, Glycine max
ggcgcattgaacgaaaattacggtttgtagtggggcatgaagaagcagcgatggcgcctaagataacacgtaaggttagcagaaaccctgaattgataaggggaatcggaaagtactcgaggtcgcagatgtaccacaagaggggcatttgggctatcaaggccaaaaacggtggcgttttacctcgccacgaccctaaacccaagcctgaagctcctgctgaaaaaccacccaaattttaccctgctgatgatatcaagaagcccctttgtcaacaagcacaaaccgaaaccaccttaactcaagggttagcattacttcccgga

SEQ ID NO: 273327 - DNA, 285 bp, Glycine max
gatgatgaagtacttcttgcaatggcagaagagttgggagtgttcattccttgtgttgggggagtggaacatgctagtgtgttgctgccaccgctggagacactttgcactgttgaggaaacctgtgtgagagataaagctgcggagtcactttgtagaattggatctcaaatgagggagagtgatttggttgaatattacatcccgttggtgaagagattggcagcaggtgaatggtttactgctcgagtctctgcatgtggactatttcatattgcataccct

SEQ ID NO: 273328 - DNA, 240 bp, Glycine max
cgatgcacctcgtgacttaacatacttgcactaggaaatgtatttccagataattttcagagattcaaatcttagataatctattgcatgaacagttgaatgctaaactatcagactttgggttatcaaggttgggaccattttattgactgactcatgtcttaccagacggtgtatgaacaatgagatattcagctactgaatatgttcacactggacgtctaacattaaagaatgatg

SEQ ID NO: 273329 - DNA, 305 bp, Glycine max
aaaaacaccacaaaggggttttgaaattacatttattgtcccacacatacggtgcttttctgtgaagtggagggcccaaaactttttgcccccaccaaatatttcctttatatttataacagattccattttgaaaatccaactgttaggcctggtctctgaaccacattgccaaagtttggtcctgctgttgatgaataaaagccccgcatattcatactgctaaggcggtgtctttttgatagtgatgatgaggttcgagacagagcaacgctttatctgaacacacttggaggtgatggttc

SEQ ID NO: 273330 - DNA, 400 bp, Glycine max
acatatgaacagtaaaaactagtagtttaattgagactagaactcatagggaagaaaatagatttatgaatggaataaaatatgcagtatttacagacaaaagtattcggttattggggaaaaatcaatatacttttaatgtcgaatcgggattaactaggacagaaatcaagcattgggtcgaactcttctttgatgtcaaagtaatagctatgaatagtcatcgactcccggtaaagggtagaagagtacgacctattatgggacatacaatgcattacagacgtatgattattacgcttcaaccgggttattctattccacctcttagaaagaaaaaaacttaaatcaaaatacttaatagcatggcgatacatttatacaaaacttttaccccaag

SEQ ID NO: 273331 - DNA, 331 bp, Glycine max
accgcttgtacaagaacaccgaagggggtgttcgagtagaaaacgtacggtcaagggcgggctatgtgagactcaagccgaaaggtttattgctattaatatttggctctctttttcaatgtcaaattgcattattgcaataatcaaaggcactaaccacacttcatcacccccatatataccccttctcctttcacactaattaacacactcatcaaaaaacccttctttctttcaggttcattacttgatcagtgtcagaagggtagttacaaattgcaatggctaaacatgacgtttagggtggtgacttctcagccaatgactacca

SEQ ID NO: 273332 - DNA, 390 bp, Glycine max
cgagaagacgaccgacgggggagatgggacttgtaataatgggcagttctatgaatgcctgaacatggcagctctgtggaaattgccaattgtgtttgtggtggagaataatttgtgggctattgggatgtcgcatctcagagcaacctcagatcctcagatatggaagaaagggccagcatttggaatgccaggggttcatgtagatgggatggatgttttgaaggtcagagaggtggcaaatgatgcagatggaagggctagaagaggtgagggaccaactctagtggaatgcgagacctatagatttagagggcattcattggctgatcctgatgagcttcgtgaccctgctgaaaatgaacactatgccggtagggaccccatcac

SEQ ID NO: 273333 - DNA, 382 bp, Glycine max
ggctgcaaatgtggaccaaactgctcctggggggcctgcacttgcaagtgaggtgttgggagagcaagcttcaagcagagatagcccttaattaggaataatgataaactattaatgtgtagctaaaaacttatgtattatgtctgtgatggttttcgtgcactctggtgttttgtgttaaacaaacatccttagaataaagtggtcatgtcttgcctttcagcaagttcaagtgttttggacttgtgatgggtgtgttaagctcatggttgcttcttttttttttttttttaatgtctggtaattggtcgcttctgtataaagttcggctaatctgaattatgaatctctgcttataatattaaatactatttcacaaaaa

SEQ ID NO: 273334 - DNA, 278 bp, Glycine max
gggcgcgggtgaggtacaacccttccactgtggtgactctgcgatgggtgcctacaagtatgtttcagagctatggcgcaagaagcagtctgatgtcatgcgcttcttgcagcgggtgaggtgctgggagtataggcagcaaccttccattgttcgtttgacaaggtctacccgccctgacaaggctcgtcgcttgggcttcaaggctaagcatggctatgtgatttaccgtgttcgtgttacgaggggtggccgaaagaaaccagttcccaaaggta

SEQ ID NO: 273335 - DNA, 270 bp, Glycine max
ggagacagagagaatgagtacggtgggagaagggaaggttagtagtaatggtcatggatgttgcaaatcagggccaggctatgcttccccactggaagccatttctggtcccagagagtctctcatttatgtaacctctgtctacacagggaccggaatagagaagccagactatttggcgacagtggatgtggatccaaactctccaacttattccaaagtcatccataggcgttctgttccttatttaggtgaacaattgcatcacac

SEQ ID NO: 273336 - DNA, 435 bp, Glycine max
  unsure (1)..(435): unsure at all n locations
ggttatcggtggaggtgatggaggggtcatacgagaagtagcacaccattcttcagttgaaaagatagacatttgtgaaattgacaagatggttgttgatgtctccaaacaatacttccctgatgtagctgttgggtatgatgatcctcgtgtgacacttcatattggtgatggagttgcatttctgaaggaagttcctgaaggaacttatgatgctgttatagtggattcatccgatcctattggtcctgcccaagagctttttgaaaagcccttcttttcgtcagttgcaaaggctcttcgtccaggtggagttgtgtgcactcaggcagaaagcatatggcttcatatggatataattgaggacattgtggctaattgtcgccagaattttaaaggctctgtcaactatgcttggactactgntnctacata

SEQ ID NO: 273337 - DNA, 417 bp, Glycine max
ggcagagtgaggaattgaagcatgggaagagggaagggggttctggagagaatacagaacaagatcaatcgccaagtaaccttctcaaagcgcagaaatggtttgctcaagaaagctttcgagctatctgttctatgcgatgctgaaatcgctctcgtcatcttctccagccgtggcaagctttttcagtatagtagcactgaaatcattgagaagtatcgtcaatgctgcttcaacatgtctcagactggcgatgtagctgaacatcaatcggagcagtgcttataccaggagcttttggtattaagagtcaagcatgagtcactccagcggactcaaaagaatcttctgggagaagaactagagccacttagcatgaaagaaatgcatagtttagagaaacaaactgatagaacg

SEQ ID NO: 273338 - DNA, 351 bp, Glycine max
aatctccaagttaccttctcaaagcgcataaatggtttgctcaagaaagctttcgagctatctgttctatgcgatgctgaaatcgctctcgtcatcttctccagccgtggcaagctttttcagtatagtagcactgaaatcattgataagtatcgtcaatgctgcttcaacatgtctcacactggcgatgtagctgaacatcaatcggagcagtgcttataccaggagcttttggtattaacagtcaagcatgagtcactccagcggactcaaatgaatcttctgggagaagaactagagccacttagcatgaaagaattgcatagtttagagaaacaactggatagaacg

SEQ ID NO: 273339 - DNA, 436 bp, Glycine max
gataccaaaaaagttaagtgaattaaaaacccaagggaggttcatggccaaaggtaaagatatccgagtaattgttattttggaatgtaccggttgtgataaaaagagtgttaataaggaatcaacgggtatttctagatatataactaaaaagaatcgacagaatacgcctagtcgattggaattgagaaaattttgtccccgttgttgcaaacatacaattcacgcagaaataaagaaatagatcaaattgatcgcttgtgtgttacccttcgaaccaaagaacttaacatgtaaaatgatctatttttcttatctatatagatagatctatctgtattctatcatttacagttgaatatatacaaatatcagtatataacaacatatattaaaaaaataacaacatatattaaaaagtcagataaaaaaacaa

SEQ ID NO: 273340 - DNA, 410 bp, Glycine max
  unsure (1)..(410): unsure at all n locations
ggtgataagaattagcaaaagacaatgattcttcagaggagaaaaatcaagttcaaccagggcttantggtcctctgaaaaagagaattcagcagcttgttgactctaatcctgtcatgctcttcatgaaaggaactcctgaagagccaaaatgtggatttagcaggaaagttgttgttgtgttgaacgaagagagagtcaagtttggaagttttgatgtcctatcagactcagaggttcgtgaaggcttgaagaagttttccaattggcccacatttcctcagctttactgtaaaggagaacttcttggtgggtgtgacatagcaattgctatgcatgagagtggggaactgaaggaagtttttaaagatcatggaattgatactactaattgaagcaaagagaaagaa

SEQ ID NO: 273341 - DNA, 412 bp, Glycine max
caatgtcggtggatgtaattcgcaaggcactccaagcaacagaagaggggtttatttcagtggttgccagacagttttctctgtcaccacaaattgcggctgttgggtcatgctgtcttgttggtgttatttgtaatggaaccctttacatagcaaaccttggggattcccgggctgttttgggaagagcagtcaaggcaactggcgaggttttagccatgcaattatcagcagagcacaatgcatcgatagagtctgtaagacaggagctgcatgcttcgcatcctgatgacccaaatattgtggttttaaagcataatgtatggcgtgtgaaaggtcttattcaagtttctagatctattggtgatgtatatttgaaaaaggccgagttcaatagagaaccactatatgc

SEQ ID NO: 273342 - DNA, 436 bp, Glycine max
ggcacacccaacccttcaccagatctcactttgttccgttcagtgcagagaagaaaatggcggtgatggccgttcaccaattcgcgcaatgcatcacttgccacgcttggagccccgatcaatccatggtggctttatgtccaaacaataatgaagtgcacatctataggttggttgaagacaaatgggaaaaggtgcatgttcttcaaaagcatgaccaggtaatttctgggatagactggagcacaagatcaaatagaatagttactgcatcccatgatcggaattcatatgtctggaaccttgaaggatcagaatgggtgcctactcttgttatccttagactaaaccgtgctgctctttgtgttcaatggagtccaaaagaaaacaaatttgcagtgggaagtggagccaaaacttgttgtatatgctacta

SEQ ID NO: 273343 - DNA, 364 bp, Glycine max
agaggggtataaatgttatgggtgcaagggttatgtgaaggcatggaaacgtctcacagtgaaacgagctccaaatattctcacaattgcgttgaaaagatttcagagtgggaggtttggaaaacttaacaagagagtaactttccctgagactgtagatcttagcccttacatgagtgaagctggagatggatctgatatttataagctatatgctgttgtagtacatattgatatgctgaatgcttcattttttggccattacatatgcttcatcaaagatttatgtggaaactggtatagaattgatgattggaaggtctcgagtgtggaattagaagaggtgctttcccagggtgcatac

SEQ ID NO: 273344 - DNA, 398 bp, Glycine max
  unsure (1)..(398): unsure at all n locations
ggaagcagtggaacanagcaaggaagagaaagagatttgtttctctctaaagagtctccgctgaactttttggtttcttgaagatgtcgttactctccgatcttatcaaccttaacctctccgacatcaccgataaggtgatcgccgagtacatatgggttggtggatctggcatggatatgaggagcaaagcaaggactctctcgggactggttaatgacccttccaagcttcccaagtggaactatgatggttccagcactggtcaagctcctggacaagatagtgaagtgatcttatatccacaagcaatttttcgggatccattcangaggggtaacaatatcctggntatgtgtgatgcttacactcctgctggggaacccattcctaccaac

SEQ ID NO: 273345 - DNA, 153 bp, Glycine max
atcgattcacggggaggtaccaggggacaacgagttgcaactcgagcgagtcaacgtctattacaatgaaacgagttgcggaaggttcgtgccgagggcggtgctcatggatctagagccagggaccatggacagggtcagatctggccctac

SEQ ID NO: 273346 - DNA, 345 bp, Glycine max
ggcagccaaagaaaagaaaatcctcaattttctgagcagccaaacactctctctctgtctctcgaaaattctcagtttgcagagaaaatctgaatcatgtcgtggcaagcgtatgtcgacgatcaccttctgtgtgacatcgaaggtaaccacctcactcacgctgctatcatcggccaagacggcagcgtttgggctcagagtaccgacttccctcagttcaaacctgaggagataactgccatcatgaatgactttaatgagcctggatcacttgctccaactggattgtatctcggtggcaccaaatatatggtcatccagggtgaaccccgtgctgtcatt

SEQ ID NO: 273347 - DNA, 369 bp, Glycine max
gacacaccatccgttctagtctcaacttctgctcttccaactcctacaacgctgttctctgcactcatgggcaaggtcaagatcggaatcaacggatttggaagaattggccgtttggttgccagagtcgctctgcaaagagacgatgttgaactcgttgccgttaacgaccctttcattaccaccgattacatgacatacatgtttaaatacgacagtgttcacggacactggaagcatcacgatgtcaccgttaaggacgagaagacccttctcttcggtgacaaggcagtcactgtttttggacacagaaaccctgaagagatcccatgggggtcaactggagctgacatcattgttgagtccacc

SEQ ID NO: 273348 - DNA, 407 bp, Glycine max
  unsure (1)..(407): unsure at all n locations
ggaggtaaagagaaggagtgaccgaagcgaagatgttacccacagcttccaaaggacgttcttcttcctcctcctcttcctctcgacctaacaatcccatgctgcttccctacctccgcagaatcatcaagtggcaacaaatggatattgaatatactttttggcaaatgcttcatctatgtacgtccccgaaagttgtctatcagcatactaaatatcacaaacaaaccaagaatcaatgggcacgtgatgatcctgcatttgttgtgatctgcagtcttcttttggcagttgcaactttggcttattgtgcggcgtatgaccatagtactgcacatacacttcttgntatcttctcagtgttggttttccactttatattgactggtgtatttcttgcaacattt

SEQ ID NO: 273349 - DNA, 412 bp, Glycine max
gtacaaagcaaggagcttttcgagacgatggtgaggcacccttgcttcaaagacacccctttggtgctagtccttaacaagtatgatatctttgaggaaaagattagcagggtgtccctaaatacatgtgaatggttcagcgatttttgtccagttcgtgcacaccataataaccaatcactggcccatcaagcctacttctatgttgccatgaaattcaaggacctttatgcatccctcacagggaaaaaactctttgtggcacaagccatggcaagggaccgagtaactgttgatgaggcattcaagtacataaaagagatcctgaaatgggatgaagagaaggaggagaatttctatggtccacctgaggattcattttacagcacagacataagctcctcttccttta

SEQ ID NO: 273350 - DNA, 424 bp, Glycine max
  unsure (1)..(424): unsure at all n locations
tgggaaagttggaaagcaaacctatttggagaaacatcttccttcgttaccaaccttgggagacaggcaagatgcattcagcgtttattttgaatgggataatgattttggaattccaggagcattttacatcaaaaattttatgcaatctgaatttttcctcgtgagtgtcactcttgaagacattccaaatcatggaaccattcactttgtttgcaactcatgggtttacaatgcaaaaagttacaaaagggatcgcattttctttgctaataagacatatcttccaaatgaaactccaactccactagtgaagtacagaaaagaagaattggaaaatctaagaggagatggaaaaggagagcngcaggaatatgataggatctatgattatgatgtctataatgattggggtaacccagac

SEQ ID NO: 273351 - DNA, 338 bp, Glycine max
gtttaatctttttggctgtgttatgcttctcagcactgtcactgagtcgttgtcttgcggaggataatggacttgttatgaacttctacaaggaatcatgccctcaggctgaagacatcatcaaagaacaagtcaagcttctctacaagcgccacaagaacactgctttctcctggctcagaaacatcttccatgactgtgctgttcagagttgtgatgcttcacttgtgctggactccacaagaaggagcttgtctgagaaggaaacagatagaagctttgggttgagaaatttcaggtacattgagacccatcaaagaagctttggaaagggaatg

SEQ ID NO: 273352 - DNA, 418 bp, Glycine max
gaatcaagtattggagcaacaaatgccttcctttaatcggccttctaaaattgtatgtagagtggtcaatgttcatcttcgagctgaacctgaaacagatgaagtatatgcacaaataactttgcttcctgaagcagatcaaagtgaggtgacaagccctgatgatcccctgcctgaatctccaaggtgtacagtccattcattttgcaagacactcactgcttctgacactagcactcatggaggtttctctgttcttcgaagacatgcagatgattgtttgccaccactggatatgactcagcagcccccatggcaagaattagttgcaactgatctgcatgggaatgaatggcattttagacattattttcgagggcaacccaggcgccacttacttgacacttggtggagtgtc

SEQ ID NO: 273353 - DNA, 352 bp, Glycine max
gacactaaacaagttaaaagaagagcatcactggactaacaaagcagccctatgtcgaatgtggtttgtgtcaccggagccagcggctccatcggatcatgggtggtcctactcctcctccagcgtggttacaccgtccatgccaccgtccaagatatcaaggatgaaaatgagacgaaacatttggaggaaatggaaggagcaaagagtcatctccatttttttgaaatggatcttcttgacatcgactacattgccgctgccataaagggttgttccggcgtaatccaccttgcatgtcctaacatcatgggtcatgtcgaagatcccgagaaacagatattggaaccgg

SEQ ID NO: 273354 - DNA, 431 bp, Glycine max
ggacctggggttggtcaaggcactgctgcagggcaagctgtagaagggattgcacgacaaccggaggcagagggaaaaatacgaggtactttattgcttagtttggcttttatggaagctttaacaatttatggactggttgtagcattagcacttttatttgctaatccttttgtttaatcctaaaaaaatagaaatacatatccttttttccgtggacttgctttaccggtcttgctttttcgaattctatttatattaatatttcactcctataattctttatccgttcggacaagaacacaggggaaggactaattgaaaggtgaagaattcacatactgattcgccctctttcttctcttttttagtccaatgacccccccttttttttaagataatttttctcaagtttaaaactagagagattt

SEQ ID NO: 273355 - DNA, 348 bp, Glycine max
ggttctgaaaaacgtaaatacgagttggcaagggctgactgacaagaaattcggataaataaagcaaagctaatcaacatgcttgatgaggtggcgcaaaggttcacgcattaccacaaccagatgaaaatagtgatatcatcatttgagcaagctgctggaatatgctcagcaagaacttacactgcgcttgcactggaaacaatcacgaagcaatatacgtgtttgaaggatgcaataacagtgcagattagagctgcaaacaagagtttgggagaagaggattgttttggtgctaaaactgaaggatctaggctcaaatatgaggaccatcatctaatgcaacag

SEQ ID NO: 273356 - DNA, 326 bp, Glycine max
actgctgagagcgctttacagagacatggccgggtataatcagatggaaacccgatatgaggcccaagaagaaacagggcggaaacttgatcatggagatatctttaggccaccagtccatacatatctgttttgcgtttatgaccgtactggtgttcagatctttgcaacgacacttgtgacattgatatttgctctgctagggcatttgtattcatataatcgtggaggtctcatgactgctaccgctcagctgtgggtctataaggacttattaactggctactcctcaacacgtttgtacacgatgttcactgacacagaat

SEQ ID NO: 273357 - DNA, 432 bp, Glycine max
ggaaacgaagcgaaatttccacctgcatcatgttcaaacctgcgcttcttttgaaccgatttgtgctgttttgttagtgaagcacatcgagtgcaaactgtcgaacaggcatggcaagcctgttgacaacatcagccatcacctattctcctctcaacaatggttccaaggatttcagaaagtcagggaattcttctaaaggaaggtgttgcataaaagcaatggggatagagaaatccttggaggaattgtacaatgtgaaggtggaaagaaaagtgtctcctgagaaactagctgagcttggagtttcaaaatggtcggtgtggaagactgggaaaagcaagttgccctgggactggcaggtagaccaactggtgtacattgaagaaggcgaagtgagagttgtgcctgaagggagcaaccgtttcatgc

SEQ ID NO: 273358 - DNA, 435 bp, Glycine max
  unsure (1)..(435): unsure at all n locations
ggttctattgtgggatggttggtggttgaaactcgtggttcttctttggtggttctgggtttgcgtttgttttttctctcacctgaaaatgtcttgctgcggtggtaactgtggttgcggaagctcctgcaagtgcggcaacggctgcggaggctgcaagatgtacccagacttgagctacactgagtcaaccaccaccgagaccttggtcatgggagtggcacctgttaaggctcaatttgagggtgctgaaatgggtgtgcccgctgagaacgatggctgcaaatgtggaccaaactgctcctgcaacccctgcacttgcaagtgaggtgttgggagagcaagcttctagcagagatagcccttaattaggaataatgattaactattaatgtgtagctaanaacttatgtattatgtctgtgatggttttcg

SEQ ID NO: 273359 - DNA, 408 bp, Glycine max
gacacacaacttgtttcaaggaaaatggctcgggttggatttcttctgggacttttcttaatggtcactcatgtcaaggggtatggttttggaggttggaccaatgcacatgccaccttctatggaggtggtgatgcttctgggacaatgggtggagcttgtggttatggaaatctgtatagccaaggttatggaactgatacaacagcactgagcactgctctgttcaacaatggcttgagctgtggtgcatgctatcaaattaaatgtgtgaatgatccacagtggtgcctttctggctccatcatagtcactgccacaaacttctgtccacctggtggttggagcgaccctgccaatcaccactttgatctgtctcaaccttgtttccagcacattgcttaatac

SEQ ID NO: 273360 - DNA, 369 bp, Glycine max
  unsure (1)..(369): unsure at all n locations
ccggaggggcattccaattggggaacaaccatttatctaacggatgagagactcctntccctgggggtacgagattaacaatacctcgcgatgcacctagtggcttaacatacctgcactaggaaatggatttccagataattttcagagatttcaaatcttcaaatattctattgcatgaacagtggaatgctaaactatcagactttgggttagcaaggttgggaccatcatattgactgactcatgtcttaccagcgggtgtaggaacaatgagatatgcagctactgaatatgtgcaaactggacgtctaacaataaagaatgatgtatggagctaccgtgtcttccttttatgaactcataact

SEQ ID NO: 273361 - DNA, 382 bp, Glycine max
  unsure (1)..(382): unsure at all n locations
gatccaaaggaggcacgagctggtatcagggaggtccactttcttccattcaatcctgtggacaagaggactgctctaacttacattgattctgatggaaattggcatcgatctagcaaaggtgctcctgagcagatattgaacctctgcaactgcaaagaggatgtaaggaaaagggttcatggaacgattgacaagtttgctgagcgtggactccgttctttaggtgttgctagacaggaagtacctgagaaaaacaaggatagtcctggtgcaccatggcaannttgtggtctgctaccactttttgatccttcaaggcatgacagtgcggaaaccatcacaagagctctgaaccttggtgtgaatgtaagatgatcac

SEQ ID NO: 273362 - DNA, 305 bp, Glycine max
ggttgtggtgtaataaaagtaaggtcaaggtcggtcaaagcgagactcaaaccaaaaggtttattgctattaatatttggctctgtttttcagtgtcaaattgcattattgcaataatcaaatgcactaaccacactccatcacccccatatataccccttctcctctcacactaattaacacactcatcaaaaaacccttctttctttcaggttcattacttgatcagtgtcagaagggtagttgcaaattgcaatggctaagcatgatgttgaaggtggttccttctcaacaaaagactacca

SEQ ID NO: 273363 - DNA, 380 bp, Glycine max
  unsure (1)..(380): unsure at all n locations
ggttgcaaaagacaacggatggccatatgaccagtaaaacctggtatgttaattgaaactggacctcatagggaagaaaatagatttatgaatggaataaaatatgcagtatttacagacaaaagtattcggttattggggaaaaatcaatatacttttaatgtcgaatcgggattaactaggacagaaatcaagcattgggtcgaactcttctttgatgtcaaagtaatagctatgaatagtcatcgactcccggtaaagggtagaagagtacgaccctatatgggacatacaatgcattacagacgtatgattattacgcttncaaccggttattctattccacctcttagaaagaaaaaacttaatcaaatacttat

SEQ ID NO: 273364 - DNA, 353 bp, Glycine max
  unsure (1)..(353): unsure at all n locations
ggggaaggaaaagagtggtgtacgacactgctgcttcgcactcgatccgttacccctgcccgaacatagcanaaccaaacgacgcccaggtttcggaattgtgttctaggtttttgagtttcgattccgatcgaccgacgatgctggccaatcatttccaaaacggcatcgaaacggcgaggctcgtttggtcgcggattcctaattcggaagaatcgcagctcctcgacgacgccgttggcatccttaagaagaacgacggaggcggtgtcgagagccttgactatgaagtcattgagaattttgcttatcgtgaggaacaggcgcagagagggaagctgtatgtgagctat

SEQ ID NO: 273365 - DNA, 414 bp, Glycine max
ggagatgggacttgtaataatgggcagttctatgaatgcctgaacatggcagctctgtggaaattgccaattgtgtttgtggtggagaataatttgtgggctattgggatgtcgcatctcagagcaacctcagatcctcagatatggaagaaagggccagcatttggaatgccaggggttcatgtagatgggatggatgttttgaaggtcagagaggtggcaaaggaggcagttggaagggctagaagaggtgagggaccaactctagtggaatgcgagacctatagatttagagggcattcattggctgatcctgatgagcttcgtgaccctgctgagaaggaacactatgctcgtagggaccccatcactgcattgagaaataccttttgagaacaattagccaatgagcaa

SEQ ID NO: 273366 - DNA, 344 bp, Glycine max
ggggctgcgaggtgaggtcacaacaccttccgactgtggtgactcatgcggaggggtgccgtagcaagtatgatttcagcagctatgcgcgcaatgaagcagtcttgatgtcatagcgcttcattgcatcaggggtgaggtgctagggagtaataggcatgcagaccttccattggttcgtttgaccaaggtctacctcggcctgacaaaggctcgtcgcttgggcttcaaggctaagcatggctatgtgatttaccgtgttcgtgttacgaggggtggccgaaagaaaccagttcccaaaggtattgtttatgggaagcccacaaaccaatggagtacccaac

SEQ ID NO: 273367 - DNA, 424 bp, Glycine max
atgccagaagacggcggaagggggagacagagagactgaactccgtggtagaagcgtaaggtgagtagtaatggtcatggatgttgcaaatcaacgccaggctatgcttccacactggaagccatttctggtcccagagagtctctcatttatgtaacctctgtctacacagggaccggaatagagaagccagactatttggcgacagtggatgtggatccaaactctccaacttattccaaagtcatccataggcttcctgttccttatttaggtgacgaattgcatcacacaggctggaattcatgcagctcttgccatggagacccctcagcagaccgacgatttctcatcgtacctgcactcgtatcaggtcgagtatatgtggttgatgtgaaaacaaatccaagggctccatctttgc

SEQ ID NO: 273368 - DNA, 304 bp, Glycine max
  unsure (1)..(304): unsure at all n locations
ggttatcggtggaggtgatggangggtcatacgagaagtagcacaccattcttcagttgaaaagatagacatttgtgaaattgacaagatggttgttgatgtctccaaacaatacttccctgatgtagctgttgggtatgatgatcctcgtgtgacacttcatattggtgatggagttgcatttctgaaggaagttcctgaaggaacttatgatgctgttatagtggattcatccgatcctattggtcctgcccaagagctttttgaaaagcccttcttttcgtcagttgcaaaggctcttcgt

SEQ ID NO: 273369 - DNA, 407 bp, Glycine max
  unsure (1)..(407): unsure at all n locations
ggcagagttaggaattgaagcatgggaagagggaaggtggtgctggagagaatacagagcaagatcaatcgccaagtaaccttctcaaagcgcagaaatggtttgctcaagaaagctttcgagctatctgttctatgcgatgctgaaatcgctctcgtcatcttctccagccgtggcaagctttttcagtatagtagcactgaaatcattgagaagtatcgtcaatgctgcttcaacatgtctcagactggcgatgtagctgaacatcaatcggagcagtgcttataccaggagcntttggtattaagagtcaagcatgagtcactccagcggactcaaaggaatcttctgggagaagaactagagccacttagcatgaaagaattgcatagtttagagaaacaact

SEQ ID NO: 273370 - DNA, 393 bp, Glycine max
gataacaaaagagttaagtgaattaaaaacccaggggaggttcatggccaaaggtaaagatatccgagtaattgttattttggaatgtaccggttgtgataaaaagagtgttaataaggaatcaacgggtatttctagatatataactaaaaagaatcgacagaatacgcctagtcgattggaattgagaaaattttgtccccgttgttgcaaacatacaattcacgcagaaataaagaaatagatcaaattgatcgcttgtgtgttacccttcgaaccaaagaacttaacatgtaaaatgatctatttttcttatctatatagatagatctatctgtattctatcatttacagttgaatatatacaaatatcagtatataacaacatatatt

SEQ ID NO: 273371 - DNA, 403 bp, Glycine max
  unsure (1)..(403): unsure at all n locations
ggtgtaagaattagcaaaagacaatgattcttcaggggagaaaaatcaagttcaaccagggcttagtggtcctctgaaaaagagaattcagcagcttgttgactctaatcctgtcatgctcttcatgaaaggaactcctgaagagccaaaatgtggatttagcaggaaagttgttgttgtgttgaacgaagagagagtcaagtttggaagttttgatgtcctatcagactcagaggttcgtgaaggcttgaagaagttttccaattggcccacatttcctcagctttactgtaaaggagaacttcttggtgggtgtgacatagcaattgctatgcatgagagtggggaactgaaggaaagttttaaagatcatggaatngatactactaatgaagcaaaagag

SEQ ID NO: 273372 - DNA, 377 bp, Glycine max
  unsure (1)..(377): unsure at all n locations
aaaaggacaccggagggggtttaaatggaatgggtccaggggttatgtaaaggcttggaaccgtttaacagggaaacgagctccaaatattctcacaattgcgttgaaaagatttcagagtgggaggtttggaaaacttaacaagagagtaactttccctgagactttagatcttagcccttacatgagtgaagctggagatggatctgatatttataagctatatgctgttgtagtacatattgatatgctgaatgcttcattntttggccattacatatgcttcatcaaagatttatgtggaaactggtatagaattgatgattggaaagtctcgagtgtggaattagaagaggtgctttccagngtgcatacat

SEQ ID NO: 273373 - DNA, 433 bp, Glycine max
  unsure (1)..(433): unsure at all n locations
ggaagcagtggaacaaagcaaggaagagaaagaaatgggtttctctctaaagagtctccgctgaactttttggtttcttgaagatgtcgttactctccgatcttatcaaccttaacctctccgacatcaccgataaggtgatcgccgagtacatatgggttggtggatctggcatggatatgaggagcaaagcaaggactctctcgggactggttaatgacccttccaagcttcccaagtggaactatgatggttccagcactggtcaagctcctggacaagatagtgaagtgatcttatatccacaagcaattttttcgggatccattcangaagggtaacaatatcctggttatgtgtgatgctaacactnctgctggggaacccatttctaccaacanngagaataaagctgcaaagatattcagtaatc

SEQ ID NO: 273374 - DNA, 401 bp, Glycine max
gacggacgagggtttcgtttcgggtttgacgttgttcacaatcactttctgcgcttcactcactcccttcgtgcggttttctttctttgtcgaactcgtgcgaaaatgcgtgagattcttcacatacagggagggcaatgcggaaaccagatcggagcgaagttctgggaggtggtgtgcgcggagcacgggatcgattccacggggaggtaccagggggacaacgagttgcaactcgagcgagtcaacgtctattacaatgaagcgagttgcggaaggttcgtgccgagggcggtgctcatggatctagagccagggaccatggacagcgtcagatctggtccctacggtcagattttccgacctgataacttcgtttctgccagtccggcgccggaaac

SEQ ID NO: 273375 - DNA, 427 bp, Glycine max
ggcagccaaagaaaagaaaatcctcaattttctgagcaaccaaacactctctctctgtctctcgaaaattctcagtttgcagagaaaatctgaatcatgtcgtggcaagcgtatgtcgacgatcaccttctgtgtgacatcgaaggtaaccacctcactcacgctgctatcatcggccaagacggcagcgtttgggctcagagtaccgacttccctcagttcaaacctgaggagataactgccatcatgaatgactttaatgagcctggatcacttgctccaactggattgtatctcggtggcaccaaatatatggtcatccagggtgaacccggtgctgtcattcgagggaagaagggtcctggtggtgttactgtgaagaagaaccgtgcggccttgaccatggcatttatgatgaccaatgact

SEQ ID NO: 273376 - DNA, 383 bp, Glycine max
gacacaccatccgttctagtctcaacttctgcggttccaactcctacaacgcttgtctctgcactcatgggcaaggtcaagatcggaatcaacggatttggaagaattggccgtttggttgccagagtcgctctgcaaagagacgatgttgaactcgttgccgttaacgaccctttcattaccaccgattacatgacatacatgtttaaatacgacagtgttcacggacactggaagcatcacgatgtcaccgttaaggacgagaagacccttctcttcggtgacaaggcagtcactggttttggacacagaaaccctgaagagatcccatgggggtcaactggagctgacatcattgttgagtccaccggagtttcaccgat

SEQ ID NO: 273377 - DNA, 378 bp, Glycine max
gtagtgtgcaagagtgaagagcgaagagaatggctcggaagggtttaatctttgtggctgtgttatgcttctcagcactgtcactgagtcgttgtcttgcggaggataatggacttgttatgaacttctacaaggaatcatgccctcaggctgaagacatcatcaaagaacaagtcaagcttctctacaagcgccacaagaacactgctttctcctggctcagaaacatcttccatgactgtgctgttcagagttgtgatgcttcactgttgctggactccacaagaaggagcttgtctgagaaggaaacagatagaagctttgggtgagaaatttcaggtacattgagaccatcaaagaagctttggaaaaggaatg

SEQ ID NO: 273378 - DNA, 469 bp, Glycine max
  unsure (1)..(469): unsure at all n locations
tccggttgcaaaaggccaccgaagggggattaaggattggaaccaccaaagcctttctttaaggcggcctttaaaaatttaatgtaaaggtgggtcaaatggtttaatctttcgaagccttgaaccctggaaacaaaatgaaagtttatgcacaaaatactttgttcctgaaacagatcaaagtgaagtgacaagccctgatgatcccctgcctgaatctccaaagtgtacagtccattcattntgcaagacactcactgcttctgacactagcactcatggaggtttctctgttcttcgaagacatgcagatgatcgtttgccaccactggatatgactcagcagcccccatggcaagaattagttgcaactgatctgcatgggaatgaatggcaatttagacatatttttcgagggcaaacccagcgccacttactgaccacttggttgagtggctttgtcagttcc

SEQ ID NO: 273379 - DNA, 416 bp, Glycine max
  unsure (1)..(416): unsure at all n locations
gtagccaaagtcattggaacggttataacagtttcaggagctatggttatgactctgtacaaaggccctgccttccaaatcataaagggtggaggagccatcagcaaccatagcaactctagcagtactagtaccaccgaaccctctgaccagcactggatagttggaactgtttatctcatatcaagttgtgctagttgggctggcttcttcattttgcaatcattcactttgaagaagtacccggcagagctctcactgacagcttggatttgtgtgatgggtattattgaaggttcaatcgcatccctgatatntgaacgagacttcagtgtatgggccataggctgggactcaagacttcttgcttgtgtttactctgaggtgatttgttcttgaatggcatactatgtaca

SEQ ID NO: 273380 - DNA, 381 bp, Glycine max
acaacccgtccgaccggatgcaagaggcctccttaagggggccctaacaccaactaacgggcgggttccaaggcggagaaggcaggaatggccaccaacgaggagagggatatggagaacaagaagagtgaggaagaactgaagcatctcgggtttgtgaagattgcggcaatgaaagccttagtgtgtgtgtcgaatctctacggcttcgcatagcaaaactcgggacttttgagatctgctgttggaaccgtggaagacactgtaaccaccgttctgggtcccgtctaccacaaattcaacgctgttcccaaccacatcctcctttttgtcgacaacaaggtggatgaagctggtcacatattcgatgagcatgcacct

SEQ ID NO: 273381 - DNA, 335 bp, Glycine max
ctcctattgcaggtttattttactctgtgtttcgccgcggttgctgcggctgttggggcttaccttcatgtcctcttgaacattgggggttttcttactacattggcatgcgtgggaagcagtgttcggttactctcgacacctccttttgaagagaggaaaagagtgactttgttgacggccgaatgactgtttcagggtgcctctattggacccttgatagatttggctattcaaatcgatccaagccttatctttagtgcatttgtgggaacatgcttggcctgtgcatgcttctcatgagcatacttggttgctaggcgtaaggagtacct

SEQ ID NO: 273382 - DNA, 431 bp, Glycine max
ggacctggggttggtcaaggcactgctgcagggcaagctgtagaagggattgcacgacaaccggaggcagagggaaaaatacgaggtactttattgcttagtttggcttttatggaagctttaacaatttatggactggttgtagcattagcacttttatttgctaatcctttagtttaatcctaaaaaaatagaaatacatatccttttttccgtggacttgctttaccggtcttgctttttcgaattctatttatattaatatttcactcctataattctttatccgttcggacaagaacacaggggaaggactaattgaaaggtgaagaattcacatactgattcgccctctttcttctcttttttagtccaatgacccccccctttttttaagataatttttctcaagtgttaaaacttgagagatt

SEQ ID NO: 273383 - DNA, 424 bp, Glycine max
  unsure (1)..(424): unsure at all n locations
ggttctagtgtgtgattgtttgttgttgtaactcgtgcttcttcttttgttgttctgtgtttgtgtttgttttttctctcacctgaaaatgtcttgctgcggtggtaactgtggttgcggaagctcctgcaagtgcggcaacggctgcggaggctgcaagatgtacccagacttgagctacactgagtcaaccaccaccgagaccttggtcatgggagtggcacctgttaaggctcaatttgagggtgctgaaatgggtgtgcccgctgagaacgatggctgcaaatgtggaccaaactgctcctgcaacccctgcacttgcaagtgaggtgttgggagagcaagctttcaagcagagatagccctttnttaggaataatgattaactattaatgtgtagctaataacttatgtattatgtctg

SEQ ID NO: 273384 - DNA, 324 bp, Glycine max
  unsure (1)..(324): unsure at all n locations
aaaaaaaaaaaaaaaaaaaaaaaaaaaaaaaaaaaaaanaaagaaaaaaaaaaaaaanaaaaaaaaaaaaaaaaaaaaaaaaaaaaaaaaaaaaaaaaaaaanaaaaaaaanaaaaaaaaaaaaaanaaaaaaaaaaaaaaaaaaaaaaaaaaaaaaaaaaaaaaaaaaaaaaaaaaaaaaaaaaaaaaaaaaaaaagggaaaaaaaaaaaaaaaaaaaaaaaaaaaaaaaagaaaaaaaaaaaaaaggaagaanaagaaaaaagaaaaaaaaaaaaaaaaaaaaaaaaaagaaaaaaaaaaaagaaaaaaaaaaaaaaataaa

SEQ ID NO: 273385 - DNA, 425 bp, Glycine max
gatcgagagtggggtgctcgcatgacaaaagcaggtctggttcctccagttactagaaaatatgaagtcattgaccaatattgcattgtagctgatgaggaggatgtgcgaaggaagatgagggtttcattacctgatgactatgctgagaaactgagtgcacaaaagaatggcactgacgagtcagatatggaacttcctgaagtaaaagattacaaacctagaaagcagctaggaaatgaggttatcgagcaagaagtttatggaattgatccttatacgcacaatcttttgcttgattctatgccagaggagttagattggtctttgcaggagaagcatttgtttatagaagacacactccttcgaacattgaataagcaagttaggaattttactggagctggaagtacttcaatgagcta

SEQ ID NO: 273386 - DNA, 342 bp, Glycine max
gacacacaacttgtttcaaggaaaatggctctggttggatttcttctgggacttttcttaatggtcactcatgtcaaggggtatggttttggaggttggaccaatgcacatgccaccttctatggaggtggtgatgcttctgggacaatgggtggagcttgtggttatggaaatctgtatagccaaggatatggaactgatacaacagcactgagcactgctctgttcaacaatggcttgagctgtggtgcatgctatcacattaaatgtgtgaatgatccacagtggtgcctttctggctccatcatagtcacttgcacaaatttctgtccacctggtggt

SEQ ID NO: 273387 - DNA, 377 bp, Glycine max
gattgtgaattcacttatttgtccacacagatactgcacttcctgggagttgaaggaccaaaaacttctgaccccagcaaatatattcgttatatttataacagagtacatcttgagaatgcgactgttagggctggtgctgtgagcacattggcaaagtttggtgctgctgttgatgaattaaagccccgcatattcatactgctaaggcggtgtctttttgatagtgatgatgaggttcgtgacagagcaacgctttatctgaacacacttggaagtgatggttcagttgttgagacagataaagatgtcaaagattttctctttgggtcatttgatatcccacttgtcaatctggagactaagttgaaaaacta

SEQ ID NO: 273388 - DNA, 351 bp, Glycine max
gatgatgaagtacttcttgcaatggcagaagagttgggagtgttcattccttatgttgggggagtggaacatgctagtgtgttgctgccaccgctggagacactttgcactgttgaggaaacctgtgtgagagataaagctgcggagtcactttgtagaattggatctcaaatgagggagagtgatttggttgaatattacatcccgttggtgaagagattggcagcaggtgaatggtttactgctcgagtctctgcatgtggactatttcatattgcataccctagcgcaccagatacatcaaagacagagttgagatcaatatacagtcagttatgtcaggatgacatg

SEQ ID NO: 273389 - DNA, 366 bp, Glycine max
gttacagaagtgtggaacaccatttatctcacggatgagagactcctctcccatggagtacgagattaaaaatagctcgcgatgcacctagtgggttaacatacctgcactaggaaatggattcccagataattatcagagatttcaaatcttcaaatatcctattgcatgaacagcggaatgctaagctatcagactttgggttagcaaggttgggaccatcagatggactgactaatgtcttaacagcggttgtcggaacaatgagatatgcagctcctgaatatgtgcacactggacgtataacatcaaagaatgatgtatggagctaccgtgtcttcctttatgaactcataactggcaggc

SEQ ID NO: 273390 - DNA, 389 bp, Glycine max
  unsure (1)..(389): unsure at all n locations
gatccaaaggaggcacgagctggtatcagggaggtccactttcttccattcaatcctgtggacaagaggactgctctaacttacattgattctgatggaaattggcatcgatctagcaaaggtgctcctgagcagatattgaacctctgcaactgcaaagaggatgtaaggaaaagggttcatggaacgattgacaagtttgctgagcgtggactccgttctttaggtgttgctagacaggaagtacctgagaaaaacaaggatagtcctggtgcaccatggcaatttgttggtctgctaccactttttgatccttcaaggcatgacagtgcggaaaccatcacangagctctgaaccttgtgtgaatgttaagatgatcacttgtgat

SEQ ID NO: 273391 - DNA, 274 bp, Glycine max
ccactttcttccattcaatcctgtgtacaagaggactgctctaacttacattgattctgatgtaaattgtcatcgatctatcaaaggtgctccttatcagatattgaacctcttcaactgcaaacaggatgtaatgaaaagtgttcatggaacgattgacaagtttgctcatcgtggactccgttctttatgttttgctatacattaagtacctgataaaaacaatgattgtccttgttcaccatggcaatttacttggtctactaccactttt

SEQ ID NO: 273392 - DNA, 368 bp, Glycine max
  unsure (1)..(368): unsure at all n locations
acatatgaacagtaaaaactagtaggtaaattgagactagaactcatagggaagaaaatagatttatgaatggaataaaatatgcagtatttacagacaaaagtattcggntattggggaaaaatcaatatacttttaatgtcgaatcgggattaactaggacagaaatcaagcattgggtcgaactcttctttgatgtcaaagtaatagctatgaatagtcatcgactcccggtaaagggtagaagagtacgacctattatgggacatacaatgcattacagacgtatgattattacgcttcaaaccgggttattctatttcacctcttagaaagaaaaaaacttaaattaaaatacttaatagcat

SEQ ID NO: 273393 - DNA, 402 bp, Glycine max
ggagatgggacttgtaataatgggcagttctatgaatgcctgaacatggcagctctgtggaaattgccaattgtgtttgtggtggagaataatttgtgggctattgggatgtcgcatctcagagcaacctcagatcctcagatatggaagaaagggccagcatttggaatgccaggggttcatgtagatgggatggatgttttgaaggtcagagaggtggcaaaggaggcagttggaagggctagaagaggtgagggaccaactctagtggaatgcgagacctatagatttagagggcattcattggctgatcctgatgagcttcgtgaccctgctgagaaggaacactatgccggtagggaccccatcactgcattgaagaaatacctttttgagaacaat

SEQ ID NO: 273394 - DNA, 377 bp, Glycine max
gacttcaaagtggagaaaaacacacacgggtgggtcattctctctcttgtctttttcctcaaaaagttgaaaaagaataaagggggaacaatcgagtgaagttgttgctcttcaatagtaaacttacctatggaagagggaagggttgtgagtgggtacacaaaagatggaactgtggatcttaaagggaaacccattctcaaatccaaaagtggtggttggaaagcatgctcctttgttgttgggtacaagatatttgaaagaatggcttattatggaatatcatcaaatttgatactgaatctgactaggaagcttaaccaaggcactgtgaccttttccaacaacgtgaccaattgggttggcaccatttggat

SEQ ID NO: 273395 - DNA, 393 bp, Glycine max
ggaagaaaggcagagttattgccattgcgtctgcctcttgcaacaccaaactgatacacacttaataatattatagtaaaaattagccaccaaagtacactaaccccttttttcatacaactcaatagctggattggagcaaggtgaaagtaaaatcatttgcaaccaatgccgttgaacatatttcaggacaaagatggattgccacggattatattgactgagccaaagggttcatcagctgaggttcttctttatggagggcagattatttcttggaagaatcatcgaaaggaagaacttctttttatgagcagtaaggctaacaagaaacagcataaagcaatcagaggaagaatatcagcttgcctagcacggtttggtgatctcagt

SEQ ID NO: 273396 - DNA, 341 bp, Glycine max
gtagtgctctattggaaatgatgatatggcatgtaccctctccatcaacagcccataagtatcgtgtggagaacttgtatgagggtcctcttgatgatcaatatgcttctgctatcagaaattgtgatcctgaaggtcctctgatgctctatgtctccaagatgattccagcatctgataaggggagattttttgcctttggccgtgtattctttggcagggtttcaactggtttgaaggtgaggattatgggacctaattatgtccctggggagaaaaaggatttgtatgttaaaagtgggcaactaactgtcatttggatgggaaagaggcaagaaact

SEQ ID NO: 273397 - DNA, 383 bp, Glycine max
gacactaaacaagttggaagaagagcatcactgaactaacaaagcaaccctatgtcgaaggtggtttgtgtcaccggagccagcggcgccatcggatcatgggtggtcctactcctcctccagcgtggttacaccgtccatgccaccgtccaagatatcaaggatgaaaatgagacgaaacatttggaggaaatggaaggagcaaagagtcatctccatttttttgaaatggatcttcttgacatcgactccattgccgctgccataaagggttgttccggcgtaatccaccttgcatgtcctaacatcattggtcaagtcgaagatcccgagaaacagatattggaaccggcgataaaaggaacggttaatgtgttgaaggc

SEQ ID NO: 273398 - DNA, 351 bp, Glycine max
gacggacgagggtttcgtttcgggtttgacgttgttcacaatcactttctgcgcttcactcactcccttcgtgcggttttctttctttgtcgaactcgtgcgaaaatgcgtgagattcttcacatacagggagggcaatgcggaaaccagatcggagcgaagttctgggaggtggtgtgcgcggagcacgggatcgattccacggggaggtaccagggggacaactagttgcaactcgagcgagtcaacgtctattacaatgaagcgagttgcggaaggttcgtgccgagggcggtgctcatggatctagagccagggaccatggacagcgttagatctggtccctacggt

SEQ ID NO: 273399 - DNA, 350 bp, Glycine max
gggttctagtgtgtgattgtttgttgttggaactcgttcttcttcttttgttgttctgtgtttgtgtttgttttttctctcacctgaaaatgtcttgctgcggtggtaactgtggttgcggaagctcctgcaagtgcggcaacggctgcggaggctgcaagatgtacccagacttgagctacactgagtcaaccaccaccgagaccttggtcatgggagtggcacctgttaaggctcaatttgagggtgctgaaatgggtgtgcccgctgagaacgatggctgcaaatgtggaccaaactgcttcttgcacctctgcacttgcaagtgatgtgttgggagggcaagcttc

SEQ ID NO: 273400 - DNA, 453 bp, Glycine max
gagttcagacggtgatgctgctgcatccccacctatgggtgttgcttcttgtgttacaacagtttctgaggttgcttcctcttcctattccagtgagtttgaagccaggcttaagaatttgttgggttctcattctgataaccctaaccttacccctgaggaggttgtggaggcttcaaaagctgcagcagtggctgcatctaaagctgcaaaggctgcaagagctgcggccaaggagaaggccgagactgcagcataggcagttgcagctgccaagagggctttggatttagtttcctccttctctgaagaggcagtgagcagcatggagaggaacctaacgaagaacatgctcatgaagcacctaccagttcatctcttgtacaaaacataccagcccattgaaaattgtgggactgatgaagaattggccaggaagtacatcgcgccatg

SEQ ID NO: 273401 - DNA, 382 bp, Glycine max
ggggctgacattcacgaagcttttgaggcggcttttcgcgaaggaggaaatgcgaattctgatggttggtcttgatgctgctggtaagaccactatcctctacaagctcaagctcggagagatcgttactacaattcctaccattgggttcaatgttgagactgtggaatacaggaacattagcttcactgtatgggatgtaggtggccacgacaagattcgtcccttgtggaggcactacttccagaacactcatggtcttatttttgctgcatacagctatgatagggacagaattgttgtagccatacattatttacatatgatgttgaatgaggatgaactgatagatgccgtattgcttgagtttgcataacaaatc

SEQ ID NO: 273402 - DNA, 307 bp, Glycine max
ggaccaagagattaagtcttggcttgcgtttgcagcacaaaaagttgttgaagtaaatgccttggccaaggcattgtctggacagaaggatgaggttttcttttctgctaatgctgctgccttggcttcaaggaagtcctccccaagggtgataaatgaggctgtccaaaaagccgctgctgctctgaagggctctgatcatcggagggccacaaatgttagtgccaggttggatgctttacagatgaaattgaatctttctgttcttccaacaactacaattggatctttccctcatactggcgat

SEQ ID NO: 273403 - DNA, 449 bp, Glycine max
ggtcgcgtgataccatttaatttcacagcgattaggtatggatagttaagtgtggagtgcagtgcaggtcaaggcctgagattcggttctttacttgttgggttgttctgatcttctctcatagcaatcaaatcacactcccatcttctcatctcgtaaaccctaaaccccgttttcagtgacatcgagatcgatcgaacatggatgaggagtacgatgtgatcgtgttgggcacgggtctcaaggagtgcattctcagcggtcttctctccgtcgatggcctcaaggttctgcacatggacaggaatgactattactgaggagaatccacttcgctcaatcttattcagctttggaagagattcaggggagatgactagcctactccacatttgggagctagcatggactataacatcgatatgaaccctaagttaatatggctaatg

SEQ ID NO: 273404 - DNA, 393 bp, Glycine max
gacagggaaagcaaaatatctgatctttcgccctcccttgcactgagtaggcaatggcggaggaagcacagtactcatcgggacccgattccgcgcccctcaagcgcaagtacgaagaccaaccctccggcatcgagcttgccaagcagcgtgctcaggaagtcgccgcacgcctcctcaacgccgctcctcctccgccactcgacgccaagcgtcccaaacccgacaccggcttcgattctctcgatttgaagcctctgtattccgcatctcctcctcccgtctcctacggtcaccaaggttccagcaagaagattgatatccctaatggcagggttggtgtgattattggtaaaggcggagagactattaagtatctccaggtgcagtctg

SEQ ID NO: 273405 - DNA, 387 bp, Glycine max
gttctgagcagaaaccaatttagtggccgcattcctcaaaatattggaaacatttcaaagcttaggcagcttgatttgtcactgaataatcttagtggagaaattccagtcgcctttgataatctgcgtagtcttagttgcttcaacgtttctcataacaacctatctggtccagttccgaccctacttgcccaaaaatataactcgagctcatttgtggggaatattcaactatgaggctatagcccttcaaccacatgttgctgactagctccttctggttcacctcctgaaatatcagaacaccgtcatcataataaattaggcaccaaagacataattctcatagtagcaggagtgctccttgtagtcctggtaacaatttgc

SEQ ID NO: 273406 - DNA, 390 bp, Glycine max
gcattacctacatccattcactgtgaaccaattggacagtttaaggtaccaagctatgaacattgtggtggttaggcttgggagagcagaaccaccccttaggaaagaggttgtggagtacatgcttgatgtggactctcacatatggagcatgagaagaagcaaagccaatttcttcagaattgtgtcactcttttctggtgcaatatctatgagcaagtggcttggtgaggtacaacagtggaagaatccagtgaccacaatcctagtgcatgtcctctttttcatcttgatatgttaccctgaactgatcctccccacaatgttcctctacatgtttctcattggaatatggaactttaggtttaggccaaggcaccctccacacat

SEQ ID NO: 273407 - DNA, 411 bp, Glycine max
gaacaaaaaaaagtagagaatttgctttgcgaggaagtaagtaggagatgctctgaactttcaaatttgtacaacccctaggaagagaagaagaaggttcaaaatccaatccatttttcatttcgaaagatcgtgatcgcaatgtccctctccaccgtgaggcagcggcgctcggagccgtctgatccgtcgccatcagaaccgtacacgaagctggacaagcccgagaaagcggaggagaaagacgaagggttggggtgggttttcccgttcgtggctcttgggttattgaggtacatgagtgccaccttcaacatcatccacgattgcgacgaggtcttcaattactgggagcctcttcatttccttctctacaaatctggattccagacatgggaatacagttcacag

SEQ ID NO: 273408 - DNA, 356 bp, Glycine max
ggaggataatggacttgttatgaacttctacaaggaatcatgccctcaggctgaagacatcatcaaagaacaagtcaagcttctctacaagcgccacaagaacactgctttctcctggctcagaaacatcttccatgactgtgctgttcagagttgtgatgcttcactgttgctggactccacaagaaggagcttgtctgagaaggaaacagatagaagctttgggttgagaaatttcaggtacattgagaccatcaaagaggctttggaaagggaatgcccaggaattgtttcctgtgctgatatcctccgtctctctgccaaagatggcattgtttcgctaggagggccccata

SEQ ID NO: 273409 - DNA, 362 bp, Glycine max
ggtatcaagaaattttgactgatcctagggatgctggccagtttgtgctcatgacaaacccacatattgggaatactggcataaattttgatgatgaggaatcaatacagtgtttccttgctggacttgtaattagaagtttgagtatcagtacctctaactggagatgtaagaagcctctgggggattacctagctgaaaggaatattatgggaatgtatgatgttgatactcgcgcaatcacgctgcgattgctgctagatggctgtcttattggtgttttgagcactttcaattcctaaatggatgaggaactgctttacatgtctaagttatggaacatttgtggtaatgatctaata

SEQ ID NO: 273410 - DNA, 384 bp, Glycine max
gggtgcacggttcagtatgtttgagatgagagttaagatagctttggcagagaaaggaatcaaatatgagtacatggaacaagatctcaccaacaagagtactttgcttcaagaaatgaacccaattcacaagaagattccagttctcatacatcatggaagacctatctgtgagtccctcataattgttgagtatattgatatggtttgggacaacaattgtcctttgcttccctctgatccctaccacaaagctcaagccaggttctgggctgattttgtagatcagaaggtgtatcatgcttctaagagagtttggatttcaaagggagatgagaaagaggtggcaaaaaaggacttcctagagagcttaaaacaattgga

SEQ ID NO: 273411 - DNA, 282 bp, Glycine max
ggtgtgagttcattaacatatacaaatggtctgtgttgtgttgtgtacttgtgttaattgtgttgttgttgtaggaaatttaagtgaagagagaatgatgatgaagtctgctatgtgtgcattggtgcttgtggcactggttgtggttgaagtagtggcccatggctgaagctgttgtgacttgcaacccaacacagttgacttcttgtcttccggcaattaattcaggttctgcaccttctattgcttgttgccagaagctgaaagagcataatccatgct

SEQ ID NO: 273412 - DNA, 376 bp, Glycine max; identical to SEQ ID NO: 237433

SEQ ID NO: 273413 - DNA, 392 bp, Glycine max
tccagtcgtacgtacagatccaagaggcctccttaagggggagcaggattgaacagcgatgagactggctcccaacgctgcaatcttttagactgagctatgctaatcaccactgcaactgattctgtgtattgctgatgataatgtacttggtatgaactcttacgtggactcatgctctcatgctgaacacatcatcgaagaacatgtcaatcttgtgtacaaacgctacaagaacactgctctctcccggatcaaactcatcatgcatgactgggctaatcagagttgtgatgctgcactgtggctggactccacacgaaggagctcttatgagaatgatacacatagactctttgatatgagagattctatgtacattgagaccatca

SEQ ID NO: 273414 - DNA, 297 bp, Glycine max
tgggccgaggaaatgatagaaatacaaaaagaagggcattacacatcgtccgtagatttcctattctctgcttcggaagaaagagaaaacatacaaaacaatgtctttcgcttctttccttttcagagtcctatttgctactgtcttcatactctctgcttaccaacaatttaatgaatatagagttgatggaggacctgctacataagcactcatacctaagtttgatgcctttacacatctgtagcattctcaagtgggctttcatattccagatattaatcttaaatttataat

SEQ ID NO: 273415 - DNA, 378 bp, Glycine max
gacacagaacaatagtagcaagcagaggcccgagatctgtgcttgaaccttcacttgtgtttccttccttctgcagacgagcttcaccttgcgccgaagggccacagatggttgaaaccgatatggatgccgaaactgttgcaaatgtggttccaccaaaggagactccaaacagtgttcccatctcttatcattcctcacactcacaccctcctcttaatgagaggattatttcatccatgaccagaagatctgttgctgcacacccgtggcacgaccttgagataaggcctggtgcttcaacgatccttaattgtgtgattgagatttggaaagggagcaaggtgaaatatgaactggactaaaaatcgggtctta

SEQ ID NO: 273416 - DNA, 381 bp, Glycine max
ggactgaagacagatgatggtgctcatcaattacccaccattgcaatagttgcttcatatgacacctttggggctgctcctgcattatcagtgggaagcgatagtaatggaagtggcattgtggctcttcttgaagtagctaggttgttttctctcttatattctaatccaaagacaagaggacaatacaatctgctgtttgggctaacgtctggtgggccttataactacaatggaacccataagtggcttatgagctttgatcaacgtctgcgtgagagcattgactatgctatttgcttggatagtattggctcttgtgaaaatgaattgtggattcatgtatctaagccttcagaaaatgcctttattaagaaaatt

SEQ ID NO: 273417 - DNA, 388 bp, Glycine max
  unsure (1)..(388): unsure at all n locations
ggtcttggtgatggatagacacaaatgcgaggctttgttcaaggtctttcagcaatggcagagcccttggtgggcacatgaaggctcaccttgcttctctccctctccctctccctccaaagcttcactcttgtttctcttcctctgactcagaacaagaacaatctttaagggagaatcctaagaaaaccttgaggattctggatcctgaagacagagagagcgagacagagtctaataagaacccgactcgtcaacgatccaagcgcaactggaaatctaccatgcccaagctcagcctcggacaccccgaagccgaacctctcagctccgtctccgacacctnccccgaagaagacctcgccatgtgcctcatgatgctctcccg

SEQ ID NO: 273418 - DNA, 387 bp, Glycine max
ggcagatgagggtgctatttctctatggagaggaaacactgctaatgttatccgttatttccccacccaggctttgaactttgcatttaaggattacttcaagaggcttttcaactttaagaaggatagagatggctactggaaatggtttgctggcaactcggcctctggtggtgctgctggtgcatcatcccttttgtttgtttactctcttgactatgcccgtacccgtcttgccaatgatgcaaaggctgcaaaaaagggtggagagagacaattcaatggtctcgttgatgtctacaggaagacattggcatctgatggtgttgccgggctctaccgtggtttcaacatctcatgtgttggaatcatcgtgtatcgtggtct

SEQ ID NO: 273419 - DNA, 421 bp, Glycine max
ggagagtgagtgagatagagagagacgcttcgcgggtctgaatcgaatctcagaaaaatgagagaaatcatcagcattcacataggtcaggccgggatccaggtcggaaactcctgctgggaactctactgcctcgaacatggcatccagcccgacggcatgatgccttctgactccaccttcggtgtagcccacgacgccttcaacaccttcttcagcgaaaccggatctggcaagcacgtgccccgtgctgtcttcgtcgacctcgaacccaccgtcatcgacgaggtccgctgcggcacctaccgtcaactcttccaccccgaacaactcatctccggcaaggaagacgccgtcaacaacttcgcccgcggccactacaccgttggcaaagagatcgtagatctgtgcttggatcgcg

SEQ ID NO: 273420 - DNA, 452 bp, Glycine max
  unsure (1)..(452): unsure at all n locations
gggttctagtgtgtgattgtttgttgttgtaactcgttctgcttcttttgttgttctgtgtttgtgtttgttttttctctcacctgaaaatgtcttgctgcggtggtaactgtggttgcggaagctcctgcaagtgcggcaacggctgcggaggctgcaagatgtacccagacttgagctacactgagtcaaccaccaccgagaccttggtcatgggagtggcacctgttaaggctcaatttgagggtgctgaaatgggtgtgcccgctgagaacgatggctgcaaatgtggaccaaactgctcctgcaacccctgcacttgcaagtgaggtgttgggagggcaagcttcaagcagagatagcccttaattaggaataatgataaactattaatgtgtagctaanaacttatgtattatgtctgtgatggttttcgtgcactcttgtgtttt

SEQ ID NO: 273421 - DNA, 397 bp, Glycine max
cccacgcgtccgactatactctaggaagcatggacaccaccgccatggcatccaaggtgctggcattgttcgctatgttagctgataatacaatcaccactattactacatatataataatgcgactagtgctatggcatgcttattcttgctatgaacgtcatgcaaccattactctatgattcatcattctcctgttgccttgagttcatgatgggcaatgtgaacgtgactactgaagaacaagaagtttctgcaagtgcaagggcaaccgatgagaacgccatgcctcagtatactgccacctctactactgctatgcattatcccctcatattcgctgctcaggttcctgtggttccgctacatagacctgatgagatgcatgttccaagtt

SEQ ID NO: 273422 - DNA, 300 bp, Glycine max
gacactgttgaagtggatgctataacacaccgaatgacatgtaaaacaggggtagtgaatataccatatggtggtaccaaaggagggataggctgttacccagcagaattaacaatatctgaattagacagacttactagagattttacactgactaatcacgatcagattggttctcacacagatgttccagcacctgatatgtgaacaggaccacagaccatgtcatgggatactatatcaattttccaaatttctacgttacttttctgcagtagtttactggaaaacctttatata

SEQ ID NO: 273423 - DNA, 213 bp, Glycine max
gagggcgaggaagccggatggagacacaatacagagtgagttgttgctccttcgtcacaactctctgccaacatgggtatctccagagattctatgcacatgaggctttccactggtggcaagaagaaggcctggaggaaaaagagtaagtatgatcttggtcgccagcctgctaacactaagctgtctagcatcaagacagtcaggaggatc

SEQ ID NO: 273424 - DNA, 394 bp, Glycine max
tactgatggtgggggtaaaaattggattaaatccatgggccttacagcatcactgttcccattcatgtgctttggaattggttctattttaaacacaattgctatattctatggatctctagctgcaatcccctttggtactatggttgttgtctgtgttatatgtgcttatatctatttgcctctagcacttcttggcacagttgttggaagaaacttgactggtactgcatataatccatgctgtgtgaagaccattcctagtcccattcctgagaagaaatgttacctcacaccatctgtagtttcgctgatgggacgactgctttcctttggcagcatattcatcgagatgtagtctgtattcacttgcttctggaattacaaggtgtac

SEQ ID NO: 273425 - DNA, 456 bp, Glycine max
ggtgttattgaagagtagggataatagaatccgtatcgtagcaaaacgcacgagttaggggcggcgatgggaggttcatcggaggatttctcggtggtggtgctggcgtcggacctcggcgtcgatgcgcgacctttcctcgaacacgatcaacagcaagaagaagagaattggcacgactgttcccagtacctctcccccgacgaggacttctccgatctcgatcagttgcaattcctccgcctccaaggctccgacaagaactccaatcgcattctccgcatcgtcggcaagtactttcccgcaactgttgtgagtgcggagcggctcaagcggtatgtgttcaacaaaatttgcagtgagttgcctgaggggcccttctgtattgcttacatgcacagcaccgttcagaaggaggataattcccctggcatcaccatcttgaggtggatctat

SEQ ID NO: 273426 - DNA, 418 bp, Glycine max
gaggtgcagagagaggaattgaagcatgggaagagggaaggtggttctggagagaatacagaacaagatcaatcgccaagtaaccttctcaaagcgcagaaatggtttgctcaagaaagctttcgagctatctgttctatgcgatgctgaaatcgctctcgtcatcttctccagccgtggcaagctttttcagtatagtagcactgacattaacagaatcattgagaagtatcgtcaatgctgcttcaacatgtctcagactggcgatgtagctgaacatcaatcggagcaggagcttttggtattaagagtcaagcatgagtcactccagcggactcaaaggaatcttctgggagaagaactagagccacttagcatgaaagaattgcatagtttagagaaacaactggatagaacg

SEQ ID NO: 273427 - DNA, 386 bp, Glycine max
acagatgatgggagtgtacacacagaggaattgcagcgatgggtcgagccatagtcgtgctgtatatattaccgaacaagatcaatcgtcaagtatccttctcaaagcgcataaatggtttgctcaataaagctctcgagctatctgttctatgcgatgctgaaatcgctctcgtcatcttctccagccgtggcaagctttttcagtatagtagctctgacattaacagaatcattgagaagtatcgtcaatgctgcttcaacatgtctcatactggcgatgtatctgaacatcaatcttaacatgagctattggtattaagagtcaagcatgagtcactccatcggactcataggaatcttctggtagaagaactagagccactt

SEQ ID NO: 273428 - DNA, 417 bp, Glycine max
gcagtgagcgagagtgaacagcgaacagaatggctcccaggggtttaatctttttggctgtgttatgcttctcagcactgtcactgagtcgttgtcttgctgaggataatggacttgttatgaacttctacaaggaatcatgccctcatgctgaagacatcatcaaagaacatgtcaagcttctgtacaagcgccacatgaacactgctttctcctggctcagaaacatcttccatgactgtgctgatcagagttgtgatgcttcactgttgctggactccacatgaaagagcttgtctgagaaggaaacagatcgaagctttgagttgagaaatttcaggtacattgagaccatcatagacgctttggagagggaatgcccattagttgtatcctgtgctgatatcctagttctct

SEQ ID NO: 273429 - DNA, 393 bp, Glycine max
gacgttagatcatgtgtttatcgcaagaaaacacggcgtgggtcatcaacattcatggaaaaacagataccttttactggaatattaagcaataatgttgaagataatccagattttttcaactggaacagagtgaaaattcgttattgtgacggtgcctcttttgctggggatggtgaagataaggctgcgcaactgcaatttggaggacagcgtatttggtcggcagcaatcgaagatttgatgtcaaagggaatgcgatttgccaggcaagctcttctttctggatgctcggctggtggtttggctactaatatacaactgtgatgaattcagaaggttttttcccacagactacgaaagtgaagtgtcttaatgatgcaggattatttt

SEQ ID NO: 273430 - DNA, 342 bp, Glycine max
ggccatcaaaaggaatagtttgattggaggagatgactttaagagtggtcagaccaaaatgaaatcggtgttggtggatttcctagtatgggccggcatcaagccaacatctatagtgagttacaaccatttgggaaacaatgatggcatgaatctctcagcccctcaaaccttccgctcgaaggaaatttccaagagcaatgttgttgacgatatggtcaacagcaacgccatcctctatgagcctggtgaacattcggaccatgtggttgtcattaagtatgtaccttacgtttgtgacagcatgatggccatggatgagtacttctttgagatattcat

SEQ ID NO: 273431 - DNA, 372 bp, Glycine max
gaatcaagtgaaagctctgatgaagacaatgatgcataacccgccgtaactgatgtgtcaaagccttctgctcttgcaaagaagaaggttgacagctctgattctgatgatagcagctctgatgaagataaggggaagatggatattggtgatgatagttctgatgaaagtgaagagccacaaaagaaaaagactgtgaaaaatccataagaaagcagtgatagttccgaagaagacagtgaggatgaaagtgaggaggaaccctccacaactcctcagaaaagagacagggatgtggagatggttgatgctgcctcgtctggaaagaaagcgcctaagaccccagttacacccaaagaaaaaactggcgct

SEQ ID NO: 273432 - DNA, 369 bp, Glycine max
gatacaaaaagttcttatcagtgacagagtaaaggaggcataccgatgacgatggcgatgacggcgtcgcagttgcggtgcggttgggggtggaggccaacgccgaatcagcagcagcaacgacgtcgtatggttccggtggtgtgttccatcgctatagagaacgcgaagaacaaagagagagcgaaactgaagaagctcttcgatgaagcgtacgagaggtgccgcactgctcccaccgaaggcgtttccttcactctccaacaattcaccgacgctctcgacaagtacgacttcaacgccgaaatgggcaccaaggttaagggcactgtttttgccacggataacaatggagcttatgttgacatt

SEQ ID NO: 273433 - DNA, 423 bp, Glycine max
ggtggtggtggtgccaatattgggactggcaccaccaattattggaacctcaatatgtgccaagaagtgaataatcctgcaaagaagggtgtgatcaacgtggctgatcatgatgatgagaagggtgtgatggagagtgaggaaaacggggtctatgggcctgactttagggtgtgccaagattgtggcaacatgcgctaagaaagattgcgtctttagaagatgcatgacttgctgcatgggacgtgggtatgattgcaacactcacgtgaagagcacgtggatccgctacgttcgacgactctagcgcgatatcacggtggctctcggtggctgtgttagcggatatggtggtctgtagatgccaatatctgtgctggggtcatctcataatgccacttttcatagttacaactctaatgc

SEQ ID NO: 273434 - DNA, 447 bp, Glycine max
ggaggaaaagtgtgagaacgaaaatggagcattgtagctgctacatgttcacgctgagccttcttcttcttcttcttcttactccgccttctctctccgacgatctcggattcgattttccggcgaagaagctgataagagaccttaacctttttccttctgaagatgtcaacatcgttcctcgccactccaattctcacgccaacaaaatcgtcgagaaaccgcttaggttcccaaacttagtgccttcagactccggcatttccctcgacgacttggctcaccgagctggctattatcttattcctcattctcatgctgccaagatgttctacttcttctttgaatcaaggaacagcaagaaggatcctgatgtgatttggttgactggtggaccaggttgcagcagtgaatcggctgagttttatgagaatggccctttcaaga

SEQ ID NO: 273435 - DNA, 438 bp, Glycine max
gactgacaagatgcatgatacaagactctaatcctaaatctaaggagagaaaaaatttcacaagataatcagcaaataaaatttgtaatgaattttgagtaattcttagtttagaaaaaagtgaaggacacttgagtctagaattacttatattaatttgattctgtcgagaagcttgagcgagtagagttgaggattgagtaacggagatgtagcagagtcacccggctattcaacaggactttccgttttattcatttcacttttgaatcttcgaatcacatccgatgggtagcagagggcacactctcttggaggttggacccgacgacggtgttgccgtcatcaccatcgtcaaccctcccgttaattcactctcatttgacgtattgcgcagtttaaaggagagttttgatcaggcgatacatagagatgatg

SEQ ID NO: 273436 - DNA, 381 bp, Glycine max
gaaaaaatttgaatctattggtatatgcgaatcaatcctactacttctggtcctgaggtttctgcgcttgaaaaaaaaaatctgggacgtatcgcccaaataattggtccggtactagatgtagcttttcccccaggtaagatgcctaatatttacaacgctctgatagttaagggtcgagatactgttggtcaacaaattaatgtgacttgtgaagtacagcaattattaggaaataatcgaattagagctgtagctatgagtgcgacagaaggtctaatgagaggaatggaagtgattgacacaggagctgccctaagtgttccagtaggtggagcaactttaggacgaattttcaacgtgctgggaaagcccattgat

SEQ ID NO: 273437 - DNA, 283 bp, Glycine max
gacgataaagggtttttgttttgtttccttgggggctgcatgcactttcactcgaagaaccttgaagcgagtctgggccacagcaaccagcgacaacaactcaatcagctagggttgctttgcttgctatcttgttggaggattttctgttcaagagaagatggtaactagaattgtggatcttcgttcagacacagttacaaagccaactgaagcaatgagagctgctatggcaagtgctgaagttgatgacgatgttctaggctatgatccaactggtttt

SEQ ID NO: 273438 - DNA, 396 bp, Glycine max
ggatgaagataggatgcttctgaaattccgatgcgtcaataaggtccttaagtaaaaaatactactgtcgtcacagatctgaatctggtcccctctggtatcgtgtagtactagtattttagttgcatctaataaatgaggatacccaagaagttgatttaataaatgttcaccaacttaacataagctatttgattttgctgacaaatacagaggcaaatatgacagcagcatcacggttgcccaaaagtattacagatccatcagtggttacaatgatgaattgctctgggctgctgcttggttgtatcaagcatctaacaaccagtattacttggattaccttggaagaaatggtgattccatgggtggaactggttggagcatgactgaatt

SEQ ID NO: 273439 - DNA, 383 bp, Glycine max
  unsure (1)..(383): unsure at all n locations
ggaggagactgagaaaacagaagaaaacaaaatggaagacacagtttctgcgttgaggtctttgatggtttctcactctccgccgctggatgccttagtggtgccctctgaagattatcacctgagcgaatatgtgtctgcacgagacaagcgccgcgaattcgtttccggcttcactggaagtgccggcttggcacttataacaaagaaagaagcactgctgtggacggatggacggtattttttgcaggctgagaaagaacttantgctgggtggaagctaatgcgaattggtgaagatcctgctgtaaatatctggatggccgataatttgccaaaagaagcattcgttggggttgatccctggtgcatttcaattgata

SEQ ID NO: 273440 - DNA, 428 bp, Glycine max
gccggatgagcagaggaatccaattcaagaatatcaggttgctcacattcctggtgcccttttctttgatgtagatggaatagcagatcggactacaaaattaccacacatgctgccatcagcggaagcgtttgctgctgctgtttctgctcttggcatagagaacaaagatgatttggttgtttatgatggaaaaggattatttagtgcagctcgtgtttggtggatgttccgagtatttgggcatgacagagtttgggtattagatggtggcctgccgagatggcgtgcatcaggttatgatgttgaatccagtgcttcaagtgatgctattcttaaagccagtgctgctactgaggctatagagaaagtatataagggacaaacagttggcccactcacatttcagactaaatttcagccacatc

SEQ ID NO: 273441 - DNA, 446 bp, Glycine max
gaacatacggatgaacattatattgggaactgcaagaggattggcctatcttcatgagggtcttgaaccgaaagttgtccaccgagatgtgaaatcaagtaacatacttattgatcgccaatggaactccaaggtttccgattttggacttgctaagcttttgtgttctgagaatagttacgtcacaactcgagtgatggggacatttggttatgttgcaccagaatatgcatgcactggaatgctgactgagaagagtgatatttatagctttgggatacttatcatggagataatcaccggaagaagtcctgttgattatagtagaccgcatggagaggttaatttaatagaatggttgaagactatggttgggaatcgaaaatccgaggaagtagttgatcctaagctccatgagatgccattttcaaaggctcttaaacgtg

SEQ ID NO: 273442 - DNA, 377 bp, Glycine max
ggcagcgcttgagaccaagccccactcaaccaccacaccactctctctgctcttcttctacctttcaagtttttaaagtattaagatggcagagacattcctatttacctcagagtcagtgaacgagggacaccctgacaagctctgcgaccaaatctccgatgctgtcctcgacgcttgccttgaacaggacccatacagcaaggttgcctgcgaaacatgcaccaagaccaacttggtcatggtcttcggagagatcaccaccaaggccaacgttgactactagaagatcgtgcgtgacacctgcaggaacatcggcttcgtctcaaacgatgtgggacttgatgctgacaactgcaaggtccttgtaaacattg

SEQ ID NO: 273443 - DNA, 413 bp, Glycine max
ggaagaaaggcagagttattgccattgcctctgcctcttgcaacaccaaactgatacacacttaataatattatagtaaaaattagccaccaaagtacactaaccccttttttcatacaactcaatagctggattggagcaaggtgaaagtaaaatcatttgcaaccaatgccgttgaacatatttcaggacaaagatggattgccacggattatattgactgagccaaagggttcatcagctgaggttcttctttatggagggcagattatttcttggaagaatcatcgaaaggaagaacttctttctatgagcagtaaggctaacaagaaacagcataaagcaatcagaagaagaatatcagcttgcctagcacggtttggtgatctcaagtcacttgaacaacatggatt

SEQ ID NO: 273444 - DNA, 420 bp, Glycine max
gtagtgctctattggaaatgatgatatttcatgtacccgggccatcaacagcccagaagtatcgtgtggagaacttgtatgagggtcctcttgatgatcaatatgcttctgctatcagaaattgtgatcctgaaggtcctctgatgctctatgtctccaagatgattacagcatctgacatggggagattttttgcctttggccgtgtattctctggcacggtttcaactggtttgaaggctaagattatgggacctaattatgtccctggggagaaaaaggatttgtatgttaaaagtgtgcaacgaactggcatttggatgggaaagaggcaagatactgtagaggatgtcccctgtggtcatacactggctatggttggtcttgaccaagtcatcacatagcatgcaacattgacaa

SEQ ID NO: 273445 - DNA, 414 bp, Glycine max
gtcggacgagggtttcgtttcgggtttgacgttgttcacaatcactttctgcgcttcactcactcccttcgtgcggttttctttctttgtcgaactcgtgcgaaaatgcgtgagattcttcacatacagggagggcaatgcggaaaccagatcggagcgaagttctgggaggtggtgtgcgcggagcacgggatcgattccacggggaggtaccagggggacaacgagttgcaactcgagcgagtcaacgtctattacaatgaagcgagttgcggaaggttcgtgccgagggcggtgctcatggatctagagccagggaccatggacagcgtcagatctggtccctacggtcagattttccgacctgataacttcgtcttcggccagtccggcgccggaaacaactgggccaaa

SEQ ID NO: 273446 - DNA, 423 bp, Glycine max
  unsure (1)..(423): unsure at all n locations
gggttctagtgtgtgattgtttgttgttgtaactcgttcttcttcttttgttgttctgtgtttgtgtttgttttttctctcacctgaaaatgtcttgctgcggtggtaactgtggttgcggaagctcctgcaagtgcggcaacggctgcggaggctgcaagatgtacccagacttgagctacactgagtcaaccaccaccgagaccttggtcatgggagtggcacctgttaaggctcaatttgagggtgctgaaatgggtgtgcccgctgagaacgatggctgcaaatgtggaccaaactgctcctgcaacccctgcacttgcaagtgaggtgttgggagggcaagcttcaagcagagatagcccttaattaggaataatgataaactattaatgtgtagctaanaacttatgtattatgtct

SEQ ID NO: 273447 - DNA, 420 bp, Glycine max
gagagggaaaagagttgaagacttgaagtgaagaaagaaagaattgagaaaggatagggtttagggttggcaaaggaaggaagggatggaagcagctgtggtggacgtcggctctaagcttctcaaagcggactttgcaattcctgaccagactcccgccatgataattcccactcagatgaagcaattgctcgatgatggatcagtcactgatagttcactggctgacaatgtcaccgttgatcccgtcgtgcgaggatttattagagattgggatgccattgaagatttgttgcaccatgttttgtatactggcctcggatgggaaattggcaatgaaggacaaatactatttactgatccactttgtacccctaaggcgaacaaagaacagctggtgcaactaatgtttgaaacatt

SEQ ID NO: 273448 - DNA, 386 bp, Glycine max
cggttgaagtcattgcaaggagcattgctcagctgtacggacactgtacttgactatgcacaaaccggtttgattgcagcagtgttcttctttaaaatgatggaatggtggtaccaatctgctgaggagagaatgtcagctcctacagtatatccttctacacctccttcgtcttcaccaaaggtagccaaagaagggataccactaccaccagacagaacaatttgccccttatgctcgcaaaagcgtgcatatccatctgtagttactgtttcagggtatggctactgctatgcttgcatatttaagcatattactcaagataagctctgaccaattacgttaatgcctttaacagttgacctgattaggagactttttcatga

SEQ ID NO: 273449 - DNA, 392 bp, Glycine max
ggcgcattgaacgaaaattagggtttgtagtgtagcaggaagaagcagcaatggcgccgaagataacacgtaaggttagcagaaaccctgaattgataaggggaatcggaaagtactcgaggtcgcagatgtaccacaagaggggcatttgggctatcaaggccaaaaacggtggcgttttacctcgccacgaccctaaacccaagcctgaagctcctgctgaaaaaccacccaaattttaccctgctgatgatatcaagaagccccttgtcaacaagcacaaaccgaaaccagctaagctcagggctagcattactcccgggacagtgttgattcttcttgccggtagatttaagggaaagagggtagtctttttgaagcagcttccttct

SEQ ID NO: 273450 - DNA, 418 bp, Glycine max
ggggctgacattcacgaagcttttcagccgggttttcgcgaaggaggaaatgcgaattctgatggttggtcttgatgctgctggtaagaccactatcctctacaagctcaagctcggagagatcgttactacaattcctaccattgggttcaatgttgagactgtggaatacaagaacattagcttcactgtttgggatgttggtggccaggacaagattcgtcccttgtggaggcactacttccagaacactcagggtcttatttttgttgtagacagcaatgatagggacagagttgttgaggccagagatgagttacataggatgttgaatgaggatgaactgagagatgccgtattgcttgtgtttgcaaacaaacaagatcttcctaatgcaatgaatgctgctgagattact

SEQ ID NO: 273451 - DNA, 420 bp, Glycine max
ggaccaagagattaagtcttggcttgcatttgcagcacaaaaagttgttgaagtaaatgccttggccaaggcattgtctggacagaaggatgaggttttcttttctgctaatgctgctgccttggcttcaaggaagtcctccccaagggtgataaatgaggctgtccaaaaagccgctgctgctctgaagggctctgatcatcggagggccacaaatgttagtgccaggttggatgctcaacagaagaaattgaatctttctgttcttccaacaactacaattggatctttccctcaaactgccgatcttagaagagttcgtcgtgaattcaaggctaacaagatctccgaggaagattatatccgtttcattaaggaggaaatttacaatgttgtaaagctccaggaagaacttgacat

SEQ ID NO: 273452 - DNA, 426 bp, Glycine max
catgggtttggggtttaacaacaaattctacggcgcttggtccctcttcgactttatacgtacccgatacgaccgcgtttcgctcctgaacggttccgtgatcgccgtgatcgtcttcattctcgggaaaacgggtagggttttccgcgcggcgtcgctgctgcacaatctagaagccgatgggtttgaggcatatgtgtatggctacacctctctcataactgcttatgctaataataaaaaatacagagatgcactcaaggtgtttgggaaaatgaaagaagtggggtgtgaacctactttgattacttacaatgcaattttgaatgtttatgggaagatgggcatgccctgtgctaagatcattgctcttgttcaggacatgaattgccatggccttgcccctgattcgtgcacttataatac

SEQ ID NO: 273453 - DNA, 416 bp, Glycine max
cgttctgagcagaaaccaatttactggccacatgcctcaaaatattggaaacatttcaaagcttaggcagcttgatttgtcactgaataatcttagtggagaaattccagtcgcctttgataatctgcgtagtcttagtttcttcaacgtttctcataacaacctctctggtccagttcccaccctacttgcccaaaaatttaactcgagctcatttgtggggaatattcaactatgtggctatagcccttcaaccacatgttcctccctagctccttctggttcacctcctgaaatatcagaacaccgtcatcataagaaattatgcaccaaagacataattctcatagtaacaggagtgctccttgtagtcctggtaacaatttgctgcattctgctattctgcttgataaaaa

SEQ ID NO: 273454 - DNA, 417 bp, Glycine max
ggagcgcggaaccaaatgaaatgattgagaagagagagcgaagaaaaaaaagagagccaaaccaaacctttcccgaaacggttcgttttgcccttcttcggaaccctcccttctgcgccgctgctgctgctccggtcgccgtcggcgactctccggtaaccgaagaccactgccgatccgtcagaaacctcggatctcggatctgaacgagcgaaacgatgccgtctcacgcggatctggaccggcagatcgagcatctgatggagtgcaagcctctgccggaggccgaggtgaaggcgctgtgcgatcaggcgagggcgattctcgtcgaagagtggaacgttcagccggtgaagtgccccgtcaccgtctgcggcgacattcacggccagttctacgatctcatcgagctctttc

SEQ ID NO: 273455 - DNA, 418 bp, Glycine max
ggatccagcacataacaatggaaacgcagctttacgtgttttctctctagattctgctcttaaacgccgtcgttttcaaactctttttttccccttcgcttctctgtctttgtaaccgaaaggggggaaaatataattaacaccgatttcgcgaccaattcttcttctgcgttgaattgggacaacgagaaattggatctcagtttttggcaggaaataaaaattgcatttgagtgtaaaataacagagtatagtgtagggccttgttcttgatactgtgctaaatttgttggatggcggagaaatcatgcatcaagcgccttcagaaggaatatagagccctttgtaaagagccagtttctcatgttgtggctcgtccttctccaagtgatattcttgagtggcattatgtgttgga

SEQ ID NO: 273456 - DNA, 417 bp, Glycine max
gcattacctacatccattcactgtgaaccaattggacagtttaaggtaccaagctatgaacattgtggtggttaggcttgggagagcagaaccaccccttaggaaagaggttgtggagtacatgcttgatgtggactctcacatatggagcatgagaagaagcaaagccaatttcttcagaattgtgtcactcttttctggtgcaatatctatgagcaagtggcttggtgaggtacaacagtggaagaatccagtgaccacaatcctagtgcatgtcctctttttcatcttgatatgttaccctgaactgatccttcccacaatgttcctctacatgtttctcattggaatatggaactttaggtttaggccaaagcacccttcacacatggacaccaaactttcttgggcagaagc

SEQ ID NO: 273457 - DNA, 414 bp, Glycine max
ggaggataatggacttgatgtgaacttctacaaggaatcatgccctcaggctgaagacatcatcaaagaacaagtcaagcttctctacaagcgccacaagaacactgctttctcctggctcagaaacatcttccatgactgtgctgttcagagttgtgatgcttcactgttgctggactccacaagaaggagcttgtctgagaaggaaacagatagaagctttgggatgagaaatttcaggtacattgagaccatcaaagaggctttggaaagggaatgcccaggagttgtttcctgtgctgatatcctcgttctctctgccagaaatggcattgattcgctaggaggtccccatatccctcttaaaacaggaagaagggatggtagaaggagcagagccgatgtggtagagca

SEQ ID NO: 273458 - DNA, 423 bp, Glycine max
ggtatcaagaaattttgactgatcctagttatgctggccagtttgtgctcatgacaaacccacatattgggaatactggcataaattttgatgatgaggaatcaatacagtgtttccttgctggacttgtaattagaagtttgagtatcagtacctctaactggagatgtaagaagcctctgggggattacctagctgaaaggaatatcatgggaatttatgatgttgatactcgcgcaatcacgcggcgattgcagcaagatggcagtcttattggtgttttgagcactgacaattccaaaaaggatgaagaactgcttcacatgtctaagtcatggaacatttgtggtaaggatctaataagtggagtatcatgcaaaacttcacatgaatgggttgataaaacaaaacaacaatgggagt

SEQ ID NO: 273459 - DNA, 429 bp, Glycine max
gggtgcacggttcagtatgtttgagatgagagggaagatagctttggcagagaaaggaatcaaatatgagtacatggaacaagatctcaccaacaagagtactttgcttcaagaaatgaacccaattcacaagaagattccagttctcatacatcatggaagacctatctgtgagtccctcataattgttgagtatattgatatggtttgggacaacaattgtcctttgcttccctctgatccctaccacaaagctcaagccaggttctgggctgattttgtagatcagaaggtgtatcatgcttctaagagagtttggatttcaaagggagatgagaaagaggtggcaaaaaaggacttcctagagagcttaaagcaattggaggagtttcttggagacaagccttattttgggggtgacacatttgg

SEQ ID NO: 273460 - DNA, 406 bp, Glycine max; identical to SEQ ID NO: 257773

SEQ ID NO: 273461 - DNA, 416 bp, Glycine max
gacagccgtccgaacggatgcgaggacactgccgaagggggtggcgccgctcacataagggctctgcactctgtcttacggaaactattatattcgcttctctgctcaagcctcttcttctccagcactggcatctcataatgttggttatacacacatgctaccgacgagagaacttaaactagcttcagaatctttttcagatggaaagactagtactcaggaactgcacacggttactgaaaaccgtatgtcagccatatggaatcacatggctgatgctggaataaagtatattcctagctgcaacttctaaatttacgatcaaatactggacacaacaaccatgcacaggtcaattccatctagatataaccgtaacggtggtgacattggatttgatgaatacttctcaa

SEQ ID NO: 273462 - DNA, 363 bp, Glycine max
ggctcgaggaaaagaaggaaatagaaaaagaaggacatggcacagcagtcctagatatcctattctctgcttcggaagaaagagagaacatactgatcaatggcgttcgcttctttccttggcagagtcctatttgctactgtcttcatactctctgcttaccaacagtttaatgaatatagagatgatgggggacctgctacaaaagcactcagacctaagattgatgcctttacacatcaggtgcattctcaagtgggctattaaattccagagattaatctgaaatctataattgctggagctattgctctgaaagatcttgcaagggttcttttcatattaggcagatcttttggagct

SEQ ID NO: 273463 - DNA, 395 bp, Glycine max
  unsure (1)..(395): unsure at all n locations
ggactgaagacagatgatgatgctgatcaattacccaccattgcaatagttgcttcatatgacacctttggggctgctcctgcattatcagtgggaagcgatagtaatggaagtggcattgtggctcttcttgaagtagctaggttgttttctctcttatattctaatccaaagacaagaggacaatacaatctgctgtttgggctaacgtctggtgggccttataactacaatggaacccataagtggcttaggagctttgatcaacgtctgcgtgagagcattgactatgctatttgcttggatagtattggctcttgggaaaatgaattgtggattcatgtatctaagcctncagaaaatgcctntattaagaaaattcatgaagatttttc

SEQ ID NO: 273464 - DNA, 411 bp, Glycine max
ggtcttggtgatggatagacacaaatgcaagcgtttgttcaaggtctttcagcaatggcagagcccttggtgggcacatgaaggctcaccttgcttctctccctctccctctccctccaaagcttcactcttgtttctcttcctctgactcagaacaagaacaatctttaagggagaatcctaagaaaaccttgaggattctggatcctgaagacagagagagcgagacagagtctaataagaacccgactcgtcaacgatccaagcgcaactggaaatctaccatgcccaagctcagcctcggacaccccgaagccgaacctctcagctccgtctccgacaccttccccgaagaagacctcggcatgtgcctcatgatgctctcccgcgacacgtggcatgaacacaaac

SEQ ID NO: 273465 - DNA, 417 bp, Glycine max
ggcagatgagggtgctatttctctatggagaggaaacactgctaatgttatccgttatttccccacccaggctttgaactttgcatttaaggattacttcaagaggcttttcaactttaagaaggatagagatggctactggaaatggtttgctggcaactcggcctctggtggtgctgctggtgcatcatcccttttgtttgtttactctcttgactatgcccgtacccgtcttgccaatgatgcaaaggctgcaaaaaagggtggagagagacaattcaatggtctcgttgatgtctacaggaagacattggcatctgatggtgttgccgggctctaccgtggtttcaacatctcatgtgttggaatcatcgtgtatcgtggtctgtactttggattgtatgattctgttaaacc

SEQ ID NO: 273466 - DNA, 396 bp, Glycine max
gaccctgatgaagggaatgctttagcacaactaagggcatggaaaacagctgtagcaaatataccatatggtggtgccaaaggagggatagggtgtgacccagcagaattaagtatatctgaattagaaagacttactagagtttttacacaaaaaattcatgatttgattggaactcacacagatgtgccagcacctgatatgggaacaggaccacagaccatggcatggatactatatgagtattccaaattccacgggtactatactgcagtagtgactggaaaacctatagatcttggcggatctcttcgtagagacgcaggtacaggacaaggagtactctatgcaacagaagctatgcttaatgagcatgggaagagtgtatctggacaa

SEQ ID NO: 273467 - DNA, 417 bp, Glycine max
gagggcgaggaagccacatagagacacaatacagagtgagttgttgctccttcgccacaactctctgccaacatgggtatctccagagattctatgcacaagaggcgtgccactggtggcaagaagaaggcctggaggaaaaagagaaagtatgagcttggtcgccagcctgctaacactaagctgtcaagcaacaagacagtcaggaggatccgtgttggaggtggaaatgtgaaatggagggcattgagattggatactggaaattactcctggggaagtgaagctgtaactcgcaagactcgtgtactggatgtggtttacaatgcctcaaacaatgagcttgtgcgtactcaaactcttgtcaaaagtgctatcgttcaagttgatgctgctccattcaaacagtggtatctt

SEQ ID NO: 273468 - DNA, 416 bp, Glycine max
gggggtaaaaattggattaaatccatgatccttacagcatcactgttcccattcatgtgctttggaattggttttattttaaacacaattgctatattctatggatctctagctgcaatcccctttggtactatggttgttgtctttgttatatgggcttttatctctttccctctagcacttcttggcacagttgttggaagaaactggagtggtgctccaaataatccatgccgtgtgaagaccattcctcgtcccattcctgagaagaaatggtacctcacaccatctgtagtttcgctgatgggaggactgcttccctttggcagcatattcatcgagatgtattttgtattcacttccttctggaattacaaggtgtactatgtctatggcttcatgctacttggtttttc

SEQ ID NO: 273469 - DNA, 294 bp, Glycine max
gtttgtataaattggattaaatccaggatcctgacagtttcactgttcccattcatgtgctttgtaattggttttattttaaacacaattgctatattctatggatctctatctgcaattcacttaggtactattgatgatgtctttgttatatgtgcttttatctctttccctttatcacttctagacacagctgttttaataaactcgaatgatgctctaatatatccatgctgttttaagaccatactttggttcataccttatattaattcatatctcacaccattttta

SEQ ID NO: 273470 - DNA, 427 bp, Glycine max
gacgttagatcatgtgtttatcgcaagaaaacacggcgtgggtcatcaacattcatggaaaaacagataccttttactggaatattaagcaataatgttgaagataatccagattttttcaactggaacagagtgaaaattcgttattgtgacggtgcctcttttgctggggatggtgaagataaggctgcgcaactgcaatttggaggacagcgtatttggtcggcagcaatcgaagatttgatgtcaaagggaatgcgatttgccaggcaggctcttctttctggatgctcggctggtggtttggctactattatacactgtgatgaattcagaggttttttcccacagactacgaaagtgaagtgtcttagtgatgcaagattatttcttgatgcgattgatgtctccaggggacataccatca

SEQ ID NO: 273471 - DNA, 400 bp, Glycine max
ggccatcagaaaggaatagtttgattggaggagatgactttaagagtggtcagaccaaaatgaaatcggtgttggtggatttcctagtaggggccggcatcaagccaacatctatagtgagttacaaccatttgggaaacaatgatggcatgaatctctcagcccctcaaaccttccgctcgaaggaaatttccaagagcaatgttgttgacgatatggtcaacagcaacgccatcctctatgagcctggtgaacatccggaccatgtggttgtcattaagtatgtaccttacgttggggacagcaagagggccatggatgagtactcttctgagatattcatgggcggaaagaacacaattgtgttgcacaacacttgtgaggattcactgttagctgc

SEQ ID NO: 273472 - DNA, 405 bp, Glycine max
gaatcaagtgaaagctctgatgaagacaatgatgcataacccgccgtaactgatgtgtcaaagccttctgctcttgcaaagaagaaggttgacagctctgattctgatgatagcagctctgatgaagataaggggaagatggatattgatgatgatagttctgatgaaagtgaagagccacaaaagaaaaagactgtgaaaaatccaaaagaaagcagtgatagttccgaagaagacagtgaggatgaaagtgaggaggaaccctccaaaactcctcagaaaagagacagggatgtggagatggttgatgctgcctcgtctggaaagaaagcgcctaagaccccagttacacccaaagaagatactggcgcttcaaagacactatttgttgagaacttgccattt

SEQ ID NO: 273473 - DNA, 390 bp, Glycine max
gatacaaaaagttcttatcagtgacagagtaaaggaggcataccgatgacgatggcgatgacggcgtcgcagttgcggtgcggttgggggtggaggccaacgccgaatcagcagcagcaacgacgtcgtatggttccggtggtgtgttccatcgctatagagaacgcgaagaacaaagagagagcgaaactgaagaagctcttcgatgaagcgtacgagaggtgccgcactgctcccaccgaaggcgtttccttcactctccaacaattcaccgacgctctcgacaagtacgacttcaacgccgaaatgggcaccaaggttaagggcactgtttttgccacggataacaatggagcttatgttgacattactgctaagtccacggcctac

SEQ ID NO: 273474 - DNA, 410 bp, Glycine max
gaaaaaatttgcatctatgcgtatatgcgaatcaatcctactacttctggtcctgaggttcctgcgcttgaaaaaaaaaatctgggacgtatcgcccaaataattggtccggtactagatgtagcttttcccccaggtaagatgcctaatatttacaacgctctgatagttaagggtcgagatactgttggtcaacaaattaatgtgacttgtgaagtacagcaattattacgaaataatcgaattagagctgtagctatgagtgcgacagaaggtctaatgagaggaatggaagtgattgacacaggagctgccctaagtgttccagtaggtggagcaactctaggacgaatgttcaacgtgcttggagagcccattgataatttaagtcctgtagatactcgcacaac

SEQ ID NO: 273475 - DNA, 408 bp, Glycine max
gacgataaagggtttttgatttgtttccttgggtgctgggtgcactttcactcgaagaaccttgaagcgagtctgggccacagcaaccagcgacaacaactcaatcagctagggatgctttgcttgctatcttgttggaggattttctgttcaagagaagatggtaactagaattgtggatcttcgttcagacacagttacaaagccaactgaagcaatgagagctgctatggcaagtgctgaagttgatgacgatgttctaggctatgatccaactgcttttcgcttagaaacagagatggcaaagacaatgggcaaagaagctgctctttttgttccatctggcactatgcggaaccttgtatctgtacttgttcattgtgatgtcatgggatgtgaggttattct

SEQ ID NO: 273476 - DNA, 416 bp, Glycine max
ggatgaagataggatgcttctgaaattccgatgtcaataaggtccttaagtaaaaaatactactgtcgtcacagatctgaatctggtcccctctggtatcgtgtagtactagtattttagttgcatctaataaatgaggatacccaagaagttgatttaataaatgttcaccaacttaacataagctatttgattttgctgacaaatacagaggcaaatatgacagcagcatcacggttgcccaaaagtattacagatccatcagtggttacaatgatgaattgctctgggctgctgcttggttgtatcaagcatctaacaaccagtattacttggattaccttggaagaaatggtgattccatgggtggaactggttggagcatgactgaatttggttgggatgtcaagtatgct

SEQ ID NO: 273477 - DNA, 423 bp, Glycine max
ggaggagactgagaaaacagaagaaaacaaagtggaagacacagtttctgcgttgaggtctttgatggtttctcactctccgccgctggatgccttagtggtgccctctgaagattatcacctgagcgaatatgtgtctgcacgagacaagcgccgcgaattcgtttccggcttcactggaagtgccggcttggcacttataacaaagaaagaagcactgctgtggacggatggacggtattttttgcaggctgagaaagaacttagtgctgggtggaagctaatgcgaattggtgaagatcctgctgtagatatctggatggccgataatttgccaaaagaagcatccgttggggttgatccctggtgcatttcaattgatactgctcaaagatgggagcgtgcttttgccgaaaaacagca

SEQ ID NO: 273478 - DNA, 433 bp, Glycine max
gacttcaaagtggagaaaaacacacacggttggggcattctctctcttttctttttcctcaaaaagttgaaaaagaataaagggggaacaatcgagtgaagttgttgctcttcaatagtaaacttacctatggaagagggaagggttgtgagtgggtacacaaaagatggaactgtggatcttaaagggaaacccattctcaaatccaaaagtggtggttggaaagcatgctcctttgttgttgtgtacgagatatttgaaagaatggcttattatggaatatcatcaaatttgatactgtatctgactaggaagcttcaccaaggcactgtgacctcttccaacaacgtcaccaattgggttggcaccatttggataactcctatcttaggagcctacgttgccgatgctcatcttggtcgcttttggactt

SEQ ID NO: 273479 - DNA, 408 bp, Glycine max
ggatgaatggcagagttattgccattgcctctggctcgggttacaccaaactgatacacacttaataatattatagtaaaaattagccaccaaagtacactaaccccttttttcatacaactcaatagctggattggagcaaggtgaaagtaaaatcatttgcaaccaatgccgttgaacatatttcaggacaaagatggattgccacggattatattgactgagccaaagggttcatcagctgaggttcttctttatggagggcagattatttcttggaagaatcatcgaaaggaagaacttctttttatgagcagtaaggctaacaagaaacagcataaagcaatcagaggaggaatatcagcttgcctagcacggtttggtgatctcagttcacttgaacaacat

SEQ ID NO: 273480 - DNA, 389 bp, Glycine max
gtagtgctctattggaaatgatgatatttcatgtgaccctctccatcaacagcccagaagtatcgtgtggagaacttgtatgagggtcctcttgatgatcaatatgcttctgctatcagaaattgtgatcctgaaggtcctctgatgctctatgtctccaagatgattccagcatctgataaggggagattttttgcctttggccgtgtattctctggcagggtttcaactggtttgaaggtgaggattatgggacctaattatgtccctggggagaaaaaggatttgtatgttaaaagtgtgcaacgaactgtcatttggatgggaaagaggcaagaaactgtagaggatgtcccctgtggtaatacagtggctatggttggtcttga

SEQ ID NO: 273481 - DNA, 417 bp, Glycine max
gacactaaacaagttaaaagaggagcatcactgaactaacaaagcaaccctatgtcgaaggtggtttgtgtcaccggagccagcggcgccatcggatcatgggtggtcctactcctcctccagcgtggttacaccgtccatgccaccgtccaagatatcaaggatgaaaatgagacgaaacatttggaggaaatggaaggagcaaagagtcatctccatttttttgaaatggatcttcttgacatcgactccattgccgctgccataaagggttgttccggcgtaatccaccttgcatgtcctaacatcattggtcaagtcgaagatcccgagaaacagatattggaaccggcgataaaaggaacggttaatgtgttgaaggcggccaaagaagcatgggtggaacgcgtggtggcc

SEQ ID NO: 273482 - DNA, 406 bp, Glycine max
  unsure (1)..(406): unsure at all n locations
gacggacgagggtttcgtttcgggtttgacggtgctgacaatcactttctgcgcttcactcactcccttcgtgcggttttctttctttgtcgaactcgtgcgaaaatgcgtgagattcttcacatacagggagggcaatgcggaaaccagatcggagcgaagttctgggaggtggtgtgcgcggagcacgggatcgattccacggggaggtaccagggggacaacgagttgcaactcgagcgagtcaacgtctattacaatgaancgagttgcggaaggttcgtgccgagggcggtgctcatggatctagagccagggaccatggacagcgtcagatctggtccctacggtcagattttccgacctgataacttcgtcttcagccagtccggcgcccgaaacaact

SEQ ID NO: 273483 - DNA, 423 bp, Glycine max
gggttctagtgtgtgattgtttgttgtggggactcgttcttcttcttttgttgttctgtgtttgtgtttgttttttctctcacctgaaaatgtcttgctgcggtggtaactgtggttgcggaagctcctgcaagtgcggcaacggctgcggaggctgcaagatgtacccagacttgagctacactgagtcaaccaccaccgagaccttggtcatgggagtggcacctgttaaggctcaatttgagggtgctgaaatgggtgtgcccgctgagaacgatggctgcaaatgtggaccaaactgctcctgcaacccctgcacttgcaagtgaggtgttgggagggcaagcttcaagcagagatagcccttaattaggaataatgataaactattaatgtgtagctaaaaacttatgtattatgtct

SEQ ID NO: 273484 - DNA, 329 bp, Glycine max
tttgggtactagtgtgtgattgtttgttgttgcagcgttttattcttcttttgtccctctctctttctctttgttttttctctcacctgaaaatgtcttgctgccgtggtaactgtggatgcggaagctcctgcaagtgcggcaaccgctgcggaggctgcaagatgtacccagacttgagctacactgagtcaaccaccaccgagaccttggtcatgggagtggcacctgttaaggctcaatttgagggtgctgaaatgcgtgtgcccgcttaaaaccatggctgcaaatgtggaccaaactgctcctgcaacccctgcactttcaag

SEQ ID NO: 273485 - DNA, 356 bp, Glycine max
ggttgcgtgataccatttaatttcacagcgatggattatttatagttaagtgtggagtgcagtgcaggtcaaggcctgagattcggttctttacttgttgggttgttctgatcttctctcatagcaatcaaatcacactcccatcttctcatctcgtaaaccctaaaccccgttttcagtgacatcgagatcgatcgaacatggatgaggagtacgatgtgatcgtgttgggcacgggtctcaaggagtgcattcttagcggtcttctctccgtcgatggcctcaaagttctgcacattgacaggaatgactattacggaggagaattcacttcgctcaatcttattcagctttgg

SEQ ID NO: 273486 - DNA, 412 bp, Glycine max
ggttgaagacattgcaaggagcattgctcagctgtacgtacactgtacttgactatgcacaaaccggtttgattgcagcagtgttcttctttaaaatgatggaatggtggtaccaatctgctgaggagagaatgtcagctcctacagtatatcctgctccccctcctgcgtcttcaccaaaggtagccaaagaagggataccactaccaccagacagaacaatttgccccttatgctcgcaaaagcgtgcaaatccatctgtagttactgtttcagggtatgtcttctgctatgcttgcatatttaagtatattactcagtataagcgctgcccaattacgttaatgccttcgacagttgaccagataaggagactctttcatgatgtctaggcctgttggagctggggttg

SEQ ID NO: 273487 - DNA, 375 bp, Glycine max
ggcgcattgaacgaagattagggtttgtagtgtagcaggaagaagcagcaatggcgccgaagataacacgtaaggttagcagaaaccctgaattgataaggggaatcggaaagtactcgaggtcgcagatgtaccacaagaggggcatttgggctatcaaggccaaaaacggtggcgttttacctcgccacgaccctaaacccaagcctgaagctcctgctgaaaaaccacccaaattttaccctgctgatgatatcaagaagccccttgtcaacaagcacaaaccgaaaccagctaagctcagggctagcattactcccgggacagtgttgattcttcttgccggtagatttaagggaaagagggtagtctttt

SEQ ID NO: 273488 - DNA, 406 bp, Glycine max
  unsure (1)..(406): unsure at all n locations
ggggctgacattcacgaagcttttcagccggcgtttcgcgaaggaggaaatgcgaattctgatggttggtcttgatgctgctggtaagaccactatcctctacaagctcaagctcggagagatcgttactacaattcctaccattgngttcaatgttgagactgtggaatacaagaacattagcttcactgtttgggatgttggtggccaggacaagattcgtcccttgtggaggcactacttncagaacactcanggtcttttattttgttgtagacagcaatgatagggacagagttgttgaggccagagatgagttacataggatgttgaatgaggatgaactgagagatgccgtattgcttgtgtttgcaaacaaacaagatctntctaatgcaatgaatgc

SEQ ID NO: 273489 - DNA, 350 bp, Glycine max
tggggaccaagagattaagtcttggcttgcatttgcgagcacaaaaagttgttgaagtaaatgccttggccaaggcattgtctggacagaaggatgaggttttcttttctgctaatgctgctgccttggcttcaaggaagtcctccccaagggtgataaatgaggctgtccaaaaagccgctgctgctctgaagggctctgatcatcggagggccacaaatgttagtgccaggttggatgctcaacagacgaaattgaatctttctgttcttccaacaactacaattggatctttccctcaaactgccgatcttagaagagttcgtcgtgaattcaaggctaacaagatc

SEQ ID NO: 273490 - DNA, 371 bp, Glycine max
gacagggttagcaaaatatctgatctttctcccgcctggcactgagtaggcaatggcggaggaagcacagtactcatcgggacccgattccgcgcccctcaagcgcaagtacgaagaccaaccctccggcatcgagcttgccaagcagcgtgctcaggaagtcgccgcacgccttctcaacgccgctcctcctccgccactcgacgccaagcgtcccaaacccgacaccggcttcgattctctcgatttgaagcctctgtattccgcatctcctcctcccgtcttctacggtcaccaaggttccagcaagaagattgatatccctaatggcagggttggtgtgattattggtaaaggcggagagactatta

SEQ ID NO: 273491 - DNA, 427 bp, Glycine max
catgggtttggggtttaacaacaaattcgaccgcgtggtgccctcttcgacttcatccgtacccgaaacgaccgcgtttcgctcctgaacggttccgtgatcgccgtgatcgtctccattctcgggaaaacgggtagggtttcccgcgcggcgtcgctgctgcacaatctagaagccgatgggtttgaggtagatgtgtatggctacacctctctcataactgcttatgctaataataaaaaatacagagatgcactcaaggtgtttgggaaaatgaaagaagtggggtgtgaacctactttgattacttacaatgcaattttgaatgtttatggtaagatgggcatgccctgggctaagatcattgctcttgttcaggacatgaagtgccatggccttgcccctgatttgtgcacttataatactc

SEQ ID NO: 273492 - DNA, 411 bp, Glycine max
  unsure (1)..(411): unsure at all n locations
cgttctgagcaganaccaatttagtggccacatggctcanaatattggaaacatttcaaagcttangcagcttgatttgtcactgaataatcttagtggagaaattccagtcgcctttgataatctgcgtagtcttagtttcttcaacgtttctcataacaacctctctggtccagttcccaccctacttgcccaaaaatttaactcgagctcatttgtggggaatattcaactatgtggctatagcccttcaaccacatgttcctgcctagctccttctggttcacctcctgaaatatcagaacaccgtcatcataagaaattatgcaccaaagacataattctcatagtagcatgagtgctccttgtagtactggtaacaatttgctgcattctgctattctgcttgat

SEQ ID NO: 273493 - DNA, 415 bp, Glycine max
ggagcgcggaaccaaatgaaatgattgagaagagagagcgaagaaaaaaaagagagccaaaccaaacctttcccgaaacggttcgttttgcccttcttcggaaccctcccttctgcgccgctgctgctgctccggtcgccgtcggcgactctccggtaaccgaagaccactgccgatccgtcagaaacctcggatctcggatctgaacgagcgaaacgatgccgtctcacgcggatctggaccggcagatcgagcatctgatggagtgcaagcctctgccggaggccgaggtgaaggcgctgtgcgatcaggcgagggcgattctcgtcgaagagtggaacgttcagccggtgaagtgccccgtcaccgtctgcggcgacattcacggccagttctacgatctcatcgagctctt

SEQ ID NO: 273494 - DNA, 344 bp, Glycine max
gctttacctacatccattcactgtgaaccaattggacagtttaaggtaccaagctatgaacattgcggtggttaggcttgggagagcagaaccaccccttaggaaagaggttgtggagtacatgcttgatgtggactctcacatatggagcatgagaagaagcaaagccaatttcttcagaattgtgtcactcttttctggtgcaatatctatgagcaagtggcttggtgaggtacaacagtggaagaatccagtgaccacaatcctagtgcatgtcctctgtttcatcttgatatgttaccctgaactgatcctccccacaatgttcctctacatgtttctca

SEQ ID NO: 273495 - DNA, 370 bp, Glycine max
cccagccgtccgaccggttgcaagaggccacctgaggggggaggttatgggactggttgggagcttttacaaggaatcatgccctcaggctgaaaacatcatcaaggaacaagtcaggcttctctacaagcgccacaagaacactgctttctcctggctcaaaaacatcttccatgactgtgctgttcagagttgtgatgcttcactgttgctggactccacaagaaggagcttgtctgagaaggaaacagatagaagctttgggttgagaaatttcaggtacattgagaccatcaaagaggctctggaaagggaatgcccaggagttgtttcctgtgctgatatcctcgttctctctgccagagatggc

SEQ ID NO: 273496 - DNA, 424 bp, Glycine max
gggtgcacggttcagtatgtttgagatgagagtgaagatagctttggcagagaaaggaatcaaatatgagtacatggaacaagatctcaccaacaagagtactttgcttcaagaaatgaacccaattcacaagaagattccagttctcatacatcatggaagacctatctgtgagtccctcataattgttgagtatattgatatggtttgggacaacaattgtcctttgcttccctctgatccctaccacaaagctcaagccaggttctgggctgattttgtagatcagaaggtgtatcatgcttctaagagagtttggatttcaaagggagatgagaaagaggtggcaaaaaaggacttcctagagagcttaaagcaattggaggagtttcttggagacaagccttattttgggggtgacaca

SEQ ID NO: 273497 - DNA, 319 bp, Glycine max
tcaaatattactacatggaacaagatctcaccaacaagagtactttgcttcaagaaatgaacccaattcacaagaagattccagttctcatacatcatggaagacctatctgtgaatccctcataattgttgagtatattgatatggtttgggacaacaattgtcctttgcttccctctgatccctaccacaaagctcaaaccaggttctgggctgattttgtagatcagaacgtgtatcatgcttctaagagaagttggatttcaaagggaaatgagaaagaggtggccaaaaatgacttcctaaagagcttaaaaca

SEQ ID NO: 273498 - DNA, 386 bp, Glycine max
ggttcgcggaaccaaatgaaatgattgagacgagagagcgaataaaaaaaagagagccaaaccaaaccttttccgaaacggttcgttttgcccttcttcggaaccctcccttctgcgccgctgctgctgctccggtcgccgacggcgactcttcggtaaccgaagaccactgccgatccgtcagaaacctcggatctcggatctgaacgagcgaaacgatgccgtctcacgcggatctggaccggcagatcgagcatctgatggagtgcaagcctctgccggaagccgaggtgaaggcgctgtgcgatcaggcgagggcgattctcgtcgaagagtggaacgttcagccggtgaagtgccccgtcaccgtctgcggcgacattcac

SEQ ID NO: 273499 - DNA, 410 bp, Glycine max
ggcacaagtgagtttggtgatcgagataactagaaacagtgtgatgaaaatgaaggtccttgttttcttcgttgctacaattttggtagcatggcaatgccatgcgtacgatatgttccctctccgaatgaacactggctatggtgcccgtactccggaggtgaaatgcgcaagttggaggcttgctgtggaagcacacaacatctttggctttgagaccattcctgaagagtgcgttgaagcaacaaaggaatacatccatggcgaacaatatagatcagactccaaaacagttaaccaacaagcttacttttatgccagagacctcgaagtccatcccaaggacacatttgtgttcagtatagatggcaccgtactctctaatattccatactacaaaaaacatggat

SEQ ID NO: 273500 - DNA, 430 bp, Glycine max
aaaaaacccggcccgacccacgcatccgcccacccctccgtacacctgcgagtttactacacaaagccccacaaattactttcgtgggctatataactaaaaacagccgcctcaaaattaaccttctttttttcttctctgctacaatttttttagcactacacagccatgcctacgatattttccctctccgaataaacactatctatggtaccctcactccctatgtgaaatgctcaaattttatacttgctttctaatcacacaacatctttttcttctataccattccttaacattttcatttaaacaacaaatcaatacctccactgctaacaatattcatctcactcctttataattaacctacactcttacttttaatccatataccttctattccattccaatgacacatttctttttcata

SEQ ID NO: 273501 - DNA, 297 bp, Glycine max
ttctaatcctaccctctgcgcttctcagagcgagccaattcttctccagcactgacatctcatattgttggttatacacacatgctacccactagacaccttaagttgctatggaatctttctgacacggaaagagtagcgctcaagagctgcacaaggctgctgaacaccttatgtcatccatatggaagcagatggctgatgctgtactaaagtatattcctaactgcaccatctctctttactatcaagtactggacacaacacccatgctcggggcaagtccatctagatata

SEQ ID NO: 273502 - DNA, 321 bp, Glycine max
  unsure (1)..(321): unsure at all n locations
cttgaacctgcagtcgtgtctccttccttctacaaacaaacttcaccttgcgccgaatggccacagatggtagaaaccgatatggatgccgaaactgtttcaaatgttgatccaccaaacgagactccaaacactgttcccatctattatcatttctcacactcacactctcctcttaatgagaggattatttcatacatgaccacaacatcatgtgctgcacacccgtggcacgaccttgagatagggcctgatgctccaacgatcttcaattgntcgaatgaaattgttaaaggcagcaaagtgaaatattaaccgtac

SEQ ID NO: 273503 - DNA, 391 bp, Glycine max
  unsure (1)..(391): unsure at all n locations
ggactgaagacagatgatgatgctgatcaattacccaccattgcaatagttgcttcatatgacacctttggggctgctcctgcattatcagtgggaagcgatagtaatggaagtggcattgtggctcttcttgaagtagctaggttgttttctctcttatattctaatccaaagacaagaggacaatacaatctgctgtttgggctaacgtctggtgggccttataactacaatggaacccataagtggcttaggagctttgatcaacgtctgcgtgagagcattgactatgctatttgcttggatagtattggctcttgcgaaaatgaattgtggattcatgtatctaagcctncagaaaatgcctttattaagaaaattcatgaagatt

SEQ ID NO: 273504 - DNA, 420 bp, Glycine max
ggtcttggtgatggatagacacaaatgcaggcgttgttcaaggtctttcagcaatggcagagcccttggtgggcacatgaaggctcaccttgcttctctccctctccctctccctccaaagcttcactcttgtttctcttcctctgactcagaacaagaacaatctttaagggagaatcctaagaaaaccttgaggattctggatcctgaagacagagagagcgagacagagtctaataagaacccgactcgtcaacgatccaagcgcaactggaaatctaccatgcccaagctcagcctcggacaccccgaagccgaacctctcagctccgtctccgacacctcccccgaagaagacctcgccatgtgcctcatgatgctctcccgcgacacgtggcaggaacacaaactcgccaatgc

SEQ ID NO: 273505 - DNA, 408 bp, Glycine max
ggcagatgagggtgctatttctctatggagaggaaacactgctaatgttatccgttatttccccacccaggctttgaactttgcatttaaggattacttcaagaggcttttcaactttaagaaggatagagatggctactggaaatggtttgctggcaactcggcctctggtggtgctgctggtgcatcatcccttttgtttgtttactctcttgactatgcccgtacccgtcttgccaatgatgcaaaggctgcaaaaaagggtggagagagacaattcaatggtctcgttgatgtctacaggaagacattggcatctgatggtgttgccgggctctaccgtggtttcaacatctcatgtgttggaatcatcgtgtatcgtggtctgtactttggattgtatgattc

SEQ ID NO: 273506 - DNA, 424 bp, Glycine max
  unsure (1)..(424): unsure at all n locations
tggggagagtgagtgagatagagagagacgctgcggaaatctcaatcgaatctcagaaaaatgagagaaatcatcagcattcacataggtcaggccgggatccaggtcggaaactcctgctgggaactctactgcctcgaacatggcatccagcccgacggcatgatgccttctgactccaccttcggtgtagcccacgacgccttcaacaccttcttcagcgaaaccggatctggcaagcacgtcccccgtgctgtcttcgtcgacctcgaacccaccgtcatcgacgaggtccgctgcggcacctaccgtcaactcttccaccccgaacaactcatctccggcaaggaagacgccgncaacaacttcgcccgcggccactacaccgttggcaaagagatcgtagatctgtgcttggatcgcg

SEQ ID NO: 273507 - DNA, 398 bp, Glycine max
gggttctagtgtgtgattgtttgttgttgtgactcgttcttcttcttttgttgttctgtgtttgtgtttgttttttctctcacctgaaaatgtcttgctgcggtggtaactgtggttgcggaagctcctgcaagtgcggcaacggctgcggaggctgcaagatgtacccagacttgagctacactgagtcaaccaccaccgagaccttggtcatgggagtggcacctgttaaggctcaatttgagggtgctgaaatgggtgtgcccgctgagaacgatggctgcaaatgtggaccaaactgctcctgcaacccctgcacttgcaagtgaggtgttgggagggcaagcttcaagcaaagatagcccttaattaggaataatgataaactattaatgtgt

SEQ ID NO: 273508 - DNA, 418 bp, Glycine max
ggaggcggtggtgatggtgttgtgtggggcaatgctcacccctccaaatccaaagtcgtcggagaatattcttattagtattaattaattaataataatgagacgagtgcttggcttcttattcttgttctgtaagtttgcaacttttttcctttcattcattattcttctcttgccttgagttgaggatgggcaatgtgaacgtgactcctgaagaagaagaagtttctgcaagtgcaagggcaaccgatgagaacgccatgcctcagtctcctcccacctctcctacggctatccatttccccctcatattcgctcctcaggttccggtggttccgctacaaagacctgatgagatgcatgttccaagttgttcctggatggagacaacttcagggtatgaagatgtgtaccgcga

SEQ ID NO: 273509 - DNA, 317 bp, Glycine max
tccggcgggaggacacctaagggggcccttgttgaagggaatgctttagcacacttaaggccgggcaaaacagctgtagcaaatataccatatggtggggccaaaggagggataggctgtgacccagcagaattaagtatatctgaattagacagacttactagagtttttacacacaaaattcatgattcgattggaactcacacagatgtgccagcacctgatatgggaacaggaccacagaccatggcatgcatactagatgagtattccaaattccacggctactctactgcagtagtgactggaaaacctat

SEQ ID NO: 273510 - DNA, 406 bp, Glycine max
gggggtaaaaattggattaaatccatgatcctgacagcatcactgttcccattcatgtgctttggaattggttttattttaaacacaattgctatattctatggatctctagctgcaatcccctttggtactatggttgttgtctttgttatatgggcttttatctctttccctctagcacttcttggcacagttgttggaagaaactggagtggtgctccaaataatccatgccgtgtgaagaccattcctcgtcccattcctgagaagaaatggtacctcacaccatctgtagtttcgctgatgggaggactgcttccctttggcagcatattcatcgagatgtattttgtattcacttccttctggaattacaaggtgtactatgtctatggcttcatgctac

SEQ ID NO: 273511 - DNA, 285 bp, Glycine max
aaattggattaaatccataatcctgacggcttcactgttcccattcgtgtgctctggaattgcttttattttaaacacaattgctatattctatggatctctagctgcaatcccctttggtactatggttgttgtctttgttatatgggcttttatctctttccctctagcactccttggcacagttgttggaagaaactggagtgttgctccaaataatccatgccgtgtgaaaaccattcctcatcccattcctgagaataaatggtacctcacaccatctgt

SEQ ID NO: 273512 - DNA, 400 bp, Glycine max
ggtgttattgaagagtagggataatagagtccgtatcgtagcaaaacgcacgagttaggggcggcgatgggaggttcatcggaggatttctcggtggtggtgctggcgtcggacctcggcgtcgatgcgcgacctttcctcgaacacgatcaacagcaagaagaagagaattggcacgactgttcccagtacctctcccccgacgaggacttctccgatctcgatcagttgcaattcctccgcctccaaggctccgacaagaactccaatcgcattctccgcatcgtcggcaagtactttcccgcaactgttgtgagtgcggagcggctcaagcggtatgtgttcaacaaaatttgcagtgagttgcctgaggggcccttctgtattgcttacatgcaca

SEQ ID NO: 273513 - DNA, 299 bp, Glycine max
gaggtgcagagagagggattgaatcatgggaagagggacggtggttctgcagagaatacagaacaagatcaatcgccaagtaaccttctcaaagcgcacaaatggtttgctcaagaaagctttcgagctatctgatctatgcgatgctgaaatcgctctcgtcatcttctgcagccagggcaagctttttcagtatagcagcactgacattaacagaatcattgagaagtatctgcaatgctgcttcaacatgtctcatactggcgatgtatctgaacatcaatctgagcaggagcttt

SEQ ID NO: 273514 - DNA, 396 bp, Glycine max
ggccatcaaaaggaatagtttgattggaggagatgactttaagagtggtcagaccaaaatgaaatcggtgttggtggatttcctagtaggggccggcatcaagccaacatctatagtgagttacaaccatttgggaaacaatgatggcatgaatctctcagcccctcaaaccttccgctcgaaggaaatttccaagagcaatgttgttgacgatatggtcaacagcaacgccatcctctatgagcctggtgaacatccggaccatgtggttgtcattaagtatgtaccttacgttggggacagcaagagggccatggatgagtactcttctgagatattcatgggcggaaagaacacaattgtgttgcacaacacttgtgaggattcactgttagc

SEQ ID NO: 273515 - DNA, 373 bp, Glycine max
gaatcaagtgaaagctctgatgaagacaatgatgcataacccgccgtaactgatgtgtcaaagccttctgctcttgcaaagaagaaggttgacagctctgattctgatgatagcagctctgatgaagataaggggaagatggatattggtgatgatagttctgatgaaagtgaagagccacaaaagaaaaagactgtgaaaaatccaaaagaaagcagtgatagttccgaagaagacagtgaggatgaaagtgaggaggaaccctccaaaactcctcagaaaagagacagggatgtggagatggttgatgctgcctcgtctggaaagaaagcgcctaagaccccagttacacccaaagaagaaactggcgctt

SEQ ID NO: 273516 - DNA, 372 bp, Glycine max
gatacagagggttcttatcagtgacagagtaaaggaggcataccgatgacgatggcgatgacggcgtcgcagttgcggtgcggttgggggtggaggccaacgccgaatcagcagcagcaacgacgtcgtatggttccggtggtgtgttccatcgctatagagaacgcgaagaacaaagagagagcgaaactgaagaagctcttcgatgaagcgtacgagaggtgccgcactgctcccaccgaaggcgtttccttcactctccaacaattcaccgacgctctcgacaagtacgacttcaacgccgaaatgggcaccaaggttaagggcactgtttttgccacggataacaatggagcttatgttgacattact

SEQ ID NO: 273517 - DNA, 357 bp, Glycine max
tttatgaaaagtgtgagaacgaaaatggagcgttgtaactgctacatgttcacgctgagccttcttcttcttcttcttcttactccgccttctctctccgacgatctcggattcgattttccggcgaagaaactgataagagaccttaacctttttccttctgaagatgtcaacatcgttcctcgccactccaattctcacgccaacaaaatcgtcgagaaaccgcttaggttcccaaacttagtgccttcagactccggcatttccctcgacgacttggctcaccgcgctggctattatcttattcctcattctcatgctgccaagatgttctactttttctttgaatcaaggaac

SEQ ID NO: 273518 - DNA, 412 bp, Glycine max
gaaaaaaattgaatctatttggatatgcgaatcaatcctactacttctggtcctgaggtttctgcgcttgaaaaaaaaaatctgggacgtatcgcccaaataattggtccggtactagatgtagcttttcccccaggtaagatgcctaatatttacaacgctctgatagttaagggtcgagatactgttggtcaacaaattaatgtgacttgtgaagtacagcaattattaggaaataatcgaattagagctgtagctatgagtgcgacagaaggtctaatgagaggaatggaagtgattgacacaggagctgccctaagtgttccagtaggtggagcaactctaggacgaattttcaacgtgcttggagagcccattgataatttaggtcctgtagatactcgcacaacat

SEQ ID NO: 273519 - DNA, 413 bp, Glycine max
gacgataaagggtttttgttttgtttccttgggggctgcatgcactttcactcgaagaaccttgaagcgagtctgggccacagcaaccagcgacaacaactcaatcagctagggttgctttgcttgctatcttgttggaggattttctgttcaagagaagatggtaactagaattgtggatcttcgttcagacacagttacaaagccaactgaagcaatgagagctgctatggcaagtgctgaagttgatgacgatgttctaggctatgatccaactgcttttcgcttagaaacagagatggcaaagacaatgggcaaagaagctgctctttttgttccatctggcactatggggaaccttgtatctgtacttgttcattgtgatgtcaggggaagtgaggttattcttggag

SEQ ID NO: 273520 - DNA, 415 bp, Glycine max
ggatgaagataggatgcttctgaaattccgatctcaataaggtccttaagtaaaaaatactactgtcgtcacagatctgaatctggtcccctctggtatcgtgtagtactagtattttagttgcatctaataaatgaggatacccaagaagttgatttaataaatgttcaccaacttaacataagctatttgattttgctgacaaatacagaggcaaatatgacagcagcatcacggttgcccaaaagtattacagatccatcagtggttacaatgatgaattgctctgggctgctgcttggttgtatcaagcatctaacaaccagtattacttggattaccttggaagaaatggtgattccatgggtggaactggttggagcatgactgaatttggttgggatgtcaagtatgc

SEQ ID NO: 273521 - DNA, 422 bp, Glycine max
ggaggagactgagaaaacagaagaaaacaaaatggaagacacagtttctgcgttgaggtctttgatggtttctcactctccgccgctggatgccttagtggtgccctctgaagattatcacctgagcgaatatgtgtctgcacgagacaagcgccgcgaattcgtttccggcttcactggaagtgccggcttggcacttataacaaagaaagaagcactgctgtggacggatggacggtattttttgcaggctgagaaagaacttagtgctgggtggaagctaatgcgaattggtgaagatcctgctgtagatatctggatggccgataatttgccaaaagaagcatccgttggggttgatccctggtgcatttcaattgatactgctcaaagatgggagcgtgctttttgccgaaaacagc

SEQ ID NO: 273522 - DNA, 420 bp, Glycine max
gccggatgagcagaggaatccaattcaagaatagtcaggttgctcacattcctggtgcccttttctttgatgtagatggaatagcagatcggactacaaaattaccacacatgctgccatcagcggaagcgtttgctgctgctgtttctgctcttggcatagagaacaaagatgatttggttgtttatgatggaaaaggattatttagtgcagctcgtgtttggtggatgttccgagtatttgggcatgacagagtttgggtattagatggtggcctgccgagatggcgtgcatcaggttatgatgttgaatccagtgcttcaagtgatgctattcttaaagccagtgctgctactgaagctatagagaaagtatataagggacaaacagttggcccactcacatttcagactaaatttc

SEQ ID NO: 273523 - DNA, 288 bp, Glycine max
gaacatacggatgaacattatattgggaactgcgggaggattggcctatcttcatgagggtcttgaaccgaaagatggccaccgagatgtgaaatcaagttacatacttattgatcgccaatggaactccaaggtttccgattttggacttgctaagcttttgtgttctgagaatagttacgtcacaactcgagtgatggggacatttggttatgttgcaccagaatatgcatgcactggaatgctgactgagaagagtgatatttatagctttgggatacttatcat

SEQ ID NO: 273524 - DNA, 342 bp, Glycine max
tgttcagcgcttgagaccaagccccactcaacgacgcggaccactctctctgctgttcttctacctttcaagtttttaaagtattaacatggcagagacattcctatttacctcagagtcagtgaacgagggacaccctgacaagctctgcgaccaaatctccgatgctgtcctcgacgcttgccttgaacaggacccatacagcaaggttgcctgcgaaacatgcaccaagaccaacttggtcatggtcttcggagagatcaccaccaaggccaacgttgactactagaagatcgtgcgtgacacctgcaggaacatcggcttcctcttaaacgatgtggg

SEQ ID NO: 273525 - DNA, 252 bp, Glycine max
ggaactggaggcaaaagtatatatggtcgtactttcaaagatgagaattttaatttgtctcacactggaccgggtgttgttagcatggcaaatgcaggacccaacacaaatgggagtcagtttttcatatgcactgtcaagacaccttggctggatcagagacatgtagtatttgggcaagttttggaaggcatggatattggtaggttgatcgaatcacaggagacagataggggtgaccgtcctacaaag

SEQ ID NO: 273526 - DNA, 361 bp, Glycine max
gaattgggaatttttctaataggggatcaaaatggttttccctggagatggaaaattcgtccgccaggttttatcaatttgcaaattcttcctcaattagttaaaagaatgaaattggccgatattatgacaatactaggtagcatagatattattatgggagaagttgatcgttgaaatgataatttatttaacagagatacaagatatccatttttttttcagattggaatcttttaaagagatatatggaattatatgggtatttgcccctattttgattcttatattgggaattacgataagtgtactagcaattgtatggttagaaagggaaatatccgcagggatacaacaacgt

SEQ ID NO: 273527 - DNA, 429 bp, Glycine max
gaattgggaatttttctaatacgggatcaaaatggttttccctggagatggaaaattcgtccgccaggttttatcaatttgcaaattcttcctcaattagttaaaagaatgaaattggccgatattatgacaatactaggtagcatagatattattatgggagacgttgatcgttgaaatgataatttatttaacagagatacaagatatccatttttttttcagattggaatctttcaaagagatatatggaattatatgggtatttgcccctattttgattcttatattgggaattacgataagtgtactagcaattgtatggttagaaagggaaatatccgcagggatacaacaacgtattggacctgaatacacaggtccttttggagttcttcaagctctagcagacggaacaaaattaccttt

SEQ ID NO: 273528 - DNA, 467 bp, Glycine max
ccgccagactgctggaattaggcttaccgaggtcgcttccgaggtacttgagccctggcttgatgaggatcatctgcagcagcctgtggttgaagtcggacaccccgatggacttggccaatcctgcatctttacactactccatggcctcccatgtggcacagagatccactgtgtcaaatagtatttttccattttcatcttttgggatcacttactcacctggctttatagacactggaaaatgaataagatagaggtcaacatagtccaattgaagatttttcagtgacctttccaaggctggtcggaccaactctggtcgatgggaattgctccaaagctttgaagtgtagaatatgtcttctctcttcacactgccatctgcaatcttgcttcggatggccagtccaacctgctcctcattattgtaaacatgtgcagaatcaatatggtggaacccggct

SEQ ID NO: 273529 - DNA, 293 bp, Glycine max
ggcacaagtgagtttgttgatcgagataactagaaacagtgtgatgaaaatgaaggtccttgttttcttcgttgctacaattttggtagcatggcaatgccatgcgtacgatatgttccctctccgaatgaacactggctatggtgcccgtactccggaggtgaaatgcgcaagttggaggcttgctgtggaagcacacaacatctttggctttgagaccattcccgaagagtgcgttgaagcaacaaaggaatacatccatggcgaacaatatagatcagactccaaaacag

SEQ ID NO: 273530 - DNA, 156 bp, Glycine max
ctgcttacagatgacgacgacaacggaggggggcgattaattactagcaatgagcaatagggttggtttgttacctattccgttaggaactgctcattttttggttcatcatattcatgcatttaccatacatgttacaggattgatactcctcaa

SEQ ID NO: 273531 - DNA, 298 bp, Glycine max
gaagcagtggtacatagcaaggcagagaaagaaatttgggtctctctaaagagtctccgctgaactttttggtttcttgaagatgtcgatactctccgatcttatcaaccttaacctctacgacatcaccgataaggtgatcgccgtgtacatatgggtcggtggatctggcatggatatgatgagcatagcaaggactctcgggactggttaatgaccctttcaagcgttccaagtggaactatgatggttccagcacgtgtcaagcttctggacaagatagtgtagtgatcttata

SEQ ID NO: 273532 - DNA, 413 bp, Glycine max
gaaagcaagcagggtaactgctgaaggaaggatcggttcttacatccatgacagcaggataggtgttttggtagaagtaaactgtgagacagattttgtctcacgaggtgaaatttttaaagagcttgtcgatgatatagccatgcaagtggctgcatgccctcaagtagagtttcttgatactgaggatgttcccgaggaaattgtgaacaaagaataagagatagaaatgcataaagaagatcttttgtcaaaaccagagcagataagatcaaagattgctgaagggcggattagaaaaagacttgaggagctggcattgcttgagcagtcctacattaaggatgataaggtagcagtaaaggacttcttcaagcatactattgcaactattggaggaaatattaaagtta

SEQ ID NO: 273533 - DNA, 267 bp, Glycine max
gggccacagactatggttgttcagaaaaggaggaagaatttcattggctgatcaagtactcaccattgcataacgtccggagaccttgggaacagcatcccgatcagtcaattcagtacccatcaacaatgctattgactgctgatcatgatgatcgtgttgagccattgcattcgttaaagctgttggcgaccctgcaatatgtcctcgttaccagccttgataaaagtccgcatacaaactccaataattggtcgcattgaatgc

SEQ ID NO: 273534 - DNA, 428 bp, Glycine max
ggagtgagagaaagagatcacatagcagaatggcttgtactcaatgtttcttgcaccaccatgctcttaccacccctgccagatccccatcacaacgcatcatggttagcaccaagcctaaccagcttgtttgcaaggcacagaagcaagaggatattgatgtcagcccaatctctcgccggttagctctaaccgtgctcattggtgctgctgctgttggctccaaagtccaacctgctgatgcagcttatggggaagctgccaatgtgtttggaaagccaaagacagacacagatttcctgccatacaatggagatggattcaaactatcgattccctcaaagtggaacccaagcaaagaagttgagtacacaggtcaggttgttagatatgaggataactttgattcaaccaccaacgtggctgtc

SEQ ID NO: 273535 - DNA, 425 bp, Glycine max
ggacacagtgagagtgtgagataatggacgaaattttacgacgtctttctgcggtggccgagtatcgaagaaagttttacctttgtcaaataatccattacagaatccgagcagccaaaagggttttgcgggatgcaaagaaggaatatgcgacaactcagtccctgaggaggggtggccaactcgttactcttgttgaagggccttataatgatcacaatcaacgctttatagtaaaatcaagcagtggagcagatagacatatagttggcattcatagtaaggtggagaaggagaagctagttccaggcacaagagttagcctggataggactaccatgaccattatgagaattcttccgtcccaagttgacccttttgtgtataacatgattcatgaagaccctataaatgctaattactct

SEQ ID NO: 273536 - DNA, 421 bp, Glycine max
gaatcgaagagagagtattgttcttaatttcttaatcctccgtcgtgggtggcgatgttgttcttctccggagcggattctcagatccatggagcaggctcatattattaagccaaagcctctcagatccgcggtggcggcgtgacggaaatgaagtcctcaagccgtctcttcacgatcggactggtgtcggcgtggtactcctccaacattggggtactgctcctcaacaagtaccttctcagcaactatggcttcaagtatcctatcttcctcaccatgtgccacatgaccgcctgctccctctttagctacgttgccatcgcctggctcaagatggtccccatgcagaccatccgctcccgcctccagttcctcaagatcgccgccctcagcctcgtcttctgcgtctccgtcgtct

SEQ ID NO: 273537 - DNA, 422 bp, Glycine max
gctgcgttgtgcgtcggagctgtgtctggggaaagttgcgttgctttttgcggtacagctcacacacactgaacggtaagtatggcggacaaggctgttacaatccgaacccgaaagttcatgaccaacaggcttctttccaggaagcagtttgtgcgttgatgttcttcatccagggagggcaaatgtttccaaggctgaacttaaggagaagctagctaggatgtatgatgtgaaagaccctaatactgtatttgtcttcaaattccgaacacattttggacgttgcagatccactggatctggtttgatttatgacacagtggaaaatgctaaaaagtatgagcccaaatacaggcttatcaggaacggtcttgacactaacggagaaaagtcatggaagcaaatgaaagagagaaaga

SEQ ID NO: 273538 - DNA, 432 bp, Glycine max
gacacgcagtcgtattgtagaactgaacaagggtttctctgtctctatctctgtctgcttcttcactttctctcgtttcaatcgaacaaaatcatgggcagaaaattcttcggcggtggcaactggaaatgcaatgggaccactgaggacgtgaagaagattgctactactttaaatgaagctaaagtccctggagaagatgttgtagaagttgacgcgagccctccttttgagttccttccttttgtaaaaagtttgctgcgccctgatttccatgtctcggcccagaattgctgggttcgcaaaggcggtgcttatactggataggttagcgctgaaacgcttgtgaatttgggaattccttgagtgattattggtcactctgaacggatgcagctgttgaatgaatcaaatgagtatgtgggagataaa

SEQ ID NO: 273539 - DNA, 419 bp, Glycine max
gaagtataatacttttgtccaggattcaagtgcggatgatcttaccgatgtcggcgatgtggagtccttgcagttcgacttggctacagttgaagctgccacagacagattctcagatgaggacaagattggccaatgtggatttggggtggtttataagggtgtcttccctaacggacaggagatagctgtgaagaggttgtcagtaacctccttgcagggtgctgtagagttcaggaatgaagctgctcttgtggccaagcttcaacatagaaatttagtgagactattgggattttgcttggagggacaagagaagatccttatctatgaatacataccatacaaaagccttgatcgctttttatttgaccctgttaagcaaagagagttagattggtcaagacgctacaagatta

SEQ ID NO: 273540 - DNA, 427 bp, Glycine max
gagattggatggtggaaatggaatcggcagctgagaaccctaattacccggcggtggactacaagcgaccttccatcttgtcatttcctcggaggcccgccctcagagttacatccgagttcgatagtgaaagcgcagtcttcttccataagatttcctgcaagttgttggacagccttgccaagttcaagttttcgttcaaccacagcggtaagggcggcgacatctccgaacctcaattcagctttgtctccaagcaccttagcctccactacgacctcgaagaccataatgctctcgttaagacctccatcgatcttgctcccagtttgcaactcactgcttctcatgatctcaaggctcaacaaggagaggttaccgtgcttgcaaacctaggcgatcctgcctattcacttcaactatctac

SEQ ID NO: 273541 - DNA, 377 bp, Glycine max
aggcgtgcgaacacctcagacaggacagcagtagaagaatgggagcatgctgctagcgccagtaagctgtcaaccatcaaatggtaagtgcctcaaccacaggctacctactccactagttcatctgagtggagccatgtatccacacactatctacctctatatcatgatctggatctgatacactggcattacacacaggtgacggacatacgtccaaggacatattcgaatcatcgtattacagcgttctgagaattacttgactaatcactcgcattcactaaacacagtttatgtcagcgtaaatgtatcgtcgctagatactagaggattagttcgaaccttatgtattgagtggatagatcatacctgca

SEQ ID NO: 273542 - DNA, 416 bp, Glycine max
gacactaaacaagttaaaagaagagcatcactgaactaacaaagcaaccctatgtcgaaggtggtttgtgtcaccggagccagcggcgccatcggatcatgggtggtcctactcctactccagcgtggttacaccgtccatgccaccgtccaagatatcaaggatgaaaatgagacgaaacatttggaggaaatggaaggagcaaagagtcatctccatttttttgaaatggatcttcttgacatcgactccattgccgctgccataaagggttgttccggcgtaatccaccttgcatgtcctaacatcattggtcaagtcgaagatcccgagaaacagatattggaaccggcgataaaaggaacggttaatgtgttgaaggcggcgaatgaagcatgggtggagcgcgtggtggc

SEQ ID NO: 273543 - DNA, 429 bp, Glycine max
gtacttgaagggtttcactgaagggacgatgattgttggggaatttgctgggagaagagttcaggaagctaagcccttgattaggaacaagcttttagaaacaggccaggctattatctacagtgaaccagagaaacgggtgatgtcaagatctggcgatgagtgtgtggtagccctcacagatcagtggtacattacatatggagaatcagaatggaagaagctagctgacgagtgcctttctaacatgaacctgtattctgatgagacacgacatggatttgagcacactttaagctggttgaaccagtgggcttgctcacgatcatttggtcttgggactcgcataccgtgggatgaacagttcctagttgagtctttatcggattccaccatttacatggcgtattacacttgtgcacaccattt

SEQ ID NO: 273544 - DNA, 422 bp, Glycine max
  unsure (1)..(422): unsure at all n locations
ggttctagtgtgtgattgtttgttgttgtaactcgttcttcttcttttgttgttctgtgtttgtgtttgttttttctctcacctgaaaatgtcttgctgcggtggtaactgtggttgcggaagctcctgcaagtgcggcaactgctgcggaggctgcaagatgtacccagacttgagctacactgagtcaaccaccaccgagaccttggtcatgggagtggcacctgttaaggctcaatttgagggtgctgaaatgggtgtgcccgctgagaacgatggctgcaaatgtggaccaaactgctnctgcaacccctgcacttgcaaagtaagtgtttggagagcaagctttaagcagagatagcccttaattaaggataattgataactattaatgtgtagctaaaaacttatgtattatgtct

SEQ ID NO: 273545 - DNA, 413 bp, Glycine max
acttttacctcaacgtcatatccttggcctctgtctccgtggctttccttttctcacttttcctaccaatgcccaagaaaagcatgttttttcatgcaaaacccagcagagaaataaagaagtcatcaagcgtgaatccagtattagaggaaactcacgaaggtgaagcaccaggctgtgaagagcagaaacccacatcagaaatactcagcacttcagggaagctgaataagggccagctgaacagcctgaaaccaagcaatgtgactgtggacgtttttgtgcagtggttccaagatttgaaggagtgctactcctcaaaacgtcttttctactggtctctatggtgggctttcgccacagcaggttttaaccaggttttgaactatgttcaaatcctgtgggattacaag

SEQ ID NO: 273546 - DNA, 424 bp, Glycine max
gcatacaaaaagattgagcctaagccactagtcattgcaccaggaggtttctatgatgcaaactggttcaacaaatttataagcaaatcaggaaaatctattgatgtggtcactcaccgcatttataaccttggaccaggagttgatgaacaccttgtggaaagaattctggacccttcctatcttgataaagaggttagcacattcagtggcctaaaaaatatacttgcaggtacaggaacctcagcaacagcatgggttggtgagtccggaggggcctacaatagtggccatcatcttgtatccgatgcatttgtttacagtttctggtatttggatcagcttggcatgtcagctgcttatgacactaaaacatattgcagacagactttgataggaggaaactatggtttactcaatacta

SEQ ID NO: 273547 - DNA, 432 bp, Glycine max
ggcacaagtgagtttgttgatcgagataactagaaacagtgtgatgaaaatgaacgtccttggtttcttcgttgctacaattttggtagcatggcaatgccatgcgtacgatatgttccctctccgaatgaacactggctatggtgcccgtactccggaggtgaaatgcgcaagttggaggctatgctgtggaagcacacaacatctttggctttgagaccattcctgaagagtgcgttgaagcatcagaggaatacatccatggcgaacaatatagatcagactccaaaacagttaaccaacaagcttacttttatgccagagacctcgaagtccatcccaaggacacatttgtgttcagtatagatggcaccgtactctctaatattccatactacaaaaaacatggatatggggtggagaaatttaact

SEQ ID NO: 273548 - DNA, 395 bp, Glycine max
ggaacaccacagtgatgaacgaacacccatttgaggactgggaacgttccatattaacatctttgttggttacacttgaagttagaagcctcaagtgaagtgtacttgcatcttgttcttggaaaagttcagttgaatggggactcaaagaggaatagctcttctcagtttcacattcttcttgttggtgagctcagcaaatgctttgctttctcctaagggagtgaactttgaagtgcaagccttaatgggcataaaagattctttagaggatccacatggtgttctagataattgggatggggatgcagttgatccatgtagctggactatggtcacttgttcttctgaaaacttggtcattggactgggcactccaagtcaaagtttatctg

SEQ ID NO: 273549 - DNA, 420 bp, Glycine max
acaattagcttcagagttgatattaatagaaattattccaaaattattcttgtcacaagtaactactatatcccacataaaaagggaaaaaatcccacccaatcacagaaaaggcatcctctgtatgtttccgtggcaatgcgttgtttatgtattctcaaattttgtctggctagttatccaccgcttctccaatggattcattcagtttcttggagaaccatatagactaatgacagcatctgggacacacggacgtatcaagttcatggtggacattcctattataaaaaatactcaggtcttgagaattcctgtgctgaaggatcccaaaatgctttctaaaaagcattagtcatgcctcaaaactgccctttgaggtaggtcagtattattatccccattttaacagaaggaaaa

SEQ ID NO: 273550 - DNA, 397 bp, Glycine max
ggaagctaagcgaagcaaaatgggtggatcagtgagggacgtgaagtcgaagggcgaggtcgacgaggtggtggcgagtggctctccggttatcctccacttctgggcgtcgtggtgcgaagcttccaagcacatggaccaactcttctctcacctttccactgatttccccaacgcccgcttcttaagggtcgaggccgaagagcaacccgagatttctgaggcttactccgtctccgctgttcctttctttgccttctgcaaggatgggaagacctttgatacattggagggagctgatccgtcaagcttaaccaataaggttgctaaagtagcaagctcaattaaccctggagaatctgcatcttctggcagtcttgggatggctgcaggggct

SEQ ID NO: 273551 - DNA, 380 bp, Glycine max
gaaattgatgtggatgaacttgagaagaggatgtggagggacaaaatgcgtcacaagcgattgaaagaacaaaccaagtccaaggaagggactgatgcaacaaagcaaaggcaatcccaagagcaggcaaggaggaaaaagatgtcaagagctcaagatggaatactgaagtacatgctgaaaatgatggaggtttgcaaggcacaagggtttgtttatgggataattcctgagaaggggaagccagtgactggagcatcagacaatcttcgtgaatggtggaaggacaaggtcaggttcgatcgaaatggtcctgctgccatagtgaagtatcaagctgataatgcaatccctggaaagaatgatggatgcaattccat

SEQ ID NO: 273552 - DNA, 422 bp, Glycine max
gagaacagagtgtgataatagtaagacagagcacctactcactcgtaaatggcgaggaagaagatcagagagtaccactccaagaggcttctcaaggagcatctcaaacgtctcgcctctatcgacctccaaatcctctcagctcaggtgacagaatctacggatttcactgagctgacagaccagcatccatggctttcgtcaaccagattggtcgtcaagccagacatgctgttcgggaagcgcggcaagagtggcttagttgctctcaatttagacatagctcaagtcgccgagttcgtcaaagcacgcctcggcgttgaggttgagatgggaggttgcaaggcgcctataaccacttttattgtcgaaccgtttgttcctcacgaccaagagttttatctgtctattggttctgaaag

SEQ ID NO: 273553 - DNA, 429 bp, Glycine max
gactgagggagaggggaatttgcccaagcttgtgctcacttccccggccggtaggtgcgtaatttgctataaagctatttttcccttaacaatcacaaccacaaccatgtgagtgcgtactttgattgattgaatatgtgggtgtgcagtgaggctgagatatacccggttggaaggttcattacttcttggaaagttcccagtggtaaggacctcctctttgttcgccccgacgctgttttcaatgggaacaaaccgataagtggtggtgttccgcattgttttccacagtttggtcctggtccaattcagcaggtacgtgtgcatctttaatccacgctattttctgcacttcttcttgatcttttttcctgtatattttactttttttatggtatatctgctgaattaaaatacaaaaatctgagt

SEQ ID NO: 273554 - DNA, 437 bp, Glycine max
  unsure (1)..(437): unsure at all n locations
gggagcttctatcagtagcagtgcaccggctgctaaggcgcaagttgttggttggcctcctataagatcatttaggaaaaactcattggccaccacttcaaagaacaatgatgaagtagatggaaaaccaggtgcagctgcaatctttgtgaaggtcagcatggatggggctccctatctgaggaaggtagatctaacaaattatacaacgtaccgggaactgtcttctgcacttgagaaaatgttcagctgtttcactctaggtcaatgtggttcccatggagctccaggaagagaaatgttgagtgagagcaagctgaaggacctnctgcacggttcggaatatgtactcacttatgaagataaagatggtgactggatgcttgttggagatgtaccatgggatatgttcatcgacacatgcaaacgactgaaaa

SEQ ID NO: 273555 - DNA, 385 bp, Glycine max
actccccttctctttgacagctgggtgtttgcgcacaagcagccaacccacgtgagagaagaaaaagccacgtcgggaattatgaggatcagcatgtgtttctgaaaacttgtggtgggcacggtggtcacgagcccattcatagacatcattctggaatgccattgtgttggcaatgatcagaaagagccgtaggggcagccgagctttgtaagagcggtggctccacagacgatgagctcctgctgttatgcccagggcactgacaaaatagtagaataccccccaaagccaggtgtagaacttgcaggtaggaatcaaagtgatcccatacagggcttccaaatgtagcagagacataaagatgatgtttctccaaacatat

SEQ ID NO: 273556 - DNA, 412 bp, Glycine max
acaacttcttccgagcctggaacggaggcttctctggaaacctggaaggagaaggcttcatccttgggggagttttcgtggtgggatcaggaaagcagggcattcttcttgagcaccgagaaaaagaatttggagacaaagtaaacctactttctgttctggaagctgctaagatgatcaaaccacagactttggcctcagagaaaaaatgattgtgtgaaactgcccagctcagggataaccagggacattcacctgtgttcatgggatgtattgtttccactcgtgtccctaaggagtgagaaacccatttatactctactctcagtatggattattaatgtattttaatattctgtttaggcccactaaggcaaaatagccccaaaacaagactgacaaaaatctgaaa

SEQ ID NO: 273557 - DNA, 346 bp, Glycine max
acagttgacccagtcaccaatcaaaatcttcaatatttcttggatcgattttacatgaaccgtatttctactcggatgctgatgaaccagcacattcttatatttagtgactcacagacaggaaacccaagccacattggaagcattgatcctaactgtgatgtggtagcagtggtccaagatgcctttgagtgttcaaggatgctctgtgatcagtattatttatcatctccagaattaaagcttacacaagtgaatggaaaatttccagaccaaccaattcacatcgtgtatgttccttcttacctccatcatatgctctttgaactatttaagaatgcaatgc

SEQ ID NO: 273558 - DNA, 412 bp, Glycine max
  unsure (1)..(412): unsure at all n locations
gaggcaattgcaaaggaaaaattgccaaagatggtttatgacttctatgcatcaggggctgaggatcagtggactttgaaagagaaccgaaatgcgttctcaaggattctgttccagccgcgtattcttattgatgtaagcaagatagacttgactacaactgtaatgggcttcaaaatatcaatgcctatcatgattgctccaacagccatgcaaaagatggctcaccctgaaggagaattagctactgctagagcagcatcagcagctggcacaatcatgacactatcctcaactgcgacttccagtgtcgaggaggttgcttcaacaggtcccggcattcgnttttttcaactttatgtgttaaaagacagaaatgtggttgctcaggttgtgagaagagctgaaaaag

SEQ ID NO: 273559 - DNA, 397 bp, Glycine max
ggagagatggagggaagtatccggtgctctgccaactacgttcctctcactccaatcagcttcttggaccgcgccgacgtcgtttaccgcgacagactttctcttgtctccggtgacgttacctacacgtggacccagacacaccaacgctgtatcaaacttgcttcttccatttctcaacttggtgtccgtctttctcccctcgatgtgggtgctgtattggcccctaatgttccagctatgtatgagctgcattttggctgtcccatgtcaagggcttgtctctgcacgctaaatacacgtcatgattctgcaatggtttccttgttgctaaaacattctgaggccaaacttgcttttgctgattatcaattacttgatattgctaaggagcact

SEQ ID NO: 273560 - DNA, 430 bp, Glycine max
gcagatgatggcagacaaattgttgccagggctaagtctgaagctactaactatgacagcgtatatggcgaaccaattcctgttaaggaacttgctgaccgcgtggctagttatgtgcacctctgtacgctatattggtggctcagaccttttggatgtggtgtcatactaggaggttatgacagggatggaccacagttgtacatggttgaacctttcggtgtttcctatagatatctcggtgctgcaaatgggaaaggcaggcaagctgctaaaacagagattgaaaagttaaagcttgctgatatgacatgtcgacaaggggttattgaagtggctaaaattatatatggagttcatgatgaggcaaaggacaaagattttgaactagacatgagcttcgtgtgtgatgagtcacaaccgacacatg

SEQ ID NO: 273561 - DNA, 419 bp, Glycine max
accggcgggcttcgaaaccgcagtcctgcggcgaccccgaactccgctccggagcctcagccccctggaaagtgatcccggcatcggagagccaagatgccggcccacttgctgcaggacgatatctctagctcctataccaccaccaccaccattacagcgcctccctccagggtcctgcagaatggaggagataagttggagacgatgcccctctacttggaagacgacattcgccctgatataaaagatgatatatatgaccccacctacaaggataaggaaggcccaagccccaaggttgaatatgtctggagaaacatcatccttatgtctctgctacacttgggagccctgtatgggatcactttgattcctacctgcaagttctacacctggctttggggggtattctacta

SEQ ID NO: 273562 - DNA, 446 bp, Glycine max
  unsure (1)..(446): unsure at all n locations
ggcagccaaagaaaagaaaatcctcaattttctgagcaggcgaacactctgtctctgtctctcgaaaattctcagtttgcagagaaaatctgaatcatgtcgtggcaagcgtatgtcgacgatcaccttctgtgtgacatcgaaggtaaccacctcactcacgctgctatcatcggccaagacggcagcgtttgggctcagagtaccgacttccctcagttcaaacctgaggagataactgccatcatgaatgactntaatgagcctggatcacttgctccaactggattgtatctcggtggcaccaaatatatggtcatccagggtgaacccggtgctgtcattcgagggaagaagggtccttgtggtgttactgtgaagaagaccggtgcgngcctgatcnattggcattatgatgaaccaatgactccaggtcaatgcaacat

SEQ ID NO: 273563 - DNA, 360 bp, Glycine max
ggagcatgaatgaagagcgatcagaatggctcccaagggcttaatgtttttcgctgcgttatgcttgttatcactgccactgagtcggagccttgccgaagataccggactcggtatcaacctctacgatgaatcataccctcacgctgatgacattatctgcgaacacgtcaagcttctctacaagcgccacaataacactgatttctcctggctcataaacatcttacatgactgtgctgttcagagccgtgatactctactgatgctggactccacatgacagagcttgtctgagaacgaaacctatagaagctctcggctgagaaatttgaggttcattgagaccatcaaacaatc

SEQ ID NO: 273564 - DNA, 448 bp, Glycine max
  unsure (1)..(448): unsure at all n locations
tcatgaagaactcaggaaacaattgcctaatcacaggttccgtacaggaagtgattgtgatgttattgctcacctgtatgaggagcacggagaaaactttatggacatgcttgatggtatattttcatttgttctgctggatactcgtgacaacagttttatagtggcacgggatgcaattggggtcacttccttgtacattggttggggtttagatggctctgtctggatttcctctgaattgaaggggttgaatgatgattgcgaacattttgagtcttttccacctggtcacttgtattctagcaaagagagagcgttccgcagatggtacaatcctccatggttctctgaggctattccatctgccccttatgatcctctngctttgaggcatgcctttgagaaagctgtggtaaaaaggttgatgactgatgtgccctttggt

SEQ ID NO: 273565 - DNA, 332 bp, Glycine max
tcatgtagaacgcaggtagcaattgcctaatcacacggtacatacaggaagtgattgtggagccatagctcatctgcattaggagcacggccaaaactttctggacatgcttgatggtatctctttatttgttcttctgcgatactcgagaccccagttctatagtggcactggatgcaatctacggcactttcttgtacattgattggggtatagatggctcctactggatatcctctgaatatgaaggggttgaatgaccgattgctaacatattgcacctttcacaccttgtcactcgtattctagcatatagagagcattccgcagat

SEQ ID NO: 273566 - DNA, 409 bp, Glycine max
  unsure (1)..(409): unsure at all n locations
gattcagatacgtttcagtgggaaatgaagtgaaacgggaacactcatttgcacaatttctagtgcctgcattggaaaacattcagagggccatttctaatgctggccttggaaaccaagtaaaagtttccactgccattgatactggtgccttggcagaatcattcccaccatcaaagggttccttcaaatctgattatagaggagcatatcttgatggtgtcatcagatttctagtgaacaataatgccccattaatggttaatgtgtactcttacttcgcttacaccgcaaaccctaaggacattagtcttgactatgcancttttaggtctncttcggtggtagtgcaagatggttcacttggttacccgaacctctttgatgcttccggtgatgctngttatgc

SEQ ID NO: 273567 - DNA, 396 bp, Glycine max
ggagccaaagagagagaaagagaagaggaagaagaggaagaagaagctctggattccacctcttcccgtccttcgagacggttgttgtgctgcttgctcttcaggttgacctgggattgaatctaaagaatcttgatttacattttgagatatggagggagtttgtttctggacaaattgctaccagtatcggttttttgcattccaagaagtgcttgattggcgagttttcatccttggagattttcttcgggtttcctttgttaattgcacttagggttctgctccgctttaatgatcagcacagggtacgtgatgctacattcttctgatacaggtgctgcatcttaagtgcacttgtacaatgcattgctgacccaacattcagttaaaact

SEQ ID NO: 273568 - DNA, 446 bp, Glycine max
ggcacaagtgagtttgttgatcgagatggctagaaagagtgtgatgaaaatgaaggtccttgttttcttcgttgctacaattttggtagcatggcaatgccatgcgtacgatatgttccctctccgaatgaacactggctatggtgcccgtactccggaggtgaaatgcgcaagttggaggcttgctgtggaagcacacaacatctttggctttgagaccattcctgaagagtgcgttgaagcaacaaaggaatacatccatggcgaacaatatagatcagactccaaaacagttaaccaacaagcttacttttatgccagagacctcgaagtccattccaaggacacatttgtggtcagtataaatggcaccgtactctctaatattccatactacaaaaaacatggatatggggtggagaaatttaactcgaccctggatgatg

SEQ ID NO: 273569 - DNA, 431 bp, Glycine max
gatggacttgatcattttcgtctatctccgacacaactccgtgcagagttcacaaggcgcaatgcggatgctgtgtttgccttccagctccggaatcctgttcacaatggccatgctttgctaatgactgacacccgaaagcgccttcttgagatgggctataagaatcctgtcctcttgcttcatccacttggaggctacaccaaagctgatgatgtcccacttgattggcgaatgaagcaacatgagaaggtacttgaggatggtgttcttgatccagagacaactgtggtatccatattcccatctcccatacactatgctggacccacggaggtgcagtggcatgcaaaggctaggatcaatgcaagggctaacttctatatcggtggtcgtgaccccgcaagcatgagccatccagttgagaaaaa

SEQ ID NO: 273570 - DNA, 420 bp, Glycine max
gggtggagtgtgcaaaagagcgtcgtagtcgcaagcctaatcagaagaagcgcagcttcaagcgagtgacagccaccagccatgggtcgtatgcacagccgcggtaagggtatatcctcttctgctttgccctacaaaaggacacctcctagctggctcaagatctcttcgcaagatgtcgaagaaaatatctgcaagtttgcgaagaaaggtttgaccccgtctcagattggtgtcattctcagagattctcacggtattgctcaggtcaatagcgtcactggcagcaaaatccttcgcatcctcaaagctcacggacttgcgcctgaaattccagaggacctgtaccatttgattaagaaggcagtttcaattaggaagcatcttgagaggaacaggaaagacaaggactccaagttc

SEQ ID NO: 273571 - DNA, 365 bp, Glycine max
aagggataaaaatggagatgtcaaagatggtgggagtgattcctcaaatggggtgctgaatgagtcattggataaacctgttgtgactgctaacatcgagccgcagccaaatgtggtagcaacaggattttgtagatatgtacatgaaaagcatgcagctattcaccgagtcattgtcgataatgaagcttcctatggactgagaaagtggaccatctaggtcaggaaactctaactgtgaacagaagatacagactcgaaatagcactaactgacgcgtgctgtatggaagcagggctttcttctgaactctggatcatgggaaatactctcaagtgacttagactttagaatgaaaactgata

SEQ ID NO: 273572 - DNA, 419 bp, Glycine max
  unsure (1)..(419): unsure at all n locations
gagaagaagaaggttggttgattggtcccattgattcgcgaagagaaaagaaaagatgtttgagccacaacagctatacactcgcgcgaagaccgaggaattcgacctcgaatcaggagaaaccctctacccagggctgagcgtcggcgagaaccagctccgatggggtttcatccgcaaggtctacggcatcctctccgcgcagatcgtgctcaccaccctcgtcttcgtcaccaccgttttctatactccaatcaatgacctgctcaagggcaattccaccctcctnctcatactcctattccttcccttcatctttttgattcccctgttgaagtaccagcagaagcatcctcataattacatcttgcttgcactcttcaccgtgtcgatcagttccaccatcggagtcacctgtg

SEQ ID NO: 273573 - DNA, 412 bp, Glycine max
ggtacacagcctcaacaaccctaacgcgtgcagagcggagagagacgcagccatggggcgaagacccgcgaggtgttataggcacattaagaacaaaccataccccaagtcacggttttgccgtggtgttcctgatcccaagatcaggatttacgatgttggtatgaagaagaagggtgttgatgagtttcctttctgtgtccatctggttagttgggagaaggaaaacgtttctagtgaggccctggaagctgctcgtattgcttgcaacaagtacatggccaaatttgctggaaaggatgctttccacttgagagtcagggtgcacccattccatgttcttaggatcaacaagatgctttcgtgtgctggagctgataggctccaaactggaatgagaggtgcttttgga

SEQ ID NO: 273574 - DNA, 451 bp, Glycine max
ggagacagagagaatgagtacggtgggagaagggaaggtgagtagtaatggtcatggatgttgcaaatcagggccaggctatgcttccccactggaagccatttctggtcccagagagtctctcatttatgtaacctctgtctacacagggaccggaatagagaagccagactatttggcgacagtggatgtggatccaaactctccaacttattccaaagtcatccataggcttcctgttccttatttaggtgacgaattgcatcacacaggctggaattcatgcagctcttgccatggagacccctcagcagaccgacgatttctcatcgtacctgcactcgtatcaagtcgagtatatgtggttgatgtgaaaacaaatccaagggctccatctttgcacaaagttgtcgagcctgccgatatcatacataagactggattagcttat

SEQ ID NO: 273575 - DNA, 451 bp, Glycine max
ggttctagtgtatgtgattgttgtgagtcgttcttcttcgtcgttatcttcttcttttgttgtttgtgtgtttgttctttctctcacctgaaaatgtcttgcttcggtggtaactgtggttgctgaagcgcctgcaagtgcggcaacggctgcggaagctgcaagatgtacccagacttgagctacaccgagttaaccaccaccgagaccttggtcatgggagtggcaccagttaaagctcaattctagagtgctgaaatgggtgttcccgctgagaacgaatgcttgaaatgtggagctaactggacctgcaacccctgcacttgcaagtgaagtgttcgagagctaaagctttaagcataaattgcccttagaaataatgattaaaactatatgtagcttcaaaacttcaaaattatgtaatatgtattatggtgcactctggtgtttt

SEQ ID NO: 273576 - DNA, 396 bp, Glycine max
tataggggcttccatagagaatatacagtaaacagaaaatgtgaagctcgagtggctggtgagaggcagcgactgctaaggaagggaagcatatttaactacaaatccaatggcggatacctcaagccgatcaagagacctcgacaagctgcttctccgacctggcaatctcgtcggtcctaggttctaacctgggcctgagttgccagatgaccttcaagccttcgccaattcttgttcagacttggagatgttggcaaacccaaagccgaagtagctgccaagcgtgtcatggagagaattagtggtgtggaaatcgtgccgcactttttcaggatcgaggacaaaggaattgaattctacaacaattttaacaatattgcccttggtcttgat

SEQ ID NO: 273577 - DNA, 292 bp, Glycine max
gaagtaagaaagtaagaaagtaggaaagatgacaggtgggatgtttggaaggaaggggcaaaagataaaggggacagtggtgttgatgcctaagaatgtgttggacttcaacgccataaccttcgtcagataaggcagtgttaacgacaccgtctccgatttcttgggcatatgcttgtactcattatgtcatgcatttgatgctgttactgctttaactggtcaaagcatctgcttgcaacttatcatggctactcagactgatagtagcggataaggaaaaggtggaaac

SEQ ID NO: 273578 - DNA, 413 bp, Glycine max
gagaagaagaagagagaaggtataagcagccgtttggtctgttggtatatgaaggtggtgaagagagaagaagaaggagaatggtgacggaccaggatatagcgaaaggggtggagtctctactgcgtcactctgacccaaactccataactacggttaacggtgtcgttcagcagctggaggccaaactagggttagacctctctcacaaggccagtttcatcagagaccagatcgaccatcttctccggtcacagccacaggcatttggtcctcaccctcctccactttacaaagactattttgcccctcacccccaaccgcactttccgaccacccactttccttcccattttgccctccatgacgagatcaacttccagcagcacccccgcgctccttcaccgtgcaaa

SEQ ID NO: 273579 - DNA, 449 bp, Glycine max
ggggaaagagacagaaccgaaaatggttgcgactttgagtcttccgatcatagacctctcttctccccatcgtctttccacagccaattccattcgtcaggcatgcgtggaatatggtttcttttaccttgtgaaccatggggtggacaccgattttgtgagcaaagtcttcgaccaaagttgcaagttcttctcgcttccggtccaacgcaaaatggacctggcccgcaaggaatatagaggctacactcctctctatgctgagacacttgatcctacttcactctccaaaggtgatccaaaagagacctattacattggtcctatagaaagtacctctattgctcatctgaatcaatggccttctgaagaattactgccaaactggagacctacaatgaaatccttatattggaaactactggctgctggaaaaagtctgctgtctc

SEQ ID NO: 273580 - DNA, 267 bp, Glycine max
ggcgcactcagagaggaagcttatagagagagagagagagagagtgaggagagcgtattggctcttcatcaagattggtatttatagggattccatgcacaagaggcgtgccactggtggcaaggacaaggcttggagattgaagagcaagtatcatctatgccttaaggcatgcaaacacctacttatcaagcatcaagtcactctagaggattcgtgtaacatatcactgcttctcatacaggtcattgaggctaaatactggct

SEQ ID NO: 273581 - DNA, 389 bp, Glycine max
ggtgatagcacgtagattagagccatggtaaaggaagtcaacacccaaaccgaggttagtgtgagattggaagccctctgggcagttctgtccaaggatttcgtcaccgtagctccaaaggtactccccaatattgtgaaggatgtgcaagtgattgaaggtgatggaggggttggtacaatcctcatctttaattttttgtctgatgtgtccccaagttaccaaagggagaagatcacagagtttgatgaaatttcacatgaaattgggctgcaagtgattgaaggaggttatctgagtcaaggattgtcatactacaagacaacttttcagttatctgcaataggataggatcagaccttggactacgtggaaattttttatgacca

SEQ ID NO: 273582 - DNA, 274 bp, Glycine max
gggaactggggtacacagaatgatgacattgctgtggttactgaggaagtggtgtatgaaactgaaaagaattttgctgatgagaagcctgcatgcgaggaagatgcacctgaaggaaacaaggactgtcctgccaatgaaaatgaataaaaggagtctgaagacaaggagatgacactggaagagtatgagaaggtgcttgaagagtaaagaaaggccctgcaggcacaaatgactgaagttagaaaggtggacattaaggagtttgcattca

SEQ ID NO: 273583 - DNA, 425 bp, Glycine max
ttagggggcgtcaatagagagtagagagtaaggagaaaatgtgaagcgcgagtggctggtgaaggcagcgactgcgaaggaagggaagcatctttagctccaaattcaatggcggatacctcaagccgatcaagagacctcgacaagctccttcttcgccctggcaatctcgtcggtcctaggttcgaacctggccctgaattgcgagatgaccttcaagccttcgccaattcttgttcagacttgaagatgttggcaaacccaaagccgaggtagctgccaagcgtgtcatggagagaattaatggtgtggaaatcgtgccgcacttttgcaggatcgaggacaaggaaattgaattttacaacaattttaacattattgcccttggtcttgattccattgaggcccccaaatatatcaatact

SEQ ID NO: 273584 - DNA, 420 bp, Glycine max
ggagaaaggggtgcattctgttctgtgtttcggggttacgctttgcgagtgagaattgataaacaaatcgttagggttttttggttgtgcgagtgagagtgagagagaacaatggaagacataacagagggagtgaacaacatcaacatctctgattcgtataagaaaaatcgcattcaggtctctaacaccaagaagcccctcttcttctacgttaatctggccaagagatatatgcaacagcatgatgaggtcgagctctcagctctaggaatggctattgccacagtagtaactgttgctgaaattttgaaaaacaacagacttgctgttgaaaagaaaatcaggacatcaactgttgacataaaggatgactctagaggtcgacctgttcaaaaggccaagattgaaatagtacta

SEQ ID NO: 273585 - DNA, 386 bp, Glycine max
ggcggccaaacgtttcctagccgaaaccctagctagctctttcttaatccataatctctcttatcttcttctctttctatctgcaaaacacaaatgtctcacttcggacgttcgggtcccccagacatttacgacacttactctcttctcgatctcaacatcaccttccgtaccaccgacgacgacctattccctctcttcgacaagtacgggaaggtcgtcgacatcttcatccccaaggatcgaacaactggtgagtcacggggttttgcattcgtgcgttacaagtatgctgatgaggctcagaatgccgttgagaggctcgacgggagaatggctgatggtcgcgaaataactcgccagtatgcgaaatatgggcctaatgc

SEQ ID NO: 273586 - DNA, 445 bp, Glycine max
  unsure (1)..(445): unsure at all n locations
gatatccaaaggaacaaaaatattattaagatgatcgacattattggagcacttgttctactctttgcatttctcttcctcagttgtgtgtatgcacaagacacaacaacccttgtgcctgcaatcataacttttggtgattctgctgtggatgtagggaacaatgactatcttcccacccttttcaaggctgattaccctccttatgggagggactttgttaaccaccaacctactgggaggttttgcaatggcaaattagctactgatttcactgctgacacattgggtttcaagacctatgctccagcatatcttagcccacatgcatcanggaaaaacctccttattggagcaaactttgcttcagctgcatctgggtatgatgaaaatgctgctactttgaatcacgcgattccgttgtcccaacagttgagttatttca

SEQ ID NO: 273587 - DNA, 418 bp, Glycine max
gaagaaggcacagttgcaaactatactttccacaaatacaaggctggctacattcatcactgtcttattgaaggccttgagtatgagactaaatactactatagaattggaagtggtgattcttctcgagaattttggttcaaaacacctctcaaagttgatccagattctccctacaaatttgggatcattggtgatttggggcaaacgtttaattctctttccacccttgagcattatatacaaagtggagcgcagactgtcttatttgttggagatctttcttatgctgataggtaccagtacaatgatgttggattacggtgggatacatggggacgatttgttgaaaggagtacagcatctcatccatgggtatggtctgctggaaatcacgaaatagactatatgcgctaca

SEQ ID NO: 273588 - DNA, 435 bp, Glycine max
ggtggtattgcgtgttggtgtgaatgaagaaccggtctgctgtggctgctctgcaatacttggaatcgctgcgtaattcgcaccctgagctctccgattggtacaattcgctggcggatctgtaccagaagaagctctggcaccagctcactctcaagctcgagcagtttgtggctctcgccgtcttccaggctggtgatgctttaatacaattatatcacaatttcatcacagactttgagacgaaaatcaaccttctcaagcttgcacattttgctgttatagtttctcggcagtattctgaaaaagaagctgctgttggttatcttggaggggtcattcagaaacttcaagacactatggagcagcgcatagaagaacctattctttacattaagatgcaaatagcaatattcaagcttgagcaaggtgatc

SEQ ID NO: 273589 - DNA, 196 bp, Glycine max
gaatatggagcgtgtgactcaggctgtaatggtgggttgatgaacaacgcatttgagtacatacttcaatctgggggagtacagaaaggaaagggctatccatacaccgggagaaattgcacctgcaaatttgaccaaaccaaagttgccgctactgtatctaattacagtgtggtttcccttgatgaagaacaaa

SEQ ID NO: 273590 - DNA, 371 bp, Glycine max
  unsure (1)..(371): unsure at all n locations
ggaagaggaaaaactagaaaagatcccaacagtgaggagccgagcgattttgtttaccttccaagagatgaagcatttggtcacttgaagtcatcagattttctcgcttatggaatcaaatctgtatcccaagatgtcttgcctgtcttgactgatgcattcgatggaaatattttgagccttgagtttgataattttgctgaagtgcacaaactctatgaaggtggagttacactacctacaaactntcttagcaagatcgcccctataccagtgatcaaggaaatttttcgaactgatggcgaacagtttcctcaagtatccaccacctaaagtgatgcangttgataagtctgcatggatgactgatg

SEQ ID NO: 273591 - DNA, 392 bp, Glycine max
  unsure (1)..(392): unsure at all n locations
gatctttatgagaaagaagggcagagtccatggtatgataatctcggcagacctgttacagaccttcttcctcttatagcaagtggtgtcagaggcgtcactagcaaccctgcgatttttcagaaagctatctcatcatcgaatgcttacaatgatcagttcagggaacttgtgcaagcagggaaagacattgaaagtgcatattgggaacttgtagtgaaggatatccaagatgcttgcaaattatttgaaccaatctatgatcaaacagatggtggtgatggctatgtttctgctgaagtatctcccaggctcgctgatgacactgagggaaccatagaagctgcaaaatggcttcatanagtggttgatcgcccaatgtgtatattaag

SEQ ID NO: 273592 - DNA, 416 bp, Glycine max
tggggtgttcgaggtagccattgatattctggtaatgactgtggtgttcaaaaacacaaaccagttagaggaaagtatggattccacttatgacaggaaggctgaagtgaaagcctttgatgattcaaaagctggtgttaaaggtcttgtagagtctggattgacaaagatccctcgcatgttccattctggcaggttggatatcattgaaacctcagtcagtgactctaaaatcggtattcccatcatagacgctcaaaatattcactcctatcctgctcttcattcaaaatgaattggcaaagttcgaaatgcatgccctgactggggatttttccaggggaataatcatggaattcctatcagtgtggtggatgaggataatgattgaattcgtagattcaatgacaagacac

SEQ ID NO: 273593 - DNA, 387 bp, Glycine max
ggcgctaggggaagagagactctctctgctcttccgtctacacgtttagagagagaaagtgtgtctcatttttcaatcttgcccgcatctttttgcgatttctcatttttctcctgttcctttcctttccgtttctctgctactacttccaactccttccattctcaactttctttcaatctctagggtttaattcgccactcatcgaatggaacctcgggttgcgaacaagttccgtcttggccgcaagattggtagcggatccttcggcgagatctatctcggtacgaatactcagacaaatgaagaggttgcagttaagctcgaaaatgtcaaaactaagcattctcaattgttgtacgaatcaaagttgtataaaatacttca

SEQ ID NO: 273594 - DNA, 402 bp, Glycine max
ggcacaagtgagtttgttgatcgagataactagaaacagtgtgatgaaaatgaaagtccctgttttcttcgttgctacaattttggtagcatggcaatgccatgcgtacgatatgttccctctccgaatgaacactggctatggtgcccgtactccggaggtgaaatgcgcaagttggaggcttgctgtggaagcacacaacatctttggctttgagaccattcctgaagagtgcgttgaagcaacaaaggaatacatccatggcgaacaatatagatcagactccaaaacagttaaccaacaagcttacttttatgccagagacctcgaagtccatcccaaggacacatttgtgttcagtatagatggcaccgtactctctaatattccatactacaaaaa

SEQ ID NO: 273595 - DNA, 357 bp, Glycine max
atcgacctttcctttaacaacctctccggccccataccaagctcgcttggtaaactgcctaaactcgcgtatctagatttgagccgcaacaagctcacgggctcaattccggcctcatttggatccttccaaaagcccgggccggctattatgctctctaaaaaccagctttcagggcgccttcctgcttctttggccaacttagactcggacaggatagacttgtcaaggaacaagctcgaaggcgatgcctccatgcttttcgggagcaataaaaggacgtggtctcttgacctttcaaggaacaatttcgcgtttgatctatctcgcgtggagattccccacaagaccctggca

SEQ ID NO: 273596 - DNA, 385 bp, Glycine max
  unsure (1)..(385): unsure at all n locations
ggaagcgtgaaagaaagataatgggtgcttattgcagcggatacgtttcgttgccaccatcctacgacgtcgcttcaggagaagatcccagggtctgcaagcacgttcgcgacaacgtccatggcaacatttatctcgattccctcagtttgaagttcattgacactgagcagtttcagaggcttcgcgagttgaaacaactaggttttacgaacatggtttatccaggtgctgtgcattccagatttgagcattctcttggtgtgtattggcttgccagtcaatgtgtggaaaagcttaaaacttatcaaggcttggagcttggtataaatagatttgatattcaaacagtgaaacttgcangacttctgcatgatgtgngaca

SEQ ID NO: 273597 - DNA, 428 bp, Glycine max
gacaacttttaccagaatcatcgacggtatgttaaaagccgaaatgatgatcagctgagggattctggaaaagcaagctcagtaagtggttgtgaacctgaaaataatgtaaatggaatggcaattttaccttgcggtcttatagcttggagcttgttcaatgatacgtacagcttctcacgcaacagcaataatttaacagtgaacaagacaggcatctcatggaagagtgacagggaccacaaatttggaagtgatgtttttcctaaaaatttccaaaatggtcctataataagtggtggtggcctcgatgaaaatgtacctttgagtctgcatgaggatcttattgtttggaatcgaactgctgctttgccaacttttaggaagttgtatggaaagattgaggtggatctaaaaaaaggcgatgt

SEQ ID NO: 273598 - DNA, 400 bp, Glycine max
  unsure (1)..(400): unsure at all n locations
gcaccaactagggagcttgctcagcaaattgaaaaggttatgcgggcactcggagattatcttggtgtgaaggtgcacgcatgtgtgggaggtaccagtgttcgtgaagaccaacgcattctatcaagtggtgttcatgttgttgttggtactcctggtcgtgtatttgatatgctgcgcagacagtcacttcggccagactatatcaagatgtttgtattggatgaggctgatgaaatgctttcccgtggttttaaagatcagatctatgatatattccagttgcttccatctaagattcaagtgggagttttctctgctacaatgcctnccgaggcacttgagatcacaaggaagttcatgaacaaacctgtgaggatccttgtgaagcgtgatgagc

SEQ ID NO: 273599 - DNA, 385 bp, Glycine max
  unsure (1)..(385): unsure at all n locations
ggacacagagagcatagtaatacttactgagtgcttgcagttgctgcgtcgcaaggtaccggcggcgacggagagctatcttctcaatttccgatcactgcattggttctgttgacgagggttttgttctacttgacttgcatacttgatggcgtcaaagttgcagaagttgcagtccgcagcatgtcaagcatctcaatttgtatccagtcgtggaactaactactacaggcaattgctggaacagaacaagcaacacattcaggagcctnctacagtagagaaatgcaacctgcttgcaaagcaattgttttacacccgccttgctagtattccgggtcgtaatgagtccttttggaaggaacttgattatgtcaagaattta

SEQ ID NO: 273600 - DNA, 314 bp, Glycine max
gatccacacgctcacaataacacactgtcaccgttccgttccgttttgctctgttttttttttctttctttcaaatccccgcttcgtggaaatcccgaaccagaaaccatgcttcttcgaaccgctgctgcttctgcttcgtccctcttcctcttcagcccgaacgccgaaccttcccgttcggttcccgctcgtggattggtggttcgcgcagcgaaaggatccacgaaccaccgcgccctgaccggagtgatttttgaaccgttcgaagaggtgaagaaggagctcgatctcgttcccaccgttccgcaagc

SEQ ID NO: 273601 - DNA, 398 bp, Glycine max
  unsure (1)..(398): unsure at all n locations
ggaactaatgggctcctaacgtgttgcatacgccgtagcagcatttttgggcctggtgataggctgttggtgccttccctagttgatgctgccagaaaagggaagtctaagttcattattggtgatggcaataatgtttatgatttcacatatgttgaaaatgtggctcatgcccatatatgtgctgatcgagctctagtttcagaaggaccaatttcagaaaaagctgcaggagaggcatatttcataacaaatatggagtctatgaaattttgggagttcgtgtcagtggtagtggaaggtcttgggtatgaagggccaagaataaagatccctacctttgntatcatgccaattgcacatttggtggagtggatatataggctactaagcccata

SEQ ID NO: 273602 - DNA, 444 bp, Glycine max
tataagggagagttttgtcggctactggttggatgcatgatcagagactcgtggaggtttcaagtggcttcgtgaaggtgctgcaacttccttggagatggggaatgaagtatttctgggacacccttttggatgcagatcttgagagtgatgctcttggttggcagtacatatctggcactctccctgatggtcgtgaacttgaccgaatagataatccacagtttgaggggtacaaatgtgacccaaatggagaatatgtgcgacgatggcttcctgaacttgctagattaccaactgaatggatacaccatccatggaatgcaccggaatctgtactccaagctgcttgaattgaacttggttcaaattatcctctttccattgtgggaatagattccgcaataagtttaacttcaagaagcacttattcaaatgtggcaa

SEQ ID NO: 273603 - DNA, 448 bp, Glycine max
gagtgtgtgagttcattaacatatacaaattctctgtgttgtgttgtgtacttgtgttaattgtgttgttgttgtaggaaatttaagtgaagagagaatgatgatgaagtctgctatgtgtgcattggtgcttgtggcactggttgtggttgaagtggggcccatggctgaggctgcggtgacttgcaacccaacacagttgactccttgtcttccggcaattaattcaggttctgcaccttcgagtgcttgttgccagaagctgaaggagcaaaagccatgcttctgtggctacctcaaaaaccctagcttgaagcagtatgttaactctcctaatgccaaaaaaaccgttagttcttgtggtattgcctatccaacttgttaagcacctcttatatatatatatataaaatgtgtgaacaatatatatatattgattaaaaaatat

SEQ ID NO: 273604 - DNA, 422 bp, Glycine max
gagatacggagttacattgggaatgcgcggactccggccaccgcgacaatcgtgttcaaggggacaaggctaggggttaggccagcacctgtggtggcatcattttcagcaagagggccaaaccctgagtccccagagattttgaagcctgatgttatagctccaggattgaacattcttgcagcttggcctgatcatgttggaccctctggggtaccctctgatgggcgtaagactgagtttaacatcctctctgggacttcaatggcttgtcctcatgtttctggtttggctgctttgttgaaagcagcacatcctgattggagtcctgctgccattaggtctggcttgatgaccactggttacactggggacaacaagggggatcccatgttggatgagtccactgggaatgtttcatc

SEQ ID NO: 273605 - DNA, 418 bp, Glycine max
gcaaccaaacaacagatattcatggggttctttatgctctcctttctcttccttcttcctgtttcatctgccactgcttgtgatcgctgcttgtatcaatccaaggcttcctatttctccaaagcttctgctctttcatctggggcatgtgggtatggctctttggcactagacataagtggtggacaccttgcagctggtgtggattctctcttcaaaaatggagcacgttgtggtgcctgctttcagataagatgcaagaacccaactctatgtagcatagaacgtaccaaagtggtattgactgatcttaatcacaacaatcaaactgattttgtgctaagcagcatagcctttgcggtcatggctcataagggtatgggccaacaaatactgaagcttggcattgctgagattg

SEQ ID NO: 273606 - DNA, 440 bp, Glycine max
gacactaaacaagttaaaagaagagcgtcactgagcgtaacaaagcaaccctatgtcgaaggtggtttgtgtcaccggagccagcggcgccatcggatcatgggtggtcctactcctcctccagcgtggttacaccgtccatgccaccgtccaagatatcaaggatgaaaatgaggcgaaacatttggaggaaatggaaggagcaaagagtcatctccatttttttgaaatggatcttcttgacatcgactccattgccgctgccataaagggttgttccggcgtaatccaccttgcatgtcctaacatcattggtcaagtcgaagatcccgagaaacagatattggaaccggcgataaaaggaacggttaatgtgttgaaggcggcgaaggaagcatgggtggagcgcgtggtggcgacttcatcgatttcgtcgatta

SEQ ID NO: 273607 - DNA, 398 bp, Glycine max
gctggacaatgggcaaagggcttgggtacttgcactttggattggtgtgatgttaggtctttatgcctataaatttgtgcaatataggagaaaagcagcctatgaggtgatgggccattgtgtatgcatggcaaaaggtgcagccgagacacttaaattgaacatggctcttatcttgttacctgtttgccgcaacaccatcacctggctgaagaataagaccaagttaggtgttgtagttcctttggatgacaacatcaacttccacaaagtgatagctgtggcaatagcagttgctgttgctgtacattccatctatcatcttacttgtgattttactcgccttcttcatgcaagtgatgaaaagtacaagctgatgcaaccttttttcggagaca

SEQ ID NO: 273608 - DNA, 426 bp, Glycine max
gagtgctatgaggatattgctgctggaagtgagattcgcagtgttgtcgtggctgggcggcgcttttatgagaaagagggtctgcctgcatttcccatgggtaaaattgatcagacccggatgtggaaggttggtgagcgtgtccgttctacaaggccagctggtgatctaggtccattatacccatttactgctggggtctacgtggcattgatgatggcccagattgagatcctgaagaagaaggggcattcttactctgaaattattaacgagagtgtcattgagtctgttgattctttgaatcctttcatgcatgctcgtggtgtttcattcatggttgataactgttcaaccacggcaaggttgggttcaaggaaatgggctccccgatttgattacatcctaacccagcaggccttggtg

SEQ ID NO: 273609 - DNA, 442 bp, Glycine max
  unsure (1)..(442): unsure at all n locations
gacacatacaaagcttcagagtctttactctctctgtctctctcgctctctctctctgcgtaaatcgcgtcttccaccaatcagcttgcttgcttgctacctgatctgtcaatactgcgtcgtttaggaccaatccctcaccctccaaggatatggcaatgccggagacaatccctcccactactcccagtgctcaagttgtcggcaatgcctttgtggagcaatattatcacattctgcatcaatccccagaattggtgcacagattttatcaggattcaagtttcttaaccagatcagacagcaatggtgtgatgacaactgttgcaactgtacaagatatccatgaaaagattatttcccttgaatatgaagattatacagcagaaataaaaactgcagacgctcangagtcacataanggaagtgtgatagttttagt

SEQ ID NO: 273610 - DNA, 438 bp, Glycine max
gaatctgagaagcaatggtcaaaagcagctcaaatgctcagtggtattgaccttgattcaggaatgagggtgattgatgatggattcaggctgtcaaagtgtgtccaaattgcttgtttatatcttgaggacgatgatgctgtcaatgctgaagcttttattaataaagcatcattcttggtcagcaacagtcagcatgaagttctgaatttaaagtacaaggtttgctatgcaaggattttggatttgaagaggaagtttttggaagcagcattacgatattatgatatatctcaaattgagaaaaggcaaataggagacgaggagattaatgaggaagcacttgaacaagctttatctgctgctgttacatgcacaatattggcagctgcaggacctcaacgttcccgtgttcttgccactttgtacaaggatgag

SEQ ID NO: 273611 - DNA, 426 bp, Glycine max
gacacaaaaataagtgcgtccaacggaatataaagcatgagaaaaatgccctcccctctggtgtctctgatgcggttgggagtggggacagggagggtttgccattaggtaaaggtaaagcagcacaagtgtcattcatttctctgcaatggatatggatctctagcattcgcattcatcccctccttttctccatgcctccgtcttcacccgttattttcttgtcctgaatgcattcccagaatgttgtagagatggaaggcaagacagaaattcgtatgacatcagctgctgcctttgttgaaggggggattcaagaatcctgtgatgatgcttgcagcatatgccttgaggagttttgtgcaagtgatccttcgacggtcactacctgcaagcatgagtttcacctgcagtgcattctcgaat

SEQ ID NO: 273612 - DNA, 406 bp, Glycine max
gattgctgatagatgttacttacagaggcgtgtacggcaatgtctcaagaggtcctgcagttcgtgcattacgtgctcagaccgataaaagggactatgccattcaaatgaaaagtgtagtagaaagcactccaaacctttctattcgagaggctatggtcacagatattttactagggaagaatgataacgtggaaggtgtttgtacattctttggaatgaaattctatgctccgtctgttattctcaccacagggacttttatgagtggtaaaatttgggtcggtagaacttctatgcctgcaggaagagcttgcgagtctgcttcacttggattaacagaaaacttacaacgacttggttttgaaactgatcggttgaaaactggaaccccttgccgagtgga

SEQ ID NO: 273613 - DNA, 389 bp, Glycine max
gggtttaacagcaaacccaattgtcaaggtctccggcgttgtaggaactaatgtacttgcccttggtactgatgtttcttttgacaccaagattggggagttaactaaattcaatgctggattgaacttcaccaaagatgatttggttgcctcattgactgtgaataacaaaggtgattccctgaatgcttcatactaccatacagtcaatcgcttgaccaacacagctgttggtgctgaggtaactcaccaattctcaaccaatgagaacaccctcacacttggcacccagcatgcattggatccattgacgactgtgaaggctcgtgtcaacaacttgggcaaggcaaatgctctcatccagcacgagtggcgtcccagatcgttct

SEQ ID NO: 273614 - DNA, 446 bp, Glycine max
  unsure (1)..(446): unsure at all n locations
ggagttgaacaagaaagaaaagaaaagatgatgaggaggagagtggacaggaagaaaaggattgaagttgttgctgtgagaaagagaaagagtgaaatcggagtttgggaaggaattgcaatcaatggatgtgataaagacgcagcaaatctcatctcgaccaatctagaaggtggtggttcaccctctcgtgcttctcagcatcgtcgacaactacaacagagtcgccaaagacactctcaagcgcgtcgtcggcgtcttgctcggctcctccttcaaaggcaccgtcgacgtcaccaacagctacgccgtgccctttgaagaagatgacatggatcctagcatctggtttcttgaccacaattaccatgaatctatgttatccatgtttaaaagaataaatgcanaggatcatgttgtggggtggtatagcactggtccaaagc

SEQ ID NO: 273615 - DNA, 291 bp, Glycine max
gggtaaagcattgatgaagcgtgtcatgcaaacctggctttcagcaagtagtgctctattggaaatgatgatatttcatctacccttttcattaacagcccagaagtatcgtgtggagaacttgtatgaaggtcctcttgatgatcaatatgcttctgctatcagaaattgtgatcctgaaagtgctctgatgctctatgtctccaagatgattccagcatctgataaggggagattttttgcctttggccgtgtattctctggcagggtttcaactggtttgaaggtgag

SEQ ID NO: 273616 - DNA, 408 bp, Glycine max
ggaagtaggcgaggatcgttcacataaaatatcgagagagatcgacgagaaaaagctaagcgaacaatgtggagctccaaaacgacgatgatgctggccattgcagccattgctctgatgatgtttctctcatcggcttcagccgacgacgtcgttgcactcacagaggaaaccttcgaaaacgaggttggcaaggatcgcgccgctctcgttgagttttacgctccctggtgtggacactgtaaaaggcttgccccggagtacgaacagctcggagcgagttttaagaaaacgaagtccgttttgattgccaaggtggactgtgatgaacataaaagcgtttgcggtaaatatggggtatctggttaccctaccattcaatggtttcctaagggatctctagaacct

SEQ ID NO: 273617 - DNA, 283 bp, Glycine max
ggcacacaacatttttagtgaaactgaaatggggacggagatcgtgaaatgggggagctttacgcgttggacttctatggaatcatatttgatatctgcattgaaagctttctttttgctatgaaggcttccaaagtgtgatggcctgatttgtttgatgtggtggatgtaacctcagaaaattgggttattgaccatatgcacactttgcgaccagttttggatacttggtatggacactgtttacttgttagactggtgcttgaaagcatagcaccaacca

SEQ ID NO: 273618 - DNA, 339 bp, Glycine max
ggaccacataggattcatcattttccaaacgagcatctgcgtagtttcttaagtcaagagaagaagtgaagtgctgcttcaatggcttcaagtcaggaagaggtgatccttttgggggttattggaagcccatttctgcacagggtgcagattgctctcaaattgaagggagttgaatacaaatatttggaagatgatttgaacaacaagagtgatttgctcctcaagtataacccagtttataaaatgattccagtgtttgttcacaatgaaaagcccatatccgagtcccttgtgattgttgagtacatcgatgacacatggaaaaacaaccccatc

SEQ ID NO: 273619 - DNA, 347 bp, Glycine max
ggtgcgcattttgtgaaaaaaaataaaaaatggggataggggtactatttgttgggtttttcttgctatcttgtgttgtgtgtgtgaagggtgtggagccaaaagcctcacccacttgtacatttccggcagtttacaactttggggactcaaactcagacactggaggcatatcagcttcatttgtgccaattcctgcaccttatggcgagggcttctttcacaagccttctggaagggactgtgatggccgtctcattgtagattccatagctgagaagctaaacttgccatacttaagtgcttatctgaattcccttggaaccaattaccggcatggggcaaat

SEQ ID NO: 273620 - DNA, 424 bp, Glycine max
ggattcggcaaagttgatttcaattcaatttgaggtccccctttttcttctccacgtttgtgcctgcaacctcaaataccgattagggttcatgctacactgaacttggtttcggtgttccaagttagttagaggcattgttgcttgcatagatctctgatctgaaaatgagtgcgtcgaggttcattaagtgcgtcaccgtcggcgacggtgctgtcggcaaaacctgcttgttgatttcctacaccagcaacacttttcccacggactatgtgcccaccgtttttgacaatttcagtgctaatgtggtggtggatggaagcaccgtaaacctaggattgtgggatacagcttgtcaggaggattacaatagattaagacccttgagctatcgaggagctgatgtcttcatacttgccttttc

SEQ ID NO: 273621 - DNA, 312 bp, Glycine max
tcataatgaaatgatccagagcaattccactgaggctgttttgtctgaagtgttcacctcttctgggtcgacagcttctacaattgccaagacatcagagactgctctccttgatgaaaaatcattattagcttgtattgtacgcactattccagctggtggccgaattcgaattagttcaacgctccctaacaggctgggcaagatgcttgcacctctacattggcatgattacaaaaagaagtatgggaagctggatgactttgtagctagccatcctgaattatttttgattgaaggtgactatattca

SEQ ID NO: 273622 - DNA, 423 bp, Glycine max
ggtggtaacgttgttgtgcgtgcggttcatcatgcacaattccacatcctgataactatacaacacaagcacgaacacccccttaccaaaacggcacttgtttattgtcgtttagatcccatggatcacacgcctgctgcgcaacgtcgtctcaaagccattcacgcccacctcaccgccaccgccgatgaatctccctcccacctccgatccaatcccaccgccggcgagttcttctccgctttgatctttacttctgggcagaacaagggtatagtgttgtactcccagagaaattacaaacaggaaagtggaacgtttacagatctgtacgatctcctctgcagctggtgaccaagtttactaatcatcctgaaattggtaccctgcacgataattttgtgcgctcagttgacacctttc

SEQ ID NO: 273623 - DNA, 319 bp, Glycine max
ggcagtagtttattgaaacagattccctttgacccgtgacattttaagtggtgactactagaccaatggaatggagtgcaaagaacatttcagttacctctgctaaatgggtcactactactctgtctctgctctccctgttttggctcttgtccctgcaccaagcaagagctgcaaagttccacaatgtgagtggcttgagagggaaaaagccagttgtagtaaatgggtgcaatttgttcctgggaagttgggtggttgacacgtcttatcctctctatgactcttcaacatgccccttcattgatcccgagtttga

SEQ ID NO: 273624 - DNA, 391 bp, Glycine max
ggagagaaaaaatggccaaatcaatcaaattctttgagttgaacacaggggccaagattccttctcttgggttagggacttggcaagctgaacctggtgttgtagctgaagctctcaccacagccattcaggttggatacaggcatattgactgtgctagtgcgtataagaatcaagcagagattggttctgctcttaagaagctttttgatgatggtgtggtgaagcgtgaggacttatggatcacttccaaactctggtgttcagatcatgcaccagaagatgtgccaaaagcattggataaaacattacaggaattgcaacttgactatcttgacctctatctgatccactggccagtccgcatgaaaagtggaacatttggactcaa

SEQ ID NO: 273625 - DNA, 387 bp, Glycine max
gtgttgaaggcggcgaaggaagcaggggtggagcgcgtggtggcgacttcatcgatttcgtcgattatgccaagtcctaattggccagctgataagattaagggagaagagtgttggacggaccttgaatactgcaagcaaaaggggttgtattatcccattgcaaagactctagcagagaaagcgggttgggactttgcgaaggagacaggttttgatgttgtcatgataaaccctggtacagcattgggccctctgcttcctccaagaatcaattcaagcatggctgtgcttgttagtgttctcaaagggggcaaagagacctacgaggacttttttatgggaacggctcactttcaagacatagcattggcacatattttggca

SEQ ID NO: 273626 - DNA, 341 bp, Glycine max
ggagagacacgtgagatagcacagtggcagggcgtgtcaatccgagagaaagaggcaaccaacttcccattttgttatttccattttccattcccaatcgtaaaaacaacaaatcataatcagtcatagcttcggcgacttctcgatattattttttctgacagagccaccgacagagccggcggttcccgtggcggtttgagaatggccgacaagtacaacctgaagaaccccgccgtgaagcggatcctccaggaggttaaggagatgcagtccaacccttccgacgatttcatgagccttcctctcgaggaaaatatatttgagtggcaatttgcgat

SEQ ID NO: 273627 - DNA, 362 bp, Glycine max
atacgccctagcagcatttttgggcctggtgataggctgatggagccttccctagttgatgctgccagaaaagggaagtctaagttcattattggtgatggcaataatgtttatgatttcacatatgttgaaaatgtggctcatgcccatatatgtgctgatcgagctctagtttcagaaggaccaatttcagaaaaagctgcacgagaggcatatttcataacaaatatggagtctatgaaattttgggagttcgtgtcactggtagtggaacgtcttgggtatgaagggccacaaataaagatccctaccttcgttatcatgccaattgcacatgtggtggagtggatatataggctact

SEQ ID NO: 273628 - DNA, 410 bp, Glycine max
gggatatgaagattttgtttacttcatactatcagaagaggataaatcatctgaaccaagtcttgagtactggttcaagtgcatagatttggatggaaatggagttctaacaaggaatgaactgcaatttttttatgaggagcaattgcatcggatggaatgcatggcccaagagcctgtgctctttgaggacatattgtgtcagataattgacatgattaaacctgaggatgagagtgttataactttgcgggacctgaaaggtggtaaactttcaggaagtgttttcaacatcctgttcaatctaaataagttcatggcctttgaaactcgtgacccatttttgatccgtcaggaacgtgagaacccaacattgacagagtgtgatcgatgtgctcatcgagaatata

SEQ ID NO: 273629 - DNA, 355 bp, Glycine max
gtacgaaaattgagcctgatgacccaaatgggtacataccggagaggttaattggtgaaatagagtttcatgaagtgcatttcgcgtaccctgctaggcctaatgtggccatctttgaaaatttctccatgaaaatagaggcgggaaaatctacggcaatggtgggacaaagtgggtccgggaaatcgacgatcattggtctaatagagaggttttatgatccacttaaagggatggtgacaatagatggcatggacataaaatcgtataacctaaagtcactaaggaagcacatagcactagtgagccaagagccaacgttgttcggtgggaccataagggagaacattgcata

SEQ ID NO: 273630 - DNA, 309 bp, Glycine max
ggaaaaactgtagcagaatgggaatctgcccttgaaacttataaaagaattcccagtaatgaaatcttaaagattctagaagtaagctttgatgctttggaggaagaacaaaagaatgtttttcttgacattgcttgttgcttcaaagggtataaatggacagaggtttatgatatattccgtgctctttatagtaactgcaagatgcatcatattggggtgttggttgaaaaatctctcttattaaaagttagctggcgtgataatgttgaaatgcacgacctgattcaggacatgggtagagacatt

SEQ ID NO: 273631 - DNA, 428 bp, Glycine max
  unsure (1)..(428): unsure at all n locations
ggtacacagcctcaacaaccctaacgcgtgcagagcagagagagacgcagccatggggcgaagacccgcgaggtgttataggcaaattaagaacaaaccataccccaagtcacggttttgccgtggtgttcctgatcccaagatcaggatttacgatgttggtatgaagaagaagggtgttgatgagtttcctttctgtgtccatctggttagttgggagaaggaaaacgtttctagtgaggccctggaagctgctcgtattgcttgcaacaagtacatggccaaatttgctggaaaggatgctttccacttgagagtcanggtgcacccattccatgttcttaggatcaacaagatgctttcgtgtgctggagctgataggctccaaactggaatgagaggtgcttttggaaagccacanggtactt

SEQ ID NO: 273632 - DNA, 393 bp, Glycine max
  unsure (1)..(393): unsure at all n locations
ggcctcaagaaggagaacatggggtttgaggaaactgagttaaggcttggactgcctggaaacggaggcactgaagaagtgctcatcaggaagaggggtttctctgagactgaaactggtcatgaagatgagtctgccaccactgtggatttgatgcttaatctttcttctaaggaggccgcaaccactgctgctgctgctgcagatccaactgataagcacaagactttgcctaaggagaagacccttctgccagcagatcctgctaagcctccagccaagacgcangtggtgggttggccacctgtgcggtccttccggaagaacatgttggctgtgcaaaaaagcgttggagaagagagcgagaagaacaagcagccttatgcaagcttt

SEQ ID NO: 273633 - DNA, 406 bp, Glycine max
ggaggcgaaccgaacgagtgttttcaagctgcggggtgtggtctttctctccgtgacacagcacaaacaaattctcagtgttggagacttgagctcatagagaaatcatagtttgtttaatttcaattctgagcaaaggtcaacatgcaagttttttccattgaaggcgaaagtgctttgtcagttgttggtccaaggccaatggaatggtctactgttccatacaatgcccctcaagctcctgggccaaatggaaagcagcggacctcaagtttggaatcaccgatcatgttgctgtcaggtcaccagagtgctatatataccatgaagttcaatccagcaagatcagtcattgcatctggatctcatgacagggaaattttcctctggaatgtgcatggggatt

SEQ ID NO: 273634 - DNA, 403 bp, Glycine max
ggtgcacaagtgagtttgttgatcgagataactagaaacagtgtgatgaaaatgaaggtccttgttttcttcgttgctacaattttggtagcatggcaatgccatgcgtacgatatgttccctctccgaatgaacactggctatggtgcccgtactccggaagtgaaatgcgcaagttggaggcttgctgtggaagcacacaacatctttggctttgagaccattcctgaagagtgcgttgaagcaacaaaggaatacatccatggcgaacaatatagatcagactccaaaacagttaaccaacaagcttacttttatgccagagacctcgaagtccatcccaaagacacatttgtgttcagtataaatggcaccgtactctctaataatccatactacaaaa

SEQ ID NO: 273635 - DNA, 384 bp, Glycine max
ggagaaaaacgagccaattcatcattttctctcttctctgcttcttcttgttcaaatcttaagagctgaggagaatcaatcgagagaaatatgtctggtatcgctcgtggacgccttgctgaggaacgaaagtcatggcgcaaaaaccatccacacggtttcgttgccaagcccgagactctacctgatggcaccgtaaatttgatggtctggcattgcactattcctggcaagaccgggactgattgggagggtggatatttcccactgacaatgcacttcagtgaagattaccctagcaagcctcccaagtgcaaattccctcaaggtttctttcaccctaatgtgtatccatctggaactgtttgcttgtctatacttaat

SEQ ID NO: 273636 - DNA, 384 bp, Glycine max
  unsure (1)..(384): unsure at all n locations
ggagaaaaacgagccaattcatcattttctctcttctctgcttcttcttgttcaaatcttangagctgaggagaatcaatcgagagaaatatgtctggtatcgctcgtggacgccttgctgaggaacgaaagtcatggcgcaaaaaccatccacacggtttcgttgccaagcccgagactctacctgatggcaccgtaaatttgatggtctggcattgcactattcctggcaagaccgggactgattgggagggtggatatttcccactgacaatgcacttcagtgaagattaccctagcaagcctcccaagtgcaaattccctcaaggtttctttcaccctaatgtgtatccatctggaacttgttgcttgtctatacttaat

SEQ ID NO: 273637 - DNA, 403 bp, Glycine max
  unsure (1)..(403): unsure at all n locations
ggaccaaggggcgtgtggttcgtgttggtctttcagtacgacgggagcgttggaaggagctcattatctggccactggtgagctcgtgagccttatcgagcaacagcttgtggattgcgatcacgtgtgtgatccagaagaatatggagcgtgtgactcangctgtaatggtgggttgatgaacaacgcatttgagtacatacttcagtctgggggagtacagaaagaaaaggactatccatacaccgggagagatggcacctgcaaatttgacaaaaccaaagttgcggctactgtatctaattacagtgtggtttcccttgatgaagaacaaattgctgcaaacctagtaaagaatggccctcttgcaggtgctatcaatgcagtttttatgcagacatat

SEQ ID NO: 273638 - DNA, 354 bp, Glycine max
  unsure (1)..(354): unsure at all n locations
gacaccgagtcgcagaaaaagaaaaaagcgatcatagtttcacttcggccttatccagtttagggtttcggttctctaccctatctttcacgtatcgaaaccttaaatttacgatcaggtctgagcaatctggttggtagaacctttggtcttagtgagtcaagttttatgtctgaattagacgatcaaattcctactgccttcgatccttttgctgatgcaaatgctgatgactcgggtgctgggtcaaaggagtatgtgcatattcgtgtacagcagcgaaatggtaggaaaagcctgacaaccgttcanggattgaaaaaggaattcagctataacaagatacttaaagac

SEQ ID NO: 273639 - DNA, 409 bp, Glycine max
ggcacaagtgagtttgttgatggagataactagaaacagggtgatgaaaatgaaggtccttgttttcttcgttgctacaattttggtagcatggcaatgccatgcgtacgatatgttccctctccgaatgaacactggctatggtgcccgcactccagaggtgaaatgcgcaagttggaggcttgctgtggaagcacacaacatcttttgctttgagaccattcctgaaaagtgcgttgaagcaacataggaatacattcatggcgaacaatatagatcagactccaaaacagttaaccaacaagcttacttttatgccagagaccttgaagtccataccaaggacacatttgtgttcagtataaattgcacccgactctctaatattcatactacaaaaacatggata

SEQ ID NO: 273640 - DNA, 402 bp, Glycine max
  unsure (1)..(402): unsure at all n locations
ggagcaagagtgaagagcgaagagaatggctcccaagggtttaatctttttggctgtgttatgcttctcagcactgtcactgagtcgttgtcttgcggaggataatggacttgttatgaacttctacaaggaatcatgccctcaggctgaagacatcatcaaagaacaagtcaagcttctctacaagcgccacaagaacactgctttctcctggctcaaaaacatcttccatgactgtgctgttcaaagttgtgatgcttcactgttgctggactccacaagaaagagcttgtctgagaaggaaacggatagaactttgggttgaaaaatttcangtacattgagaccatcaaagagctttgaaagggaatgcccagagtttgttctggctgatatctcgtc

SEQ ID NO: 273641 - DNA, 393 bp, Glycine max
  unsure (1)..(393): unsure at all n locations
gaggaggagtgaggcanagctgatagctccggcgaagcccacccctcgtgaagtgaagctactctcagacatagatgaccaagatgggttacgtttccaaattccggtgatacagttctatcgccacgacccatcaatggcagggaaagaccctgtcgatgtgataagaaaggctgtggccaaaacgcttgtgttttactatccttttgcaggtaggcttagggaaggacttggtcggaaactgatggtggattgtactggggaaggtgttttgttcattgaggctgatgcagatgtcactcttaagcaatttggtgatgctcttcaacctcctttcccgtgctgggaggaactcctttatgatgtacctggttctcaaggagtgcttaacac

SEQ ID NO: 273642 - DNA, 414 bp, Glycine max
gagtaggtttgaggcagagctgatagctccggcggggggcacccctcgtgaagtgaagctactctcagacatagatgaccaagatgggttacgtttccaaattccggtgatacagttctatcgccacgacccatcaatggcagggaaagaccctgtcgatgtgataagaaaggctgtggccaaaacgcttgtgttttactatccttttgcacgtaggcttagggaaggacttggtcggaaactgatggtggattgtactggggaaggtgttttgttcattgaggctgatgcagatgtcactcttaagcaatttggagatgctcttcaacctcctttaccgtgctgggaggaactactttatgatgtacctggttctcaaagagtgcttaacaactcccttctgcttattcaagt

SEQ ID NO: 273643 - DNA, 372 bp, Glycine max
ggaggcaagaagttgtattttggcatccccgtggcttcaagaagagaatctcaatggaggcccaggagctgaagcgcgtgttccagatgttcgaccgcaacggcgacgggagaataacgaagaaggagctgaacgactcgctggagaacctgggcatcttcatctctgacaaggacctgagccaaatgatccagaggatcgacgtcaacggcgacggttgcgtggacatggacgagtttggggagctgtatcagaccataatggacgagcgcgacaatgaggaggacatgagggaggccttcaacgtcctcgaccagaacgccgacggcttcatcaccgtcgacgagttgaagaccgtcttgtcctccctcg

SEQ ID NO: 273644 - DNA, 396 bp, Glycine max
gatgacaaactttttgaggctcacagggactggggtaggcgatttatgagactatattcacagttcacatcatgggacaactcaaaagatcctgaacggcctcttgtgataggatatgtctctcctgattattttacacattctgtgtcatatttcatagaagctccccttctctatcatgactataccaattataaagtggttgtttattcagcagttgtcaaggcagatgcaaaaaccattcggtttagagagaaagtcttaaagaaaggtgggatctggaaagatatttatggaactgatgaaaagaaggttgccgacatggttagagaagatcaagttgatattgtaatagagcttactggtcacactgcatacaataagctgggaatgatg

SEQ ID NO: 273645 - DNA, 357 bp, Glycine max
gggatattggcgcggctcaatcaccaactttctcccattgggaagccttttcagagggctgctttttatttcaaagaggccttgcaattacttctccattcaaatgccaacaacagttctttcaccttttcacccaccggccttctgctcaagattggtgcttacaaatcattctcagaaatctcaccagttctgcagttcgctaattttacttgtaaccaagcactgcttgaagctgtgaaagggtttgatcgcattcacataatagattttgatattgggcttggtggacagtggtcttctttcatgcaagagttagcactcaagaatggcggtgcacctgaactcaagatcact

SEQ ID NO: 273646 - DNA, 291 bp, Glycine max
ggagaagaagaagaagaagaagatggagaagtatcagatctggagcaggagaatagcgttggcagcgtttgcgtttgctctgctgttccaatcggcctcagcagacgacgtcgttgtgctctctgaagataacttcgagaaggaagttggtcaggacagaggagctctcgttgagttctatgctccttggtgtggacactgcaaaaagcttgctccagaatatgaaaagcttggtagcagcttcaagaaagccaaatctgttttaattggcaaggttgactgtgatgagca

SEQ ID NO: 273647 - DNA, 409 bp, Glycine max
gcggaaataggagagaaagaagagaagaagaagaagcagcatcgacgaggaggcatcagaacattacctttcattcttgcaaatgaagtgtgtgacagatttgcaagtgctggttttcatggtaacttgataagttacttgacccaagagctgaacatgccattggtagctgcctcaaacacactgacaaactttggaggaacatctagcttcacccctctcattggggctattatagcagattcctttgctggacgtttttggaccattaccgttgcttctctcatttatgaactgggattgattagcatcactgtatcagctatactgccacaatttcgtcccccaccatgcccaacacaagctaattgccaagaagccacatgctcacaactgtggatactctaca

SEQ ID NO: 273648 - DNA, 356 bp, Glycine max
  unsure (1)..(356): unsure at all n locations
gatgatagaggcggttccttcgtcgctgtgagaagaatttcgcagggtcttgatcgaagcaacacgtgccattcaagttccgctgagtttgtgacaggatcaacagcatggcttggcagaagtctgtcctgtgtctgtgcacagagaagagaaagtgatgcccgaccctcttttgatttaactccagcccangaagagtgcttgcagagactacaaagtcgcattgatattccatacgatggttctgtccctgagcaccaagatgccctaagagatttatggaatgcagcatttgccgaagaagactccatggtttgatttctgagcagtggaaggacatggggctgcaagggaag

SEQ ID NO: 273649 - DNA, 248 bp, Glycine max
aggatagcattagcatcgtttgcgtttgctctgctgttccacagatttgcaagtgctggttttcatgggcactcgataaataacttggacaaggaagttggtcatgacagaggagctctcgttgagttctatgctccttggtgaggaacatgtaaactgctcgctccagaatatgctattatagcagattcctttgctggacgtttttggaccattaccgctgcttctgtcatttatgaactgggatt

SEQ ID NO: 273650 - DNA, 322 bp, Glycine max
tggggaaaaaaaagatgaataaaaaagagaggttgcggatttaacgcactataattgcaacttcatcaattgcttatactctcatcctacactctgcctcatgaaactacatattcattctctatcattataacttcgagatcgtaatcattctcgacaaaggacctctaaataagttctatgctatttattctaaacactgaaactatctttctctaaacattcaaacattcattatcaactatcataaagccaaatctcttttaatttgcaaggaccactgtgatactcattacagtaaatgcagctacattggacattc

SEQ ID NO: 273651 - DNA, 383 bp, Glycine max
acctgactcttgggaagctagagaatctgagggttgttgctcttcataacaacaacttctatgggtcaattccaccagagttgggaaattgcactgaattggagggaatatttttacagggtaattaccttagtggagcgattccaagtgaaataggaaacctttcacagcttcaaaatttggatatatcaagcaattccctcagtgggaatattcctgcatcacttgggaagttgtataatctcaaaaatttcaatgtatcaaccaattttctggtcggacctataccttctgatggtgtccttgccaactttactggaagctcctttgttgggaatcgtggtttgtgtggagtgaaaataaattcaacatgtagagatgat

SEQ ID NO: 273652 - DNA, 405 bp, Glycine max
ggagagcgagagagagagagaaacaaagcagcacccatttggatcctctcttctcttctttgatctccgttaccctttttgttttctcaacagagagagagagagagaatctttcgaagttcgtttgcgtgtgttgtgtggtcagtcaccgatggcagcaccacctgcgagggcacgtgccgattacgattacctcatcaagcttcttcttattggcgatagcggtgtgggaaagagttgtctgcttttgcgattttctgatggttccttcacaaccagttttatcaccaccattggcattgattttaagataagaaccattgaacttgatggcaaacgcattaagttacaaatctgggatacagctggtcaggagcgatttcgaactattaccacagcttatta

SEQ ID NO: 273653 - DNA, 372 bp, Glycine max
gatggctcagatgcataccctttttgtgaagcatggtactactcttgacagacacctcggaagctttaaaattcccccatcaagattggctgcatttgttactgtagccttgcttgttagcattgagctctatgatcgcttctttgagaagatcatgcaaaggttgaccaagaaccccagatgcattacccttattcagaggatgggaattggacttgtaatgcacacactgatcatgatcattgcatactgggactgaaagctatagactcattgttgcaagagaacatggtgtaggtgaaagcggagggcatgtgcctttgagcatattcattacgctctctcaacttatactgatgggaactgctgatg

SEQ ID NO: 273654 - DNA, 342 bp, Glycine max
gatgctgtagattatcttacgtggacattcatgtacaggcggctcacacagaatcccaattattacaacttgcaaggagttagtcacagacatctttctgatcacctctcagagatggtggaaaatactttgagtgatttagaagcgggcaagtgcattacaattgaggatgatatggagcttgctcctctcaatcttggaatgattgcatcctattattacatcagttacacaacaattgaaaggttttcatcatctgtgacttcaaaaactaaaatgaagggtcttttggagattctgtcttcagcttcagagtatgctcagcttccaatacgacctgga

SEQ ID NO: 273655 - DNA, 392 bp, Glycine max
  unsure (1)..(392): unsure at all n locations
gattagtgggagcaatacatatcattcattcagaggcaacaaaggagttgtaaattaagagcatggctgcacaagctcttgtatcatcatcatctcttaccttctcagccgaggctacaagacaaagtcttggaccaagatcactccaatctccatttggcttctcaagaaaagcctcctttcttgttaaggcagctgctactccccctgtcaagcaaggatcagacagacctttgtggtttgcatcaaagcaaagtctttcctacttggatggcagccttccgggtgactatggatttgaccctctgggactttcggaccctgaaggaacaggagggttcattgagccgaaatggctagcatatggtgagataatcaatggtcngtatgca

SEQ ID NO: 273656 - DNA, 420 bp, Glycine max
ggtgcaagagtttgttgtgagctataagctggtggatcgtgaggagaatatgaagttgtttgttttctttgttgctgcagtagttttggtagcatggccatgccatggcgcaggctaccaaaggttccctctccgaatgaaaactggctatggtgagcgttcttcggaggtagaatgcgcaagttttaggcttgctgtggaagcacacaacatccgagcctttaaaaccattcctgaagagtgcgttgaaccaacaaaggactacattaatggcgaacaatttagatcagactctaaaacagttaaccaacaagctttcttttatgctagtgaacgcgaagtccatcacaacgacatatttatattcggcatagataacaccgtactctctaatatcccatactatgaaaaacatggata

SEQ ID NO: 273657 - DNA, 412 bp, Glycine max
ggaagtaggaaatagcagagtttagactttagactttagagtcagtgtacgcagaagagtaaaatcgattggcgatgatggagttgaaagagattcagagactcgaaggccacaccgataaggtttggagcttggcctggaacccgaccaccggtcacgccggtatcccactcgtcttcgcttcttgcagcggcgacaaaaccgtccgaatctgggagcagaacctctcctctggcctctgggcctgcacggcggttctggatgaaacgcacactcgaactgttcgatcttgtgcttggtcaccgtcgggtaagctattggccactgcaagcttcgatgccaccactgccatttgggaaaatggtgggggggattttgaagtgggttctactttggaagggacaacgaaaat

SEQ ID NO: 273658 - DNA, 316 bp, Glycine max
ggtggtgatggcaaagtattctctccctcttctgcaaatacagctgtgtcccagcccaacacctctcagaaaagaactgctcctgctccagtggtggggtggcccccaattcgttccttcaggaagaaccttgcaagcagcagcagtgcttctaagccacctcctgagtctcaggctgagcagcacaacaaggttgctggtaaaaaacctgttgacaactatgctaataataaaggtttgtttgtcaagatcaacatggatggtgttcctatagggagaaaagtggacctcaatgcctatgacagctatgaaaatc

SEQ ID NO: 273659 - DNA, 294 bp, Glycine max
ggaagcaaaacaacattaccagagtgggtctagtaattcagtgctgctagaagatggaaactagtgaatggcatatcgagcgaagatctagcttcggctctgaatcccccttagcaagagaggcaggaaatgtgcctgaaactgggtcactctctattgtggtgcttggtgcttctggtgatcttgctaagaaaaagacgtttcctgcacttttccacctatacctgcagggattcttaccaccagatgaagttcatatttttggctatgcaaggacaaaaatctctgatgatg

SEQ ID NO: 273660 - DNA, 396 bp, Glycine max
  unsure (1)..(396): unsure at all n locations
ctttgtcactttattactaatacaaacaatggaaggcttccaatccctgtccatagacccaatgggacaaacaatgctggaacattaccttctacatcaacatcaatgccccaatctcaaagtcaaacggtagtggtagaaaatccaatgtctgttgattcaagtgggaaattggtgagcaatgttgttgttggcgttacaacggataagaaataacatcatcacatataaaaggtacagttcacgtcatgacgcatcaccacaagtgctgtcacaagaagatattgnttgtgtatatgaatatatatatgatattgcagcctgcaatggtttaattgaaatcaacatttttccaatataagaagttgacgaatatcatgtatgtatgaatgtata

SEQ ID NO: 273661 - DNA, 406 bp, Glycine max
ggggagagaatagagaagagagatggatccagacgcgttggcaaaggcattcgtggagcactactacagcaccttcgacaccaacaggaacggcttagcgaatctctaccaggagggttccatgctcactttcgaagggcagaagatccaaggcgcttccaacatcgttgccaagctcacctccctcccttttcagcagtgccaccactcaatctccaccgtcgactgccagccctccggcgtcaacgccggcatgctcgtcttcgtcagcggaaaccttcagctcgccggcgaacagcacactctcaagttcagccagatgttccatttgataccaacacctcagggaagctattatgtgttgaatgacatattccgtttaaactatgcatgaagatgtcatatg

SEQ ID NO: 273662 - DNA, 426 bp, Glycine max
ggatcgcagtgggtatagtagatgaagggaaagggacagcagccagcttcgggactcacggaaccttctaggctatatataaaaaaaaaaatattgcacgctcctccgggctcctggcatttcaaattcaaggcctcttttcaatcttcaaagcagctactgcggcagctccattttccaattgaagttagcagagcagccatctgtgtgtgaaggggacatgatggatgattcccaaaagcatagaatcctgatggtctcagattttttctatcccaactttggaggtgtggagaatcacatatattatctctcacagtgtttgctcaagttaggccacaaggtggtggttgcaactcatgcttatggaaatcgatctggggtccgatatatgaccggtggtctgaaagtctactatattccatg

SEQ ID NO: 273663 - DNA, 316 bp, Glycine max
ggggtgtaagtgagtcttgggagtgagtcactcttcctgcttaacccacatctgtagacaatatgggaagcactggtttgctacatttgatatgccttgacattgctttagtaagtgagtcgcttgtgcaagcacaacatgcgtataagtatttcacatggacggtgacttatgggactctttatcccttggctagtccccagcaagttattcttatcaatggtcagattgctgggcctagacttgacttggtaactaatgaaaatgtaattctcaaccttatcaacaagctggacgaaccatttttactcacttg

SEQ ID NO: 273664 - DNA, 413 bp, Glycine max
ggatgtgggaagtgatgcatgaatgccacaaacttcagtttcagatcatgtcagcagcatataacaacagccatgctagaatcaccatgcattcagaattacgtagacagattacttcctatcttgaaaatgaactccaatttctatcatcaagctttaccaagtggattggagctcagaaattctatctggaggctataaacggatggcttctcaaatgtgttcgtcatgaagaaaaatcatccaagagaaaaaggaagcctcaatctggccctagccgttatgatcttccaatatatgtcacctgtgcagtctggttggataaacttagtgacttacctgtaaaggatgttgccgattcaattaaaagtttggcgacagatactgcccagttcttaccacaccaagacaag

SEQ ID NO: 273665 - DNA, 425 bp, Glycine max
  unsure (1)..(425): unsure at all n locations
ggggaaaaagaagagtaattggcaaattgattttggcttgctcggcaacacggtgggagcattcttcacttgtccttggttttggaacgacgacagccgagctatctctcattccattttcatccatcaatggctccagtagcagcagcatcttcagattcaatcaagccaagagatgtttgcattgttggtgttgcacgtacaccaatgggtggatttcttggtaccctgtcatctctatctgccaccaagctaggctctatagctattgaagctgctcttaaaagggccaatgttgatccatcccttgtggaagaagtatttttcgggaatgttcttagtgctaatttggggcaagctcctgcaagacaagctgctcttggagcangaatatccaattcagtaatctgtactactgttaacaa

SEQ ID NO: 273666 - DNA, 348 bp, Glycine max
ggaacgaggagggactttacaaattagtggtattttgttgaacatgttgggggagatgcgtaggatgggacgtttattagcaaaaggtatcaaggtttgaagggtggaggggagactggtaaataggtttggaatagaaacaggtaaagagttggcaggttaccgggtgggttaattactctccacccgcgatctcaaacgaagggaagctcacaccgccaagaagaacaacctcgtcatgggaccttcattccaaatggggaaatagatggtcaagaattgctcgcaagctaccagggcgaactgacaatgaaattaagaattattggaagactcacatgaggaaaa

SEQ ID NO: 273667 - DNA, 337 bp, Glycine max
tcggccagacacgtgcgcccttctgcagccgcccgccgcatccgccgccgcagcccccagcatgtcgggcccagacgtcgagacgccgtccgccatccagatctgccggatcatgcggccagatgatgccaacgtggccggcaatgtccacggggggaccatcctgaagatgatcgaggaggcaggcgccatcatcagcacccggcattgcaacagccagaacggggagcgctgtgtggccgccctggctcgtgtcgagcgcaccgacttcctgtctcccatgtgcatcggtgaggtggcgcatgtcaacgcggagatcacctacaccttcaagcac

SEQ ID NO: 273668 - DNA, 324 bp, Glycine max
atctgatcttgtacaaacctgagaaaaacaagcaatggggaaaggattccctatttaataaatggcgctgtgtaactggctagccatatatagaaagctgaaactggatcccttccttacaccttatacaaaaatcaattcaagatggattaaagacttacatgttagacctgaaaccataaaaaccctagaagaaaacctaggcattaccattcaggacatacgcatgggcaaggacttcatgtctaaaacaccaaaagcaatggcaacaaaagccaaaattgacaaatgggatctaattaaactaaagagcttctgcacagc

SEQ ID NO: 273669 - DNA, 412 bp, Glycine max
  unsure (1)..(412): unsure at all n locations
gggaggccataaaaaagatgcgatgctacacgcagacaagtagtacaagtccaataagaaaagcaagatagaaagattggctagttcacacacctcaattaatacaacaacaccctgttgctgatagttattatagagagagttcgatcaattcaagcttgcaagcttaaccatggaacggtatgagataattaaagatattgggtcanggaaactttggtgtggcaaagctggtcaaggaaaaatggagtggtgaattatatgctatcaagttcattgagagaggcttcaagattgatgaacacgtgcaaagagagattataaatcataggtccttgaagcatcccaatatcattagatttaaagagttgttgcttactccaactcatcttgcaatagtcatggaatatgc

SEQ ID NO: 273670 - DNA, 431 bp, Glycine max
ggcagccaagaaaagaaaatcctcacgcattttgttcgtagccaaacactctgaaattctcagttatgtcgtggcaagcgtatgtggatgatcacctactgtgtgaaatcgaaggtaaccacctcactcacgccgctatcatcggccaagacggaagcgtttgggctcagagcaccaacttccctcagttcaaacctgaggaaataactgccatcaataatgactttaatgagcctggatcacttgctccaactggattgtatatcggtggcaccaaatacatggtcatccacggtgagcctggtgctgtcattcgagggaagaagggtcctggtggtgttactgtgaagaagaccggtgcggccttgatcattggcatttatgatgaaccaatgactccaggtcaatgcaacatggtagttgaaaggctt

SEQ ID NO: 273671 - DNA, 383 bp, Glycine max
gggagtcagaggtttgtgtcacacacacggaaagggaaagagaaaacacagagagaagcaaaacattacttctttgaacttgatgtgtattgtaacaaatgtctttcccaatattgttcgtaatgtaaggaccgaatttgaaacttaataaaggcgaacttttaatgtaaggctttctggtgggggcaagtcaaatagtttggtccatgaggagcacgaatgcctgtcagttgtacagaacatacagtgggctagccttccacctgagcttcttcgtgatgttattaaaagattggaagaaagtgagactacatggcctgctcgtaagcacgtggttgcgtgtgcttctgtatgcaagtactggagaggaatgtgcaaagaaa

SEQ ID NO: 273672 - DNA, 417 bp, Glycine max
  unsure (1)..(417): unsure at all n locations
gaaggtgcaagagtttgttgtgagctataagctagtttatcgtgaggagaatatgaagttgtttgttttctttgttgctgcagtagttttggtagcatggccatgccatggcgcangctaccaaaggttccctctccgaatgaaaactggctatggtgagcgttcttcggaggtaaaatgcgcaagttttaggcttgctgtggaagcacacaacatccgagcctttaaaaccattcctgaagagtgcgttgaaccaacaaaggactacattaatggcgaacaatttagatcagactctaaaacagttaaccaacaagctttcttttatgctagtgaacgcgaagtccatcacaacgacatatgtatattcggcatagataacaccgaactctctaatatcccatactatgaaaaaca

SEQ ID NO: 273673 - DNA, 188 bp, Glycine max
  unsure (1)..(188): unsure at all n locations
ggagcaagagtgaagagcgaagagggtggctcccaagggtttaatctttttggctgtgttatgcttctcagcactgtcactgagtcgttgtcttgcggaggataatggacttgttatgaacttctacaaggaatcatgccctcangctgaagacatcatcaaagaacaagtcaagcttgtctacaagc

SEQ ID NO: 273674 - DNA, 333 bp, Glycine max
ccggcgctctgtccccaccccggccggccgcccatagccagccctacgtcacctcttcaccgcaccctcggactgccccaaggcccccgccgccggtccagcgccgcgcagccaccgccgccggcgccgcctcttcttagtcgccgccatgacgaccgcgtccacctcgcaggtgcgccagaactaccaccaggactcagaggccgccatcaaccgccagatcaacctggagctctacgcctgctacgtttacctgtccatgatcgtcacagctacctgtctctggggatccctagtataacacattcagtgttcccctttcagtcttactac

SEQ ID NO: 273675 - DNA, 428 bp, Glycine max
gtgttaatatcatagcaaatctattccatgctccgataagtgatgatgagactgcagtaggtgtgggaactgtggggtcatcggaggcaataatgttggcaggtctagcttttaaaaggaaatggcagacaaagagaaaagcagaaggcaaaccatatgataagcccaacatagtaactggggctaatgtgcaagtttgttgggaaaaatttgcaaggtactttgaagtagagctcaaggaagtgaaactcaaagaaagatactatgtgatggaccctgcgaaagcagttgaaatggtagatgagaacaccatctgtgttgcagccattttggggtcaactatgaccggagagtttgaggatgtgaagcttctcgatgaacttcttactaaaaagaacaatgagacaggttgggataccccaattcat

SEQ ID NO: 273676 - DNA, 422 bp, Glycine max
ggttctagtgtgtgattgtttgttgttgtaactcgttcttcttcttttgttgttctgtgtttgtgtttgttttttctctcacctgaaaatgtcttgctgcggtggtaactgtggttgcggaagctcctgcaagtgcggcaacggctgcggaggctgcaagatgtacccagacttgagctacactgagtcaaccaccaccgagaccttggtcatgggagtggcacctgttaaggctcaatttgagggtgctgaaatgggtgtgcccgctgagaacgatggctgcaaatgtggaccaaactgctcctgcaacccctgcacttgcaagtgaagtgttgggagagcaagcttcgagcagagatagcccttaattaagaataatgataaactattaatgtgtagctaaaaacttatgtattatgtct

SEQ ID NO: 273677 - DNA, 423 bp, Glycine max
gattgagaggtccaccaaccttgactggtacaagggaccaactctccttgaggctcttgaccaaatcaatgagcccaagaggccctcagacaagccactcaggcttccattgcaggatgtctacaaaattggtggtattggtaccgtgccagtgggacgtgttgagactggtgtcgtgaagcccggtatggtggtgacttttggtcccactgggctgacaactgaggttaagtctgttgagatgcaccatgaggctctcacagaggctcttccaggtgacaatgttggctttaatgtgaagaatgttgcagtcaaggatctcaagcgtggttttgttgcatccaactccaaggatgaccctgccaaggaagctgccaacttcacatctcaagtcattatcatgaaccaccctggccagattgg

SEQ ID NO: 273678 - DNA, 203 bp, Glycine max
tcggccaccgagggcgcacgcgtgagacttcttcgccgcagacgccgccgcgatgcgctacgtcgcctcctacctgctggctgccctagggggcaactccttccccagcgccaaggacatcaagaagatcttggacagcgtgggtatcgaggcggacgacgaccggctcaacaaggttatcagtgagctgaatggaaaaaaca

SEQ ID NO: 273679 - DNA, 409 bp, Glycine max
gacggctaaaagctaaaaatcatcgaagtactcaaattagcatggctgtcacggttgcattcttgaatttgatcatcatgttttcagtagtctctacaagcaagtcactgagcttaaactactattcaaaaacatgccctgatgtggaatgcattgttgccaaggcagtgaaggatgccactgctagggacaaaactgttccagctgcacttctgcgaatgcacttccatgactgtttcgttcgggggtgtgatgcctctgtgctgctaaattcaaaaggaagcaacaaagcagaaaaagatgggccaccaaatgtttctttgcatgcattctatgtcattgatgcagcgaagaaagcactagaagcttcatgcccaggtgtggtctcttgtgctgacatccttgctct

SEQ ID NO: 273680 - DNA, 425 bp, Glycine max
ggaactaaaaaatgaactgtcttcagaatctttctcgattctctgttttgcccttcgatacacttgttacgcgccaccgcaagaaccttcccctttccctgggtttcgtcaataattctcatcaaaatctaactatggcactcaaggctgcctcaggttctataccgagtgcagacacaagtagtgccgataaggaggaagaaaagtctgagacatatagtcatagcatgacagaagccatgggtgctgttttgacttataggcatgaattaagaatgaactataatttcatccgtccagacttgattgtgggatcatgcctacagactcctgaagatgtagacaagttgtgtagaattggagtgaaaactatattttgcttacaacaagatccagaccttgaatatttcggagttgatattaat

SEQ ID NO: 273681 - DNA, 432 bp, Glycine max
gacagagaaaatgagtacggtgggagaagggagggtgagtagtaatggtcatggatgttgcaaatcaaggccaggctatgcttccccactggaagccatttctggtcccagagagtctctcatttatgtaacctctgtctacacagggaccggaatagagaagccagactatttggcgacagtggatgtggatccaaactctccaacttattccaaagtcatccataggcttcctgttccttatttacgtgacgaattgcatcacacaggctggaattcatgcagctcttgccatggagacccctcagcagaccgacgatttctcatcgtacctgcactcgtatcaggtcgagtatatgtggttgatgtgaaaacaaatgcaagggctccatctttgcacaaagttgtcgagcctgccgatatcatacaaaa

SEQ ID NO: 273682 - DNA, 389 bp, Glycine max
  unsure (1)..(389): unsure at all n locations
gacgagtaaactgggatatatattttgttcctgcgaacccaaaatcaaaatccctctcctgtgagcatgctgaaaggaacaacaaaaggaggtgaaatgggaggagaaggagggagagaaggggattgggagtgcagcagttgcaacaacaggaactacgccttcagatcattctgcaaccgatgcaagcaaccccgcctcctcgtcgacaccaaaaccccctctgattccaagtggctccctcgtattggcgattggatctgcaccggttgcactaacaacaattatgcattaagagagaagtgcaagaagtgcggacaaccaaaagaggtagcagccatgccagcaatngcgatgaccggagcatctttcccnccttattcacacta

SEQ ID NO: 273683 - DNA, 407 bp, Glycine max
gacgcgtggaaatgatatgcacgcacgcttctgtgggagaggaagtaggaaatagcagagtttagactttagactttagagtcagtgtacgcagaagagtaaaatcgattggcgatgatggagttgaaagagattcagagactcgaaggccacaccgataaggtttggagcttggcctggaacccgaccaccggtcacgccggtatcccactcgtcttcgcttcttgcagcggcgacaaaaccgtacgaatctgggagcagaacctctcctctggcctctgggcctgcacggcggttctggatgaaacgcacactcgaactgttcgatcttgtgcttggtcaccgtcgggtaagctattggccactgcaagcttcgatgccaccactgccatttgggaaaatgttgg

SEQ ID NO: 273684 - DNA, 425 bp, Glycine max
gaatgaatggaaaaggatctaattagacaatgacgttatctcggactgtgaatgagtgaacagcataaaagcacaacttgactgacatacgcaaccaaactaaagataaacaaaatttagaaacaaaaacatgttggtgaaggtgtacggtccaacctatggagcccccaagagggtgctggtgtgtctgattgacaacgaaattgagtttgaaacaacacatattgatctcttgaagggagagaataacgaacctgagttgctaaagctgcacccatttggatcacttgctgctattcaagatggtgattatactctctatgaatctcgggcaataatcagatactttgcacagaagtataaataccaagggacagactcgttggtaaagacaatagaataaaaaagtctagtggaacaatggc

SEQ ID NO: 273685 - DNA, 325 bp, Glycine max
cggagccgcggggttcttgacggatctcgccatgatccgctttatcctgatccataaccgggcaggtataacgtcgccggactagtggtacacgcgctttgatgatgatgagaaacacaggctgatcgatgaggtgcatgccttgatcacggtccgagacgccaaacacaccaactttgcggagttccggaactttaaaatcatttaccgccgctatgctggcctctacttctgcatctgtgtagatgtcaatgtcaacaacctggcttacctggaagccattcacaactatatggaggtcttaaccgaatatttccacaatgtc

SEQ ID NO: 273686 - DNA, 436 bp, Glycine max
gttaaagaactgtgaagaagagggtaactgcaaacaaagcaagcaaaacaaaagacgcagtgatggagaggatgaagagggtgcttctgctgcttctggccttcactgttcttctcatgttgccagaagcttctgctacaaagtttactgttggaaacaaccagttttggaaccccaatattaactacactgagtgggctaaaggcaaacatttctaccttggtgactggctctattttgtgtacgataggaaccaagcgagcgtgttggaagtgaacaagacagattatgaaacatgtaactctgatcatccactcacaaattggactacgggagctggaagagacgtggttccattgaatgtaacaaaaacttactacattatcagtggccgagggttctgcttcagcggcatgaagaaagcagttcatgttga

SEQ ID NO: 273687 - DNA, 421 bp, Glycine max
  unsure (1)..(421): unsure at all n locations
gaacgcagccaagaaaagaaaatcctcacccattttcttcgtagccaaacactctgaaattctcagttatgtcgtggcaagcgtatgtggatgatcacctactgtgtgaaatcgaaggtaaccacctcactcacgccgctatcatcggccaagacggaagcgtttgggctcagagcaccaacttccctcagttcaaacctgaggaaataactgccatcaataatgactttaatgagcctggatcacttgctccaactggattgtatatcggtggcaccaaatacatggtcatccanggtgagcctggtgctgtcattcgagggaagaaaggtcctggtggtgttactgtgaagaagaccggtgcggccttgatcattggcatttatgatgaaccaatgactccaggtcaatgcaacatggg

SEQ ID NO: 273688 - DNA, 356 bp, Glycine max
  unsure (1)..(356): unsure at all n locations
gttttgtggaggtgttcatcanaaaatagcttctgggttgtttgagcctttcgtttctcatctcaaattcctcaaagatgagatctccaaaggtggatactcaattaagcttctgcctcccaacaacggtgccttctggttcaccagagccacgtttgagagatttgtgcgctttgtcagcacacccgctattctggagaggtttgctagccttgaaaatgaaattcttcagatcgaaagttcttttcaagctaatgctctatcgatgtccattgcaactccagatgaaggatccgtaccacaagccaatggcatcacaaagaggttaagtgattctacaaagttaaatgatgtac

SEQ ID NO: 273689 - DNA, 370 bp, Glycine max
ggcatgtccaaaggaacaaaaatattattaagatgatcaacattattggaacacttgttctactctttgcatttctcttactcagttgtgtgtatgcacaagacacaacaacccttgtgcctgcaatcataacttttggtgattctgctgtggatgtagggaacaatgactatcttcccacccttttcaaggctgattaccctacttatgggagggactttgttaaccaccaacctactgggaagatgtgcaatggcaaattacctactgatatcactgatgacacattgagtttcaagacctatgctccagcatatcttatgccacatgcatcacggaaaaacctacttattggagcatactttgcttc

SEQ ID NO: 273690 - DNA, 422 bp, Glycine max
ggttctagtgtgtgattgtttgttgttgtaactcgctcttcttcttttgttgttctgtgtttgtgtttgttttttctctcacctgaaaatgtcttgctgcggtggtaactgtggttgcggaagctcctgcaagtgcggcaacggctgcggaggctgcaagatgtacccagacttgagctacactgagtcaaccaccaccgagaccttggtcatgggagtggcacctgttaaggctcaatttgagggtgctgaaatgggtgtgcccgctgagaacgatggctgcaaatgtggaccaaactgctcctgcaacccctgcacttgcaagtgaggtgttgggagagcaagcttcaagcagagatagcccttaattaggaataatgataaactattaatgtgtagctaaaaacttatgtattatgtct

SEQ ID NO: 273691 - DNA, 430 bp, Glycine max
ggagattggtgcaattattttaaaatgcacatgtgcgactaactccctttcttctatttattgccttcgcagacacaaaaatcgccatcggaaaccaacaatgcctcctttgactttgtggctggtgctgccttttctcgtgttgctagcggcggcaacaacgtctccaacacgcgccacgacggtcgcctcgtcgttccacggtcaacgagagtttgactatttcgctttcgcgttgcaatggcccggtacttactgcaaacgcacccgcagttgctgccccaccaacggttgctgcagaggctccaattttccaacagtgttcaccatacatggactctggcctgactataatgatggaacctggccgtcctgttgctctggatctagtttcgatccaaaagagatattgacattgactaatagttta

SEQ ID NO: 273692 - DNA, 426 bp, Glycine max
ggcagggcagaggagaaggccttgtgattcatcatgacgaatgaacccaacaacaagtacgatgtttttctgtgtttagttggcccagatacccgctacaccttcgctggtaatctctataatgctttgcgccgcaacagaatcaatacctttttcacagaagataatcatcatgatgagctactactcatgaatggcgaccaaatttcaccctttgctctaagagcaattaaagaatcaaacttgttaattgttgttctctctccaaactacgcatcatccccaaggaatcttgatgaatttgtggccatcgttcggtgtataaagaggaagaagcaactgctgctttccgtcttttacaaagtggaacgaggggaaataatggatgcaatatttagtggacctgatcaacaagcgctctgtgta

SEQ ID NO: 273693 - DNA, 413 bp, Glycine max
ggtggtagtgtggcagcgacacgtatcaacttcaataatcgcatcgcagaagcagtttccggtgcatctcatcgtctccgaaaatgaacgacgcagatgtctcgaagcaaatccagcagatggtgcggttcatccgccaggaagctgaggaaaaggccaacgagatctctgtctccgccgaagaggaattcaatatcgagaagctgcagttggtcgaagccgacaagaagaagatcaggcaagaatacgaacgcaaagagcgccaagttgaaattcgcaagaagattgagtactcaatgcagctgaatgcttctcggattaaagttcttcaagctcaagatgacgtgatcagttccatgaaagaagctgcatgcaaggaacttttgactgtgagtcatcatcatgatgatcat

SEQ ID NO: 273694 - DNA, 413 bp, Glycine max
ggagcaagagtgaagagcgaaaagaatggctcccgagggttgaatctttgtggctgtgttatgcttataagcactgtcactgagtcgctgtcttgcggaggataatggacttgttatgaacttctacaaggaatcatgccctcaggctgaagacatcatcaaagaacaagtcaagcttctctacaagcgccacaagaacactgctttctcctggctcacaaacatcttccatgactgcgctgttcagagttgagatgcttcactgctgctggactccacaagaaggagcttgtctgagaaggaaacagatagatgctgtgggttgagaaatttcaagttcattgagaccatcaaagaagctttggaaagggaatgcccacgagttgtttgctgcgctgatatcctcgatctct

SEQ ID NO: 273695 - DNA, 430 bp, Glycine max
gatgcatgtcatggcattggcaacatcaaggaacgggtccacgcccactcccactcccactcccactcccacggacactcccactcccacatcgaagatggagaagatactgacgttcgacacgtcgtcgtttctcaggtgttggagcttgggattgtatcacattctgttataattgggttgtccttaggagtttcgcaaagtccttgtaccataaggccattaattgcggcgttatcttttcatcagttttttgaagggtttgcgcttggaggttgcatttcccaagcgcagtttaaagcctcgtcagcaactataatggcttgtttttttgcactgactacacccttgggtgttgggattggaatggctatctcttcggggtataacccttacagccccggtgcactcatcgccgaaggtatcttgg

SEQ ID NO: 273696 - DNA, 317 bp, Glycine max
  unsure (1)..(317): unsure at all n locations
ggcggcgaacgcggagagcacgccatgaaggcctcgggcacgctacgagagtacaaggtagtgggtcgctgcctgcccacccncaaatgccacacgccgnccctctaccgcatgcgaatctttgcgcctaatcatgtcgtcgccaagtcccgcttctggtactttgtatctcagttaaagaagatgaagaagtcttcaggggagattgtctactgtgggcaggtgtttgagaagtcccccctgcgggtgaagaacttcgggatctggctgcgctatgactcccggagcggcacccacaacatgtaccgggaataccg

SEQ ID NO: 273697 - DNA, 318 bp, Glycine max
  unsure (1)..(318): unsure at all n locations
cttcaacagggcttggacggaacccggcgctcgttccccaccccggccggccgcccatagccagccctccgtcacctcttcaccgcaccctcggactgccccaaggcccccgccgccgttccagcgccgcgcagccaccgtcgacgtcgccgcctctccttagtcgccgccatgacgaccgcgtccacctcgcaggtgcgccagaactaccaccaggactcagaggccgccatcaaccgccagatcaacctggagctctacgcctnctacgtttacctgtccatgtcttactactttgaccgcgatgatgtggctttg

SEQ ID NO: 273698 - DNA, 353 bp, Glycine max
gaaggacactggaactgtgtatgcattgaaaatcatggacaagggatttattaccaaaaaaaataaaacagcttatgtgaaattggaacgcattgtgctaaatcaattggatcgtccaggcattgtgcggttatatttcacatttcaagactcattttctctatacatggctcttgaattctgtgaaggtggagaacttttgatcaaataaccacgaaagggcgtctatcaagggatgaagcacgattctatgcagctgaaattgttgatgctctcgaatacatacataatttgggagtcatacatcgggatattaagccagaaaacttattacttacagattgaggacatat

SEQ ID NO: 273699 - DNA, 385 bp, Glycine max
gaaggacactggaactgtgtatgcattgaaaatcggggacaagggatttattaccaaagagaataaaacagcttatgtgaagttggaacgcattgtgctagatcaattggatcgtacaggcattgtgcggttatatttcacatttcaagactcattttctctatacatggctcttgaatcctgtgaaggtggagaacttttgatcaaataaccaggaaaggtcgtctatcacgggatgaggcacgattctatgcagctgaagttgttgatgctctcgaatacatacataatttgggagtcatacatcgtgatattaagccagagaacttattacttacagctgaaggacatattaaaatagccgattttgggagtgtgaagccta

SEQ ID NO: 273700 - DNA, 423 bp, Glycine max
  unsure (1)..(423): unsure at all n locations
gaaggacactggaactgtgtatgcattgaaaatcggtgacaaagaatttattaccaaagagaataaaacagcttatgtgaagttggaacgcattgtgctagatcaattggatcgtccaggcattgtgcggttatatttcacatttcaagactcattttctctatacatggctcttgaatcctgtgaaggtggagaacttttgatcaaataaccaggaaaggtcgtctatcaggggatgaggcacgattctatgcagctgaagttgttgatgctctcgaatacatacataatttgggagtcatacatcgtgatattaagccagaaaacttattacttacagctgaaggacatattaaaatagccgattttgggagtgtgaaacctatgcangatagccaaataactgttctttcaaatgcagca

SEQ ID NO: 273701 - DNA, 416 bp, Glycine max
atagatcaggtggaacagaaaccactgggtaaccggtatgttaaccgtgccccgtttgctggaaatggagttcaagtctcacctgttactccatctgctgatgttactgcttacttcagctctgagcattcgaacagctcgattgattattctgacctcggatggggtgaacaagtgcccaagacacccgagatctcatccatgctttctgctgctcctttggacggtgaatctcagtttgtgcagggtgctgctgatcagaatcagaagaagaacaacctgctggatatggcatctgtgcaagatgattctgcaaaaactctttctgaggagcttgcagacattgaataccagctgaagttctttgagaccccttcttttcttgatgaaacctggactgatgctgcattggcgtc

SEQ ID NO: 273702 - DNA, 425 bp, Glycine max
ggccctaattcaggacattaaaccatagctagcgtgtccttgcgaaaaatgaccataagcttacagtttaagggctttgtgaggatatgatctatggcacttgtgtcacagcttccaagtcactgattttcagagcgttagtgttgcagaagccattaaattttcaagtaaaattctcctccaagtgttttcctacgaagataagaatggaaagtaatcttaatcatagcatagagggcaacaataaagcgtctaggggtgccttggttgtcctagaaggcttggatcgttctgggaagtcttctcagtgtagcagactagtgtccttcttggagggacaagggatctctgctgaattatggagatttcccgacagaactacaaatgttgggcaaatgatatctgcctatctaactaacacatct

SEQ ID NO: 273703 - DNA, 214 bp, Glycine max
gtcactggccgtgattgtggggatttttgccctgtgctggttacctgtgcatgctgttaactgggtcactcttttccagccagctcagggtaaaaataagcccaagtgggcaatgaatatggccattcttctgtcacatgccaattcagttgtcaatcccattgtctatgcttaccggaaccgagacttccgctacacttttcacaaaattatc

SEQ ID NO: 273704 - DNA, 262 bp, Glycine max
gtcttctgacgctggtgcgcctgcccgggaacatcctgctggactcagtcatggcttgtggtctggtcgccagcaacctgaatctcaaacctggagagtgccttcgagtgcgaggcgaggtggctcctgacgctaagagcttcgtgctgaacctgggcaaagacagcaacaacctgtgcctgcactttaaccctcgctttaacgcccacggcgacgccaacaccatcgtgtgcaacagcaaggacggcggggcctgggggac

SEQ ID NO: 273705 - DNA, 293 bp, Glycine max
ttggtcccaggggttcagctgaggtagggacgtgctgtaggccggaatgttaccggctgttggatctgcggatgaggaggaggatcctgcggaggaggattgtcctgaattggttcccattgagacgacgcaaagcgaggaggaggaaaagtctggcctcggcgccaagatcccagtcacaattatcaccgggtatttaggtgctgggaagacaacacttctgaactatattttgacagagcaacatagtaaaagagtagcggtcattttaaatgaatttggggaaggaagtg

SEQ ID NO: 273706 - DNA, 427 bp, Glycine max
gatagaaacaaagtgctttgctactaagcaaacgggaacaatatgggtaatcacagtaccaacatctccctgtttgcttattgatttgcttcttccgatcccatcacgaagtgcaaatagcaattccgctactcacaaaaaaccttttcctattccctttctctttcctgaacccaacacaacaacacaacacaggataaataaattaaattaaaaactagctaaattcctctctctctctctttctcttcgagggtttgggtttctcttcctcccttggagaaaaagaagagccaccgctgcgacgccgttcgtgcatttttgaagtgccgctgtcatgtttgggcgtggtggaccaaggaagagtgataactccaaatattatgatattctcgggatttgcaaaaatgccagtgaagatgaaatc

SEQ ID NO: 273707 - DNA, 431 bp, Glycine max
atcactgaaagcgaagatggcatgattagtttggcgctgatttgctcgtttaatcgaatgcgaaagcaccttaatttgggtgatgtaaagcccgaagaagtggcccaagataccgtgaatgctgttgctcaaactttgagaaattcagctacactcaaggtctccgaagatgggaaaaaagttggcaggaaaactgaacttccaaagctagaagaggttgagcaggtggagataagaacacttgctgtatcgccatttgaacatgatctgaagcttgaagatgtggagaaactctttggtcaatatgccaaggttaatagtgtccggcttccccatcatgttggagacaaaaagttcttctgtggcactgctcttgtagaattttcttcagaggaagatgtagaaaaggtcatgaaggaaaaattggtata

SEQ ID NO: 273708 - DNA, 93 bp, Glycine max
tttcttacctgctacaattctaggaacatgaaaatgccattcgcacgatatgttccctcttctaatgaacactggctatcaaacccgtactcc

SEQ ID NO: 273709 - DNA, 437 bp, Glycine max
gagaaagagcgtgagaagaatgttgaggaagcaagggaggctctgcagtttcttgagaatgagataaaggacaagaagttctttggaggagaggagattgggttggtagatattgctgctgtctacatagcattttgggtccctatggttcaagaaattgcagggttggagttattcacaagtgagaaatttcctaagctccacaattggagccaagaatttttgaaccatccaattgtcaaagaaagtctgccccctagaggtcctgttttctcctttttcaagggtctctatgaaagcctttttggttcaaaatagatttgatgatgtggtgtgagacttagtatttctaagaattatgtgtttgttaaaggcttctatgaaagcctcactgcttcaaaatagattcatgtatgtgagactcagaatctctgggg

SEQ ID NO: 273710 - DNA, 225 bp, Glycine max
gcggtcgtgagggctgaggatttttggtccgcacgctcctgctcctgactcaccgctgttcgctctcgccgaggaacaagtcggtcaggaagcccgcgcgcaacagccatggcttttaaggataccggaaaaacacccgtggagccggaggtggcaattcaccgaattcgaatcaccctaacaagccgcaacgtaaaatccttggaaaaggtgtgtgctgacttg

SEQ ID NO: 273711 - DNA, 320 bp, Glycine max
ggagggtggagagagagagaagtgagagtgtgagagggagcacagtgaagaagagaacgaaggaacgaagatggagactcctcctccgcaacaaggcgtggtgaagaagaaggagacaaggggccgaaaacccaagccgaaagacgaacacgccaaggcgttgaaggaagggagaaaaacacagcaacaacaacatgatcagcagcaacaacaacaacagcaacatcaaccttcggtggacgagaaatacacgcagtggaagtcccttggtcctggcctctacgactggctcggtaaccacaaccttgtctggccctctc

SEQ ID NO: 273712 - DNA, 382 bp, Glycine max
gacacaaaaggagcatcgagtaggtttcctactcccttctcatcgttggcaagatgagtgccatgaaattttgccgtgaatgcaataacattctgtaccctaaggaagacagagaccagaaagttcttctcttcgcttgccgcaactgcgaccatcaggaggttgctgataacttctgtgtgtataggaatgagatacatcactctgttggagagcgcactcaggtgttgcaagatgtcgctgcagatccaacgcttactcgaaccaagtctgttcgctgcagtcaatgcaatcatggtgaagctggctttttccaggcaactgccagaggggaagaaggaatgacactttttttcggttgctgcaacccaaactgtggaca

SEQ ID NO: 273713 - DNA, 342 bp, Glycine max
gggtatcatgtgaatgacacacacatttggtgtgggaatttagggactgataacgggaaggacgtgtttggttctgcttgtgagaacccttcacagtatataagttgggacagtgttcattatgctgaggctgcaaaccattgggttgcaaatcgtatactcaatggctcttacactgacccaccgacacccatcacccaagcatgttacaggcattaagcatcatagtcagaaaatcatttctgattggacattaattcctaaaggaacttatatatcagaaattgtaatattgcttgagacttttatttattcctgtgctagatgagaaccactagtttg

SEQ ID NO: 273714 - DNA, 364 bp, Glycine max
ggaagaagaagaaggttggttgattggtcccattgattccgaagagaaaagaaaagatgtttgagccacaacagctatacactcgcgcgaagaccgaggaattcgacctcgaatcaggagaaaccctctacccagggctgagcgtcggcgagaaccagctccgatggggtttcatgcgcaaggtctacggcatcctctacgtgcaaatcgtccttaccacccttgtctgcgtcaacaccggtttctatactccaatcaatgaccttcttaagggcaattccagccttctacttatactgctcttacttgccttcatccttttgaatcccctggtgaagtaccagcagaagcattctcataatta

SEQ ID NO: 273715 - DNA, 349 bp, Glycine max
  unsure (1)..(349): unsure at all n locations
ggtgggcaaatttagttaaagacttcattcccaatggtgttgatggtatatggaatgatatgaacgaaccagctatctttaaggttctaacaaaaacaatgcctgagagcaatgttcatagaggagatactgaacttggaggttgtcagaatcattttttctatcataatgtctatggtctactgatggcaagatcaacttatgaaggcatgaaactagctaatgaaaagaagcgtccttttgttcttacgagagctggattttctggcagccaaaggtatgctgcaacatggactggagataatctttctacatgggagcatcttcacatgagtatctncatggtact

SEQ ID NO: 273716 - DNA, 298 bp, Glycine max
ggttctagtgtgtgattgtttgttgttgtaactcgttcttcttcttttgttgttctgtgtttgtgtttgttttttctctcacctgaaaatgtcttgctgcggtggtaactgtggttgcggaagctcctgcaagtgcggcaacggctgcggaggctgcaagatgtacccagacttgagctacactgagtcaaccaccaccgagaccttggtcatgggagtggcacctgttaaggctcaatttgagggtgctgaaatgggtgtgcccgctgagaacgatggctgcaaatgtggaccaaac

SEQ ID NO: 273717 - DNA, 298 bp, Glycine max
ggttctagtgtgtgattgtttgttgttgtaactcgttcttcttcttttgttgttctgtgtttgtgtttgttttttctctcacctgaaaatgtcttgctgcggtggtaactgtggttgcggaagctcctgcaagtgcggcaacggctgcagaggctgcaagatgtacccagacttgagctacactgagtcaaccaccaccgagaccttggtcatgggagtggtacctgttaaggctcaatttgagggtgctgaaatgggtgtgcccgctgagaacgatggctgcaaatgtggaccaaac

SEQ ID NO: 273718 - DNA, 374 bp, Glycine max
gaagaggaagctcagaaagaggctagccagaggtataatggaaagcagtttcatttaagccaggatcctgacgttcttgatacatggttttcttctggtctgttcccattatctgtgctgggatggcctgatgacacagaggacctgaagacattctatccaacttctgttctggaaactggccatgatatcctctttttctgggttgcccgaatggtgatgcaaggattgaagttgggtggtgatgtgccttttacgaagatttatttgcatcctatggttcgtgatgcacatggacgcaagatgttcaaagtcttatggaatgttattgatcccattgaagtgataaatgggatatcacttgaaagtctaca

SEQ ID NO: 273719 - DNA, 330 bp, Glycine max
gaaagaacttgtatctgagcctttaattagtcgttatggtaacgatgaaggtattcctgaactcagagcagcattagtcaaaaagttgcgtgatgaaaataatttgcacaaatcttcagtaatggttacatcaagtgccaatcaggcatttgtgaatctagttcttactctctgtgatccgggtgattccgtggttatgtttgctccttactacttcaatgcctacatgtccttccagatgactggcgttaccaatattctagttggtcctggtagctcaggcacactccatcctgatgcagattggttggaaagaatattatcagaaac

SEQ ID NO: 273720 - DNA, 400 bp, Glycine max
ggagaaaaaagattgtttgttgctgtgttgtgtgcatagagggggagagagagtgtggaggctgctatggggaacagagctatgttaacgctgctactcttcttcttctcgaccaaattgtttccttccgctctggctatctggctgtcgttacccaccactggcaccaagtgcgtctctgaagaaatccaacacaacattgtcgttttggccgattacgtcgttatccccagtgatcacacccacaaccccaccatcgccgtcaaggtgacatcaccatatggaaacaatcttcatcacaaggagaacacaacacatggtaatattgcatttacgactcaagaggctgggaactaccttgcatgcttctgggtgggtagccatagtcaaggagttggtg

SEQ ID NO: 273721 - DNA, 376 bp, Glycine max
gatggtggtaataataaaggtgaaggtgaagtcagttcaggaaagcctgcggagcaaagcgctaagccagcttcggagcctccgaagcaagactacattcacgttcgagccaggaggggtcaagccactgatagtcacagtcttgcagaacgagtaattttttgtttttattgtacttgagagggttgtgtttggaaaaatgaagtgaaaatgtgatgttattgtgagtttaccttttctgagttaaaggggtaattttgaggttattgatttgtttggattaaagttgttgactgtgattgatttctgattgggatgtttgtggatgctggacaggctcgaaaggaaaagattagtgaaaggatgaaaattcttc

SEQ ID NO: 273722 - DNA, 323 bp, Glycine max
gagcgaaacagagagtgatttcagtgagtgatcggtgttcacttgatctcatcataatcgtcagcgtcaattgaagaagatgccgatcagaaacatcgccgtcggaaggcctgaagaggcgactcaccccgacacgttgaaggcggctttggctgagttcatctcaaccttcatcttcgtgttcgccggctcaggctccggcatcgcctacaacaagctcaccgacaacggcgctgccacccctgccggcctcatctccgcctgcatcgcccatgcattcgccctcttcgtcgccgtctccgtcggcgccaacatctccggcg

SEQ ID NO: 273723 - DNA, 360 bp, Glycine max
gtagtgaaaggcaccaaaatccaaccacatcaatagccatgaaaaccacactctcactctctcctttacttctcttcctactcttctccctagtccaaggactcacccccaaatgtgacacccaagaccatggctcaacccttgaagttttccatgtgttcagcccatgttccccatttaggccatcaaagccactctcatgggcagagagtgtcctccagctgcaggccaaggaccaagccaagctacagttcctggctagcatggtggctgggaagtcaattgtgcccattgcctcaggaaggcaaattattcaaagcccaacttacattgtgagggccaaaatagggaccccaccac

SEQ ID NO: 273724 - DNA, 325 bp, Glycine max
tgggatcacacgatggcatatttaaaggaactgccagaaagtaattggctttgttgcaatgattgcacaagaatacactctactttggagaatcttttggttaaggtggctgagagactccctgaatctatcttgggtgttataaagaagaagcaagaggatgaaggattagaaccgatcattgatgtaagatggaggcttcttaatggcaacattgcttatcctgaaactagaccattgcttctggaggctgcttgaatctttgatgaatgctttaatcctatagtcgatgcaactagtggacgtgaccttattccagccatgg

SEQ ID NO: 273725 - DNA, 390 bp, Glycine max
ggaggaggatgaagaagaggaggaggggttgaaggaagaggtggatgcaaatggggacgtgaagatgggtgagattgatgaggggcaggttcaggagttggaggagcaccgcattgagttgagtctcgggcaagataataatgttgagagggttgaagttgagaaggagcagggtggagaggagcagatgatggatgtgggttttgagcagtctaaggaggaggatatgcctggaatgtggcttttggatcagaagaactgtgtgggggagccatttttgcggccttgtcatggtggtgatgtgaagggtgtggaagttgaacaagtgagagaggacgatggagaaagtgtgcatgaacaagaggaggtggaggaagatgaagaagagga

SEQ ID NO: 273726 - DNA, 398 bp, Glycine max
  unsure (1)..(398): unsure at all n locations
ggtcgtcgcaggcgcagagtagagcagcacagaagagggaaaacggcaccgccgccgtagaagaaaacaaccatggtgcacgtctccttttacaggaactatgggaagacattcaagaagccgcgtcgtccgtacgagaaggagcgtctcgacgcggagttgaagctggttggtgagtacgggcttcggtgcaagagagagctgtggagggtgcagtacgcgctcagccgcatccgcaacaacgcgcggaacctnctcaccctcgacgagaagaacccgcgccggatcttcgagggagaggcgctgctccgaaggatgttccgttacggtctcctcgatgagacacagaacaagcttgattacgtcctcgccctcaccgtcgagaactttctcgagcg

SEQ ID NO: 273727 - DNA, 396 bp, Glycine max
gggtgacagagagagagaagttttcagtttcagaaagaaagcaaaagcaatagcaatgggttggatcggtgagactgttgattccatcaaatctcttcagatccgccaggtcctcacccaggctgtgagcctaggcatgattgttacgtctgcactgataatatggaaggcattgatgtgcgttactggcagtgaatctcccgttgttgttgttctttctggaagcatggaacccggattcaagcggggagacatcttggtcttgcacatgagtaaagatcctattcgggcaggggagattgttgtgtttaatgttgatggacgtgagattccaattgttcatcgtgtaattaaggtacatgaaagggaagatactggggaggttgatgttctcac

SEQ ID NO: 273728 - DNA, 357 bp, Glycine max
gggggaaaagcgtagtcatcagtttgccgatagaagtagaaaatggaatcttgatcgtattatctttgttgctcatccattactccttctgcagtagaataatatataaagagagaagagtgcaatctagaaccacatagttattttactgtgtgagtgagagagagaaaattaacatgggaagaggaagggttgttctggagagaatagagaacaagatcaaccgtcaagtaacattctcaaaacgcagaagtgggttgctgaagaaggcctttgagctttctgtgctatgtgacgctgaagttgcccttatcatcttttctagccgtggcaagctttttcagtacagcagcactg

SEQ ID NO: 273729 - DNA, 406 bp, Glycine max
  unsure (1)..(406): unsure at all n locations
ggtggtggaatagtccaattcggacattgaaaccatcaccagtcaccacctttctcgcatcgcttgttggatttcaaactctgccatttcgattccttcgttcactcgttattttgcatgactattgtagaggctgcagcctggatgattggtggactttaagcttgtgaaagaataattgccgaatggaacttgcaagacctgcctcaagtagaagaaaattgaaagatttattgcttcagagtgataatcgtctttgtgctgattgtaatgctccagatcctaaatgggcgtctgccaacattggagtttttatatgcttaaaatgttgtggtgtgcacagaagccttggtactcatatatcanaggttntgtctgtgacattggatgattgggcagaggatga

SEQ ID NO: 273730 - DNA, 421 bp, Glycine max
ggagctgaaggcaaaaaggacacaccgtttcatagtttttaagattgaggagcagcatatgcaggtcattgtggagaagcttggtgagcctgaccagggctatgaagatttcactgccagccttcctgctgacgagtgccgttatgctgtttatgattttgagtatctgactgaagggaatgtccctaacagcagaatttttttcattgcgtggtccactgacacatcaagggtgaggagctagatgatttatgcaagctccaaagacagattcaagagggagctggatggaattcaagtagagttgcaagcaactgatcctactgagatgggtcttgatgtgttcaaaagccgtgccgactaaaatgattatataaaatactaagctttctggtgggagcagcacccctgaagccttatt

SEQ ID NO: 273731 - DNA, 308 bp, Glycine max
ggagcgaagagtgaagagaatggctcccaaggggttaacctttctggctgtgttaatatgcgtttcagcactgtcactgagtccttctgttgctggggaagggcaaaataatggccttgttatgaacttgtacagggaatcatgccctcacgctgaagacatcatcacagaacaagtcgagcttctctacaagcgccacaagaacactgcattctgctggctcaggaacatctttcatgactgagctgttcagagttgtgatgcttcactgatgctggactccacatgaaggagcttgtctgagaagg

SEQ ID NO: 273732 - DNA, 396 bp, Glycine max
ggttgcaacagagagacagaaaaaggactcacaatcacgaaggagaagaaacccaataagtgattctcatttttatggctcttgccctgaagtcaagttgcttcttgcaattgaagaaacctgaggctggtttcaatgattgtttttcatctaagaaagctataatctgcgtgaaacgacacactcccgtggctgctatcaggaccatggaagcagtgggactctctgcaacattcaccaggttgaaaaaagaaggaaaagtagctttcatcccgtatgtcactgctggtgatcctgacctttcaaccacagcagaagcactgaaagtgcttgattcatgtgggtctgacataattgagctaggtgttccatactctgatcctttagcagatggtc

SEQ ID NO: 273733 - DNA, 414 bp, Glycine max
ggttgcagggtggtggatggtgtaataatattagaacatgtgtttatcgcaagaaaacccggcgtggatcatcagatttcatggaaaaggagataccttttactggaatattaagtaataaggctgaagaaaatccagattttttcaattggaatagagtaaagcttcgttattgtgatggcgcctcatttactggggatagtgaagatgagactgcagaactgcaattcagaggacagcgtatttgggcagctgcaatggaagatttgatgtcaaaaggaatgcgttttgccaatcaggttatagacatatataatgctatttcagtaatctttcatctcatgctatgtacatctcattttgcttcaggctcttttttcgggatgctctgcgggtggcctggctactattatt

SEQ ID NO: 273734 - DNA, 347 bp, Glycine max
  unsure (1)..(347): unsure at all n locations
gaagattcagagggaagaactgctttgcattttgcctgtggatatggtgaggtgaaatgtgctcaagttctccttgaggctggagcaaaagtggatgctttggataagaataagaacactgctctccattatgcagctggttatggcagaaaggaatgtgtggcccttctccttgaaaatggtgctgcagttactctccagaatatggatggtaaaactccaatagatgttgcgaagctaaacaatcaaaatgaagtcctgaagctacttgagaaagatgcttttctgtaattgcaatgcatgatgccatgctgtcaccaacaagcaaaggggaaactgangggaag

SEQ ID NO: 273735 - DNA, 398 bp, Glycine max
ggagaacaaaacaagtgtttcgaatagattatcctaagtctttgggaatagtgctgcaatggcttcaagtcaggaggaggtgacccttttgggagctactggaagcccatttgtgtgcagggttcatattgccctcaagttgaagggagttcaatacaaatatgtcgaagaaaatttgaggaacaagagtgaactgcttctcaaatccaacccagttcacaagaaggttccagtgtttattcacaatgagaagcccatagcagagtctcttgtgattgttgaatacattgatgagacatggaagaacaaccccatcttgccttctgatccttaccaaagagccttggctcgttctggtccaaaatcattgatgataagggttttggtgctgcatggaa

SEQ ID NO: 273736 - DNA, 356 bp, Glycine max
gatagtcagcaattctgaattgtcaaattgacccgctaccttttcccgtgtacgaacgaatccaatccaccaaatcggcggcgacgcctccgctctgtctcgaaaccacagatctgcggcggaaccgccgtctccgactatctccgattgatcttccggtaaagtggaccggagatgccggttgccgcttccgccatttacttcctcaacctccgcggcgacgttctcatcaaccgcctctatcgcgacgatgtcgggggaaatatggtggatgcttttaggacgcatattatgcaaacgaagggagctggtacttgcccagtgaggcagattggtggatgctctttcttttacat

SEQ ID NO: 273737 - DNA, 436 bp, Glycine max
cccacgcgtccggacgacagaagggggcaatcagcttccaaaatgactcaagcccagattcaaccagttaaacttggaacccaaggctttgaggtactattaactacattacttgctcttattttgataattgatacaattaatctcattctaggtttcaaaattgggattcggatgtatgggccttactggagcgtacaatgaccctctccaagaacaggatggcatatctgttatcaagtatgcgttcagtaagggaatcacattttttgatactgcggatgtttatggagccaatgctaatgaacttttggttggaaaggctttgaagcagctgcccagagaaaagattcagatagccacaaaatttggtattgcttcacgaggttttcctgatatgaagatcaagggttcgcctgaatatgtgcgatcatgc

SEQ ID NO: 273738 - DNA, 340 bp, Glycine max
gcagaagaaatagcagcattggacaccattgatgggggaaagcttttcagttggtgtaaggctgtggatgttcctgaagcatccaacatcctacgttactatgccggtgctgctgataaaattcatggagatgtgttcaaaacatctcgcaacctccacttgtattctctgatggaacctgttggtgttgttggacacattatcccttggaatttccctaccgtcatgtttttcgccaaagttgccccggccttggctgctggctgcaccgtggtcatcaagccttctgagcaaacacctctgtcatcactcttttatgctcatctttctaagttggctg

SEQ ID NO: 273739 - DNA, 380 bp, Glycine max
  unsure (1)..(380): unsure at all n locations
ggtgggcgaggtagccagagagtgatacaatacagagtgcgttgttgctccttcgccacaactccctgccaacatgggtatctccagagattctatgcacaagaggcgtgccactggtggcaagaagaaggcatggaggaagaagagaaagtatgagcttggtcgccagcctgctaacactaagctgtcaagcaacaagacagtcaggaggatccgggttagaggtggaaatgtgaagtggagggcactgagattggatactggaaattactcctggggaagtgaagctgtaactcgcaagactcgtatactagatgtggtttacaatgcctcanacaacgagcttgtgcgtactcagactcttgtaaaaagtgctattg

SEQ ID NO: 273740 - DNA, 360 bp, Glycine max
ggagaaaaacgagccaattcatcattttctctcttctctgcttcttcttgttcaaatcttaggagctgaggagaatcaatcgagagaaatatgtctggtatcgctcgtggacgccttgctgaggaacgaaagtcatggcgcaaaaaccatccacacggtttcgttgccaagcccgagactctacctgatggcaccgtaaatttgatggtctggcattgcactattcctggcaagaccgggactgattgggagggtggatatttcccactgacaatgcacttcagtgaagattaccctagcaaggcctccaagtgcaaattccctcaaggtttctttcaccctaatgtgtatccatctgga

SEQ ID NO: 273741 - DNA, 389 bp, Glycine max
gaaagaagttcaggataaaagtagtgtagaatatcaaaggttaacgtgggatgctttgagaaagagcattaatgggcttgtaaataaggttaatgctactaatataaaaaatataattccagaattgtttgcggaaaacctgattaggggaaggggactcttttgtcgttcatgtatgaagtcacagatggcatctccaggatttacagatgtttttgctgctttggttgctgtcgttaatactaagtttcctgaagtgggggatcttttgctaagaaggattgttttgcagcttaagagagcttataagcggaatgacaagcctcaattactagcagctgttaaatttatagcgcatctggtgaatcagcaagtggctcatgagatca

SEQ ID NO: 273742 - DNA, 394 bp, Glycine max
ggggaggaaggacgcactttgtgcttgccattgttaggaaacttgatgagcttcaggaattaccttcagtttttatcacttttcttgcatggagcatgggggaggtcattagatattcacattatgctttcggttgtttgggaaattgtccttcttggatgacctatctcaggtacactgcgtttattgtgctgtatcctttgggagtgggtcctggtgaaatatgggctatgtaccaggctcttccagttataaaggagaagaatctctatgcagattccttttcaagcctcccatttagttattatgatttccttaaggtggtacttatagattatccatttctctggttcaaactttacctgcatatgttcaagcaacgacgtacaaaact

SEQ ID NO: 273743 - DNA, 288 bp, Glycine max
ggatgtggagggtggcaaagaccctcttagtaacggtttatcatctgtgattcctgggtggttctctgaaattagttcaatgtggcctggataggctcactccttgaaggtggaaaagattttgtttcaaggaaagtctgaataccagaatgtcatggtcttccagtcatcaacatatggcaaggttcttggtttagatggagtaattcagctaacagaaagggatgaatgtgcctaccaagaaatgatcactcatcttgctctttgctctattccaaaccccaaaaa

SEQ ID NO: 273744 - DNA, 390 bp, Glycine max
gaagtacaagcagagagttacaacacatatttctgtttcttttccctttttcctaggcacagcacacgccctctcaaatagaaactgagagatgaattctgatcagtttcagaagaacagcatgttcgtagaaacccctgaagatggtggcaaaaacttcgacgatgatggacgagtcagaagaacgggtacatggataactgcgagtgcccatatcataacggcagtgatagggtcaggagtgttgtcacttgcatgggcaattgcacaaatgggttgggtggctggccctgccgatctctatggcttctctttcatcacttacttcacttccactcttcttgccgactggtatcggtcacctgatcctggtcatggcaagcgaaactt

SEQ ID NO: 273745 - DNA, 400 bp, Glycine max
ggagcaagagtgaagagcgaagagaatggctcccaagggtttaatctttttggctgtgttatgcttctcagcactgtcactgagtcgttgtcttgcggaggataatggacttgctatgaacttctacaaggaatcatgccctcaggctgaagacatcatcaaagaacaagtcaagcttctctacaagcgccacaagaacactgctttctcctggctcagaaacatcttccatgactgtgctgttcagagttgtgatgcttcactgttgctggactccacaagaaggagcttgtctgagaaggaaacagatagaagctttgggttgagaaatttcaagtacattgagaccatcaaagaagctttggaaagggaatgcccaggaagttgttcctgtgctgat

SEQ ID NO: 273746 - DNA, 369 bp, Glycine max
gatcccaagttcaatattgtctctcctggagctgatatgtcaatatatttcccctactctgaaaagcagaacaggcttacagccctgcatggttcaattgaaaagctgttatttgatcctgagcagactgatgaatacattggttcattgaaagacaagtcaaagcccataattttctccatggcaaggctagacagagtgaaaaacataactggattggtagaatgctttggtaagaacagcaaattgagggaactggtcaaccttgttgtagtagctggttatattgatgtaaagaagtcgagtgacagagaagaaattgcagaaattgagaagatgcacgagctcatgaaaaagtataatttaaat

SEQ ID NO: 273747 - DNA, 394 bp, Glycine max
  unsure (1)..(394): unsure at all n locations
gagagaagagctgcggaagagtggtctcctgctccgacatcactgccctcactgcacgagatgctgttttccttaatttgataaaaacagtcaggaggaccagactatgagattcctttgggaaggagagacgggctaacctttgccacaagacaagtgacattggacaacctttcaccaccttcaagcaacgcctcaaccatcctaagctccctcgtcaccaaaaacctcgacccaaccgatgtcgtagccctctcaggtggccacaccatatgcatcagccactgcggttccttcaccaacaggctctaccccacccaagaccccgtcatggacaagaccttcggcaacaacctcagacgcacgtgccccgncgncaacaccgacaacacca

SEQ ID NO: 273748 - DNA, 406 bp, Glycine max
ggcacaagtgagtttgttgatcgagataactagaaacagtgtgatgaaaatgaaggtccttgttttcttcgttgctacaattttggtagcatggcaatgccatgcgtacgatatgttccctctccgaatgaacactggctatggtgcccgtactccggaggtgaaatgcgcaagttggaggcttgctgtggaagcacacaacatctttggctttgagaccattcctgaagagtgcgttgaagcaacaaaggaatacattcatggcgaacaatatagatcagactccaaaacagttaaccaacaagcttacttttatgccagagacctcgaagtccattccaaggacacatttgtgttcagtatagatggcaccgtactctctaatattccatactacaaaaaacat

SEQ ID NO: 273749 - DNA, 397 bp, Glycine max
gaagaaggcacagttacaaactatactttccacaaatacaagtctggctacattcatcactgtcttattgaaggccttgagtatgagactaaatactactatagaattggaaggggtgattcttctcgagaattttggttcaaaacaccttccaaagttgatccagattctccctacaaatttgggatcattggtgatttggggcaaacgtttaattctctttccacccttgagcattatatacaaagtggagcgcagactgtcttatttggtggagatctttcttatgctgataggtaccagtacaatgatgctcgtttacggtgggatacatggggacgatttgttgaaaagagtacagcatattatgcatgggtatggtctgctggaaatcacg

SEQ ID NO: 273750 - DNA, 383 bp, Glycine max
cgtcggctggcagagacacagagggggagtagtgagaagagtgttatattgggtggcgaagaagaaaaggagcagcggtccatacaattcaggagcagctataagaatccttcaacacaagagcatcgcctacaacaatggcagataattcaactgctcaggaagcaacaccctatttctccttacaagatgcctaaattcaacctctctcatagggtggttttggctccgatgacaagatgcagagcgttgaactggattccccaggaagcacttgctgaatactacgctcaaagatcaacaccaagaggatttctcatcagcgaaagcaccttgatctctctcactgctactgggttttcacatgtgcctgggatatattc

SEQ ID NO: 273751 - DNA, 359 bp, Glycine max
gggatatagatagtgtatgtgctgatatctatgagtggcaaccaaatcttgtaagttatgacatgcaagcttctggcaaagtcagaagtcctgtgagaccaaaagcacatttgtcatgtggccctggacaaaaaatctcatcaatcaagtttactagctttggcactccagtagggtcttgtggaaactaccgcgaaggaagttgtcatgctcacaagtcatatgatgctttccaaaagaattgtgttggccagagctggtgcgcagtgacagtgtctcctgaaatttttggaggagatccttgtccaagtgtcatgaagatactctcagtggaagccatttgcacctgatcatttcaa

SEQ ID NO: 273752 - DNA, 411 bp, Glycine max
gagcaagagtgaagagcgaagagaatggctcccaagggtttaatctttttggctgtgttatgcttctcagcactgtcactgagtcgttgtcttgcggaggataatggacttgttatgaacttctacaaggaatcatgccctcaggctgaagacatcatcaaagaacaagtcaagcttctctacaagcgccacaagaacactgctttctcctggctcagaaacatcttccatgactgtgctgttcagagttgtgatgcttcactgttgctggactccacaagaaggagcttgtctgagaaggaaacagatagaagctttgggttgagaaatttcaggtacattgagaccatcaaagaagctttggaaagggaatgcccaggagttgtttcctgtgctgatatcctccgtctc

SEQ ID NO: 273753 - DNA, 413 bp, Glycine max
ggagcaagagtgaagagcgaagagaatggctcccaagggtttaatctttttggctgtgttatgcttctcagcactgtcactgagtcgttgtcttgcggaggataatggacttgttatgaacttctacaaggaatcatgccctcaggctgaagacatcatcaaagaacaagtcaagcttctctacaagcgccacaagaacactgctttctcctggctcagaaacatcttccatgactgtgctgttcagagttgtgatgcttcactgttgctggactccacaagaaggagcttgtctgagaaggaaacagatagaagctttgggttgagaaatttcaggtacattgagaccatcaaagaagctttggaaagggaatgcccaggagttgtttcctgtgctgatatcctcgttctct

SEQ ID NO: 273754 - DNA, 321 bp, Glycine max
gtctcaaaaggctgttactgctgccacaaattataataatagggttgttgaatgccatttggcttctattgtgctcgctataaagctagggatggatccaaaagaggcaatatcaaaagtgagcacactgtctgatgttgaagggttatgcgtatcatttgctggtatttataactcatctgatcctgtacttgctgtaaaggtaattgtacctcgtatgatgtcatccttagaattagccttgtgtgacactatctttctatttgcattgagaacatttcatttcaattgatatggatttctttgaactttaatattctc

SEQ ID NO: 273755 - DNA, 296 bp, Glycine max
ggcatcaaaccagactaaactccgacgatgcctcccgtcgctcctcgatccggtgatgccatattcgccaacgtcgaacgcgtcaatgcggagctgtttactttgacgtatggcgcaattgtgcgtcaattgctcacggatctggaagaggctgaggaggttaacaagcagcttgatcaaatgggttacaatattggaatccgtttgattgatgagtctttagccaagtctaatgtcttcagatgcaacgatttcagagagacgactgatgttattgcaaaagttggttttaaaat

SEQ ID NO: 273756 - DNA, 400 bp, Glycine max
gttgcttgagttggaataaatgtgctaagaatcaaatagctagtagtgattatgaaggaattgtgactgtttgggatgtaaccactcggaaggtaaatgttgaattcaaatggtcagtttgttcttgtatcagatctttgggtatcttcattcattaatattgttttgattgtcatgtgcttgcttaagttttctacagattatttacgcatggctatcattttaactttggcagagtttaatggaatatgaagagcatgaaaagcgtgcatggagtgtagacttttcaagaacagatccctctatgcttgtatctggtagcgatgactgtaaggtcaaaatttggtgcactaatcaagaagctagtgttctaaatatagacatgaaagcaaacatatgt

SEQ ID NO: 273757 - DNA, 413 bp, Glycine max
gggatttccaaagtttttaatagagggtaagtctcaaaaaatcgaggaattacagacgaatatgcaaaaaaaactgaattgtgtgaatcgaaaactaaacattgctattgtaaaagttgcaaatgcttataaacaccctaatattattgcagaatttatagctggacaattaaagaatagagtttcgtttcgtaaagcaatgaaaaaagctattgaattaactgaacaggcggtacaaaaggagttcaagtacaaattgcaggacgtatcgacggaaaagaaattgcacgtgttgaatggatcagagaaggtagagttcctctacaaaccattcgagcgaaaatcgattattggtgctatacagttcgaactatttatggggttttaaggatcaaaagttggatattttctaa

SEQ ID NO: 273758 - DNA, 344 bp, Glycine max
gacttcaaagtggagaaaaacacacacggttggttcattctctctcttttctttttcctcaaaaagttgaaaaagaataaagggggaacaatcgagtgaagttgttgctcttcaatagtaaacttacctatggaagagggaagggttgtgagtgagtacacaaaagatggaactgtggatcttaaagggaaacccattctcaaatccaaaagtggtggttggaaagcatgctcctttgttgttgtgtacgagatatttgaaagaatggcttattatggaatatcatcaaatttgatactgtatctgactaggaagctttaccaaagcactgtgaccttttcaac

SEQ ID NO: 273759 - DNA, 397 bp, Glycine max; identical to SEQ ID NO: 234774

SEQ ID NO: 273760 - DNA, 303 bp, Glycine max
gcgcgagttggtgtctagatctacatatctagaagcagtgtcaggaaactgaaagtactggctctgtctgttgctcaatgctgtagcatggcaatgccatgcgttactatatatgcgctctccattgaacactgctatactgccagataggccttgaaatgctcaagttgtgcgcttgatgcgtacgaacacaatatcttggggtacgataccatagctgaataatgcattgaagcaactccggagtacattgatgccgaacaatgtctatcagactacggaacacctaagcaacacgcttac

SEQ ID NO: 273761 - DNA, 380 bp, Glycine max
ggaactatatgaagactctccaggcagttcggaatacagtacaggatcaactctcctgcctcattcagctggtgaggatttggaacactcactgcatcaggatattggaaccgaactgaatatacaaattgaagattcagaaggagttaggggatgtgaccaaggggttctttctagtgcaactctggatcaagatttattcccatcttgtgaggaacagataaacaatgatgcaattgtttctgccttatcaagttcagcggagttcagttcacctcttcaagttacccctctgtttagatccttagctgctggaattcctagcccacaattttcagaaagtgaaaggagcttccttatgaaaacactcggaatggagt

SEQ ID NO: 273762 - DNA, 339 bp, Glycine max
tcagcaaagaggtgacaaagcatgaggatgcagcagagagtgaatggaaggggtggaattggaggtcagaaggggacttgttagtaaacggtgcgtttttcacggcatcgggggctggagcctcctctagttatgcaagagcttctagcttgagtgcaaggccatcttcactggtggggtccataaccactggtgcgggtgcactcacctgtaggaagggttcccgctgctgattatgacccctccagcaagcaactgtatctgcaggccgctccattaattccaaaaaaatggaatggaatcaaaaaatcaagggggaggggaaggggaaagagaatg

SEQ ID NO: 273763 - DNA, 409 bp, Glycine max
ggtgctacaagagtttcaagcattagttatgaggaagaaatttatggaatctgtcagtggagggaattccgagttgcagtatggactaagctttcgagatatgagcattgaagatctttgtcttgattttactcttcctgggtttcctgatattgttcttgcttcagggaccgatcataccatggtaaatatgagaaacttggaggattatgtttctcttattgtcgatgcaactgtgaggtctggagtttcaagacaagtggaagcttttaaatctggctttaaccaggttttctccattgatcatcttcggattttcaatgaagaagaacttgagcgaatgctttgtggagagtatgactcttgggctgtcaacgagtttgggagatcacattaaagttgatcatgg

SEQ ID NO: 273764 - DNA, 405 bp, Glycine max; identical to SEQ ID NO: 234594

SEQ ID NO: 273765 - DNA, 419 bp, Glycine max
taccaaaagaggcacaaggaaaagttgcaaaatttgatttccatgggcagccagcagagctcaagcatggcagtgttgtgattgctgcaatcacaagctgtacaaatacatcaaacccaagtgtaatgcttggtgctggtcttgttgcaaaaaaggctcatgagcttggtttgaaggtcaagccttgggttaaaacaagtcttgctccaggctctggagttgttacaaaatatctactccagagtggactgcaaaaatatctaaatgaacaaggttttcatattgttggatttggctgtactacatgtattggcaattcaggagagctggatgagtccgttgcttctgccatctcagaaaatgacgttgtagcagctgctgtgttgtctgggaaccgtaaatttgagggtcgagtacat

SEQ ID NO: 273766 - DNA, 289 bp, Glycine max
  unsure (1)..(289): unsure at all n locations
ggaagtgaagtgggaaagagacaggaccgaaaatggttgcgactttgagtcttccgatcatagacctctcttctccccatcgtctttccacagccaattccattcgtcaggcatgcgtggaatatggtttcttttaccttgtgaaccatggggtggacaccgattttgtgagcaaagtcttcgaccaaagttgcaagttcttctcgcttccggtccaacgcaaaatggacctggcccgcaaggaatatagaggctacacntctctctatgctgagacacctgatcctac

SEQ ID NO: 273767 - DNA, 422 bp, Glycine max
  unsure (1)..(422): unsure at all n locations
gagggcgcaatagaaaatacaagccgtagaagagggctcgctctttcgtgtttttgttcgcgaaggaaactctatccttagctatcgcgatggatcggtaccagaaggtggagaagccaagagctgaaactccaatcgatgaaaacgagatccggattactagtcagggaaggacgcgcaactacattacttatgccatgagcttgcttcaagagaaaggttctaatgaaattgttttcaaagcaatggggagagctatcaacaaaaccgtgacaattgtggagttgatcaagaggagaatngtgggcctncaccagaatacagcaattggatccactgatatcactgatccctgggagcccctagaggaaagcctccttcctttggagacgacaaggcacgtgtcaatgataacaataacc

SEQ ID NO: 273768 - DNA, 358 bp, Glycine max
gatcgaacgagaaaaattgaatttaattaatgcaatttatacgactttggaacaattagaaaattacaaaaacgaagccattcattttgaacaacaaagagtgattaatcaagtccgacaacgggttttacaacaagccttacagggagctctaggaactctaaagagttgcttgaacaacgagttacatttacgtactgtcagtgctaatattggcatgtttgggacgatgaaagaaaaaataactgattagtctttctattataaaaatagagtatatggcattatttttttcttctaaaaaataaaattaagaaattttcatggtaaccattcgtgcagatgaaattagtaaaat

SEQ ID NO: 273769 - DNA, 246 bp, Glycine max
gatagcgaaacagagagtggtttcagtgagtgatcggtgttcacttgatccttcataagtcgtcatcatcatcatcatcatcaccgttgattgaagaagatgccgatcagaaacatcgccatcggaaggcctgaagaggctactcaccccgacacgttgaaagcggggttggctgagttcatcttcaccttgatcttcgggttcgccggttcacgtttcggcatcgcctacaacaagctcaccgac

SEQ ID NO: 273770 - DNA, 218 bp, Glycine max
ggatgaagagttgatgaaattttttggagaatatggtaccattactagggctggaataatgaaggacccagaccgtaaatcaaggggttttggctttgtcaattttgaaaacccagatgatgctgccaaagctgttgaaggacttaatgggaagaaagttgatgataaggagtggtatgttggaaaagcccagataaaatctgagcgtgaacaagaac

SEQ ID NO: 273771 - DNA, 369 bp, Glycine max
ggaagagtgaagagaatggctcccaagggtttaacctttctggctgtgttaatatgcgtttcaacactgtcactgagtccttctgttgcgggggaagggcaaaataatggccttgttatgaacttctacaaggaatcatgccctcaagcttgagacatcatcacagaacaagtcaagcttctctacaagcgccacaagaacactgctttctcctggctcaggaacatcttccatgactgtgctgttcagagttgtgatgcttcactgttgctggactccacaagaaggagcttgtctgagaaggaaacagatagaagcttgggttgagaaatttaggtacattgagaccatcaaagaagctttggaaag

SEQ ID NO: 273772 - DNA, 360 bp, Glycine max
  unsure (1)..(360): unsure at all n locations
gagagtggtggggtgtgcagaagagcgtcgcagttgtaaccctaatcagaagaagcgcagcttcaagcgagtgacagccaccagccatgggtcgtatgcacagccgcggtaagggtatatcctcttctgctttgccctacaaaaggacacctnctagctggctcaagatctcttcgcaagatgtcgaagaaaatatctgcaagtttgcgaagaaaggtttgaccccgtctcagattggtgtcattctcagagattctcacggtattgctcaggtcaatagcgtcactggcagcaaaatccttcgcatcctcaaagctcacggacttgcgcctgaaatccagaggatctgtaccatttgat

SEQ ID NO: 273773 - DNA, 385 bp, Glycine max
ggaaaaagggtttttataatttttcaagatattaaacatttcaagcagttggaagacattcgagaactaactaagcagcttggttctggcagcaaagtcatcattacagctcaagataagcatttgcttgatagatatgggattggatttgaaagtatatgtgaaataaaagggtttagtgattcagaagctgatcgattgcttgaattcaaagttcttaattctgcaactgttagtcctaagtatgtgaacattctaaaccgaatcaagtcttatgcccttggtcatccatggactttggaagtaatgtgttccaacttgagtggaaaatcaatagaagaatgtgaatctgcattactcaagtatgaatctataacagatagag

SEQ ID NO: 273774 - DNA, 367 bp, Glycine max
gggagctgagctgagaaaacccccaaccccaacctcaaccttaacctctcctcactttcttttcaaccagaactatgattaagctttttaaagtaaaggaaaaacagagagaactggcagaaaatgcgagtggcggaccacccgttaagaagcaaagtgccggcgagttgcgtcttcacaaagatataagcgagctgaatctaccaaaatcatgtaccatgcaattccccaatggcaaagatgacctgatgaactttgaagtttcaattcgacctgatgatggatattacttaggtggcacatttttggtgtcctttcaagtgtcgtccatctatccacatgaagcaccaaaggttaaatgcacgac

SEQ ID NO: 273775 - DNA, 334 bp, Glycine max
agggattggtaatactgatgctggctttgtgctgggaactgggaaacttctgcttaaggtgcccccaactttgagatttgtaatggatggagaaatgcctgattatttgctttctaaggatttgattctgcaaattattggtgaaataactgtggctggtgcaacatataaatcgatggagtttgtcggtacaactgttgaaagtttaactatggaagaacggatgacattgtgcaacatggttgttgaagctggtggaaagaatggtgttgttcctgctgacagcactacatttaaatatcttgagggcctgacatctctgccatatgaacct

SEQ ID NO: 273776 - DNA, 405 bp, Glycine max
ggagtaactaagatggcgcaagtgaggaacaagcaagtgcttctaaaggactatgttaccggttttcccaaagaatccgacatgaatattgtcgaaagtaccataacattgaagcttccacaaggttccaatgatgtcttgctcaaaaatttgtacttgtcttgtgatccgtatatgaggaatctcatgaacaagcccgaaggccctcccaatagtcgtgcttacactcctggctctccattaataggatatggtgtgtctaaagtcctggaatctgggcacccagattataaagaaggtgatttagtgtggggctttaccaaatgggaagagtatagcttgttaccctcagctcaaatactcttcaaaattgagcacactgatgttccacttacctactacact

SEQ ID NO: 273777 - DNA, 422 bp, Glycine max
cacactcaaaaccctaatagcaataatgctattgatcaaggccaagatctcaattgggcttttccatcctccaccccagatttcagaaaaatctctgaattggtccaacaaaacaacaacaacaacaatagtagcaacaacagcatgtcagcttcagcttcttcttcttcaaccacaactacaacttccacttctcacctttctgcattggagcttcttactgggatcacttcaagttccagtgctggtttgacttctttcatgcctgtgccggttccatctgatccaaattctatctacacatgtgggtttcctctgcaagatttcaagccaaccttgaatttctctttggatgggatcggaaacgggtacacaagccttcagaatgttcaaagtgggaggctcttgtttccatctgatga

SEQ ID NO: 273778 - DNA, 340 bp, Glycine max
  unsure (1)..(340): unsure at all n locations
gttccaacatattcctcaccaaagacaacaacattcggcttggtgactttggtcttgcaaagcgacttaatgcagaagaccttgcttcctcggttgttggaaccccaaattacatgtgtcctgagctcctcgctgatataccttatgggtataaatctgatatgtggtctcttggttgctgcatgtttgagattgctgcacatcaaccagcttttcgtgctccagacatggctggacttatcaataaaataaacagatcctgcatttctncactgccaattgtttattcttccacactgaaacaacttatcaagagcatgcttaggaaaaacccagaaca

SEQ ID NO: 273779 - DNA, 388 bp, Glycine max
ggatgaggaaacattggtagaagaaattggagagagagagagagagagagggttggattggttttcttcttcctcttcctaaagagaatctaatctcaatcctcattacacacatatctacagatttcttcattcctctctcaatcttttctggtttcttttcccctctttgacatcctcgttttcgccgaaacaaaaacaactaagattttgttttttgttgtatttttcttcctgttgttatttgactcggttgtctgaatcagttgttgcagcagggtcgggagccacagctatgcagagccaagttgtgtgcaatggttgtaggagccttctgctttacccaagaggagcaaccaatgtctgttgtgcattgtgcaacacaatt

SEQ ID NO: 273780 - DNA, 380 bp, Glycine max
ggagtgagcaagagtgaagagcgaagagaatggctcccaagggtttaatctttttggctgtgttatgcttctcagcactgtcactgagtcgttgtcttgcggaggataatggacttgttatgaacttctacaaggaatcatgccctcaggctgaagacatcatcaaagaacaagtcaagcttctctacaagcgccacaagaacactgctttctcctggctcagaaacatcttccatgactgtgctgttcagagttgtgatgcttcactgttgctggactccacaagaaggagcttgtctgagaaggaaacagatagaagctttgggttgagaaatttcaggtacattgagaccatcaaagaagctttggaaagggaatgc

SEQ ID NO: 273781 - DNA, 392 bp, Glycine max
  unsure (1)..(392): unsure at all n locations
ggaaactaacaacaacaataaaagaccatgtcggtgaaggagtgcgagcaccacaaggggaagaagaggaagatcttccggcaagtgttctggtgcttagtggtgttccttttcatcgtgctggtcacaattcttttgatatgggcaatccttagacccaccaaacccaccttcacgctccaagacgtcaccgtctacgccttcaacgccaccgtggcgaacttcctcacttcgaattttcaggtcacgctcatctcgcgtaacccgaacgaccgcatcggtgtttactatgatcgcctcgaaaccttcgtgacctaccggagccagcaggtcacgtaccgaaccgncatcccttcgacatatcaaggccataaagagatcaatgtttggtc

SEQ ID NO: 273782 - DNA, 400 bp, Glycine max
tggaaactaacaacaacaataaaagaccatgggggtgaaggagtgcgagcaccacaaggggaagaagaggaagatcttccggcaagtgttctggtgcttagtggtgttccttttcatcgtgctggtcacaattcttttgatatgggcaatccttagacccaccaaacccaccttcacgctccaagacgtcaccgtctacgccttcaacgccaccgtggcgaacttcctcacttcgaattttcaggtcacgctcatctcgcgtaacccgaacgaccgcatcggtgtttactatgatcgcctcgaaaccttcgtgacctaccggagccagcaggtcacgtaccgaaccgccatccctccgacatatcaaggccataaagagatcaatgcttggtctacgttt

SEQ ID NO: 273783 - DNA, 392 bp, Glycine max
gaagacaagagataaataataactagttgtagctgctggggagagtggaacataataaacatgacaatgaagctgcttttggtagccgttgttgaagttgcatgcttagtttctgggatcttgtcctttggatctgagacactctctgagctttctttcttagaaaacgatgtcgtctcaacagcaagaccttcctcttcatttcaacctcttatggtcgacctcactctcattcaaggagctgattctaaaggagctgtctgtttggatggaacggtgcctggataccatttggatcgtggatttggatctggtgcagatagttggctaattcatttggagggaggaagatggtgtaataccatcagaaactgtgtctatagaaaaaatac

SEQ ID NO: 273784 - DNA, 347 bp, Glycine max
  unsure (1)..(347): unsure at all n locations
ggtgttggagaatgaaaactgaaacagagccaaatgaaaccgagtcagattggagcgagttgactcgcgagtgcctcatcaacatcctctctcgactcagcgtcgaggatcgatggcgcggcaccatgctcgtttgcaagtcatggttcagcgtcttcaaggaaccctctcttcacttcgtcttcaacctcgaccctcaattcgactcgcccaccgaatcaactcgctggtggacccncgagttcgaggccaagatcgataacatgcttcgatctgtcgtcgaatgggcccaatcctctctacccatatacgcattcgcccactgtctgatcgttctctcgccctcg

SEQ ID NO: 273785 - DNA, 316 bp, Glycine max
ggacggagcagaggacaagatgggtagtgtgagttatagcaatctgaagaacgccatgatagcattcttggtccctctaccctccatcctattctacctctcattccaatcgggcattagtactccttcttcttggtcttctctgtggacatggtgctatcaccaccctctgctattggccaatgtccctttcttcttcaatgtgaatttcctcttctggctcatcggcctaatccaatccagccactggatgattgacccgcattggacagtgatacctgtgatgcttgttcattactattcaactcaccctttg

SEQ ID NO: 273786 - DNA, 400 bp, Glycine max
  unsure (1)..(400): unsure at all n locations
ggaagaaaaaaggaagggtaagtaaattgggaatggtggtggtagtgccaggtgtctgtctgaggagaaaatagaataaaaagctatgaaattttggcacaaggtctgattgtagaattgaagaagatgactggggggggtatcactatgcaatcgacgccgggaagctcaggatacttggatttgtatccagagcggaagatgtcctttttcaaaaatccttacattctcggactggctgctgtcgccggcatcggtggtctcctcttcggctacgacactggtgtgatatcaggggctctnttatacattaaggatgattttgaggaggttagaaacagcaatcttctccaggaaacaatagtcagcatggctattgccggngcaatcgtgggagcag

SEQ ID NO: 273787 - DNA, 411 bp, Glycine max
gggagggagagaggatgaacccacagcactgaaagtaacgttagaaacgagaaagtttgcattattcacaatttcgaaaactcactcagagtggagaagggagtcccacacatcctagcattaacaagaagaagaaaaaaaaatcaacgctttgggtttttctcttggctgcaacttttggtctctccgcagaatctcgttccaattggagttcatcctctaaaggggaaggtggtgtttggaatctgggaaaatgggtttgttttctgggatttttatgggggtgttgttcggcatcgcattgatggctggatgggcgcgcatgatgaagtaccgaagtgccaaacgaattgcaaaagcagctgacattaaactccttggatcccttaatagagatgatttgaagaaaat

SEQ ID NO: 273788 - DNA, 415 bp, Glycine max
  unsure (1)..(415): unsure at all n locations
gaaggaagaaacagaaaaaacagtggctgcggaatctcttgttaaggagagagaggctaggcttaactttgagaggtcacagagtacactacaggaggatcttggacgagcacaacgagagctccaaagtgcaaatcagaagatattgtcactcaatgacatgtataagcggttacaggattacataacaagcttgcagcagtacaatgggaaactccattcagagctttctacagttgaaaatgaacttaagagtgtagagaaagagaaagctactgtagtggagacccttaccatgttaaagggtcagcttactttgtctatggcttctcaagaagaggccacanaacagaaggatgcattggctagtgaagttacatctctccgagtagagttgcaacaagtgagggatgat

SEQ ID NO: 273789 - DNA, 402 bp, Glycine max
  unsure (1)..(402): unsure at all n locations
ggacttttcaaagggaatggtactaattgtgctagaattgtccctaattctgctgtgaagttcttcagttatgagcaagcttctaaaggtatactgcatctgtataagcagcaaactggaaatgaggatgctcagctgactcctcttttacgccttggagctggagcttgtgctggaataattgctatgtctgcaacttatccaatggatatggttcgaggcaggattactgtgcagactgaggcatccccatatcagtacagaggaatgtttcatgctttgtctactgtgctcagggaagaaggtgctcgtgctttatataagggttggcttccttcagttattggagttattccttatgtaggtctcaactttgctgnctatgagtctctgaaagattat

SEQ ID NO: 273790 - DNA, 401 bp, Glycine max
gctctaaaccagtaagttatcttctagtatttttcaagtaacttaaggtttcaaacctaggaagttggaagtcatggcagcaacattgatggcagcaacaagttctggcactcttaaagcaactcctttcctaggccaaggcaagggtgccaatgccaatgctcttagggatgttgtttccatgggaactgggaagtacaccatgggcaatgatttgtggtatggaccagacagagtgaaatacttgggacccttttcagctcagaccccttcatacttgaaaggagaattcccaggggattatggatgggacactgctggcttatctgctgacccggaagcatttgccaagaacagggctcttgaggttatccatgggagatgggccatgcttggagcac

SEQ ID NO: 273791 - DNA, 415 bp, Glycine max
ggagaacaaaacaagtgtttcgaatagattatcctaagtctttgggaatagtgctgcaatggcttcaagtcaggaggaggtgacccttttgggagctactggaagcccatttgtgtgcagggttcatattgccctcaagttgaagggagttcaatacaaatatgtcgaagaaaatttgaggaacaagagtgaactgcttctcaaatccaacccagttcacaagaaggttccagtgtttattcacaatgagaagcccatagcagagtctcttgtgattgttgaatacattgatgagacatggaagaacaaccccatcttgccttctgatccttaccaaagagccttggctcgtttctggtccaaattcattgatgataaggtttttggtgctgcatggaaatcccgtttcacagct

SEQ ID NO: 273792 - DNA, 403 bp, Glycine max
gacggctaaaagctaaatatcatcaaagtactcaaattagcatggctgtcatggttgcattcttgaatttgatcatcatcttttcagtagtctctacaacagtaaaggatgccactgctagggacaaaactgttccagcagcaattctgcgaatgcacttccatgattgtttcgttcgggggtgtgatgcctctgtgctgctaaattcaaaaggaaacaacaaagcagaaaaagacgggccaccaaatgtttctttgcatgcattctatgtcattgatgcagcaaagaaagcactagaagcttcatgccctggtgtggtctcttgtgctgacatccttgctctggcagcaagggacgcagtttttctgtcaagaggacctacatgggatgttcctaaaggaag

SEQ ID NO: 273793 - DNA, 407 bp, Glycine max
  unsure (1)..(407): unsure at all n locations
ggtgtgagttcattaacatatacaaattctctgtgttgtgttgtgtacttgtgttaattgtgttgttgttgtaggaaatttaagtgaagagagaatgatgatgaagtctgctatgtgtgcattggtgcttgtggcactggttgtggttgaagtggggcccatggctgaggctgcggtgacttgcaacccaacacagttgactccttgtcttccggcaattaattcaggttctgcaccttcgagtgcttgttgccagaagctgaaggagcaaaagccatgcttctgtggctacctcaaaaaccctagcttgaagcagtatgttaactctcctaatgccaaanaaaccgttagttcttgtggtattgcctatccaacttgttaagcacctcttatatatatatataaaa

SEQ ID NO: 273794 - DNA, 233 bp, Glycine max
ggatcatgattggtgtgcagcagtgagaaaactgttgaacctactgcttgatggaactgtaaatacaggagatcatccttccttgtatctcgcgctttcagagatgggtctccttcacaaagctgtaaggagaaacagcaagcagttagtggagtgtcttttgagatatgttcctgagaatatttctgataaactaagacctgaagacaaggcactggttgatggcgagaatc

SEQ ID NO: 273795 - DNA, 371 bp, Glycine max
ggatgaccagcaagacatcacgagaggaaagggtatggttgattccctcttccaagctccacaggagactggaactcactatgcagtcatgagctcttttgagtaccttagcactggacttaaacagtataacttggataacaacatggacggtttttacattgctcctgcttttatggacaagcttgttgttcacatcaccaagaacttcatgaccctgcctaacatcaaggttcctctcattcttggtatttggggaggcaaaggtcaaggaaaatccttccaatgcgagctcgtctttgccaagatgggaatcaaccccatcatgatgagtgctggagagttggaaagtggaaatgcaggagagccag

SEQ ID NO: 273796 - DNA, 440 bp, Glycine max
ggagaaagcaatgggcattgatagtgaatgcgtggtatctcacaaggcctatgcgagggtgggattgcttgggaacccgagcgatgtctactacggcaaaacgatagcgttaagcgtcgccaacttcttcgccaccgtcacgctgcgtccctccgaccagttaatcctccaaccacaccccctccacgatctccttcatttctcatcgctccctcaattggtcaacaggttgagctcccaaggttactatggaggcgtgcgattgcttatggctatttgcaatgtcttctacgcgtattgcagagagaacgccatcgatcttggcgacgacaatttcactctctgctacgacaccaatatccctcgccaggctggtctttcgggttctagcgggatcgtgtgtgctgcgttgaactgattgttggatttctacaacgtca

SEQ ID NO: 273797 - DNA, 342 bp, Glycine max
gcgtgcacgcatacgaccacacgtgcgctatgagaatactacagactgtgaaatgaatgtgtcggaccccctacaaaaccctagcacacttttatcgcttaatgactactacagacgatgtaagcaactgcattcgcaatgggaattgatgtgaaagcctgatgtgagtccaataagaccatgctatccgaacacatatccgatgatatctaccttaagcttctcgacgagctgatccggcatcttgttaggaagactggcagtaacttcaatgctgctgtcctcaagcgccttgtcatgagcaaggtcagcatagcccacgctatacctctctagattgat

SEQ ID NO: 273798 - DNA, 235 bp, Glycine max
gggtgaaatccacttggctgtgaggtttacttgttcttctttgcttaatatgatgcacatgtattcactacctttgttgccaaagatgcattatattcacccactaactgtcagccagcttgataatctgaggcatcaagctactcagattgtttcaatgagactgagtcgtgccgagccaccgctgagaaaagagatagtggaatatatgctagatgttgggttccacatgttg

SEQ ID NO: 273799 - DNA, 425 bp, Glycine max
ggaggaagaagaggttgaagaagtggaagaagaggatgcgatgcaaaatcatagcagtgatgaaacaaaggtggaagatgaggatgagaagaaaaaacatgctgaactcctttcaattcctcctcatgggtctgaagtatacattggtggcattcctcatgcctcagatgaggatttgaaatctttatgtgagcgtattggggaagttgcagaggttcgaataatgaagggaaaggattcttccgagaacaagggctttggttttgtgacctttagaagtgtggaattggcttctaaagccattgaggagctaaataataccgaattcatgggtaaaaaaattaaatgttcaaaatctcaagccaagcaccgtctttttattggcaatgttcctagaagctggggtgttgaagatctgaagaaga

SEQ ID NO: 273800 - DNA, 419 bp, Glycine max
ggcggatgagcttgttgctgaattttctgaaccaggcaagagtgaattgccccctgatcagcaacaatatgatgaaaaaaacatccgccgaagggtctatgatgctctgaacgttctcatggcaatggatattatttccaaggacaaaaaggaaattcaatggaggggccttcctcgtactactgtgaatgatattgaagaactaaagacagagcggcttgggctcaggaatagaattgaaaagaaaacagcctatctgcaggagcttgaggagcaattcataggtcttcagaaccttattcaacgaaacgagcagttatatagctcaggaaatcctcccagtggaagtgtatctttaccttttattttggtacagacacgccctcatgcaactgtggaagtggaaatatcagaagata

SEQ ID NO: 273801 - DNA, 444 bp, Glycine max
ggatgcaatagagaataattactggtttgaattgttcatggatgatctacctttgtggggatatgttggtgagttacatcctgataagaacagtgataatggcaagcatgtcatttatacacacaaaaacattattgttaaatacaacaatgatcagattattcatgttaatctcactcaggatatcccaaagcctttggaagtgggaaaacatttggacatgacatattctatcaaatgggattctaccaatgtcacttttgggcgtcgctttgatgtctacctggatcatcctttctttgagcatcagattcattggttctccatttttaactctttcatgatggtcatcttccttactggattggtgtcaatgatattgatgcgaactctgagaaatgactatgcaaagtatgctcgggaagatgatgatttggaaagtct

SEQ ID NO: 273802 - DNA, 432 bp, Glycine max
  unsure (1)..(432): unsure at all n locations
gggagagtgctaagcaatcgtcttctcttctcggagcttggctttgcttatcgattctctctcctctcgtttctctaattccaaggtttgtaaaagatggcagatgccgaggatattcaaccccttgtttgcgacaatggaaccggaatggtcaaggcaggatttgctggtgacgatgctcctagggctgtctttcccagtattgttggccgacctcgacatactggtgttatggttgggatgggtcaaaaggatgcctatgttggtgatgaagcccaatccaaaagaggtattcttactctcaagtatcccattgagcatggtatagtcagcaactgngatgacatggaaaagatctggcatcacacattntataatgaacttcgtgttgctcccgaggagcacccagtgcttctcactgangcccccctc

SEQ ID NO: 273803 - DNA, 373 bp, Glycine max
agagaagagaggagaaagcagggggcattgatagtgaatacgtgatatctcacaaggcctatgcgagggtgggattgcttgggaacccgagcgatgtctactacggcaaaacgatagcgttaagcgtcgccaacttcttcgccaccgtcacgctgcgtgccttcgaccagttaatccttcaaccccacccccttcacgatctccttcatttctcatcgctccctcaattggtcaacaggttgagctcccaaggttactatggaggcgtgcgattgcttatggctatttgcaatgtcttctacgcgtattgcagagagaacgccatcgatcttggcgacgacaatttcactctctcctacgacaccaatatccc

SEQ ID NO: 273804 - DNA, 445 bp, Glycine max
  unsure (1)..(445): unsure at all n locations
gagccaaatgaacatatctccagctaatggaagggtgtgattatcagatacaggtgcttttggtcttgaaacaagtcacttccttgttggaagtggtgctactgctagcaatgctgcttctgtagatgttgggggattccatcatgaatttggtacaagcagaaatcctactgctccttaaaggttttcataatactcaaactcaaactgctaggggaattagaagcaactattctcagagatccacaccaacttttagggcttcttcaagcttgcgcttgngacaagtgacatctgatgatggattgcctatggtagctgaaagttactcttctagacttccaaagccattgagcaccattggcaggaggaatggtgatagaaatgggaagtcaagaatttctagtgaaagatatcgatcattggctgagagtggtctgcatga

SEQ ID NO: 273805 - DNA, 426 bp, Glycine max
gatctcaaaccaagcggtgttggattggacaatggcatcaatccaaaaatctgtgattttggaatggcatggatggtagctacagaccacattcaaggatgcaccaatagagttgcgggcacatatggatatatgtctcctgaatatgcactgcatggacaattttctgagaagtctgatgtatacagttatggagttatggctcttgagatcattaatggcaagaacaactcttgttcttttgaatcatgtcgagacgctgacctattgacctatgcatggaataactggagggatgaatcaccatatcaattgctggattcaactctgctagaatcttacgttccaaacgaagtggaaaagtgtatgcatattggtttaacgtgtgtgcaagaaaatccagatgacaggccaacaatgggaaca

SEQ ID NO: 273806 - DNA, 316 bp, Glycine max
  unsure (1)..(316): unsure at all n locations
gacagcgaaacgtagagtgatttcagtgagtgatcggtgttcacttgatctcatcataatcgtcagcgtcaattgaagaagatgccgatcagaaacatcgccgtcggaaggcctgaagaggcgactcaccccgacacgttgaaggcggctttggctgagttcatctcaaccttcatcttcgtgttcgccggctcatgctccggcatcggctacaacaagctcaccgacaacggcgctgccacccctgccggcctcatctncgnctncatcngccatgcattcgccctcttcgtcgccgtctccgtcggcgccaaca

SEQ ID NO: 273807 - DNA, 428 bp, Glycine max
aattcgagcggccgcttttttttttttttttttttttttttttttgtaaaaacaagactagcgatattagaatataattctcacaagacgagtaaaaaatcataaattaaaagatatgttcaaagcattatcaatctacagaaacccacccccttaacaataatcctaagttgagaaaagaaaagtcaagagagttgcaaataaatagaaaaggaaaaaaaaggggaaaaaacattaaaactgatacattgcaagctggaatgatacacatgcccacaatagcatcgcctgctgctcagcttccacttggaaagattcagttataattcaagtaaacaacacatccaccgaagcctaacttcgaaaatataagtatcaatatgattcatggctctgatttggacaaggagatgagcttgcacattact

SEQ ID NO: 273808 - DNA, 444 bp, Glycine max
gactacaattagagcaagcacacctatgtttctgatgtctcggaagattaaatcacttggtgtcaaatgggttatctcaggagaaggatctgatgagatctttggagggtatttgtacttccacaaggcacccaacaaggaggagttccacagagaaacatgccgcaagatcaaagcacttcaccaatatgattgcttgcgagccaataaatcaacatttgcttggggtctagaagcccgtgtaccatttttggacaaggcgtttatcaatgctgcaatgagtattgaccctgagtggaagatgataaaaagagatgaaggacgaattgagaagtggattctgaggagagcctttgatgatgaagagcatccttatctgccaaagcacattttatacaggcagaaagaacaattcagtgatggagttggctatagttggattga

SEQ ID NO: 273809 - DNA, 298 bp, Glycine max
gtagaagatggcagacactgaggatattcaacctcttgtttgtgacaatggaacaggaatggttaaggctggatttgctggagatgatgccccacgtgctgtgtttcccagcattgtaggtcgtcctcgtcacactggtgtgatggttggcatgggccaaaaagatgcatatgttggtgatgaggcacaatctaagaggggtattttgactctcaagtaccccattgaacatggaattgtgagcaattgggatgatatggaaaagatttggcatcataccttctataatgagcttcgt

SEQ ID NO: 273810 - DNA, 255 bp, Glycine max
ggcacaagtgagtttgttgatcgagatagctaggggcagtgagatgaaaatgaaggtccttgttgtcttcgatgctacaattttggtagcatggcaatgccatgcgtacgatctgtcccctatgcgaatgaacactggctatggtgcccgtactccggaggcgaaatgcgcaagttggaggcttgctgtggaagcacacagcatctatggctttgagaccatacctgaagagtgcgttgaagcaactgaggaata

SEQ ID NO: 273811 - DNA, 426 bp, Glycine max
  unsure (1)..(426): unsure at all n locations
ggcccaaaatattttcatagcattttcagaggaagatggcgggtacggtttcgacttgtttcttcttcgtgtttcttctttctctccttcttccttttcagatctccgctgaggaatcctcggagaaggagttcgtactcacattggatcactctaactttcacgacactgtcagcaagcacgatttcatcgtcgtcgagttctacgccccatggtgtggtcactgtaagaagcttgctccggagtatgagaaagctgcttctatcttgagtagtcatgatcctcctattgttttggctaaagtagatgccaatgaggagaagaacaaagaccttgcatcacaatatgatgttaagggattcccaacaattaatattctgagaaatgggggaaagaatgttcaggaatacanaggtccccgtgaag

SEQ ID NO: 273812 - DNA, 370 bp, Glycine max
  unsure (1)..(370): unsure at all n locations
gatagcagcatcatacaaagcattgaattcaaaaacttaagttcattccttgtgttttgctttcttcctcaaaaccaaacatgtcgaacacatgcggcaactgcgactgcgctgacaagactagctgcaccaagggaaacagctatggtgttattgtagagactgagaagagttacatcgagactgttgtcatggatgttccagcagctgagcatgatgggaagtgcaagtgtggcactaactgcacttgcacggactgcacctgtggccattaaggaatatgtatganaatgtaattgccatgtgtttggcaatacaaatatccaaataatgtaatcttcgtatgaataaatgtgtgtgctgttatcct

SEQ ID NO: 273813 - DNA, 444 bp, Glycine max
ataggagaaagttctaataatctcgatgaaagtgaaaaatataagcatttgtggcttgaatgcgaaaattgttatggattaaattataaaaaattttttaaatcaaaaatgaatatttgtgaatactgtggatatcatttgaaaatgggcagttcagatagaatcgagcttttgattgattcgggtacttggaatcctatggatgaagacatggtttctctggatcctattgaatttcattccgaagaggaaccttataaagatcgtattgattcttatcaaagaaaaacgggattaactgaggctgttcaaacaggtactggtcaactaaatggtattcctgtagctattggaattatggattttcagtttatggggggcagtatgggatccgcagtaggtgagaaaatcacccgtttggtagaatatgctactaatcaactt

SEQ ID NO: 273814 - DNA, 420 bp, Glycine max
gactcacaggggagagagtgttggtacgaaaaatgtcgaagctgatcttcgtgttcctttcgcttattcctcttctctgcacctccttctccccagagagaccctcagatcgacgcgtcctcgttttgctcgatgacttcgccatcaaatcctctcattctctcttcttcaactccctcaaatctcgcggcttcgatctccaattccacctcgcagacgacccccaaattgcgctccagagatacggccagtacctctacgacgccctaattctcttttcccccaccattgaacgttttggaggatccattgacgcggctgcaattttggattttggtgattcgggtcatgatttgatcgttgctgctgatagcaatgcatctgatttaatcaaggaaatcgccaccgagtgtggagtgg

SEQ ID NO: 273815 - DNA, 409 bp, Glycine max
gacggctaaaagctaaaaatcatcgaagtgctcgaattagcatggctgtcacggttgcattcttgaatttgatcatcatgttttcagtagtctctacaagcaagtcactgagcttaaactactattcaaaaacatgccctgatgtggaatgcattgttgccaaggcagtgaaggatgccactgctagggacaaaactgttccagctgcacttctgcgaatgcacttccatgactgtttcgttcggcggtgtgatgcctctgtgctgctaaattcaaaaggaagcaacagagcagaaaaagatgggccaccaaatgtttctttgcatgcattctatgtcattgatgcagcgaagaaagcactagaagcttcatgctcaggtgtggtctcttgtgctgacatccttgctct

SEQ ID NO: 273816 - DNA, 393 bp, Glycine max
gacacacacaaattcacacaaacataaaaaaaaaaaaaaaaacacacacacactctcatacacacgttgtcgcgcacacattccttcattccgcagcaacaaacaaacatcttttaccttaaacaacaatggccgatgccgaggatattcaacccctcgtttgcgataatggaaccggaatggtcaaggctggttttgctggagatgatgcaccgagggctgtgttccctagcattgtggggcgtccacgtcacactggggtgatggttgggatggggcagaaagatgcgtatgttggggacgaggctcaatccaagaggggtattttgactctcaaatacccaattgagcatggaattgtgagcaattgggacgacatggagaaaaatctgc

SEQ ID NO: 273817 - DNA, 391 bp, Glycine max
  unsure (1)..(391): unsure at all n locations
gaaaacaacggtgacaacaacagcaatggctcttcacacacgacaacgttgctcattggctcaaagacgcatcatcattccttttacaaaagtaacaactatccattccctcattcatcatccgcggcatgctagatatatatacatatatatatagttccgagctaatatatatatgtaattaaagataggtgattagtgattattactattagagatcaatcccccatgcaccacatgctttcttatatatatgtatacttcataaatggaaagatcaattcatagagatttttctaatttgttgtaatttattttatatgtaatatatttatggtctatgcgtacattacatatgaataacaatgcanggttatcacatagttcaatc

SEQ ID NO: 273818 - DNA, 390 bp, Glycine max
gaagcggaaggggtttggttttgttcattatctgcttcttctgatgcgaaagtgaagactgaagagaaggtaagatcaatccaatgctggcgctacttcagaactgctccatgcccctcgcacgtgcggtacgcctaccacctcgcacgcacgtgcgaccttgtttcactgccgtgggctacgcatccatttccccacgtgccaactcccagtctcaggttctcctcggcttgtccgacaaggaactgcaacaacttgcccttgacctcggtcaggcaacatataggggcaaacaacttcatcattttttataccagaggaagctcagagaaattcaggatttcactcagttgcctcagggatttaggaatactctagaggaagctggat

SEQ ID NO: 273819 - DNA, 394 bp, Glycine max
ggttgtgtgagtgaagaagcagagggagtagcggcattaaaaatgcagatcttcgtgaaaactctgacagggaagactataaccctcgaggtcgagagcagcgacaccatcgacaatgtcaaggccaagattcaagacaaggaaggcattcctccggatcagcagcgtttgattttcgccggaaagcagcttgaagatggaaggaccctggccgattacaacatccagaaggaatcaacccttcatctcgtcctcaggcttcgtggtggcatcattgagccttccctcatggctttggctcgcaaatacaaccaggacaagatgatttgccgcaagtgctatgcccgtctgcatcctaaggctgtgaactgccgcaagaaaaagtgcggtcata

SEQ ID NO: 273820 - DNA, 433 bp, Glycine max
gccacagaaaaaaccatttatgattttactgtcaaggatattgacagaaaggatgtttctcttagcaagtttaaggggaaggttctattgattgtcaatgttgcttcacgatgtggtttgacatcatcaaattactcggagctgtcacgcttgtatgaaaaatataagaatcaaggtttggagattttagctttcccctgcaatcaatttggtatgcaggaacctggatcaaatgaagatattaagcaatttgcttgcactcgatataaagcagaatttccaatttttgataaggttgatgtcaatggaccatttacaactccagtgtaccagtttctgaaatcgagtgctggaggccttttgggtgatctttataagtggaattttgaagaaattctggttgacaaaaatggtaaagttattgaaagatccc

SEQ ID NO: 273821 - DNA, 413 bp, Glycine max
gaggcgaattgaaagctaagctgtggtaattctaagtgttccccccgggaaaaatagagatgtctcctacgttacccgtaccatgtggaagtagcgacgtaatttcatagagtcattcagtctgaatgctacatgaagaacataagccagatgaaggaacgggaagacctaggatgtagaagatcataacatgagtgattcggcagatttggattcctatatacccactcgtgcggtacttcattgtatgatctatatctatatatctatatctatatatctatctatagatatatagatatataagatccatctgtatagatatcatcatctacatccagaaagccgtatgctttgtaagaagcttgtacagtttgggaagaggttttgattgatccaaaagaagaatctac

SEQ ID NO: 273822 - DNA, 306 bp, Glycine max
cgaaagcaaacctatttggataaacgtcttccttacaaaccgaccttgggagacaggcaatatgcattcagcgtttattttgaatgggataatgattttggaattccaagaacattttacatcaaaaattttatgcaatctgaatttttcctcgtaagtgtcactcttgaagacattccaaatcatggaaccattcactatgtttgcaactcatgggtttacaatgcacaaagttacaaaagggatcgcattttctttgctaataagacatatcttccaaatgaaactccaactccactaatgaag

SEQ ID NO: 273823 - DNA, 353 bp, Glycine max
ggtgcaaatcaagcattttgcttgttatttcacgggttcgctctccaatttggacctccctttccttcgttcctcactcactgcaacggcgccggagatccgtcgctctcctcctccaccaccaccgcgatgggcgccaattccatgctcgccgagttctctcacgatctcgacgaccagatctcccagctcatgcagtgcaagccactctccgagcaacaggtccgaggtttatgtgagaaggctaaggagattttaacggatgaaggtaatgttcagcctgttaaaagccctgtgacaatttgtggcgatattcatgggcagtttcatgatcttgctgaactgtttcgaaa

SEQ ID NO: 273824 - DNA, 378 bp, Glycine max
ggaagcaaaaaatgaaaacccgaagtgcttctctcctctgtctttttctctctcttgctatccttttggctagtggcactgctgcaagtgcaactccaagaagcgcagtgccaagccaccatgtttcaacattcaacagaagcctttttccttccacttttctctttggaattggttcttctgcttaccaggcagaaggagcagcaagtgtagatgggagaggaccaagcatatgggacacctacactagacagcatactgaaaagatttgggatcatagcaccggtgacatgggagctgatttttatcatcgatacaagggtgacataaaaatagcgaaaggaatttggcttgactctttcagattctctatctcat

SEQ ID NO: 273825 - DNA, 346 bp, Glycine max
tgggaggaacacatatgcgtattgaaggacggcaacggaccaataatcttcaccatggcaaggcttgaccgtgtgaagaacatcacggggcttgtcgagtggtacgggaagaacgcacgcctccgcgagttggtgaacctggtggtggtggctggagacaggaggaaggagtcgaaggacttggaagagaaggccgagatgaagaagatgtatggcctcatcgagacctactagttgaacgggcaattcagatggatatccatttagaagaaccgtgtgaggaaccgagagctctaccgggtcatctgtgacacaaggggtgcctttgtgcagcctgcaatttatg

SEQ ID NO: 273826 - DNA, 400 bp, Glycine max
gatccatcactagttttttatatatatcggactggttgtgcttatccttattgagagaaaaaatggccaaatcaatcaaattctttgagttgaacacaggggccaagattccttctcttgggttagggacttggcaagctgaacctggtgttgcagctgaagctctcaccacagccattcaggttggatacaggcatattgactgtgctagtgcgtataagaatcaagcagagattggttctgctcttaagaagcttttagatgatggtgtggtgaagcgtgaggacttatggatcacttccaaactctggtgttcagatcatgcaccagaagatgtgccaaaagcattggataaaacattacaggaattgcaacttgactatcttgacctctatctgat

SEQ ID NO: 273827 - DNA, 359 bp, Glycine max
gaggaacacatatgcgtattgaaggaccggacggaccaataatcttcaccatggcaaggcttgaccgcgtgaagaacatcacggcgcttgtcgagcggtacgggaagaacgcacgcctacgcgagttggtgaacctggtggcggtggctggagacaggaggaatgagtctaaggacttggaagagaatgccgacatgaagaagatgtctggcctcatcgatacctacaggctgaacggacaattcagatggatatgctctcatatgaaccgtgtgaggaacggtgagctctaccgcgtcatctgtgacacatggggtgccttcgtgcatgctgcagtttatgaggcctttgggttgact

SEQ ID NO: 273828 - DNA, 246 bp, Glycine max
cgattgggacacaaggtaattacgttgtctagataactagaggcagggtcatgaatatgaacgtcctggatctgttaattgctacaaaacttgtagcatgttaatgccttgcgtacaatatgttcactcttccaatgatcactgactatagtgcccgtacttccaaagtgaaatacacaagatacatgcttgctgtagaaccgcgcaacatctatgacttatagaccattcatgatcagtgcgttg

SEQ ID NO: 273829 - DNA, 424 bp, Glycine max
gggagctgagctgagaaaacccccaaccccaaccgcaaccttaacctctcctcactttcttttcaaccagaactatgattaagctttttaaagtaaaggaaaaacagagagaactggcagaaaatgcgagtggcggaccacccgttaagaagcaaagtgccggcgagttgcgtcttcacaaagatataagcgagctgaatctaccaaaatcatgtaccatgcaattccccaatggcaaagatgacctgatgaactttgaagtttcaattcgacctgatgatggatattacttaggtggcacatttttgttttcctttcaagtgtctcccatctatccacatgaagcaccaaaggttaaatgcaagacaaaggtctatcatccaaatattgacttggaaagaaatgtttgtctcaacatcttacg

SEQ ID NO: 273830 - DNA, 430 bp, Glycine max
ggcacaagttagtttgttgatcgagataactagagacagggtgatgaaaatgaaggtccttgttttcttcgttgctacaattttggtagcatggcaatgccatgcgtacgatatgttccctctccgaatgaacactggctatggtgcccgtactccggaggtgaaatgcgcaagttggaggcttgctgtggaagcacacaacatctttggctttgagaccattcctgaagagtgcgttgaagcaacaaaggaatacatccatggcgaacaatatagatcagactccaaaacagttaaccaacaagcttacttttatgccagagacctcgaagtccattccaaggacacatttgtgttcaatatagatggcaccgtactctctaatattccatactacaaaaaacatggttattgggtggagaaatttaac

SEQ ID NO: 273831 - DNA, 407 bp, Glycine max
ggatcgaacatggatgaggagtacgatgtgatcgggttgggcacgggtctcaaggagtgcattctcagcggtcttctctccgtcgatggcctcaaggttctgcatatggataggaacgactattacggaggagaatccacttcgctcaatcttattcagctttggaagagattcaggggagatgacaagcctcctccacatttgggcgctagcagggactacaacatcgatatgaaccccaagtttattatggctaatggcaatttggtgcgggttctcatacataccgatgttacaaagtatctctatttcaaagctgtggatgggagctatgtgtttaataaaggttcataaggtgcctgcaaacgacatggaggccttgaagtccccacttatggggctatttg

SEQ ID NO: 273832 - DNA, 438 bp, Glycine max
ggaattgatgagcaggaaataacatatgccttgggtcagagaaagactttacgacagctgatcaggaatggggacattgatgttgcatttggtaaattacgtgaatggtatccacagattgttgaggacaatacatcagctacatgttttctgcttcattgtcaaaaatttatcgaattagttcgggttggagcacttgaagaggctgtcaaatttggaaagatggaattgtcaagtttttatgacttgcctgtgtttaaggatttagttcaggactgtgttgctttgctggcatatgaacggcctctggaatcctccgtaggttatcttctaaaagactctcagcgtgaagttgtagctgacacagtaaatgccatgatattgtccacaaatcttaatatgaaagattcaaaacattggttgcactcttatcttgag

SEQ ID NO: 273833 - DNA, 435 bp, Glycine max
ggtgcacaagtgagtttgttgatcgagataactagaagcagtgtgatgaaaatgaaggtccttgttttcttcgttgctacaattttggtagcatggcaatgccatgcgtacgatatgttccctatccgaatgaacactggctatggagcccgtactccggatgtgaaatgcgcaagttggatgcttgctgtggaagcacacaacatctttggctttgagaccattcctgaagagtgcgttgaagcaacaaaggaatacatccatggcgaacaatatatatcagactccaaagcagctaaccaacatgcttacttttatgccaaagacctcgaagtccatcccaaggacacatttgtgttcagtatagatggcaccgtactctctaatattacatactagcgaatacatggatatgcggtggagaaattaactcga

SEQ ID NO: 273834 - DNA, 444 bp, Glycine max
gatatatagttattttactgtgtgagagagaaagttaaacatgggaagaggaagggttgttctggaaagaatagagaacaagatcaaccgtcaagtaacattctcaaaacgcagaagtgggttgctgaagaaggcctttgagctttctgtgctatgtgatgctgaagttggccttatcatcttttctagccgtggcaagctttttcagtacagcagcactgatattaccaaaatcattgagaggtatcgccaatgtcgttacagcaagtcacacactggtgattcattggaacacgattcacagagcgcataccatgaattcttgaaattaagagcgaaatatgaatctcttgagcggacacaaaggcattttcaaggagaagaccttgagccacttagctttaaagatttgcagagcctggagaagcaactagacataacgct

SEQ ID NO: 273835 - DNA, 319 bp, Glycine max
gactatagagtgtgataggatgatgatgtagctcatgcttatcatttcgaagatcagtgttggtgcttgcagcttctcgtcacctgaagatggccagatggcttgggaactgccgctgcggatgatactgactgtgcgacaacccatgcagaggctgacacatgtacccgatacttgagctacactgagtcaaccaacagcgaaaccttcatcatgcaagtggcacctagcacggctcaatgagacggtgctgaaatgggcgttcccgatgggaaccatggatgcttatgaacaccaaactgttactgcaatggctgga

SEQ ID NO: 273836 - DNA, 404 bp, Glycine max
gactgcaatggctgatataattgactttcatggatggaaagaggtcattgttgtattcttggatgatgattatggaagaaatggactatctgctttgagtgatgagcttgaaaaaaggaaattgaaaatttcttataaactgcctttaagtattaagtttgatttggatgaaatcactaacttgctcaatcaatccaaggtggttggtcctcgtgtgtatgttgttcatgccaaccctgatccgagattgagaattttttttattgcccataaacttcaaatgatggccaaggattatgtctggcttgtcacagattggctctcagctacactagattcattatctccagtgaatcagacctctttcagtgttctccaagggggtgttggtctacgtcaacaca

SEQ ID NO: 273837 - DNA, 395 bp, Glycine max
ggggaacatcatcacattacattagattgggggtaatggcagcgtcactacaagcagcagctactttcatgcaacccaccaagttgagcaggagcaacactttgcagcaaaagtctactcagtccatttccaaggcttttggtttggaacctgttggagctaaaaaggtcacatgctcccttcaggctgatcttaaggacttggctcacaagtgtgttgatgctaccaaaattgcaggattcccccttgccacctctgccctcgttgtctctggggcaagtgctgaaggtgttccaaagaggctaaccttcgacgaaatccagagcaagacctacttggaagtgaaggggacaggaacagcaaaccagtgcccaacaattgatggtggattggac

SEQ ID NO: 273838 - DNA, 379 bp, Glycine max
  unsure (1)..(379): unsure at all n locations
ggagagagaagcctccatttataaaacatcgtgtgcgcactctctcttctcctaggtttcgctcccatcaacagcaacgatggtgcagaggctcacttatcgcaagcgccatagctatgctaccaaatccaaccagcaccgggttgttaagacccctggtgggaagttggtgtaccagaccactaagaagagagcaagtggacctaagtgccctgtcactggcaagaggatccaagggattccacacttaagacctgctgaatacaagaggtctagattgcctaggaaccgcaggaccgtaaaccgagcctatggaggtgttttatccggnggagctgttagagaaaggattattcgcgctntccttgttgaagagcag

SEQ ID NO: 273839 - DNA, 379 bp, Glycine max
gtgtgaaagtagtagtagcagagtcacatgggaaggttgcagcgtcttgctcgacatcaacgacggtgaccgtctcgttttcgctcgtctctcccccgctgcaaaattgaagattgggaataagaactgctctctgcaaccgttaattggctgtcccttcggtactgtttttcaagtcgatggacctttcctctctcccgcacaagttaatggtaataatgctgaagaagtaagagatggtcaagtaagtgtcgagtccagggacaaagttaataatgataataatcctgaagaagtgagagatggtcgagcaaatgttgattcgagggacaatcgtgccttggttgacaataacacggcacagagcctgactggtgag

SEQ ID NO: 273840 - DNA, 378 bp, Glycine max
ttcgactagaggggaatgatggaagaaaagaaataggataaagtaaataaaaatgcagtagaagagtcctgattccaaacgaaaaaattcaaacttgattgaaaaggatctttctgattattgaagaatgggacaaaggattgatcgcgaaaaagatttcttgttcttattagaagatcgtgattggatccacatatgtttggtaaaaagaaagaaaaatatgcttctttgagaataatagaaaaggaaagtgttcaattggaacatgaaaacgtgacagaattggtcctagttactcttcggaacggaatagaagaaggggagagattctcgaaccgaactaggaaacggatccaatgacttcaaaggaattgaacg

SEQ ID NO: 273841 - DNA, 308 bp, Glycine max
ggacacagcacatcatgatgactttcatcagcctaactttggtggttcttcaataaaaaaaggtggtccaagggaaccttggcacgacatccattctcgacttgaaggccctattgcttgggatgactggttcaactttgagcagagatggaggaagcagggagtgaaaggacttacttgttccactgagagactcttgaagatgtcattattccatcatacccggtaacttacatagatgatcatgagacatgtaatgtgcaagtattgagatccattgatggtgaagctgctttagagttcccaga

SEQ ID NO: 273842 - DNA, 291 bp, Glycine max
catgggaagagagtgtcctacagctacaagccaaggaccaagccaggatgcagtacctttctaacttggtggctagaagatccattggtccaattggcttagggagacaaattacacagagccctacatacatagtgagggccaagtttggtaccccagcacagacccttctcttggccatggacactatcaatgatgctgcctgggtcccttacactgtctgtgttgggtgctcaacaaccacacactttgctcctctcaagtgcaccactttcaagagagttggatgtg

SEQ ID NO: 273843 - DNA, 259 bp, Glycine max
gttggggctggccctcttgggcattgggggtaaaatttgggttaactttcccaagggggaaacaaattttgcctccgaaaaccccctaaaccgctttgggtgggtcttttctggcatcgtaagaagtggcctgctgatgctcctgccagcatttgtcttcattgggctggaacaggattactgctgtggctgctttggccatgaaaactgtggcaaacgatgtgcgatgctttcttctgtattggctgctctcattgga

SEQ ID NO: 273844 - DNA, 404 bp, Glycine max
  unsure (1)..(404): unsure at all n locations
gcagtgagttggaattgataatctagagagtgactactgatcgccgacagcgagctttttccgtgtaatggcgacctccgtcgcagtcgccggcgctttgacggcgcacgatcgccgggttctgacggcggtgaacgccggagcctcgagcctgtcgttagccggttccagcttcattgtagtgtgctacctcctcttcaaggagctccgcaagttctccttcaagctcgtcttctacctcgctctctctgtatgcttcttttttctctctttccgtgttcctcttcttcagatctaaaacttgcgtttttactttttaacgttccttcgaattgactcattcgttagtttagtaacacttatcagtaatcacgattggcagaaacgatacggntaaacgcgct

SEQ ID NO: 273845 - DNA, 348 bp, Glycine max
ggagttgagtagcagaagagaagagaagatgggatctgtatgtatctgagactgtgcatcaccccattccctgttgcggttgattcttgaggacaggcagagataggattaacttaatatgacgacacgacaccattgcaatttaccattctacatttaggcaatgccagccacccaatagataatagcaataagtctttcttcacttcaactcgcactggtatttaaacaagtctgatgggttcaagattcccatctcatcagctcagcaatggcctgtatgtatcaggtcggcctgaacagccgtaagacagaactccaacaatgagctcagttgccatgccttac

SEQ ID NO: 273846 - DNA, 312 bp, Glycine max
ggcggggacggttgccaattttgcaggactgggccaaatcaagggtcgagatcttgaacggtagaagaagggggaactgctgaatccaatgtaccacctgaaaggtgggctgtcccagttacgcctgggcaaatttacaaagcggccggtctgcaaactatctaaaatccacttagatcggaaatccattggacgtattctaacagttattaaccagactcagacagagaacctaaagaaattgtacatgggcaagaattacaagcccctgaacctgttgcctaagatgacacttgccatgcgctgtcggtt

SEQ ID NO: 273847 - DNA, 397 bp, Glycine max
gatgaaagaattgactaaaaggactcaggactgtttagtctcctttggagaatgcatgtcgactaggatctttgctgcatatcttaacaaaataggtgtcaaggcacgccaatacgatgcatttgagattggttttataacaactgatgacttcacaaatgcggacattttggaagcaacttatccggcagtcgccaagagattacatggtgattggctctctgatcctgcaattgcaattgttacaggcttccttggaaaggcccagaaatcatgtgcagtgacaacactgggtagagggggcagtgatttgacagctacagcaattgggaaagcactagggttacctgagatccaggtatggaaagatgttgatggtgtcctaacctgtgatcca

SEQ ID NO: 273848 - DNA, 386 bp, Glycine max
  unsure (1)..(386): unsure at all n locations
ggcacaaaaatacaatacaaaacaaaacagagcaaagagagagtgtgtgaaaagtgaaacaaaaaacagaacaacaatggcgacacttaaggttcctcagcctcttccccccgttgcagatgattgtgagcagctccgaaaagccttctcaggttggggaactaacgaggagctgattgtatcgatcttggctcataggaatgctgctcagaggaggcttatcagagaaacttatgcccagacctatggagaagatctcctcaaggccttggacaaagaactcacgagtgattttgagaggctggttcatctttggacacttgattctgctgaacgtgatgcatttttggcaaacgaggcgactaanaaatggacttcaagcaatc

SEQ ID NO: 273849 - DNA, 377 bp, Glycine max
ggacacgatggtgttctacttcaaagcgcgccccgaagccggcgatttcaccatcttcatgggcctagacaagtacgagaacgaggaactcatcaaatacgggtttcccgaagacatgtggatccatgtcgataaaatgtcttcagcccatgtctatgtcaggttgcacaaaggccataccatcgatgacatgagtgagggtttactggatgactgtgctcagcttgtcaaagcagattcaattcatggaaatagagcgaacaatgtctatgttgattacacaccctggactaacttacagataactgctacaacggatgttggccaagatggttatcacagctcacagatggttcgaactgtaagagttgagaaga

SEQ ID NO: 273850 - DNA, 406 bp, Glycine max
gcattgaagagttctacagtcaagttgttcaaacacatggctcagcaaagaatttgcctacatcctgcacttcaagactcagaccagggctgtgctttttccctcaaaatgtcgtgtcccaaatcagtaccccaatcttctttgtaaatgcagcctatgactcatggcagatcaaaaacattttggcaccaggtgctgctgattcccgtggccaatggcgtgaatgcaagcttgatatcaaaaactgctcacctaatcaactcagtgtaatgcaaggattcaggacagatttcttaagggcatttagtgtggttggcaacgccgcatctaaagggcattttatagatggttgctatgcacactgccaaactggaatacaagagacatggctgagaaatgactcccc

SEQ ID NO: 273851 - DNA, 361 bp, Glycine max
  unsure (1)..(361): unsure at all n locations
gatgttgaagtacatagcacgtgataaagagtttcgcagaatccctgttataatgatgcccgcacaagatgaggtatccattgttgttaagtgcttgagacttggagcagcagactatctagtaaagcctttacgcactaatgaactattaaatttgtggacgcacatgtggagacggaggcgcatgcttggacttgtagagaagaacatcttgaattacgattttgatctggtagtatctgaccctagtgatgccaacacanacagtaccaccttgttctctgatgacacagatgacaagtccaagagaagcactaatccagaggcaggaatatcagtccaacaggaacaagagtctact

SEQ ID NO: 273852 - DNA, 355 bp, Glycine max
gggttcaagggtatgatgcttgctggattcattctcttgctgaaatgcagtctttctagaaagtttgttcaactgtcccattattggcgttagctatgctacccactggagcataagagacccaattacgtgagagcaacagtcataaggtccatcctcaaccaatagaagaggccatgaatcagaatccagaagcaatggaaaccctaatatctaaagtttttatgaatatctcttccttgaagtcagcttatattgagcttcaagctgctcatactccctacgaccctagtaaaattcacactgctgataaacttgttattagtgagctgaacaatctgcttgaactcaagca

SEQ ID NO: 273853 - DNA, 412 bp, Glycine max
  unsure (1)..(412): unsure at all n locations
gatatccaaagggacaaaaatattattaagatgatcaacattattggagcacttgttctactctttgcatttctcttcctcagttgtgtgtatgcacaagacacaacaacccttgtgcctgcaatcataacttttggtgattctgctgtggatgtagggaacaatgactatcttcccacccttttcaaggctgattaccctccttatgggagggactttgttaaccaccaacctactgggaggttttgcaatggcaaattagctactgatttcactgctgacacattgggtttcaagacctatgctccagcatatcttagcccacatgcatcanggaaaaacctccttattggagcaaactntgcttcagctgcatctggttatgatgaaaatgctgctactttgaatcacg

SEQ ID NO: 273854 - DNA, 327 bp, Glycine max
ggcacaagtgagtatggtgatcgagataactagaaacagagtgatgaaaatgaacgtccttgttatcttagatgctacactattggtagcatgccaatgccatgcgtacgatatgttagctttacgaatgaacactggctatggtgcccgtacttaggatgtgaaatgcgcaagttggaggcttgcatgtggaagcacacaacatctttggctctgagaccattcctgaacagtgcttataatcatcaaaggaatacatccatggcgaacaatatagatcagactacaacacagctaaccaacaagcttacttttatgccatacacc

SEQ ID NO: 273855 - DNA, 354 bp, Glycine max
gatgagaagagtgtcttgttcacaccagatgatgctaagaatgatgttggtgttggattaaggtatgactacgggatattctatgcatccaagacgttttatgatcagaataaggagaggagacttttgtggggttggattggagagtctgacagtgaatatgctgatgtagccaaaggttgggcttcagttcagagtattcctagaactgtggagcttgataggaagactggcagcaacttgcttcagtggcctgttgctgaggtggagagtttgagattgagaagtgatgaattcaaaaatttgaaggctaaaccagggtcagtcgtgtcaatagatattgaaacagccaca

SEQ ID NO: 273856 - DNA, 387 bp, Glycine max
  unsure (1)..(387): unsure at all n locations
gaaggtgcaagagtttgttgtgagctataagctagtttatcgtgaggagaatatgaagttgtttgttttctttgttgctgcagtagttttggtagcatggccatgccatggcgcaggctaccaaaggttccctctccgaatgaaaactggctatggtgagcgttcttcggaggtaaaatgcgcaagttttaggcttgctgtggaagcacacaacatccgagcctttaaaaccattcctgaagagtgcgttgaaccaacaaaggactacattaatggcgaacaatttagatcagactctaaaacagttaaccaacaagctntcttttatgttagtgaacgcgaagtccatcacaacgacatatttatattcggcatagataacaccgt

SEQ ID NO: 273857 - DNA, 419 bp, Glycine max
  unsure (1)..(419): unsure at all n locations
ttgagcgaagagtgaagagaatggctcccaagggtttaacctttctggctgtgttaatatgcgtttcagcactgtcactgagtccttctgttgcgggggaagggcaaaataatggccttgttatgaacttctacaaggaatcatgccctcaggctgaagacatcatcacagaacaagtcaagcttctctacaagcgccacaagaacactgctttctcctggctcaggaacatcttccatgactgtgctgttcagagttgtgatgcttcactgttgctggactccacaagaaggagcttgtctgagaaggaaacagatagaagctttgggttgagaaatttcaggtacattgagaccatcaaagaagctttggaaagagaatgctctggagttgnttcatgtgctgatatcctcgttctc

SEQ ID NO: 273858 - DNA, 375 bp, Glycine max
cgggggatcggctgtgggagagaggctaggcctctgaggaggcgaatccggcgggtatcagagccatcagaaccgccaccatgacggtgggcaagagcagcaagatgctgcagcatattgattacaggatgaggtgcatcctgcaggacggccggatcttcattggcaccttcaaggcttttgacaagcacatgaatttgatcctctgtgactgtgatgagttcagaaagatcaagccaaagaactccaaacaagcagaaagggaagagaagcgagtcctcggtctggtgctgctgcgaggggagaatctggtctcaatgacagtagagggacctcctcccaaagatactggtattgctcgagttccacttgctg

SEQ ID NO: 273859 - DNA, 404 bp, Glycine max
gataaatgaagaggtgaaagaaagagagaaaaaaaatcaatgatatagaattctaatatgtaaaggtctatgggttatctcataaaaggtagtgtaataaagcatcaatctaaatcaattcatatctatttatatatgaattaatttataacgtaaacaaattaagagctctgaatcaataaaaactgagaatattgattcacgaaaaaacaaatcaatattcgaaaaaaaagattattaattttaagatatgagaaaggctccattgtcgaattcagacctaaccattaatcgagaagtgatgggaacgacgaaacctgcaaatacttaagattttattaaaaacatatcttaatgattcattaggtgggatggcggaagaaaccaaaaagcaatcctttttt

SEQ ID NO: 273860 - DNA, 416 bp, Glycine max
gggtaccaagacaataacgaggtttgtatagagttacttaaaacaaaagacggaatcgattctttagctctatacagctcatctgtcggaaggtttcccaatgctcctggggctttgctttatcctatttatggtgagggagaactaccacaagccttttgtcgccgtgctgctgtcaaaggttgcatttatgttctaagaatgtcggttgtttctctgcttatggataaggttacggggtcttataaaggtgttagattagcttcaggtcaggatttatatagccaccaactaatcctggacccatccttcatgattccatcaccattgtcttcgtctccaagagattttcccagtgaaaagctccaaatgttgggtcagagagatattaaaggaatggtggctaggggaatatg

SEQ ID NO: 273861 - DNA, 268 bp, Glycine max
acaagaataaatgtgagggccccatgaaaacagggatacggcaagggttgatcagcggatcaggatttggggtttcatttttcttactgttttgtgtttatgcaaccagtttctacgcaagagctagacttgtggatgctgggaaggcaacattctcagatgttttccgggttttctttgcattaactattgcagctattggagtttcccaatcaagcttctttgcttctgacttaagcaaagccaagtcagctactggttccatatt

SEQ ID NO: 273862 - DNA, 419 bp, Glycine max
ggggactgaagcttcacgtggcagagattggaagtggctccaaaacagtggtattcttgcatggattcccagagatctggtacacatggaggcaccaaatgatttctgtggcaaacgctggttatagggctattgcctttgatttcagaggctatggactttctcagcaaccagcagagcctgaaaaggaaaccatgtttgatctggttcatgaaattgtaggccttttggatgctttgaacatctccaaggccttccttgttggaaaggattttggtgccattccaggacatcttactactgcagtgcacccagaaagagtagctggtatcataactttaggcattcccttcatgcttccgggtccctctgctgtggagaaccaccttcagcttcccaaaggggtttatattactaga

SEQ ID NO: 273863 - DNA, 395 bp, Glycine max
ggagagagagagagagaaagtgagagatggagagaatgttccctcccaagaagccctctactatgaattcccatgacagacccatgtgtgttcaaggagactcgggtcttgtcctcaccactgaccctaaacctcgcctccgttggactgttgagctccatgaacgctttgttgatgctgttactcagcttggagggcctgataaggccactcctaaaaccatcatgagggttatgggggtgaagggtctcaccctttaccacctcaagagccaccttcagaaatttaggcttggcaagcagccccacaaggaattcaatgatcactcgattaaggatggtatgagagcttcggctttagaactgcagcgaaacactgcttcgtcttctgccatg

SEQ ID NO: 273864 - DNA, 414 bp, Glycine max
ggaagaaaactaaggaaggaaggaaggaaggaagagtgagcgtgaaagatgccttcggcgaggctttcagggtcaccaaggctcgacgttgctattgacatgggcaatccatttctcaatctcactgttgatggtttccttaagatcggagctgtcgcagtcacgcgatcagctgctgaagatacttatcatattatccgaaacgggaatatctcaagtcatgatttcgagaaaacgttgaagaagatgtgtaaagaaggtgtatattggggaactttagctggtgtttatcttggaatggaatatggggtagagaggatccgtggcaccagagattggaagaatgccatgattgggggtgcagtaactgcgactctgttatctggtgccaccaccaccatcaaagacaaaatt

SEQ ID NO: 273865 - DNA, 328 bp, Glycine max
gtcgcgcggaggctgatgcttgggtgcgttcaagattcaacttcacccgtaacccaccgccatggccgaggaaggcattgctgctggaggtgtaatggacgttaatactgctttacaagaggttctgaagactgccctcatccacgatggcctagcacgtggaattcgcgaagctgccaaagccttagacaagcgccaagcccatctttgtgtgcttgcatccaactgtgatgagcctatgtatgtcaagttggtggaggccctttgtgctgaacaccaaatcaacctaattaaggttgatgacaacaagaaactatgagaatgggta

SEQ ID NO: 273866 - DNA, 289 bp, Glycine max
ggaggaaagaaattgatatcgcttacagtaagaggtgagaaagagagacaaatcggcagaagcaaggaggctgagagcgagagagcaactgcacgcactgtaactcctaacttcccagatcgtcttcttcctcttttctctccggtgattgttggaactcagagagcttctttgatggaacagtacgagaaggttgagaagataggcgaaggaacatacggcgtcgtttacaagggtcgcgaccgcgtcaccaacgagaccatcgcgttgaagaagatttcgctcgagc

SEQ ID NO: 273867 - DNA, 324 bp, Glycine max
  unsure (1)..(324): unsure at all n locations
gacttcaaagtggagaaaaacacacacggttggtggattcgctctcttttctttttcctcaaaaagttgaaaaagaataaagggggaacaatcgagtgaagttgttgctcttcaatagtaaacttacctatggaagagggaagggttgtgagtgagtacacaaaagatggaactgtggatcttaaagggaaacccattctcaaatccaaaagtggtggctggaaagcatgctcctttgttgatggtatctctctctctcactataaattgtatatggtcattntcatcttgttatggacattaatttcaaaagcaatttcccaa

SEQ ID NO: 273868 - DNA, 207 bp, Glycine max
gataaccagcagcaaataaaccctttttaaaaacggattgtcaagtcatgatgcgtctattcaatccccggaaaaccacattgctttttggtatacgtgataaaacaaagaccccacttgaaaatttggagcctattctaagagaagatattcagaagatttgggatggcatttcaaaacccgaagcccatcaacatactcctcttt

SEQ ID NO: 273869 - DNA, 290 bp, Glycine max
ggaggcaagaagttgtattttggcatcgccgtggcttcaagaagagaatctcaatggatgcccaggagctgaagcgcgtgttccagatgttcgaccgcaacggcgacgggagaataacgaagaatgtgctgaacgactcgctggagaacctgggcatcttcatctctgacaaggacctgagccaaatgatccagaggatcgacgtcaacggcgacggttgcgtggacatgaacgagtgtggcgagctgtatcagaccataatggacgagcgcgacaatgaggaggacatg

SEQ ID NO: 273870 - DNA, 206 bp, Glycine max
tattttgggatcgcctaagcttcaagaagagaatctcaatgtatgcctattagctgatgcgcgatgttcagatgttcgaccgcaacggcgacgggagaataacgaagaaggatctgaacgactcgctggagaacctgggcatcttcaatattgacaaggacctgagccaaatgatccagaggatcgacgtcaacggcgactgttgc

SEQ ID NO: 273871 - DNA, 401 bp, Glycine max
ggtggaagatttgagcagaagaagacatgtagagattggaatcatccgtgtccctctctctcatctctctttctctctcttcccttggtttccttactaattactttaacccaataatccaataactacatacaaagttgaacaataccaccatcatagcgcatcatcatcagaattccaaggggaattgttgatgtggtggtgagaatgatgtatggggagtagaactacctggagggttgttggtgttgaagatgacaagggagctgaaagaggaatgccgagcttcaattctgagttacccaattccaattcatgctatacagaggggaacacagttgattcttttcgtgtttctgactttggagcatttgatcagtcatatcacatagaggatgctg

SEQ ID NO: 273872 - DNA, 375 bp, Glycine max
ggcagcgcttgagaccaagccccactcaggcacgggaccactctctctgctcttcttctacctttcaagtttttaaagtattaagatggcagagacattcctatttacctcagagtcagtgaacgagggacaccctgacaagctctgcgaccaaatctccgatgctgtcctcgacgcttgccttgaacaggacccagacagcaaggttgcctgcgaaacatgcaccaagaccaacttggtcatggtcttcggagagatcaccaccaaggccaacgttgactacgagaagatcgtgcgtgacacctgcaggaacatcggcttagtctcaaacgatgtgggactagatgctgacaactgcaaggtccttgtaaacat

SEQ ID NO: 273873 - DNA, 225 bp, Glycine max
ggagaaaaggaggaagcagagagggaggagggtagtgaggaggaagggcccaaagggtggaagggttattgtctctggggctatgctggttgaggttgagactgttcttcagactcaggaaccagtgataaaaccaatttggaatacatttgctagcagtctcagtggaatttggaagggtgtaggtgctgtgttttctcccatcacagctgaaatggaaccaat

SEQ ID NO: 273874 - DNA, 265 bp, Glycine max
  unsure (1)..(265): unsure at all n locations
gacggctaaaagctaaaaatcatcgaagtactcaaatgagcatggctgtcacggttgcattcttgaatttgatcatcatgttttcagtagtctctacaagcaagtcactgagcttaaactactattcaaaaacatgccctgatgtggaatgcattgttgccaaggcagtgaaggatgccactgctagggacaaaactgttccagctgcacttctgcgaatgcacttccatgactnngttcgttcggggtgtgatgcctctgtgct

SEQ ID NO: 273875 - DNA, 279 bp, Glycine max
gacagacaagggtttggtccgggttcacgtttcacaatcactttttgcgcttctctcactcactcactcttcttcttcctcttcgtgtggttttctttctcgaactcgaacgaagatgcgtgagattcttcacatccagggagggcaatgcgggaaccagatcggagccaagttctgggaggtggtgtgcgcggagcacgggatcgattcaacggggaggtaccaaggggacaacgagttgcaactcgagcgagtcaacgtctactacaatgaaacgag

SEQ ID NO: 273876 - DNA, 252 bp, Glycine max
gggacaacagcatgttgtcttggcagagggctgcgtttcatttccaaccagagaaagactggatgaacgatcccaatggtcctatgtactacaagggatggtatcactttttctaccaatacaacccgaacggtgcagtttggggtgacatagtttggggacatgcagtttcaagggacatgatccattggcttcaccttccactggcaatggtggctgatcaatggtatgacatgcaaagtgtgtggacag

SEQ ID NO: 273877 - DNA, 416 bp, Glycine max
ggtgaaggcctaggattgctgagtcaaacttgagttgaaggtgaagaaggagatggcagcaacttcttccttgtgttcatcgaccctccaatcccaaatcaatggattctgccttcacaaaacctctctttcccatcctcgttccctcactttctccaggaagaaaatttcaaccacagtgaaggctacatctcgtgttgacaagttttcaaaaaacgatatcattgtttctccatccattctttctgcaaactttgcaaaattgggagagcaggtgaaagcagtggagttggctggttgtgattggattcacgttgatgtaatggatggccgttttgttccaaatattacaattggacctcttgtggttgatgcattgcgccctgtgacagatcttcctttggatgtacacctga

SEQ ID NO: 273878 - DNA, 331 bp, Glycine max
gacacaaaaatagtgatggaaaggttgtattgtatgagtatattaatgtctctttccatacatagtcatttctgcaagttgggtttggttttctcttcctcgttcgtttcatttcgtttcgttgaagagcaacttttctctctctgtctctgtacaattctcccttttcttccctcgtagatcgaaagggaatattcttccatggcctccaagcggattctgaaggagctcaaggacctacagaaagacccttcaacctcttgcagtgccggtcccgtagcagaagatatgtttcattggcaagcaactataatgggtccccctgatagcc

SEQ ID NO: 273879 - DNA, 366 bp, Glycine max
  unsure (1)..(366): unsure at all n locations
ggtgggattttgagagagagaaatagagagagaacttcgagtgatggtgagagtgacacaaatctagagagagcactagtactctaaaagtctattatattcttcaaaatatgaccatgcatcgcgagtcttgggcttttgtcttcggcgttatgggcaacatcatctcctttggagtgttccttgctccattgccaaccttttaccaaatctacaagaagaaatccactgaaggtttccagtcacttccttatgttgntgcactggtcagtgcaatgctttggatttactatgctttcgtgaaaagggaaactgcccttcttctcattaccattaacacattttgaaattgtgtggagtcaattt

SEQ ID NO: 273880 - DNA, 410 bp, Glycine max
ccacacaagtaacggagaacatactaaagctttggagtgtgattttcgggcgctcgagcgaaacccattcttaccccaagcttttaataatatggccgtgatctgtcattaccgaggagaacaggccattcgacagggagactcggaagttgcggagtcttggtttaatcaagccgctgaatattggaaacaagctatagccctaacccctggtaattatattgaagcccagaattgggtgaagatcacaggacgttttgaataagaaccaccttgttttttatttttcttatattttcttcttaaattatatctatctatctataattctatctatatagatagatagatatctataagtatcaaattttggcttggtgttcccatcaatcaaattaaaaactcttttc

SEQ ID NO: 273881 - DNA, 313 bp, Glycine max
ggaattgtgaaagtaagcaaagatggctttcacggaatcggctctcctccttccttcggtttcaggaaccaacaagaacaagaacaaggttccagaagacaaatggtatttagcctacattgtgtattttaccctgggtctcggttaccttctcccatggaacgctttcatcaccgacgttgattacttctcctttctctaccctgacgccagcgttgaccgcatcttcgccgtggtttacatgatagtcggactggtggggatctccctcataatcctctacagccacaagtctgacgcctatgtgaggatc

SEQ ID NO: 273882 - DNA, 315 bp, Glycine max
ggaagagtgaagagaatggctcccaagggtttaaggtttctggctgtgttaatatgcgtttcagcactgtcactgagtccttctgttgcgggggaagggcaaaataatggccttgttatgaacttctacaaggaatcatgccctcaggctgaagacatcatcacagaacaagtcaagcttctctacaagcgccacaagaacactgctttctcctggctcaggaacatcttccatgactgtgctgttcagagttgtgatgcttcactgttgctggactccacaagaaggagcttgtctgagaaggaaacagataga

SEQ ID NO: 273883 - DNA, 384 bp, Glycine max
ggacttcgatgaagatgtagatgggagaacagagagaaatagagtactttcaggttcccttgacaattccattatctaccttcgcaatctccgtaaggtatattttgaggagaagcatcatgggagaaaggttgcagtagattcattaactttctcagttcaggaaggagaatgttttggctttttaggaacaaatggagctggaaagaccacaactatttctatgctatgtggggaagaatgtccttctgatgggactgcttttatttttggcaaagatatatgttcccatccgaaggctgctcgccgatatattggatattgtccacaatttgatgctctattggaattcttaactgtccgagaacatcttgagctttatgc

SEQ ID NO: 273884 - DNA, 403 bp, Glycine max
  unsure (1)..(403): unsure at all n locations
ggaggctactgaaatcattacttatactagttttcggcgattattcatagtgaggcaatagtagcaacaattcacactggtctttgcttctcgttactcatttctcacctaactttctattcttctcagtctcagatcagaaccttagccatggcagcgttccagaagatcaaggtcgccaaccccatcgtcgagatggacggagatgaaatgactagggttatctggaagtcaatcaaggacaagctcattttgccctttcttgagttggacatcaagtattatgacttaaggctttcttaccgngatgagaccgatgataaagtaccaattgaagtgcggaagcactctcaagataatgtggcattaagtgccgcactattactccagatgaagctcgtgt

SEQ ID NO: 273885 - DNA, 398 bp, Glycine max
  unsure (1)..(398): unsure at all n locations
gggggtgtggatgacttgtatatagatttctaaaacgcttttctcttttatccccccgctctcttgttctattcatacctaatttttcttatttcttgttgtttatatagaatgataggatgtagttttctatagccagaaaaagaaatgaaatttgcatcgatcttcaaaacaaaatgaaaaaatgtatagagataaaagatagaatataggaaaaagaaaaaaaatagtcactaaatgaagtaattggactttataatagattaatagattacccctattgaagtactttnttttttaatggttcttaatatttttgattttaatatcatttctttttaataccaactcgctctttattattttcagntactaatcctagntatttgatttatata

SEQ ID NO: 273886 - DNA, 361 bp, Glycine max
gaggctcaagacttacatgtgtcagagaattccgagatccgtgatgcctatgttaagctacagattggtaaccagattttgaagacaagaccagttcaatcaaggactatgattctgcgttgggatcaagagctgatgtttgttgctgctgaacccttcgaggaacctctgattgtttcagtggaaaatcgagttggtcccaacaaagatgagactattggagctgttgttattcctttaaaccaaactgataagcgagctgatgatagacttatccttactaggtggtatcaccttgaagagtccatgccatctgcgatgaatggggaacagggaaaaatgagaaagataaatttttagt

SEQ ID NO: 273887 - DNA, 388 bp, Glycine max
gacggctaaaagctaaaaatcatcgaagtactcggattagcatggctgtcacggttgcattcttgaatttgatcatcatgttttcagtagtctctacaagcaagtcactgagcttaaactactattcaaaaacatgccctgatgtggaatgcattgttgccaaggcagtgaatgatgccactgctagggacaaaactgttccagctgcacttctgcgaatgcacttccatgactgtttcagtcgggggtgtgatgcctctgtgctgctaaattcaaaaggaagcaacatagcagaaaaagatgggccaccaaatgtttctttgcatgcattctatgtcattgatgcagcgaagaaagcactagaagcttcatgccccagtgtgggctc

SEQ ID NO: 273888 - DNA, 368 bp, Glycine max
gatctcgacccgaacgtcacggacgcccagctgtgtgatttgttcaaccaattggggcaagtcgtatccgttagggtttgcagggacttgaccagtaggagatcgctcggttatggttatgtcaactttagcaacccgcaagatgctgccagagctttggatgttttgaacttcactcctctcaataacaggcccatccgtatcatgtattcgcatcgtgatcccagtatccgtataagtgggcatggaaatatatttattaagaatttggatagggcaattgaccacaaggcgttgcatgatactttttctacatttgggaatatcctttcgtgcaaggtagctacagattcatctgggcaatcaaa

SEQ ID NO: 273889 - DNA, 313 bp, Glycine max
gatggccgtgtcattgtttggaaggagggcaacggaaaatgaatggactcaagctcatgtgtttgatgaccacaagtcatctgtgaattcggttgcttgggcgcctcacgagttgggtctttgcttggcttgtggctcgtctgatgggaatatatctgttctgactgcaagagcagacggtggctgggacactgtgagaattgatcaggctcatccagttggtgtcacttcggtgtcatggacgccatcgatggcacccggagcccttgtcggtgcaaggttgcttgatccagtacagaagctgtgctctggt

SEQ ID NO: 273890 - DNA, 439 bp, Glycine max
agaagggggatgtaaggaagtagtcacatctgaagagagacaagagcgggcttctttcatagaagaaatcagtagaacagcaccaattaagtatcttcacaagtatcttgcatccaagcaaattgtatcagggaattaccaagatttcaaaagaatgattaccagtctgtggtttgacctttatggccgtggtggcacttctggttcctcttctgcttttgaacatgtttttgttggagaaaccaaacaatgtggtgaagtttctggctttcataactggctgcagttttaccttgaagagcaaaggggagaggtgattatcaaggatatatttttccccgtcgacggggagaaactcctgactcttgagctcagcttctgactattcagtttgaatggaatggtgtcctaaaatctgtatccagcacttttggttgga

SEQ ID NO: 273891 - DNA, 319 bp, Glycine max
gggcgcgaacgagttccagacggagatcaagatggtctcgcgcttccgccacgcgcacttggtctcactcatcgggtactgcaacgatggcggagaaatgatcctcgtctacgatttcatggcgcgtgggaccctacgcgaccacttgtacggttcggagctgtcgtgggagaggaggctgaacatatgtcttgaggcggcgcgtgggcttcacttcctccacgcgggcgtggacaagcagagcgtgatacaccgcgacgtgaagagcacgaacatcctgctggacaaggattgggtggcaaaggtgtcggatttgggg

SEQ ID NO: 273892 - DNA, 316 bp, Glycine max
ggagatcttggatggcaaagaaatagacagatgggttgaaatatagatgagcatactaaacctatacattcactttccaagatccacgtgaagctgcaatacttccatgtttcaaaagacttgagctggggccaaggcattggaagtcctaaattccccggagtgccttacacttctcacacagagacaagggtgtaaggcttctctgtaccaagatgctcatgtcccagacaactttgtccctaaaataccacttgctggaggccacacttaccaacctgatagatgttgtaaagatgtttttgatgaaatcaat

SEQ ID NO: 273893 - DNA, 367 bp, Glycine max
gatcccaagagagttggaaaagaaaggatagagtgaaagaatgggtgagaaaagcaagattttgatcataggaggcaccggctacatcggcaaacatatagtggaagcaagcgcaaaggctggaaatcccacttttgctttggtgagggaatccacactctctgacccctccaaggcacaactcatccacaattttgaggctttgggcgttaatttggtccgcggggatctgaacgatcatgagaagttggtgaaagctatcaagcaagtagatgtcgtcatatccacgctgggtcacctgcagcttgccgatcagctcaagatcatcgctgccattaaggaagccggtaatgttaagaggtttttc

SEQ ID NO: 273894 - DNA, 265 bp, Glycine max
ggactctactagtacatcgtaaaaggatgcattgatgagttttacttgttgcccgatgctttcaaggtgatcaagcagattggtgttatcggttgtggatctcagggacctgcgcatgctcagaatctactgtactcacttgctgaagcaaagtctgatattgtgatcaagattgtactcaagaatggtactagttcctttgctgaagcttacgcaattggattttctgaagagaatggcactttatgtgatatatgggaaactg

SEQ ID NO: 273895 - DNA, 380 bp, Glycine max
ttggggcgcattgaacgaaaattagggtttcgagtgtatcaggaacaagcagcaatggctccgaaggtaacacgcaaggttagcagaaaccccgaattgataaggggaattggaaagtactcgaggtcgcagatgtaccacaagaggggcatttgggctatcaaggccaaaaatggtggcgttttacctcgccacgaccctaaacccaaacctgaaacacccgctgaaaaaccacccaaattttaccctgctgatgatatcaagaagccccttgtcaacaagcacaaacccaaacccgctaagctcaaggctagcattactccgggaacagtgtcgattcttcttgctggtagatttaacggaaagagggtagtcttttt

SEQ ID NO: 273896 - DNA, 312 bp, Glycine max
ggttctagtgtgtgattgtttgttgtcgtaactggttcttcttcttttgttggtctgtgtttgtgtttgttttttctctcacctgaaaatgtcttgctgcggtggtaactgtggttgcggaagctcctgcaagtgcggcaacggctgcggaggctgcaagatgtacccagacttgagctacactgagtcaaccaccaccgagaccttggtcatgggagtggcacctgttaaggctcaatttgagggtgctgaaatgggtgtgcccgctgagaacgatggctgcaaatgtggaccaaactgctcctgcaaccc

SEQ ID NO: 273897 - DNA, 204 bp, Glycine max
gcacattaatctggtatgttcatggttaaccaaacgagtgtcattgttttgtgctgcaaatgtggaattccaatgcaaccaaatgctgctaatatgtgtgttaagtgtctgcgctcggaattcgatattacataatgacttctgaatcttcttatgcttgtgcattgccccgagtgtgatatttactttcaaccaccaagaatt

SEQ ID NO: 273898 - DNA, 333 bp, Glycine max
cggtttaagtaattcgaaacaagcaaactagtcaagctgaatgttatgggtttattgagtttaatagtcgtgctggagctgagagaattcttcaaacatataatggggcaataatgccaaatggggggcagagtttcaggttgaattgggcaacttttagtgctggtgagaggtcgcgccacgacgattctccagattacaccatatttgttggtgacttggctgcagatgttactgattatcttcttcaggagacatttagggctcgttataactcggtgaagggtgcaaaagttgtcattgataggctaactggccggaccaagggatatg

SEQ ID NO: 273899 - DNA, 414 bp, Glycine max
gaagccaaagaaaggaacaagaacaagaacaacaaagtggcgtgaaagagagagagatggaggcgattgttccagtggtggatttccagaggctttcagaggaagaggagcgcaagaagctgagaaaaacatgtgagaaaccagggtgtttcagaatcatcaaccactcaattccactaacactcatggctgacatgaagtcagtggttaaatacttgcatgaccttcccacggaaatcaaaatgcgcaacaaaccctccgtccctgagagtggctatagggcggcaatgccaacaagtcctctatacgagggcatgggaatatatgacatgcatgcctcaccacaagcatttgaagatttctgctccaacttgaatgtgtcaccccgtcacaggcaaataataaaggaatatg

SEQ ID NO: 273900 - DNA, 402 bp, Glycine max
ttgtggagagggagaagagtacgacggtgttcaatgccggcgtcaacttcaacgaggacttctccgccgcgatgcagcgcgtggtgaaaaccgtcgacacgtatctcgccgagatcgccgcgtacggcgaactctccatctcgaaattcaacggcatcgcaatcctcattcccaaaggctcgagaaaatccgacgacgatctataccgcgccgtcgatatctacctcaaggtgcacccgaacctggacgagatagagaaggagaaagtgtgcagcgtattggacccgttaaaattgtcctacgaggcgcgtgtgcacgcgtcaaagaacaagcgcttgccgctgcagatcgtgcttcacgcgctgtactacgatcagctacatataaggagcgggacggcgg

SEQ ID NO: 273901 - DNA, 248 bp, Glycine max
ggtagttccaccgagtagcaacaatgtcgaagcgaggtcgcggaggatcggcagggaacaagttccgcatgtcactgggtctgccggtggcggcgacggtgaactgcgccgacaacaccggcgcgaagaatctctacatcatatcagtgaaggggatcaagggaaggctgaatcggttgccgtcagcttgcgtgggtgacatggttatggccaccgtcaaagaagggaaagcctgatcttccgaaaaa

SEQ ID NO: 273902 - DNA, 413 bp, Glycine max
  unsure (1)..(413): unsure at all n locations
ggagagaagggaagagaagagggagaagacgaagaagaatccaaaagcaatcccatctgtgtgtttgcacatcagaagggagggctatcaaactcaaagtggttgtgttggatgctataaaaggcctacactgagtgctactgtggatgtgccatcgaaagggttggcaacacaaggtaacggagtgaggaaaccaagttcatcagaagatttttggaccactagcacgcatgatatggacaacagcgctgtccagtcacaagggagcatctcttcagccagtctaacaaaaccaagctgggttcttcatgctggttcttncaaaagcagcaccaaccccactgaatttgtaaatcacggtgtaattctttggaatcaagactcgcaacgatgggttggaaataaaaagctcg

SEQ ID NO: 273903 - DNA, 381 bp, Glycine max
ggattggccattgatgcatatggtccaagcagtgacgatgctggaggtattgctgaaatggctggtatgagtcacagaattagagagagaactgatgcccttgatgctgccggaaacacgactgccgctattgggaagggatttgccattggttctgctgcccttgtatcactggccctctttggtgcctttgtgagccgagctgctattacaactgctgatgtgttgactccaaaggttttcattggtttgattgtgggtgcaatgcttccttactggttttctgctatgactatgaagagtgtgggaagtgctgctctgaaaatggttgaagaagtacgcatgcaattcaacaccattcccaggttgaaggaaggaact

SEQ ID NO: 273904 - DNA, 344 bp, Glycine max
gaatacaagacgtgtctataaaaagttaacatgacctgttccaatgagcaacaaagagagcaaggagagaggagatgtcggtggagcagaaagcagcagggaaggaggaggagggaaaactgcagaagggaattgcagagttctacgacgagtcgtctggcatatgggagaacatttggggcgatcacatgcaccacggcttttatgacccggattccaccgtttctgtttctgatcatcgcgctgctcagatccgaatgatccaagaatctcttcgttttgcctctctgctttctgagaacccttctaaatggcccaagagtatagttgatgttgggtgttgc

SEQ ID NO: 273905 - DNA, 335 bp, Glycine max
ggaacaaagtttgatgtcattcttgtagatcccccatgggaggagtatgtgcaccgtgcccctggtgttgctgatcacatggagtactggacatttgaagaaataatgaatctcaagattgaggccatagcagatacgccatctttcatcttcctttgggtgggtgatggtgtaggccttgaacaaggtcgccaatgtctaaaaaagtggggctttcgtaggtgtgaagatatatgttgggtaaagacatacaaaagtaatgcaactccaggactgcggcatgattctcatactttatttcaacattcaaaggaacactgcttgatgggcataaa

SEQ ID NO: 273906 - DNA, 364 bp, Glycine max
gattgaagatggtgtctgacgcgagcaagaagaaggctgcgcagaagaaggcggcggcagcggccaagagaggaggcaaagcagcagctgcttcgtcgaaaacgacgtcgtcggagaaggccgccgacaagcttgccaacggaattggggaaattcagatatccgatcgaacctgcaccggtgtcctctgctcgcatcctctttccagggatattaggatagaatctctgtcagttacttttcatggacatgatttgatagttgattccgaattggagctaaattatggaagacgttatggcttgcttggattaaatggttgtgggaagtctaccctgcttacggcaataggttgtcgagagct

SEQ ID NO: 273907 - DNA, 319 bp, Glycine max
  unsure (1)..(319): unsure at all n locations
gaggtactggaataatgaggaggttttgcagaagttgggacaagccatgggtcttgccaattcgggagatgcaggtgcctctgctgaaaattctggggcagatgagaccgaagatttgggaaatgaagatgaatcaattgttcatcatactgctagtgttggtgatgtggagggcttgaaaaatgcactagcctctggtgctgacaaggatgaagaagattcatagggaagaactgctttgcattttgcctgtggatatggcgaggtaaaatgtgctcacgttctcctcgaggctggagcanaagtggatgctttggat

SEQ ID NO: 273908 - DNA, 323 bp, Glycine max
gagagaacctaagagatataaataagccataataaggattcgattcggaaaagaagaaaagacattcaacaaacaacgcaatgggtattccgtcggaactgagggacatgttgttgcccaacaaaaaaggcgtcctcgttgcctctcccgcaaaggacaggaagactttgaggtccaagcaatgcactaaggaaggtgtgcgagctggattcaaggctgcttccattgctggtgttgccagtgctgtgcctacattggctgcagttcgtatgattccatgggcaaaggcaaacctcaattatactgctcaggcacttatcata

SEQ ID NO: 273909 - DNA, 407 bp, Glycine max
catatagatggttggtatctaagataagaaaatttatgataccgatgtaaattcaggtcttcatggtttaacgaaaatcatagtttttcaatttctacgcaaatcaagataaagaaaaggcagttttccaatcattgactcaaacccattgttgaaccgaatcccactgagtggaatatggaggtacttatggcagaacgggccaatctagtctttcacaataaagtgataggtggaactgccattaaacgacttattagcagattaatagatcactttggaatggcatatacatcacatatcctggatcaagtaaagactctgggattccgtcaagctacggatacatccatttcattaggaattgatgaccttttaacaataccttctaaaggatggctagtcca

SEQ ID NO: 273910 - DNA, 401 bp, Glycine max
gatgaagtaactgtggcgggatttgaagttccaaaatctcctgattctagttataacaatgtctaccctggaaatgaagatgaggcaagggatccacctatggtcccttcacatttacagcatactttgctaaattatcctgctaatagagacactgcaggaactgttccattgcctcagaatgtgattctaaatcatctttacatcgagaatagagaatcaccaagatctgtggtggcgttgggattcactcatcgtttccactctaaatatgttacagtcgtgctttacaaaccagtccaaagaaggggaaatacaagcatttagtgtgcataatattaaaaacctcgatcaccgatggtttgtaatgatttattgtagactccatattctaattactg

SEQ ID NO: 273911 - DNA, 422 bp, Glycine max
ggttctagtgtgtgattgtttgttgttgtaactcgttcttcttcttttgttggtctgtgtttgtgtttgttttttctctcacctgaaaatgtcttgctgcggtggtaactgtggttgcggaagctcctgcaagtgcggcaacggctgcggaggctgcaagatgtacccagacttgagctacactgagtcaaccaccaccgagaccttggtcatgggagtggcacctgttaaggctcaatttgagggtgctgaaatgggtgtgcccgctgagaacgatggctgcaaatgtggaccaaactgctcctgcaacccctgcacttgcaagtgaggtgttgggagagcaagcttcaagcaaagatagcccttaattaggaataatgataaactattaatgtgtagctaaaaacttatgtattatgtct

SEQ ID NO: 273912 - DNA, 345 bp, Glycine max
ggaagcagttgaagatggagcacgacgaagacgaagagccacctcttgctgttcagattcaagggaatgatgaatccgtttctcagcaatcttcttctgttggggtcactctcatcaccggttatcttggttcgggcaagtccactctagtgaatcatattttgaattcgcaacatgggaagaggattgctgtcattttaaatgagtttggtgaggaaattggcgtcgaaagagcgatgatcaatgaaagagataagggtgcattggttgaataatgggttgagcttgccaatgggtgtatatgttgcacagtcaagcatagtttggttcaagcacttgaacaac

SEQ ID NO: 273913 - DNA, 395 bp, Glycine max
gaacatgaagaagagaagttgctcaagggactcgtgctcatttgttggtgattatctggaattgcgtaagcatgcaaggagagttcatcctacttctcgtccctctaatgttgatcctacaagagaaagagcctggcgacattttgagcgccaaagagaatatggtgatattgtgagtgctattcagtctgccatgcctggagctgtgctagttggggactatgctcttgagaacggagatggtattggtaggttacaagatgaacgtgttgaaggcaacattgacaatgctaacaagccttggttagccaccactatcttgtttcagatgatggatagcaccattgaaattgttagggaaccaagagcacattcgagtgcatggacaaggcacc

SEQ ID NO: 273914 - DNA, 342 bp, Glycine max
gggcaactggatggttgcatgatcgaatacgtgttgtggtctcaagtttctttgtgaaggttctgcagcttccttggagatggggaatgaagtatttctgggacacccttttggatgcagatcttgagagtgatgctcttggttggcagtacatatctggcactctccctgatggtcgcgaatttgaccgaatagataatccacagcttgtggtctacaaatgtgacccaaatggagaatatgtgcgacgctgtcttcctgaacttgctagattaccaactgaatggatacaccatccatggaatgcaccagagtctggactccaagctgctggaattgaac

SEQ ID NO: 273915 - DNA, 360 bp, Glycine max
cggagaaacatgaaggcctaagctatgttgggattcacattccagttggtagagtccaagcagatgacatggatgagttggctacgttagcctacgaatacaccaccggtgagctcatgctcacagtggagcagaacattataatcccaaatgtggacaataacaaaattgatggcttgctcaatgagcctctctcgaaggggagattctcacccgaaccttctctattgatgaagactctggtggcatgcactggtaatcaatattgtggacaagctataattgagacacatgaaagggcattggaagtgactgatgaagtggagaggcaaagtgctgtgactaggcctgtgagaatgc

SEQ ID NO: 273916 - DNA, 378 bp, Glycine max
gtagtgaaacatggcatagtaaagcttttggatggcattgagaaatatgaggatggaaccttctattttgatgagaaatgtgttggtggacatgagcaacggggttctctttccacaacttcttcagttgttagaggggttactgcatttgctgctgtaacttctggaaaaataaatcttccaggggataaaatattgggtctggcaaaatttttcttgggcattggaatccctggagatgccaaggacttgttcaatcaagttgagtcattagcttttctagagagcaacaggatttccattccatcgatattgtcactgccagaaacagcttattcattggccatgaaaggccagcttaaggtcgaggtgaataca

SEQ ID NO: 273917 - DNA, 403 bp, Glycine max
gagcgaaacagagagtgatttcagtgagtgatcggtgttcacttgatctcatcataatcgtcagcgtcaattgaagaagatgccgatcagaaacatcgccgtcggaaggcctgaagaggcgactcaccccgacacgttgaaggcggctttggccgagttcatctcaaccttcatcttcgtgttcgccggctcaggctccggcatcgcctacaacaagctcaccgacaacggcgctgccacccctgccggcctcatctccgcctccatcgcccatgcattcgccctcttcgtcgccgtctccgtcggcgccaacatctccggcggccacgtcaaccccgccgtcaccttcggcgccttcgtcggcggcaacatcaccttccttccgcgcatcgtctacgtcatc

SEQ ID NO: 273918 - DNA, 413 bp, Glycine max
acgcgtccgaacagctgcgaaaggactttagaaggggagaaggaaaatatgtgagctgagatgttccaagacaattaattcatggcactatggtaaatgtgagacagaaaatcctagctgatgcatcaggtgctatgtctcgagcagttagcattgctacaagaaatagagctggtagaagacagtttcgatcacatattggagggctagaaacacaagtgattgattacaatacacaacaggctatgctctaacctgtgctggctgatgcttatgctattagatttgcgggtggatgtgtgaaatggctttatatcgatgtgacggaaagattgcaagctaatgattttgcaacaatgcctgatgctcatgcatgccctgatggattgaaatccttgactactacagcaact

SEQ ID NO: 273919 - DNA, 411 bp, Glycine max
ggaagaaaggcagagttattgccattgcctctgcctcttgcaacaccaaactgatacacacttaataatattatagtaaaaattagccaccaaagtacactaaccccttttttcatacaactcaatagctggattggagcaaggtgaaagtaaaatcatttgcaaccaatgccgttgaacatatttcaggacaaagatggattgccacggattatattgactgagccaaagggttcatcagctgaggttcttctttatggagggcagattatttcttggaagaatcatcgaaaggaagaacttctttttatgagcagtaaggctaacaagaaacagcataaagcaatcagaggaggaatatcagcttgcctagcacggtttggtgatctcagttcacttgaacaacatgga

SEQ ID NO: 273920 - DNA, 334 bp, Glycine max
tgaatacaagacgtgtctataaaaagttaacgtgacctgttccaatgagcaacaaagagagcaaggagagaggagatgtcggtggagcaaaaagcagcatggaaggaggaggagggaaaactgcagaagggaattgcagagttctacgacgagtcgtctggcatatgggagaacatttggggcgatcacatgcaccacggcttttatgacccggattccaccgtttctgtttctgatcatcgcgctgctcagatccgaatgatccaagaatctcttcgttttgcctctctgctttctgagaacccttctaaatggtccaagagtatagttgatg

SEQ ID NO: 273921 - DNA, 387 bp, Glycine max
cttgagagaaatggatatcttctgttgaatgaaaaaggagagaaaatgaaggagcaacttgcagttgataggaccaactgtattgattgtatataccgtacatatgtatctcagagcatgataggctgtaatatgttgtaatataagtttagaaggcttggtgtctttggtgctgaagaaaccattagttcacattcaaatatggatgaaaactttaagatctcgtggactaatcatgaggatgatataagtatacaatactcaggaactactgctcttaaacgagactttgacagatttaggcaccgcacaattgaagggatactacaagatggtgtcaatgctcttctacgatattatttcaataattctgatgatggaacgaat

SEQ ID NO: 273922 - DNA, 327 bp, Glycine max
ggagcaagagtgaagagcgaagagaatggctcccaagggtttaatctttttggctgtgttatgcttctcagcactgtcactgagtcgttgtcttgcggaggataatggacttgttatgaacttctacaaggaatcatgccctcaggctgaagacatcatcaaagaacaagtcaagcttctctacaagcgccacaagaacactgctttctcctggctcagaaacatcttccatgactgtgctgttcagagttgtgatgcttcactgttgctggactccacaagaaggagcttgtctgagaaggaaacagatagaagctttgggttgag

SEQ ID NO: 273923 - DNA, 387 bp, Glycine max
ggcagtgttgccattaacacaaacatcttcaatcttcatctccacctgcattcccaattcctctctctatccatggccgattcaacctcaagcgattcactctcactcgacatcgattccttttctccttcacctcaggaacatatcatcagaacacgtcacggttctgtatctgttgctgtatatggagaccaggataagccagctctaatcacatatccggatttggctttaaattatgtctcctgctttcaggggttattattttgtcccgaggcatattaccttctgctccacaatttctgcatttatcatattagtccacctgggcatgagttgggagctgctgcaatcgatcaagatcacccaattctttctgtagatgat

SEQ ID NO: 273924 - DNA, 422 bp, Glycine max
ggttctagtgtgtgattgtttgttgttgtaactcgtgcttcttcttttgctgttctgtgtttgtgtttgttttttctctcacctgaaaatgtcttgctgcggtggtaactgtggttgcggaagctcctgcaagtgctgcaacggctgcggaggctgctagatgtacccagacttgagctacacttgagtcaaccaccaccgagaccttgttcatgggagtggtacctgttaatgctcaatttgagggtgctgaaatgggtgtgcccgctgagaacgatggctgcaaatgttgaccaaactgctcctgcaacccctgcacttgcaagtgaggtgttgggagagcaagcttcaagccagatagcccttaattacgaataatgatgaactattaatgtgtagctaaaaacttatgtattatgtct

SEQ ID NO: 273925 - DNA, 407 bp, Glycine max; identical to SEQ ID NO: 236337

SEQ ID NO: 273926 - DNA, 427 bp, Glycine max
ggagaagcattagcaaaagcaagaagaactagtctaagcagaaatggcctcttcagtgatggcatctgtggccctcaaacctgcccctttcactgttgagaagtcctcagttagaggccttccctccctctcaaggaactcctcttcattcagagttgtggccagtggtggcaagaagatcaagactgacaagccttatggaattaatggtggcatggctttgagggaaggagttgatgcatctggcaggaaaggaaagggaaagggcgtttaccagtttgtagacaaatacggtgctaatgtcgatggttacagtcctatctacgacaccaaggactggtctccaaccggtgatgtctacgctggcggtacgactggcttggctatctgggctgtgactctacttggtcttcttgctggtggtgca

SEQ ID NO: 273927 - DNA, 357 bp, Glycine max
ggcagcgcttgagaccaagccccactcaaccaccacaccactctctctgctcttcttctacctttcaagtttttaaagtattaagatggcagagacattcctatttacctcagagtcagtgaacgagggacaccctgacaagctctgcgaccaaatctccgatgctgtcctcgacgcttgccttgaacaggacccagacagcaaggttgcctgcgaaacatgcaccaagaccaacttggtcatggtcttcggagagatcaccaccaaggccaacgttgactacgagaagatcgtgcgtgacacctgcaggaacatcggcttcgtctcaaacgatgtgggacttgatgctgacaactg

SEQ ID NO: 273928 - DNA, 414 bp, Glycine max
  unsure (1)..(414): unsure at all n locations
gaggtgtgaagatggatgtggcagctaagtctgagtcaaaggacaaccttcccttgttactcacccaatctgctgaccctctcaaaaggacagggacggtgtggacagcagtggcacacatagtgacaggggtgataggatcgggagtgctgtctctgccatggagcactgcacagcttggctggcttgcaggcccattctccatccttctcattgcttccatcactctcttctcttcttttctcctatgcaacacttatcgccatccccatcccgaatatggtcccaataggagtgcctcctaccttgatgttgttcatttgcatttaagaataagcaatggacggctcancggccttcttgtgaatataagtctgtatgggtttgcaattgccttcgtcatcacaacagcta

SEQ ID NO: 273929 - DNA, 339 bp, Glycine max
  unsure (1)..(339): unsure at all n locations
ggaggcaatagtagcagcaattcacactggtctttgcttctcgttactcatttctcacctaactttctattcttctcagtctcagatcagaaccttagccatggcagcgttccagaagatcaaggtcgccaaccccatcgtcgagatggacggagatgaaatgactagggttatctggaagtcaatcaaggacaagctcattttgcccttcttggagttggacatcaagtattatgacttangccttccttaccgtgatgagaccgatgataaagttacaattgaaagtgcggaagcaactctcaagtataatgtggcaattaagtgcgcaactattac

SEQ ID NO: 273930 - DNA, 388 bp, Glycine max
gggttctagtgagtgattgattgttggtgtaactcgttcttcttcttttaacgctctgagatcgtgtttggttcttctctcacctaaaaaattctagctgcagtggtaactgtggttgcggaagcttcttcaagggcttctacggctgcataggcttcaaaacatactctgacttgagctacactgagttaactaccacctagaccttggttatggtagctgcacctgctaatgctcaatatgaagttgctgaaataggcgtgcccgataagaacgattgctgcaaatgtggaccaaactgctactgcaactcctgcacttgcaagtgaggtgttgggagagcaagcttaaagcagagattggccctaattatgaataatgataaact

SEQ ID NO: 273931 - DNA, 426 bp, Glycine max
ggatccaatcaagaatacaataacatagcgtagagtgagaagtgagaagagaaaaatggcaatctccatacccagtagacaacttttcatagatggagagtggaaagtccctcttctcaacaatcggtttccgatcatcaaccccgctactgaagacatcatagggcatattccagccgctactaaggaagatgttgaccttgcggtggatgctgctaaaagagccttttcccataacaaaggcaaagattggtcttcagctcctggctctgttcgtgctcgctatcttcgagccatcgcttcaaagataacagagaaaaaggatgaactaggaaagcttgaagcaattgattgtggaaaaccactagatgaagcactggcagacctggatgatgttattggttgttttaactactatgccgagct

SEQ ID NO: 273932 - DNA, 364 bp, Glycine max
  unsure (1)..(364): unsure at all n locations
gaagaggaggaggagttgaagaagaaggagccctttgggttctctcgctccaacaacaaggctgcttctaagcctctctctcgtggagcaacaactgtgaaatctgtggaatcaaaggggcaagctgagaagtgcgccaagagaaagaggaagaaccagtatcgcggaatccgccagcgtccatggggaaagtgggctgctgagattcgcgacccaagaaagggggttcgtgttaggcttggaactttcagcactgctgaagaagctgcaagagcttacgatgctgaagcaaggaagatccgtggcaagaaagccaaagtgaatntccctgatgagccttcaggcgctgctttctcaaaacgtc

SEQ ID NO: 273933 - DNA, 372 bp, Glycine max
ggttggaaggatcagcacgacactgagcatcagcaatggcaagcgcaagtgttggtaaagaactgacgctgtattcgtattggaggagctcttgttcccaccgagtccgaatcgctctcaacctcaaagggcttaaatacgaatacaggcccgtcaatctgctcaagggagaacaatctcgccctgagtttctccagctcaatcctgttggttgtgtccccgttctagtggatgaccacgttgttctctatgactctttcgccattattatgtatttggaagataagtatcctcacaatcctttgctccctcatgatatttacaagagagcaatcaattttcaggctgctagtggtgtttcctcaacaatac

SEQ ID NO: 273934 - DNA, 391 bp, Glycine max
gaaggagaaaagagtgacactaatttcaaatggaaattgctctctcataacagaattcaagaggaggaagaacaagtatataaaaactatatctacatagttatatctctctcttgagatttcaaacgtagagatatggaatggaggaagtgctacttggatgtgatattggtgcccttgggatttctaacaagcattgggtaccatttctggctatggcacaaggttcgaactcagccacacacaaccatcattggcatcaatgctagtggccgtagaaattgggttaatggcatgatgaaggacaatgacaagaaaaacattctgactgttcaatcactaaggaacacaataatgggtgctactctaatggccacagcccccatcctac

SEQ ID NO: 273935 - DNA, 395 bp, Glycine max
gggaaagtgaaagagtaagacaccacaaagtgtaacttgagtgattatatctgatgagtgcagaaagaagggaggattgttggtggtcgatcatcgatcatcgatcatcgatcatcgatggcgtctgctagccttggaagtggtggggtgggcagttccaggtctgttaatggtggcttcaggggttcttccagttccgtcgattggcttggcagagagatgcttgagatgtctttgagagaccacgaggacgatagagatagtgagcctgacatcattgatggtttgggtgctgagactggtcacgtgataagaaccagcgttggtggccgaaatggtcaatctaagcagaatgttagttatatttctgagcatgttgtgggaacaggctcttt

SEQ ID NO: 273936 - DNA, 422 bp, Glycine max
gttgatgaagaaggagtatgggtattccatgagggtgctttctttccagatacagacttcggatatcatacctgcttttccctatgtggcgccattttcgtccactgtgccagattgttgtaggattgtgcggtccttcattgaggattctgtgagtttcatgtcatatggagggcagcttgagttctatgaagttgttaagaagtatttacacaggcttttgagtgaggttttggatgaatctttagtgaagcttatcaatacatcaattaatggggtttcccaggcaatgcagatggcagcgaatatggctgtcttggagcgcgcttgtgatttattctttcgccatgctgcacagctttcaagtgttcccttgagaatggtggagagaagcagaatgaacttccctctaagaaaagctc

SEQ ID NO: 273937 - DNA, 358 bp, Glycine max
  unsure (1)..(358): unsure at all n locations
gacccaccaaacattctcaaaccaaagccatgaccaatatggaatccaccacacctatactcactcctctagtgctcctcctcctcttctctctagccaaagggcttcacaaccccaaatgtgatgctgcctatcaacatgaccatgatggctcaaccctccaagtgttccatgtgttcagcccttgttccccattcaggccctcaaaaccaatgtcatgggaagagagtgtcctacagctacaagccaaggaccaagccaggatgcagtacctttctaacttggtggctagaagatccattgtcccaattgcctcagggagacanatcacacagagccctacatacttagtgagggc

SEQ ID NO: 273938 - DNA, 342 bp, Glycine max
ataaggaaggtgatttagtgtggggctttaccaaatgggaagagtattgcttggtacccttagctcaaatactcttcaaaattgagcacactgatgttccacttacctactacactggaattcttggtatgccaagagtgactgcatatgcaagtctatttgaagtaagatctcttcagaaaggagaaaatgtttttgtttcggctgtctctgtgcgcacatggtcaacttgttgggcaatttgctaaactgaatggttgttatgtagttggaagtgctggatctaaagagaaagtggatctgctgacaaataaatttggatttgatggagggtttaactac

SEQ ID NO: 273939 - DNA, 384 bp, Glycine max
ggaggcaagaagttgtattttggcatccccgtggcttcaagaagagaatctcaatggaggcccaggagctgaagcgcgtgttccagatgttcgaccgcaacggcgacgggagaataacgaagaaggagctgaacgactcgctggagaacctgggcatcttcatctctgacaaggacctgagccaaatgatccagaggatcgacgtcaacggcgacggttgcgtggacatggacgagtttggggagctgtatcagaccataatggacgagcgcgacaatgaggaggacatgagggaggccttcaacgtcttcgaccagaacgccgacggcttcatcaccgtcgacgagttgaagaccgtcttgtcctccctcggcttggagcaag

SEQ ID NO: 273940 - DNA, 369 bp, Glycine max
ggagagagcacaatcacttgcttaaacttcactccgagagttacgattatggcattgaatttgagcatgttaccattgctctgcgttttgtctctttttgttacctcggccatcacaattactctttccaagagcgttgcacccattcatgacgtttcttatctcaaccggagcagtttcccgcaaggctttattttcgggtcagcatcctcagcatatcagtatgaaggtgctgcaagggaaggtggaaaaggaccgagtatatgggatactttcactcataaatacccagaaaaaataaaagatggaagtaatggagatgtagcggacgactcatatcatcggtataaggaggatattggaatcatg

SEQ ID NO: 273941 - DNA, 416 bp, Glycine max
ggtgacaaatggagggtccttagttctggtggtctttcttctctctgttctctcaaccaagttctcaattcaatcttcttcacccttttgatctgctaattctcaaggtattcaaaattgggaggttttcgtttgaattgtgatgtccaagccactgctaggcataggggaggaggaaggtcaaagcaatgtcactttgttggtttcttcctcagtcatcatggaaagtgtgtgcctgaatagctcaaaattgaaagagcgcaactacatggggttatctgattgttcatctgtggacagctccgcgccgtccttctcagatgagactaaaagcaatctgaaccttaaggctactgagctgagactgggacttccgggattgcagtctcccgaacgagattcagatctttgcttga

SEQ ID NO: 273942 - DNA, 358 bp, Glycine max
gaatgtaacacttttgagttgcattgttgcatcaccgcaagtccacaacatggctgccactgccgctgcaggcatagcttacttgttttcttcttctattaacagcgtcaaatgtcttcgttcctccaagaactgctccattatagacccccttataaccacagtgccctcaaaccgaggcatgtttgtgtcacacttggtggaacctttgaccattgggggtgccattaattcgcacaagttgtgggggcctataatttctgctgctgttgcacaagatgaggctgttgttgtcgctgatgatgaagtaaatgatggcgctggattaggtgaacaagagatagggatgagaatgaac

SEQ ID NO: 273943 - DNA, 316 bp, Glycine max
ggagagagagagagagagaggcacttggaatccaaaaatgagagaaatcatcagcattcacataggtcaggccgggatccaggttggcaactcctgctgggaactctactgcctggaacatggcatccagcccgatggcatgatgccaagtgactcctccttcggtgtagcccacgacgccttcaacaccttcttcagcgaaaccggatccggcaagcacgtccctcgcgccgtcttcgtcgatctcgagcccaccgtcatcgacgaagtccgttgtggcacttaccgtcaactcttccaccccgaacaactcatc

SEQ ID NO: 273944 - DNA, 336 bp, Glycine max
gtagtagtgaagaaaatgaaagtccttgttttctgtgttgctatagttctagcagcatggcattgccatggctcagaccatgaccatgaccatggccacacctaccaaattttccctctgagaatgaaaactggccatggtggccactacattccggaggtatcatgccaaagttggaggcttggtgtggaagcacacaacgtcattgactggaaaaccgttcctcaagattgcgagggatatattgggaactacatgcttggcgaacaatatagatcagactccaaaatagttaaccaacaagcttatttctatgctaaaaccctcaatatcact

SEQ ID NO: 273945 - DNA, 386 bp, Glycine max
ggcggcataaaggaccaaccatgtcgcctagtttcgtcttcgacccgcctagcgacgaagaaatcgaacactctgaacacgaagaagaagaagaatccgaagaagaaccagagtcaggatcaggaacaggatcagaatcagagtcagaaggagaaggagaagaagaagaagggcacgaagaagcgcgggttccgaagaagaagaagaagaaaacgcagtctccatgggactttgctaaatacacggaatcagtggcggaggaacacgctcgcaggagcacaacctcggtcgacgagaaaatctccaaagcactcaaacaacgttccacgccgctcgttgctgagctggaccacagctccgagtccgaacctgatgaacaagaagat

SEQ ID NO: 273946 - DNA, 351 bp, Glycine max
gacactaaacaaggtaaaagaagagcatcactgtgctaacaaagcaaccctatgtcgaaggtggtttgtgtcaccggagccagcggcgccatcggatcatgggtggtcctactcctcctccagcgtggttacaccgtccatgccaccgtccaagatatcaaggatgaaaatgagacgaaacatttggcggaaatggacggagcacagagtcatctacatttttttcgaaatggatcttcttgacatcgactccattgccgctgccataaagggttgatcctgcgtaatccaccttgcatgtcctaacatcattggtcaagtcgctgatcccgagaaacggatatttggacc

SEQ ID NO: 273947 - DNA, 402 bp, Glycine max
gtctccagtatttgtagcctccacacttttggatgatggtggagttccacatggcgtgagtcctgcatcacttttaaaagaagccatccaggtcatcagttgtggttatgaagacaaaacagaatggggaaaagaagttgggtggatatatggttctgtgacagaggatatcttgactggatttaaaatgcattgccatggttggcggtctgtgtattgcattcctaagcggcctgcatttaaggggtctgcgcctatcaacctttcagatcgtctgcaccaagttcttcggtgggctcttgggtctgttgagatttttttcagcagacattgttcaatctggtatggctatggtggtggaatgaaattggtggaccaattttccacattaactcgggcgta

SEQ ID NO: 273948 - DNA, 406 bp, Glycine max
gggtgaccccagatgaaccagggactcgccatgtgcaatatggcacatcaaaggataagtttaaaactagtgcagaaggcacagttgcaaactacactttctataactacaagtctggctacattcatcattgtcttattgaaggccttgagtataagacaaaatactactatagaattggaagtggtgattctgctcgagacttttggttcgaaacacctcctaaagttgggccagatactccctacaaatttgggatcattggtgatttggggcaaacgtttaattctctttcgacccttgagcattatttggagagtggaggagaggctgtgttatatgttggagatctttctcattctgatgaacatgactacaaaaatttgggtttacggtgggatacatg

SEQ ID NO: 273949 - DNA, 363 bp, Glycine max
cggttgacgtgtggcatgaaattggggggtcctttagaattgaaaagcagccatcaaaggttatggtttatgtgcaaggtcctgcttctggtgtggacttaatggttgctggacttcaaatttttcctgtggatagacacacaagatttagatatttaaagatccaaactgataagattcgtaaacgcgatgttatcctgaaattctctggactggactctggcagctatgctaacacctcggttaaagttatacaaacacataatgatttccctattggaacatgcattatctgaacgaacattgacaaccaggactttggttacttcattgtgaagcattttaactgggcctggggtttgg

SEQ ID NO: 273950 - DNA, 318 bp, Glycine max
ggaggataatggactggttatgaacttctacaaggaatcatgccctcaggctgaagacatcatcaaagaacaagtcaagcttctctacaagcgccacaagaacactgctttctcctggctcagaaacatcttccatgactgtgctgttcagagttgtgatgcttcactgttgctggactccacaagaaggagcttgtctgagaaggaaacagatagaagctttgggttgagaaagttcaggtacattgagaccatcaaagaagctttggaaagggaatgcccaggagttgtttcctgtgctgatatcctcgttctctc

SEQ ID NO: 273951 - DNA, 323 bp, Glycine max
ggcggcaatagagagtagagagtaaacagaaaatctgaggcgcgagtggctggtgaaggcagcgactgcgagggaagggaagcatctttagctccaaatccaatggcggatacctcaagccgatcaagagacctcgacaagctccttctccgccctggcaatctcgtcggtcctaggttcgaacctggccctgagttgcgagatgaccttcaggccttcgccaaagtgttggtggttggggctggtggcttgggttgcgaattgttgaaggatttagccccctctggtttccgaaaccttgaggtcattgacatggatcgcat

SEQ ID NO: 273952 - DNA, 406 bp, Glycine max
ggcacaagtgagtttgttgatcgagataactagaaacagtgtgatgaaaatgaaggtccttgttttcttcgttgctacaattttggtagcatggcaatgccatgcgtacgatatgttccctctccgaatgaacactggctatggtgcccgtactccggaggtgaaatgcgcaagttggaggcttgctgtggaagcacacaacatctttggctttgagaccattcctgaagagtgcgttgaagcaacaaaggaatacatccatggcgaacaatatagatcagactccaaaacagttaaccaacaagcttacttttatgccagagacctcgaagtccatcccaaggacacatttgtgttcagtatagatggcaccgtactctctatttttcatactacaaaaaacatg

SEQ ID NO: 273953 - DNA, 394 bp, Glycine max
gaagaaagagatgagaacaaacaagaatcaagagagagaggtgttactacgttagtctatgaacagtcaccccgagagactgaaatttccagaccctcaaatcaaactcttctattctctcatcaatcaatcaatccagttccctctcggataggaatgggaatatatctcagcactccaaaaactgaaaagttttctgaagatggtgaaaatgactgtcttagatatggtttatcatccatgcaagggtggcgtgcaacaatggaagatgctcatgctgcatatactgatctggatgagtccacttcattttttggtgtctatgatggccatggaggtaagggtggtgcaaagttttgtgccaagtttcttcatcaacaggtgttcaaaagtg

SEQ ID NO: 273954 - DNA, 350 bp, Glycine max
gacagcagtgaagtgagttaaaagaaccgataatagttgttccttcactctccgctctctctgccactgagccaagaagatggcctcacaggtttgcaaatctgcttccagagccgcgaggtcccttctatcctctcgttttcactctcaaggacgtgcgcttggggctgctgcggctgtttcattgagcagcaaagtgcctcttttttacggaaagaacggttctggaaatggatccgcttcttcatcatcatcatcatcatggatttcaggagctcttgctcttcctgccgcagcttacatgttccaagatcaggaggtgcaagcagctgagctggagcgcactttca

SEQ ID NO: 273955 - DNA, 410 bp, Glycine max
gattggtggtttggtatacaactaaatccacagttcatgggtatcgacctcaaatttttctttgttagagctggaatgatgggatggctacttatcaatttatctattcttatgaagagcattcaagatggtactttgagccagtcaatgattctctaccagctattctgtgcactatacatcctggactattttgtacatgaagagtacatgacatccacctgggacataattgcagagagactgggcttcatgttggtctttggagatttagtgtggattcctttctctttcagcatacagggatggtggctcttgatgaacagggtggagttaacaccagctgccattgtagctaattgctttgtgttcctgattggatacatggtatttcgaggagcaaacaagca

SEQ ID NO: 273956 - DNA, 357 bp, Glycine max
ggaggcaaggagttgtattttggcatccccgtggcttcaagaagagaatctcaatggaggcccaggagctgaagcgcgtgttccagatgttcgaccgcaacggcgacgggagaataacgaagaaggagctgaacgactcgctggagaacctgggcatcttcatctctgacaaggacctgagccaaatgatccagaggatcgacgtcaacggcgacggttgcgtggacatggacgagtttggggagctgtatcagaccataatggacgagcgcgacaatgaggaggacatgagggaggccttcaacgtcttcgaccagaacgccgacggcttcatcaccgtcgacgagttgaggaccg

SEQ ID NO: 273957 - DNA, 418 bp, Glycine max
gattcatcttcaacttatattctgcataaacacatcaaactattagcaatttagcaccttctactactttgtaatcgttcaagagttgtgaactgtgaagaatgagttcaacaagccgtgcttggacttggagcgtggcagcaagtgttggagtggtggaggccttgaaggaccagggtatatgcaggtggaacagtgtgatgagatcagcacaacaacatgctaaacataatatgaggtctttgtctcaaaccaagaagttttcttttcaatcatctgcgatggcttctgccaaattgaaagatgagaaagctaagcagtcagaggagtctttgagaacagttatgtacttgagttgctggggtcccaactaaacaaagatgctaagacttcatgcaattttggatttccctttttt

SEQ ID NO: 273958 - DNA, 399 bp, Glycine max
  unsure (1)..(399): unsure at all n locations
gttgccaagaaatttggtgttaagctaaccatgttccatggtcgcggtggaactgttggaagaggaggtggacctactcatcttgctattctgtctcaacctccagacacaatccatggatcacttcgtgtgacagtccaaggtgaagtcattgagcaatcatttggagaacaacacttgtgctttagaacactacaacgtttcactgccgccactctagaacatggcatgcaccccccaatttcgccaaaaccagaatggcgtgctttgatggatcagatggctgtcattgctactgaggaataccgttccattgtattcaaggaaccacgctntgttgagtatttccgcctggctacaccaagagtggagtatggaaggatgaatattggaagtcga

SEQ ID NO: 273959 - DNA, 325 bp, Glycine max
ggcggccaagaaaagaaaatcctcacccattttcttcgtagccaaacactctgaaattctcagttatgtcgtggcaagcgtatgtggatgatcacctactgtgtgaaatcgaaggtaaccacctcactcacgccgctatcatcggccaagacggaagcgtttgggctcagagcaccaacttccctcagttcaaacctgaggaaataactgccatcaataatgactttaatgagcctggatcacttgctccaactggattgtatatcggtggcaccaaatacatggtcatccagggtgagcctggtgctgtcattcgagggaagaa

SEQ ID NO: 273960 - DNA, 397 bp, Glycine max
ggagcaagagtgaagagcgaagagaatggctcccaagggtttaatctttttggctgtgttatgcttctcagcactgtcactgagtcgttgtcttgcggaggataatggacttgttatgaacttctacaaggaatcatgccctcaggctgaagacatcatcaaagaacaagtcaagcttctctacaagcgccacaagaacactgctttctcctggctcagaaacatcttccatgactgtgctgttcagagttgtgatgcttcactgttgctggactccacaagaaggagcttgtctgagaaggaaacagatagaagctttgggttgagaaatttcaggtacattgagaccatcaaagaagctttggaaaggggatgcccaggagttgtttcctgtgct

SEQ ID NO: 273961 - DNA, 337 bp, Glycine max
tggggagccagagtgaagagcgaagagaatggctcccaagggtttaatctttttggctgtgttatgcttctcagcactgtcactgagtcgttgtcttgcggaggataatggacttggtatgaacttctacaaggaatcatgccctcaggctgaagacatcatcaaagaacaagtcaagcttctctacaagcgccacaagaacactgctttctcctggctcaaaaacatcttccatgactgtgctgttcaaagttgtgatgcttcactggtgctggactccacaagaaggagcttgtctgagaaggaaacagattgaagccttgggttgagaaatttc

SEQ ID NO: 273962 - DNA, 337 bp, Glycine max
ggccttggtattgggaaagttattgaaaatggaggagttggaggaagcctaaccgggataacaattggtaccgtgacccaaactgataaagtttggagaaccatgcaagctcttggtgacatagcctttgcttattcatactccctcatccttatagaaattcaggacacagtgaaatcccctccatcagagtcaaaaacaatgaagaaggctagtttcatcagtgttgcagtaactagcattttctacatgctttgtggttgctttggttatgctgcttttggagatgcaagccctggaaaccttctcactggttttggcttctacaacccatact

SEQ ID NO: 273963 - DNA, 384 bp, Glycine max
ggacctggggttggtcaaggcactgctgcagggcaagctgtagaagggattgcacgacaaccggaggcagagggaaaaatacgaggtactttattgcttagtttggcttttatggaagctttaacaatttatggactggttgtagcattagcacttttatttgctaatccttttgtttaatcctaaaaaaatagaaatacatatccttttttccgtggacttgctttaccggtcttgctttttcgaattctatttatattaatatttcactcctataattctttatccgttcggacaagaacacaggggaaggactaattgaaaggtgaagaattcacatactgattcgccctctttcttctcttttttaggccaatgaccccc

SEQ ID NO: 273964 - DNA, 349 bp, Glycine max
tgtccaaaggaatgcagaaagccgatcaggcacttctctctggatgctctgcgggtggtctggcatccataatacactgtgatgagttcgggagcttgtttggaaaatcttccaaagttaaatgtttgagcgatggaggtttttttcttgatgcaatggatgtatctgggggacgcacactgaggactcttttcggaggtgtggttcagttgcaggatgtacaaaaaaatctgccaaaaagttgtctcgaccaactagacccaacttcgtgcttctttcctcagaatatgatcgaacatgttgagaccccattgtttctactcaatgctgcttatgatgtgtggcaagt

SEQ ID NO: 273965 - DNA, 381 bp, Glycine max
ggggaacagcaaacaataaggccattcgccagttactgcactttgctgtgtctgatgtgagtgatgatgtcaggaggactgcagttctagcattagggtttgtgttgtactctgatccagagcagactccacgaattgtttccctcctatcagaatcttacaatccacatgttcgatatggagcagctcttgctgtgggtatttcctgtgcgggtacaggtctcagcgaggctatctctttattggagcctttgacatcggatgttgttgattttgttcgtcaaggtgcccttatagcaatggctatggtcatggttcagatcagtgaagctagtgactcacgcgttggaacatttaggcgacaattggagaaaattattc

SEQ ID NO: 273966 - DNA, 397 bp, Glycine max
gatagcagcatcatacaaagcattgaattcaaaaactaagttcatttcttgtgctttgctttattcctcaaaaccaaacatgtcgaacacatgcggcaactgtgactgcgctgacaagactaactgcaccaagggaaacagctatggtgttatagtagagactgagaagagctacatcgagactgttgacatggatgttccagcagctgagcatgatgggaagtgcaagtgtggcactaactgcacttgcacggactgcacttgtggccattaaggaatatgtatgaaaatgtaattgccatgtgtttggcaatacaaatctccaaataatgtaatctttgtatgaataaatgtgtgctggtatcctacttccaagtctgtgtagtcatgcagtctg

SEQ ID NO: 273967 - DNA, 366 bp, Glycine max; identical to SEQ ID NO: 236347

SEQ ID NO: 273968 - DNA, 357 bp, Glycine max
gggggcaattttttcaaaacctttttctctctcgcaacctcacctcttcctccttcaatctctttcggaatttcccaaaatccttagtgggaggaagagatggttctgactcagaagcttcacgaagccttcaaaggcaccgtcgagaggattactggcccccgaaccgtttccgccttcaaagaaaaaggagttctcagtgtctctgagttcgtcaccgctggcgataatctcgttgccaaatgccccacctggtcctgggaatcgggtgatccaggcaagaggaagccatacttgccacctgagaaacagttcttgattactaaaaatgtgccttgtcttcggagagctgcatct

SEQ ID NO: 273969 - DNA, 382 bp, Glycine max
gaggatcagaaggaattttacttttgttcaatatgaatcagaggatgatgctagcagagcactggaagctacaaatatgagcaagttactggatcgagttatttctgtcgagtttgctgttaaagatgatgatgataggagaaatggatatagccctgagagaggccgtgatcgtcaacgtgatagaagccgtgatggaaggcgatcacccagtccttatcgtaaagaaaggggtagtcctgattatggtcgtgggcccagtccatatcagagagagaggggtagccctgactatggccgtgaccgtagccgtagcagaagcccccctaggagggagagagctagccctgcttatggacgtaaaagcattagtccatataga

SEQ ID NO: 273970 - DNA, 358 bp, Glycine max
ggaagaaaataatacgtgcatacatagctatctatttatctatagcaagtgcgtcaagagacacgtggtaccctagctagagtgccattctgtggtttctttctttctttctttctgcatcacatcacaatttgcattgcctcgtgtcctttttcttctttgctctccaaaaatctcacacacacaggtatctagcaaatgggttctcaccaacaagaaccatggctattggagaatgggaaaccaagggttttgaccaaggagaccaggcatggccgttctgcacacagaatgtcctccacctctttgcgcaagaaatctagccgaactcttgtctcaaaagttccatgtgccactc

SEQ ID NO: 273971 - DNA, 396 bp, Glycine max
gacgcagaggggctgaaagctgatgtgaaaaaattcctttacgatcttcggatgcaagcagaagtctttgtcataacgatgaaatgggatgcacagatggatggtggtgggtctcctgcacaagatgagtcaatggatgcatttactagtgctcagcaaagaattgatgattacttaacccaaatgaaggcgacggcgaagagagaaggtactcctctaatggcagatggcaagcccgtggttgtgaacgagaagcaggtcgagaagtttctttacacgacacttaagctcaattcgaccattttgagatattcaagaatggctgctgctgtgttggtgagtctacctccacctccagtgagccacccatcatatttctatatggagtacatggat

SEQ ID NO: 273972 - DNA, 367 bp, Glycine max
ggttggaaggatcagcacgacactgatcatcagcaatggcacgcgcacgtgttggtaaagaactgacgctgtattcgtattggaggagctcttgttcccaccgagtacgaatcgctctcaacctcaaagggcttaaatacgaatacaggcccgccaatctgctcaagggagaacaatctcgccctgagtttctacagctcaatcctgttggttgtgtccccgttctagtggatgaccacgttggtctctatgactctttcaccattattatacatttggaagataagtatcctcacaatcctttgctccctcatgttatttacaagagagcaatcaatttccttgctgctttggttgtttactcaac

SEQ ID NO: 273973 - DNA, 265 bp, Glycine max
gacggcacagaggggaagaagaagatggtgtccttgaagcttcagaagcgcctcgccgctagcgtcctaaagtgcggcaagggcagggtctggcttgatccaaatgaagtcaatgaaatctccatggccaattctcgacaaaacataaggaagttggttaaggatgggtttattatcaggaagccgactaagattcactctcgctcccgtgctcgtcgaatgaaggaggccaagagaaaggggcgtcactctggttatggtaagc

SEQ ID NO: 273974 - DNA, 397 bp, Glycine max
gagaggttcaatgtgatgcttcatgaactaaagattgaacacccaaaaggaggaattgctaggagtgaaactgatgcacttgccattgcagcagatattggatacccagttgttgttcgtccttcttatgttttgggtggtcgagcaatggagattgtgtatactgatgataagctggtcacttaccttgaaaatgctgttgaggtggatccagaacgccctgtattaattgacaagtatttatctgatgcctgtgagattgatgttgatgcactggctgactcacaaggtaatgtagtcattggtgggataatggagcacattgaacaggctgggatacattctggtgactctgcctgctctaattccaccagaactgttccttcttcttgcttgg

SEQ ID NO: 273975 - DNA, 268 bp, Glycine max
gacggaccaactggctagcacattctgtggagagcattcgattttcgagagcgttctgacttcccctagcgcattctatccaagcattacgaacaatgcagttattgatttgccttttgggggactgatggccctaatggccgttctgaacaacatgtgactgctaatatgttgctgatgacatctaacattgacccgcccgacaccatgaaaaccatgcttgaatatgacaacctaatgttctattgtatggtcttacctcacaact

SEQ ID NO: 273976 - DNA, 348 bp, Glycine max
gatccagagagagatgcaaaagccataaagatttttcttgaggatggtcatttaataggacttgctcagtcatatgcaaaaaatatgggactgtatggccagcgagcaggaagcctgagtgtgctttgtgaagatgagaaacaagctgtggctgtaaaaagtcagttgcagctgattgctagacccatgtacagtaacccacctctccatggagcacttatagtttctactgtccttggtgatccagatttgaagaagttatggcttaaagaagtcaaggttatggcagaccgcatcatcggaatgaggactacactacgagaaaacttataaaagaaggggtctact

SEQ ID NO: 273977 - DNA, 362 bp, Glycine max
gccagtgggacgtgttgagaccggtgtcttgaagcctggaagggtggtgacttttgcaccaactggactgacaactgaagtcaagtctgtggagatgcaccatgaatctcttacagaggcacatcctggtgacaatgtgggattcaatgttaagaatgttgctgttaaggatttgaagcgtggttatgttgcctcaaactcaaaggatgaccctgcaaaggaggctgctaacttcacagaccaagtcatcatcatgaaccaccctggtcagattggaaatggctatgcccctgtcctcgactgccacacttttcacattgctgtcaagtttgctgaactcatgaccaagattgacaggcgat

SEQ ID NO: 273978 - DNA, 264 bp, Glycine max
gacagatcggacggatggcactgacggtttagggcaatctgattccgagaaagttaagactacccctgctggtaaatatctcactgctgccctgaatgactttaatcctgaacaatatgagggactggctgccatttctgatggtgcgaacaaactgatgatgctgattctggatgatgacatcaaagctgtgtgcctccagagaacatgagagccttgctggaactagacatgctgaactcttatttattcgtaatatggcac

SEQ ID NO: 273979 - DNA, 390 bp, Glycine max
gggaccaagtgttgaaaatgcgaaggcctataacgggaacctgattgctcatcttagatcattggttgggacacctttgatgcctgggaagtctgtggacacttacatttttgcactctatgatgaggatctaaaaccaggcccatgatctgaacgtgcatttggtatgttcaaaactgatcgcaccgtgttgtacgatgttggattaaccaagtctagccagcagactccaacaactgcggtaactccagcaccaaacactgctggatggtgtgtagcgaaagctggagtttctgatgctcatgtgcaggccaacattgactacgcctgtagccaacgtattgattgccggccaattcaaccaagatgctcttgttttgagcctaacac

SEQ ID NO: 273980 - DNA, 369 bp, Glycine max
gacggctaaaagctaaaaatcatcgaagtactcaaattagcatggctgtcacggttgcattcttgaatttgatcatcatgttttcagtagtctctacaagcaagtcactgagcttaaactactattcaaaaacatgccctgatgtggaatgcattgttgccaaggcagtgaaggatgccactgctagggacaaaactgttccagctgcacttctgcgaatgcacttccatgactgtttcgttcgggggtgtgatgcctctgtgctgctaaattcaaaaggaagcaacaaagcagaaaaagatgggccaccaaatgttttcttgcatgcattctatgtcattgatgcagcgaaaaaagcactagaagctt

SEQ ID NO: 273981 - DNA, 390 bp, Glycine max
gtacgtcagggctcagaaatcaaaagcctacttcaagagatatcaagtcaagttcaagagaagaagagagggaaaaaccgattatcgtgccaggattcggttgattaatcaggacaagaacaaatataacactccgaaataccgatttgttgttcgctttagcaacaaggacattgttgcacaaataatatctgctagcatcgctggcgatattgctcttgctgcagcatatgcacatgagctgccacaatatggtcttggagtagggcttacaaattatgctgcagcttattgcactggtctcctgttggcccgaagagtcctcaatacacttgaaatggatgaggagtatgaacgaaatgttgaggcttctggagaggattattccgt

SEQ ID NO: 273982 - DNA, 211 bp, Glycine max
gaggcaggggatgaaggtcctattgtgactgaagctgacatacagcatattgtctcatcctggactggtattcctgttgagaaagtctcaacagatgaatctgatcgcctcctgaagatggaagagactttacataagcgagtcattggtcaggatgaagcaattaaagccattagtcgggctattccgccagcgctggttggaactaaaa

SEQ ID NO: 273983 - DNA, 323 bp, Glycine max
tacgtgttgtagttgctagtttctttgtgaaggttctgcagcttccttggagatggggaatgaagtatttctgggatacccttttggatgccgatcttgagagtgatgctcttggttggcagtacatatctggtagtctccctgatggtcgtgaaattgaccgaatagataatccacagtttgagggctacaaattcggcccaaatggagaatacgtgcgacgctggcttccagaactttcaagattacccactgagtggatacatcattcttggaatgcaccatagtcagtgctacaagctgctggaattgagctaggatcg

SEQ ID NO: 273984 - DNA, 406 bp, Glycine max
gagccttgagtttgataattttgctgaagtgcacaaactctatgaaggtggagttacactacctacaaactttcttagcaagatcgcccctataccagtgatcaaggaaatttttcgaactgatggcgaacagttcctcaagtatccaccacctaaagtgatgcaggtggataagtctgcatggatgactgatgaagaatttgcaagagaaacgattgctggtttaaatccaaatgtcattaagattatagaggagttcccactaagtagcaagctagatactcaagcctatggtgatcatacctgtataatagcaaaagaacatttggagcctaacttatgtgggctcacttgtgagcaagctattcaaaacaaagaagttgttcattttaaatcaccatgacta

SEQ ID NO: 273985 - DNA, 340 bp, Glycine max
ggtgcacaagtgagtttgttgatcgagataactagaaacagtgtgatgaaaatgaaggtccttgttttcttcgttgctacaattttggtagcatggcaatgccatgcgtacgatatgttccctctccgaatgaacactggctatggtgcccgtactccggaggtgaaatgcgcaagttggaggcttgctgtggaagcacacaacatctttggctttgagaccattcctgaagagtgcgttgaagcaacaaaggaatacattcatggcgaacaatatagatcagacttcaaaacagttaaccaacaagcttacttttatgccagagacctcgaagtccatt

SEQ ID NO: 273986 - DNA, 332 bp, Glycine max
ggccaaagggaatggataaaagtttgcagtcaacaggtagaggacgtgaagttactgtcacgaatgatggcgctacaatcttgaagtccctccatattgataacccagctgctaaagtccttgttgacatatcaaaagttcaagatgatgaagttggggatggaactacctcagttgttgtgttggctggtgaacttttaagggaggcagaaaagctggttgcaaccaagattcatccgatgacaataatatcaggttttcgaatggcagcagagtgtgctcgtaatgctttgttggagaaggttgtggacaataaagcagattctgagaaa

SEQ ID NO: 273987 - DNA, 365 bp, Glycine max
gaagagggtgtttgcaaacatgcctttgagttgatttttgcatttgatgaagtcatctctcttgggcacaaggaaaatgtgactgttgcacaagtgaagcaatactgtgagatggagagtcatgaagagaagctgcacaagttggttttgcagagcaagattaatgaaactaaggatgttatgaagcgaaaagctagtgagattgataaaagcaagattgaaaagaacagaggtgataaaggaagatttggtccattacagtcaatgggctctggaagaattgaaaatagctttagtgatttgagcatatctagcagttgaactggttttggaagtggctctggttttggattgacttctgatgt

SEQ ID NO: 273988 - DNA, 418 bp, Glycine max
  unsure (1)..(418): unsure at all n locations
ggagcgaagagtgaagagaatggctcccaagggtgtaacctttctggctgtgttaatatgcgtttcagcactgtcactgagtccttctgttgcgggggaagggcaaaataatggccttgttatgaacttctacaaggaatcatgccctcaggctgaagacatcatcacagaacaagtcaagcttctctacaagcgccacaagaacactgctttctcctggctcaggaacatcttccatgactgtgctgttcagagttgtgatgcttcactgttgctggactccacaagaaggagcttgtctgagaaggaaacagatagaagctttgggttgagaaatttcaggtacattgagaccatcaaagaagctttggaaagagaatgccctnggagttgttcatgtgctgatatcctcggtctc

SEQ ID NO: 273989 - DNA, 427 bp, Glycine max
ggaacaagggagaacttctgagtttcctgactgaaatcactgcagatatatttggaattaaggatgatcagggagatggatatcttgttgacaaggtcctagacaagactggcatgaaaggcactggtaagtggactgttcagcaagctgctgaattatcaattgctgctcccactattgaagcatcattggatgcaaggttcctgagtgggttgaatgaggaaagagttgaagctgcataggtctttaaatcaggtggtattggtgatatcgcgactgatcaacctgtagactagaaaaaattgatcgatgatgttaggaatgctctatatgcagccaaaatctgtagttatgcacaaggaatgaatttgatccgtgcaaagagtattgaaaagggttgggacttgaagttgggtgaactggcccg

SEQ ID NO: 273990 - DNA, 429 bp, Glycine max
ggttgtgaatcaacataaatattccgttttgcgtttctctgcctaaaaggattgaaagatgggtcaagcactaggttgctatcaagttgatcagtcaaatgtggttatcaaggagcattttggaaaatttgatgatgtcctagaacctggatgtcattgcctgccttggtgtcttgggtaccagattgctggtagtttgtcactgcgtgtgcagcaacttgatgttcgatgtgagacgaaaaccaaggacaatgtctttgtcactgtggttgcatctgtgcaataccgagctgtgtctgagaaagcatctgatgcattctataggcttaccaacacaagggagcagatccaatcatatgtttttgatgtcatcagggccagtgtaccaaagttggagttggattctgtctttgagcagaagaatgatat

SEQ ID NO: 273991 - DNA, 376 bp, Glycine max
gtgtgcagtggtggttgtagcacttcttcttctggcggaggtggggcccatggctgaggctgtgacatgcaccccaacagagttgagtccgtgtcttccagcaatcacttccggtgctaaaccttccaatgcttgttgcacgaagctgaagcagcaaaaaccatgcttatgtggctacctcaaaaacgctagcttgaagcagtatgttaactctcctaatgcccgaaaaaccgttgcttcttgtgggattccctttccaacttgttaattaattaagccttcttataattaaagtgtgggatatatatatatatatagataaacagtttaatttatacacactttgatcctaacaagcatcttgacacaagcattc

SEQ ID NO: 273992 - DNA, 350 bp, Glycine max
ggacaaatgattgatttacctattcaaagcaatttgcgcgaagggctttctttaacagaatatataatttcttgctacggagctcgtaaaggggttgtagatactgctgtacgaacatcagatgctggatatcttacacgcagacttgttgaagtggttcaacacattgttgtacgtcgaacggattgtggtaccattcaaggaatttcggtgaatacccagaatggaatgatgccggaaagaatatggatacaaacattaattggtcgtgtattagcagacgatatatacagaggttcacgatgcattgccgttagaaatcaagatattggaattggacttatcaatcg

SEQ ID NO: 273993 - DNA, 411 bp, Glycine max
gatggtcagtagtaggtaacttgttttctcttcctcgatttgatcgatcgttccttctctctcttgtgtttatgccaggaatgacagcgtatcagtggcagtgcaggaaacgagagggagagttttcattgggaaggtaaaagcctttgtttgtagcagtgccttacatgaaccctcgccccccttctcttgttcgctaccactaactcatcgttttctcagtgtgccccgcgtgcgttctgctgtgtcctctcactcacaggtgtaaccgtgtaaccactagaatcatacttagtggcatggaaagaaagaaagaaagattaacctaaaaaccctgtgcaggctttcccagaaaagccaagtgagaaaaccaaaccctctattaccacttactacttacttcatgtaact

SEQ ID NO: 273994 - DNA, 324 bp, Glycine max
ggaggcaagaagttgtattttggcatccccgtggcttcaagaagagaatctcaatggaggcccaggagctgaagcgcgtgttccagatgttcgaccgcaacggcgacgggagaataacgaagaaggagctgaacgactcgctggagaacctgggcatcttcatctctgacaaggacctgagccaaatgatccagaggatcgacgtcaacggcgacggttgcgtggacatggacgagtttggggagctgtatcagaccataatggacgagcgcgacaatgaggaggacatgagggaggccttcaacgtcttcgaccagaacgccg

SEQ ID NO: 273995 - DNA, 335 bp, Glycine max
  unsure (1)..(335): unsure at all n locations
gggggcagagactgatatatggtatggtcgtctctgagtctgaagatctgtgagttaattgcatttgcagagagagagagagagagggaagacggttgtggggattcgatgggggccaccgttcactcgccgctagtcacttatgcttccgtcatatctctgcttacactctgccctccgtttgtcatacttctatggtacaccatgactcttgctgacggatctgtttccgagacattccattatttaaggcagaatgggttgcaaggtttgctacatatatggcccacccccacttccaccgnctgcaaaatcattgcagtctatgctgcatt

SEQ ID NO: 273996 - DNA, 402 bp, Glycine max
  unsure (1)..(402): unsure at all n locations
gaagacaagagtgattagggttttggtttggtgtttttcttaagcttgagatcaggaattaatttcagaggttcagagaatggcaacggattcttctaatggtaatggacatcaccaaacaacaacaaagcaacctcctttgccgtctcccctgcgcttttccaaattttttcagtccaacatgagaatcttggttactggaggagctggattcattgggtctcacttagttgacagattgatggaaaatgaaaaaaatgaggtaattgttgctgacaactacttcactggatccaaggacaacctcaaaaaatggataggtcatccaagatttgagcttatccgtcatgatgtcacggagcctttattgatcgangttgatcagatctaccatcttgcatg

SEQ ID NO: 273997 - DNA, 415 bp, Glycine max
ggagacagagagaatgagtacggtgggagaagggaaggtgagtagtaatggtcatggatgttgcaaatcagggccaggctatgcttccccactggaagccatttctggtcccagagagtctctcatttatgtaacctctgtctacacagggaccggaatagagaagccagactatttggcgacagtggatgtggatccaaactctccaacttattccaaagtcatccataggcttcctgttccttatttaggtgacgaattgcatcacacaggctggaattcatgcagctcttgccatggagacccctcagcagaccgacgatttctcatcgtacctgcactcgtatcaggtcgagtatatgtggttgatgtgaaaacaaatccaaaggctccatctttgcccaaagttgtcgag

SEQ ID NO: 273998 - DNA, 413 bp, Glycine max
gactgattgaatattttcagaatatacctggggtgccaaagatcaaggacaattataatcctgcaacctggatgttggaaactacctctgcatctgtagaagcataacttaaaatagattttgcacaaatatataaagagtcacacctttgccgggatacccttgaattggtgagagagttgagtgaaccaccgccaggtacaaaagacttgcacttttcaactcgcttcccacaaaatagtttgggacagtttatggcatgcctttggaagcaacacttgtcttattggagaagtgctgagtacaacttaactacgttcattttcatgattggttgtgcaatcatgtttggagcagtattctggcagaaagggaataaaatgaacaatcagcaggatttgctcaacgtactt

SEQ ID NO: 273999 - DNA, 373 bp, Glycine max
ggctgtgagtgagattacccatagatagagagcgcggcatagcctaaacttacccttcttctctctgtgtgtgtgcgcatcaaacgcaaccagaagcagccatggccactgcaagaactgtgaaggacgtttctcctcatgagttcgtcaaagcttactcttctcacctcaagcgatctggcaagatggagctgccagagtggactgatattgtgaaaactgcaagatttaaggagttggctccttatgatcctgactggtactatgtcagagctgcttccatggcaagaaagatctacttgagaggaggacttggtgtcggtgcctttcagaggatttatggtgggagcaagaggaatggtagccgccctcc

SEQ ID NO: 274000 - DNA, 274 bp, Glycine max
ggccttcaccttgatctatcttgtcagcacaggaaatagtatcttcgtttgttcaatatgtttggttcatcaggcatggcacaggaatctggtatgttcatggttagccagacaattggcagtgttttgtgctgcaaatgtggaattccaatgcaacccaatgctgctaatatgtgtgtcaagtgtctgcgatcggaagttgatattacagaaggactgctgaagcgtcttgtgctggtgcattgccctgagtgtgagagttacttgcagccac

SEQ ID NO: 274001 - DNA, 367 bp, Glycine max
ggcagcgcttgatttgaggccaggcaagccccactcaaccaccacacctctcctcgttcacgctacccctttctgctcttcttctacctttcaagttttaaaagtataaagatggcagagacattcctatttacctcagagtcggtgaacgagggacaccctgacaagctctgcgaccaaatctccgatgctgtcctcgacgcttgcctcgagcaggacccagacagcaaagttgcctgcgaaacatgcaccaaaaccaacttggtcatggccttcggagaaatcacgaccaaggccaacgttgactacgagaagatagtgcgtgacacctgcaggaacatcggcttcgtctcaaatgatgtgggac

SEQ ID NO: 274002 - DNA, 410 bp, Glycine max
ggacacgacgagtacatcgtaaaaggaggcagggatttgtttcacttgttgcccgatgctttcaaggggatcaagcagattggtgttatcggttggggatctcagggacctgcgcaggctcagaatctacgggactcacttgctgaagcaaagtctgatattgtggtcaagattggactcaggaagggttctcgttcctttgctgaagctcgcgcagctgggttttctgaggagaatgggactctaggtgatatatgggaaactgtctctggaagtgatcttgtgatgctggtaatttctgattctgcacaggctgataactatgagaagatattgtctcacatgaagcccaacagtatacttgggctttcccatgggtttcttctttggcatttacaatcattgggact

SEQ ID NO: 274003 - DNA, 286 bp, Glycine max
  unsure (1)..(286): unsure at all n locations
ggagagtgagtgagatagagagagacgcctcgcaaatctcaatcgaatctcagaaaaatgagagaaatcatcagcattcacataggtcaggccgggatccaagtcggaaactcctactgggaactctactgcctcgaacatggcatccagcccgacggcatgatgccttctgactccaccttcggtgtagcccacgacgccttcaacaccttcttcagcgaaaccggatctggcaagcacgtnccccgtgctgtcttcgtcgacctcgaacccaccgtcatcgacg

SEQ ID NO: 274004 - DNA, 393 bp, Glycine max
ggcctacgcagagagaaattgagtttctgagataaccacttttctctttgattcatcaatggcaaccgcgaggaccgtgaaggatgtttcgcctcacgatttcgtgaaggcttacgcctcccatctcaagcgttccggcaagatggagcttcctgagtggactgatattgtaaaaacagcaaaatttaaggaattggctccatatgatcctgactggtattatgttagggctgcctcaatggcaagaaagatttatttgagaggcggtcttggtgttggggttttccagaggatctatggtggaagcaagagaaatggaagccgtcccccacatttctgcaagagcagtggggctattgcaagacacattctgcaacaattgcaaaacatgag

SEQ ID NO: 274005 - DNA, 381 bp, Glycine max
gggcgtgttatagatgttaaaggcacaacagttcgtgttgagttggaatcccaaatgaaggttgtgacagttgaccggaaccatatatctgacaatgtggctgtaaccccatatcgtgatacatctcgctatggaatgggaagtgaaacaccaatgcatccttctcgaactcccttacatccatatatgactccaatgagagatcctggagcaacacctattcatgatggaatgagaacacctatgcatagccgagcatggaatccttatactccaatgagtcctgcaagggataactgggaagatggaaatccaggctcttggggagccagtccacagtatcagcctggaagccctacttcacgggcatatgaagcccca

SEQ ID NO: 274006 - DNA, 428 bp, Glycine max
gacgccgagatcagccaggagctgccggttgagaagggttccatttactcgctcacgttttgtgcggctcgcacctgcgcgcagtttgagtccatcaacgtctcggttctgcctgcgtcgcagacgatagacctgcagacactctacaacgtccagggatggaacccttacgcggtttctttcaatgcggatcaggacacttttaggttgctatttaagaatcccggcatggaggatgaccccacttgtggccccatcattgacaacattgctatcaagaagcttttcactcctcttaaacccaaagacaatgcagtgatcaatggggattttgaagagggtccatggatgttcaggaacacttcactgggtgtgttgcttcccacaaatttggatgaagaaacttcatcactgccaggttggatagt

SEQ ID NO: 274007 - DNA, 351 bp, Glycine max
gactccgatatcgctcaagttttgtcctccatgggagggtccattgactatttcacgactggtgcgggttgaacctgcccttattttgtgtgcgtcaccgtctctgatctgcctgctgtgcacacgatagacatggatgcactctacaacgtccagagatagcacccttacactgtttcttttactgcggatcaccccacttttacggcgctgtttaaaatgccacctatggaggatgaccccacttatggtcctattatttgcagcattgctctcatgaagctagctactgcccttgaacgccaagccaacgcaatgatcaatgtaggttctgaacaactcacattgatg

SEQ ID NO: 274008 - DNA, 281 bp, Glycine max
gacctgaaaatctagtttcttacaaggctctactctactgcttcaccttctgctctagaaaattcagtggtgatacatggcttcggctactctctctgtagccaaaccagcccttcaggcaaatgggaaaggcttctctgaattctctggcctccgcagctcatcaggcttccttcccttttctagaaaatcttcagaggatttccattctgtcgttgccttccagacctatgcagttggaagcagtggaggatacaagaaaggtgtgacagaagcaaaac

SEQ ID NO: 274009 - DNA, 362 bp, Glycine max
gactattcaaggaagcaaaagacagggattctagtgggaagaaatgggatgatcaccctgcaataatggctgttggtgtggttgatggaacttcagaagccatcttccagactcttatgtcgcttggtccttcaagatcagaatgggatttctgtttctacaaaggaaatgtggtggagcacttggatggtcacactgacattattcacaaacaactatttagcgattggttgccttggggaatgaaacgaagagatctcttgttgcggcgttattggaggagagaagatgatggaacttatgttattctttaccattccatgtttcacaagaagtgcccttcccagaaaggctatgtgcgt

SEQ ID NO: 274010 - DNA, 373 bp, Glycine max
ggaacaaaacaagtgtttcgaatagattatcctgagtctttgggaatagagctgcaatggcttcaagtcaggaggaggtgacccttttgggagctactggaagcccatttgtgtgcagggctcatattgccctcaagttgaagggagttcaatacaaatatgtcgaacaaaatttgaggaacaagagtgaactgcttctcaaattcaacccagtttacaagaaggttccagtgtttattcacaatgagaagcccatagcagagtctcttgcgattgatgaatacattgatgagacatggaagaacaaccccatcttgccttctgatccttaccaaagagccttggctcgtttctggtgcaaattcaatgatga

SEQ ID NO: 274011 - DNA, 408 bp, Glycine max
gagagcgaagagtgaagagaatggctcccaagggtttaacctttctggctgtgttaatatgcgtttcagcactgtcactgagtccttctgttgcgggggaagggcaaaataatggccttgttatgaacttctacaaggaatcatgccctcaggctgaagacatcatcacagaacaagtcaagcttctctacaagcgccacaagaacactgctttctcctggctcaggaacatcttccatgactgtgctgttcagagttgtgatgcttcactgttgctggactccacaagaaggaacttgtctgagaaagaaacagatagaagctttgggttgagaaatttcaagtaccttgagaccatcaaagaagctttggaaagagaatgccctggagttgtttcatgtgctgata

SEQ ID NO: 274012 - DNA, 423 bp, Glycine max
ggatgaggaaccaggcgatgatgaagaaagcagtggccaaagacaatacaagcttcccatggcaaatatcattcctttccccaagagtaatgatccttctagcgctcctgatttccctcctggaaaacatgttttggcggtctatccaggaactactgcactttataaagcaacagttgttcaaggccctcgcagaaggaagaccgaggattatgtgttggaatttgatgatgatgaggaagatggatctttacctcaaaggacagtgccattccgcaaagtggttcctcttccagaaagacatcgccaatgagtttgagtataagctatttattatggttgtgtataaagcagaaactagaccattgcatatgtgccacttgtgtaatatgctccgtgtgatgtggtttgtaagaatgacat

SEQ ID NO: 274013 - DNA, 334 bp, Glycine max
ggaaaccgagaagaagaagatggagatgtatcagatctggagcaggagaatagcgttgggagcgttcgcgtttgttctgcttttcctatcggcctcagcagacgacgtcgttgtgctctctgaagataacttcgagaaggaagttggtcaggacagaggagctctcgttgagttctatgctccttggtgtggacactgcaaaaagcttgctccagaatatgaaaagcttggtagcagcttcaagaaagccaaatctgttttaatcggcaaggttgactgtgatgagcacaagagtttgtgcagcaaatatggagtctctgggtacccaacaatt

SEQ ID NO: 274014 - DNA, 348 bp, Glycine max
gtccaaaggaatgcagaaagccgatcaggcacttgtctctggatgttctgcgggtggtctggcatccataatacactgtgatgagttcgggagcttgtttggaaaatcttccaaagttaaatgtttgagcgatggaggtttttttcttgatgcaatggatgtatctgggggacgcacactgaggactcttttcggaggtgtggttcagttgcaggatgtacaaaaaaatctgccaaaaagttgtctcgaccaactagacccaacttcgtgcttctttcctcagaatatgatcgaacatgttgagaccccattgtttctactcaatgctgcttatgatgtgtggcaagt

SEQ ID NO: 274015 - DNA, 412 bp, Glycine max
gagtgcacaagtgagtttgttgatcgagataactagaaacagtgtgatgaaaatgaaggtccttgttttcttcgttgctacaattttggtagcatggcaatgccatgcgtacgatatgttccctctccgaatgaacactggctatggtgcccgtactccggaggtgaaatgcgcaagttggaggcttgctgtggaagcacacaacatctttggctttgagaccattcctgaagagtgcgttgaagcaacaaaggaatacatccatggcgaacaatatagatcagactccaaaacagttaaccaacaagcttacttttatgccagagacctcgaagtccatcccaaggacacatttgtgttcagtatagatggcaccgtactctctaatattccatactacaaaaaacatgga

SEQ ID NO: 274016 - DNA, 362 bp, Glycine max
atgaatcaaaatcaaatgaaactcctgcattcggtagctcaaactctcagataactcaagcagtgtttgagaaggagaaaggagagttccaggtgaaggttgttaagcagatcttatgggtaaatggaatgaggtatgaacttcaggagatatatggtattggaaattcagtggagagtgatgtggatgggaatgacccgggaaaagagtgtgttatatgcttgtcagagcctcgggacacaactgtccttccatgtcgccacatgtgtatgtgtagcggttgtgcgaaggttttgaggttccagacaaatagatgtccaatctgcagacaaccagtcgagaggcttttggagatcaaagtt

SEQ ID NO: 274017 - DNA, 425 bp, Glycine max
gcacccaaaggtgcacaaatattaagatgataaacattggagcacttgttgtactctttgcatttctcttcctcagttgtgcctatgcacaagacacaacaacccttgtgcctgcaatcataacttttggtgactcagccgtggatgtagggaataatgactatcttcccacccttttcaaggctgattaccctccttatgggagggactttgctaaccaccaacctactgggaggttttgcaatggcaaattagctactgattttactgctgacactttgggttttaagacctatgctccagcatatcttagcccacaggcatcatggaaaaacctacttattggagcaaactttgcttctgctgcatctgggtatgatgaaaatgctgctactttgaatcatgcgaatccgttgtcccaacag

SEQ ID NO: 274018 - DNA, 358 bp, Glycine max
attgaaacatatgatgtgactacaattagagcaagcacacctatgtttctcatgtctcggaagattaaatcacttggtgtcaaatgggttatctcaggagaaggatctgatgagatctttggagggtatttgtacttccacaaggcacccaacaaggaggagttccacagagaaacatgccgcaagatcaaagcacttcaccaatatgattgcttgcgagccaataaatcaacatttgcttggggtctagaagcccgtgtaccatttttggacaaggcgtttatcaatgctgcaatgagtattgaccctgagtggaagatgattaaaagagatgaaagacgaattgagaagtggattc

SEQ ID NO: 274019 - DNA, 410 bp, Glycine max
gagtgtgtgagttcattaacatatacagattctctgtgttgtgttgtgtacttgtgttaattgtgttgttgttgtaggaaatttaagtgaagagagaatgatgatgaagtctgctatgtgtgcattggtgcttgtggcactggttgtggttgaagtggggcccatggctgaggctgcggtgacttgcaacccaacacagttgactccttgtcttccggcaattaattcaggttctgcaccttcgagtgcttgttgccagaagctgaaggagcaaaagccatgcttctgtggctaccttaaaaaccctagcttgaagcagtatgttaactcttctaatgccaaaaaaaccggtagttcttgtggtattggctattcaactttgtaagcacctcttatatatatatataaaa

SEQ ID NO: 274020 - DNA, 345 bp, Glycine max
cccacgcgtccgtagcgagaagacgacagattgggggagtggaagtagtaacaagtacgtcgcatatgtggttgatcttttgctggttgatagttttgttccttccaattgtcagatctgaatcaccggactcactcttcacactcactcacactgaatggcttctgaaggcgaccatcaccaccactaccaccaccatcaagatcacgatcatcatcatcatgatcatgatcaccatcatcatcacgatggagagggagagaccaactcatgggtaggtaaggatgggaaggtgtaccatagccacgatggtctggcgccgcattctcacgaacccatttactt

SEQ ID NO: 274021 - DNA, 298 bp, Glycine max
gggagaggagaagtaaaccctagagtagagaatggaaggtgagggtggggagaggaaaagaggcgcacgtttatgctgcgtgtgcaagaaatcaagagcttcggtgaagaggccgaaaaccctagagcagatatgcagggagtgcttctacgatgcttttgagtctgagatccatcaggtaattcttgagaatcagctcttcagccctggtgaacgcgtcgcaatcggcgcttctggcggaaaggattccaccgtccttgcctacgtcctctccaagctcaaccgcctccacaattac

SEQ ID NO: 274022 - DNA, 267 bp, Glycine max
ggggcaatgtacagatcacagagcattacgatattatccatgctggttctcagagcaaaggagaattttctaggcttgactatcagaccaggccatttttaagaggtgcatcagcctttaggcgtcttgttgccaagctacctccaagagctcattctgtgtactacagggatgaaattggcaacatttccacttctagtttatggggtgactcaaaaaaggtggatattttcacatttgataaatttttactgtgaaatacttttt

SEQ ID NO: 274023 - DNA, 335 bp, Glycine max
cccacgcgtccgaattcgagcggccgctttttttattgtgattttttttatttttttggggattccgatattcggacgcatgaacttgttatgaaatcacattgatagcctctactcgggtcctagctcggctaatagctagatttgcctcaattggttggctcttgcctttcgccttattcaaattagcttctgctatttcaagagtttgctgcgctttttgcggatcaatggcactaccctttttcgcatcatttacttaaaccggtgatctcattattgctgattctaacaaaaaccgccattataggcatcgttaacccatgggctttaaa

SEQ ID NO: 274024 - DNA, 376 bp, Glycine max
ggctgcaaatgtggaccaaactgctcctgcaacgccctgcacttgcaagtgaggtgttgggagagcaagcttcaagcagagatagcccttaattaggaataatgataaactattaatgtgtagctaaaaacttatgtattatgtctgtgatggttttcgtgcactctggtgttttgtgttaaacaaacatccttagaataaagtggtcatgtcttgcctttcagcaagttcaagtgttttggacttgtgatgggtgtgttaagctcatggttgcttctttttttttttttttaatgtttggtaattggtcgcttctgtataaagttcggctaatctgaattatgaatctctgcttataatattaaatactattacc

SEQ ID NO: 274025 - DNA, 389 bp, Glycine max
  unsure (1)..(389): unsure at all n locations
ggggtgttgtgtcggtaggtttgtggtggagaagaacagtttgaaggtgacttctccgaaatcgttgaagggtacgtatgaatgtgcaattgggaattttggggttcccaagtatggaggaacgttggttggttctgttctgtacccaaaggtgaatcagaaagggtgcaccaacttcagtgatgtcaattttcagtccaagccaggagggtttcccacttttcttcttgttgatcgtggagattgctacttcactttgaaggcgtggaatgcacagaatggtggagcagcagctattcttgtagctgatgaccaggcagaaacgttgatcactatggacactcctgaagaagggaagcanatgatgattatgtggacaagattagtat

SEQ ID NO: 274026 - DNA, 310 bp, Glycine max
gggagaaagggtgggtattgcttcacacaaacacaacagtgtctgctgcaccttgcaatggtttcgctatcaacatggtttcgctacattgcccacaagctcgaatactccttctccctcagctggaagaactacaaaggaggtcaaattacagacagggaggtacgtgatgttgtttggaaaaacttctttcaaggaaagctgacgtacttgcactggaataaaggagaggagatggcccctactattgatggaaaagcagtaactcttgttcggaaattaccagttgtagacccaacgcgtgtttttg

SEQ ID NO: 274027 - DNA, 339 bp, Glycine max
gccacgcgacgaccgtcgatacctacgcacgatgaccacaggaaagcgatatctactgaggctgcagtctataggagaagcaactaccgagcatgagaatgctcgatgcgaagtaccaggtggcggacatggcggtgatgatacatgtgaagaacatagcggacatgggggcgtacgtgtcgctgctggagtacaacaacatcgagggcatgatcttgttctcggagctctctcgccgtcagattcggagtgtgagcagcctcatcaaggctggccgcatcgagccggtgatggtgctccgtgtcgacaagggaaaaggttacatcgatctcagcaagc

SEQ ID NO: 274028 - DNA, 367 bp, Glycine max
gaatacaaggagtggaatgacaagaatccacaggtgacaacatgcaataaagataccaagaatttgatgcaaggtagtactgtcccacaagaagttgatacaagcaaggatattgtattcacatatgatgtttccttcacggaaagtgatatcaaatgggcatcacggtgggacacatatcttttaatgaatgatgatcagatccactggttctccatcattaactctctgatgattgttcttttcctgtctggaatggtggcaatgatcatgatgagaactcttttcagagacattgccaattataatcagctagaaacccaagatgaggcccaagaagaaacagggtggaaacttgttcatggag

SEQ ID NO: 274029 - DNA, 334 bp, Glycine max
ggagcaagagtgaagagcgaagagaatggctcccaagggtttaatctttttggctgtgttatgcttctcagcactgtcactgagtcgttgtcttgcggaggataatggacttgttatgaacttctacaaggaatcatgccctcaggctgaagacatcatcaaagaacaagtcaagcttctctacaagcgccacaagaacactgctttctcctggctcagaaacatcttccatgactgtgctgttcagagttgtgatgcttcactgttgctggactccacaagaaggagcttgtctgagaaggaaacagatagaagctttgggttgagaaatttc

SEQ ID NO: 274030 - DNA, 385 bp, Glycine max
ggaatcgccattgagctcatagtcatgtacccgattcaggaccgcaggtacagggaaggaattgacaacctgttagtgctcttgattggaggaattcccattgccatgccaactgtgttgtctgtcactatggctattggttcccacaggctttctcagcagggtgccatcacaaaaagaatgacagctattgaggaaatggcagggatggatgtcctatgcagtgacaaaactgggactctcaccttaaataagttgagtgttgacaggaacttgattgaggtgtttgctaagggtgttgagaaagagtatgttatccttcttgcagcaagagcttctaggactgaaaatcaagatgccatagatgctgcaattgttggcatgc

SEQ ID NO: 274031 - DNA, 299 bp, Glycine max
ggttctagtgtgtgattgtttgttgttgtaactcgttcttcttcttttgttgttctgtgtttgtgtttgttttttctctcacctgaaaatgtcttgctgcggtggtaactgtggttgcggaagctcctgcaagtgcggcaacggctgcggaggctgcaagatgtacccagacttgagctacactgagtcaaccaccaccgagaccttggtcatgggagtggcacctgttaaggctcaatttgagggtgctgaaatgggtgtgcccgctgagaacgatggctgcaaatgtggaccaaact

SEQ ID NO: 274032 - DNA, 389 bp, Glycine max
ggacgaaggatggggaaggcaaaagaagcggcggtggtggcgggagccctagcattcgcgtggctcgctatagagctcgctctcaaacccttccttaccaaggcacgtgcttccatcgacaagtccgacccggcacgtgaccccgacgacgatgctcttcctaaaaccaccgccgacgacgttcccgaagcctccgctgacgacgtgcctgtcgctgctgataccaaaaccaccgacgacgcctgaacttatctcattcatgttattttgaatgtcctgaaaattactgtccaaatgaaataatgttgctagcctctttgtgtttctgttaattttgtgtatattgtgttgtcagtatttttggtctggtttgtttggttttaggattg

SEQ ID NO: 274033 - DNA, 419 bp, Glycine max
  unsure (1)..(419): unsure at all n locations
ggagaaacagaactttcagaagcggaatcgctcactattgatccgattccaccgtcatcggatctttctgcagccaccgtctatcgcacttcgttgccgtcattggcgccggaattctgaatgttaatgaatttgtgaagtaatgatgagtggaagagctatccaataacatgacatgaactgcaaattcttgtatacttgaaggttaagacagcttaaacaatacaaggatgttttcgttgttttatggactatggaagtacttgttcagcaagatggagcttcatgtactcattctggggattgacaaggctggcaaaacgactttgctggagaagatgaagtcggtgtactcaaatatagaaggcattcctnctgatcgaattattccaacagtgggattgaatattggtcgcatt

SEQ ID NO: 274034 - DNA, 413 bp, Glycine max
tttgaaggggaagagggtgtttgcaaacatgcgtttgagttgatttttgcatttgatgaactcatctctcttgggcacaaggaaaatgtgactgttgcacaagtgaagcaatactgtgagatggagagtcatgaagagaagctgcacaagttggttttgcagagcaagattaatgaaactaaggatgttatgaagcgaaaagctagtgagattgataaaagcaagattgaaaagaacagaggtgataaaggaggatttggtccattacagtcaatgggctctggaagaattgaaaatagctttagtgatttgagcatatctagcagtggaaactggttttggaagtggctcttggtttggaatgacttctgatgtcgattcctttgcaaccaaacctaaaggtcgtccaactt

SEQ ID NO: 274035 - DNA, 345 bp, Glycine max
aaaaaataaaaaaataaaaaataaataaaaaaaaaaaaaaataaaaaaaaaaaaaaaaaaataaaaaaaataaaaatcaacacaaaaaaaataaaaaaataataagaaaaaaaataaaaaaaaataaaaaaataaaacataaaagaataaaaataaaaaaaaaaaaaataaaaaaaaaaaataagaataaaaaaaaaaatacccacccaaccaaaaatagaattaaaacagaaataaaaaaataaaaaaaaataaagaaaaaaaaaataaaaaaaataaataaaaaaaacattaaaaataaaaaaaaaaaaaaaatataaaaaaaaaatataaataaaaaaataa

SEQ ID NO: 274036 - DNA, 428 bp, Glycine max
  unsure (1)..(428): unsure at all n locations
ccgacccacgcgtacgnacaggcagttttaagacgacgagaggaagattgaaaccacggggaaganacaaggaagaagggaggcggccaagaagaagcggaagcccaccgaggaagcagacgaaaaacaccaccaagaaacgaagggagaagaggcgacgaagaagagacgacgacangcagccacaaaacaaaaagcagaaggcaccagcagccagacgaacacaacaacgaggcaaaccggacaaaacaaacacagaacgggggaccaaaggacagaaacaacaaaaagggaccaacagacaaagcgaaacaaacagagaacaaccagcggaaaacaaaaaggcaggcgccgacgaggaaaaagaaaaagccaccaaaggagaacaaaaaaaaaacaaaagaacaggaaggaagaaagggccaaag

SEQ ID NO: 274037 - DNA, 293 bp, Glycine max
agcagaagaattaaaaaagagagtaaattaaaaaaaaaaacgagcggtcccacaaaaccaagggaacccacaaaaacatgcaacgacataccaaaaaaataggaaaacacaaaagaaaaatacagaccagagaaaaacaaacaaaacgaaaagaaaaaaaacataacaaaaaaaaagaaaaaaacacacaaagaaaaaaatacacaaaaaaacacagaaagaaaacaaaaacaaaaaaagacaaaaaccaaaaaaaaaatacaaaaaaaaaaaaacaacacaaaaaaagaaaa

SEQ ID NO: 274038 - DNA, 227 bp, Glycine max
ggaatccgagaagaagaagatggttatgtatcagggctggagcacgagaatagcgttgggagccttcgcgtttggtctgcttttcctatcggcctcagcagacgacgtcgttgtgctctctgaagataacttcgagaaggaagttggtcaggacacaggagctctcgttgagatctatgctccttggggtggacactgtaaaaagcttgctccagaatatgaaaagc

SEQ ID NO: 274039 - DNA, 311 bp, Glycine max
gtcctaaggaatgcagaaagccgatcaggcacttgtctctggatgttctgcgggtggtctggcatccataatacactgtgatgagttcgggagcttgtttggaaaatcttccaaagttaaatgtttgagcgatggaagtttttttcttgatgcaatggatgtatctggtggacgcacactgaggactcttttcagatgtgtggttcacttgcaggatgtacaaaaaaatctgccaaaaagttgtctcgaccaactagacccaacttcgtgcttcttttctcaaaatatgatcgaacatgttgagaccccat

SEQ ID NO: 274040 - DNA, 433 bp, Glycine max
atgaatcaatttcaaatgaaactcctgcattttgtagctcaggctctcagataactcaaggggtgtttgagaaggagaaaggggagttccaggtgaaggttgttaagcagatcttatgggtaaatggaatgaggtatgaacttcatgagatatatggtattggaaattcagtggagagtgatgtggatgggaatgacccgggaaaagagtgtgttatatgcttgtcagagcctcgggacacaactgtccttccatgtcgccacatgtgtatgtgtagcggttgtgcgaaggttttgaggttccagacaaatagatgtccaatctgcagacaaccagtcgagaggcttttggagatcaaagttggacccgagcttgaggagtgaagatacattggtagtgacacatgcttcctgtacaatccaactggtatagc

SEQ ID NO: 274041 - DNA, 356 bp, Glycine max
  unsure (1)..(356): unsure at all n locations
gccaggcgattgaangcgagcggacgcagttttcttcgtgtgggattacgagtttttggtggttccgatattgggacgcatcaacttgttatgaaatcacattgatagcctatactcgtgtcctagctcgtctaagagctagatttgcctcaattgtttggctcttgccttccggcttattcaaattagcttctggtatttcaagagtttgctgggcttcttgtggatcaatggcactaccctttttcgcatcatttactaaaacagtgatctcattattggttattctagcaaaaccggccatcagagccatgggtaaccattgggctttaagaagacgtattcttaaaatacct

SEQ ID NO: 274042 - DNA, 344 bp, Glycine max
ggggtgttgtgtcggtaggtttgtggtggagaagaacagtttgaaggtgacttctccgaaatcgttgaagggtacgtatgaatgtgcaattgggaattttggggttcccaagtatggaggaacgttggttggttctgttctgtacccaaaggtgaatcagaaagggtgcaccaacttcagtgatgtcaattttcagtccaagccaggagggtttcccacttttcttcttgttgatcgtggagattgctacttcactttgaaggcttggaatgcacagaatggtggagcagcagctattcttgtagctgatgacaaggcagaaacgttgatcactatggacactc

SEQ ID NO: 274043 - DNA, 436 bp, Glycine max
gaatacatggagtggaatgacaagaattcacaggtaagaacatgcaataaagatacggagaatttgatgcaaggtagtactgtcccacaagaagttgatacaagcaaggatattgtattcacatatgatgtttccttcacggaaagtgatatcaaatgggcatcacggtgggacacatatcttttaatgaatgatgatcagatccactggttctacatcattaactctctgatgattgttcttttcctgtctggaatggtggcaatgatcatgatgagaactcttttcagagacattggcaattataatcaactagaaacccaagatgaagcccaagaagaaacagggtggaaacttgttcatggaaatgtttttaggccaacaatcaattcaaatttgctttgtgtttaatgtggtactggtgttcacatctttg

SEQ ID NO: 274044 - DNA, 399 bp, Glycine max
ggagctagagtgaagagcgaagagaatggctcccaagggtttaatctttttggctgtgttatgcttctcagcactgtcactgagtcgttgtcttgcggaggataatggacttgttatgaacttctacaaggaatcatgccctcaggctgaagacatcatcaaagaacaagtcaagcttctctacaagcgccacaagaacactgctttctcctggctcagaaacatcttccatgactgtgctgttcagagttgtgatgcttcactgttgctggactccacaagaaggagcttgtctgagaaggaaacagatagaagctttgggttgagaaatttcaggtacattgagaccatcaaagaagctttggaaagggaatgcccaggagttgcttcctgtgctga

SEQ ID NO: 274045 - DNA, 309 bp, Glycine max
ggaatcgccattgagctcatagtcatgtacccgattcagcaccgcaggtacagggaaggaattgacaacctgttagtgctcttgattggaggaattcccattgccatgccaactgtgttgtctgtcactatggctattggttcccacaggctttctcagcagggtgccatcacaaaaagaatgacagctattgaggaaatggcagggatggatgtcctatgcagtgacaaaactgggactctcaccttaaataagttgagtgttgacaggaacttgattgacgtgtttgctaaaggtgttgagaaagag

SEQ ID NO: 274046 - DNA, 416 bp, Glycine max
  unsure (1)..(416): unsure at all n locations
gacttataacatgggcagngaaactgaaaagggggagaagagagagaaaagggggagctttacgcgttggacttcgatggagtcatatgtgatagctgcggagaaagctctctctctgctctcaaggctgccaaagtgagatggcctggtttgtttgatggggtggattcaaccacagaaaattggattattgaccagatgcacacagtgcgaccagtagtggaaactggatatgaaaacgttttacttgtgagattgttgcttgagagcagaacaccaaccatccggaagtcttcggttgcagaggggctaacagttgagggtatattggagaactggtcaaagttgaagcctattatcatggaagaatgggatgagaagagggatgatctgatagatctttttggaaaggtcag

SEQ ID NO: 274047 - DNA, 327 bp, Glycine max
ggttctagtgtgtgattgtttgttgttgtaactcgttcttcttcttttgttgttctgtgtttgtgtttgttttttctctcacctgaaaatgtcttgctgcggtggtaactgtggttgcggaagctcctgcaagtgcggcaacggctgcggaggctgcaagatgtacccagacttgagctacactgagtcaaccaccaccgagaccttggtcatgggagtggcacctgttaaggctcaatttgagggtgctgaaatgggtgtgcccgctgagaacgatggctgcaaatgtggaccaaactgctcctgcaacccctgcacttgcaagtg

SEQ ID NO: 274048 - DNA, 351 bp, Glycine max
gagggagcgaaggtatgaagccttcaacaggctgagaatattccaagttgtaagtgtcgcttttctaggtggactattgtggtggcatactccagagtcacacattgatgatcgggttgccttgctctttttcttttctgttttctggggattctaccctctctacaatgcagttttcacattccctcaagagaggagaatgctgatcaaggaacggtcttcgggaatgtaccgcctttcttcctactttctggctagaacaataggagacttgcctctggagcttgcactaccaactgcatttggcttcataatctattggatgggagggcttaaacctgatcctatgac

SEQ ID NO: 274049 - DNA, 288 bp, Glycine max
ggtgcacaagtgagtttgttgatcgagataactagaaacagtgtgatgaaaatgaaggtccttgttttcttcgttgctacaattttggtagcatggcaatgccatgcgtacgatatgttccctctgcgaatgaacactggctatggtgcccgtactccggaggtgaaatgcgcaagttggaggcttgctgtggaagcacacaacatctttggctttgagaccattcctggagagtgcgttgaagcaacaaaggaatacattcatggcgaacaatatagatcagacttc

SEQ ID NO: 274050 - DNA, 324 bp, Glycine max
gatggtcagtagtaggtaacttgttttctcttgctcgatttggtcgatcgttgcttctctctcttgagtttatgccaggaatgacagcgtatcagtggcagtgcaggaaacgagagggagagctttcattgggaaggtaaaagcctttggttgtagcagtgccttacatgaaccctcgtcccccttctctcgttcgctaccactaactcatcgttttctcagtgtgccccgcgtgcgttctgctgtgtcctctcactcacaggtgtaaccgtgtaaccactatgatcatacttagtggcatggaaagaaagaatgaaagattaa

SEQ ID NO: 274051 - DNA, 398 bp, Glycine max
ggccaaagggaatggataaaagtttgcagtcaacaagtagaggacgtgaagttactgtcacgaatgatggcgctacaatcttgaagtccctccatattgataacccatctgctaaagtccttgttgacatatcaaaagttcaagatgatgaagttggggatggaactacctcagttgttgtgttggctggtgaacttttaagggaggcagaaaagctggttgcaaccaagattcatccgatgacaataatatcaggttttcgaatggcagcagattgtgctcgtaatgctttgttggagaaaggtgtggacaataaagcagattctgagaaattcaggtcagacttattgaacattgcaatgactactttgagctccaagattctctcacaggacaag

SEQ ID NO: 274052 - DNA, 295 bp, Glycine max
cgatagggaagagggtgtttgcaaacatgcctttgagttgatttttgcatttgatgaagtcatctctcttgggcacaaggaaaatgtgactgttgcacaagtgaagcattactgtgagatggaaagtcatgaaaagaagctgcccaagttggttttgcagagcaggattaatgaaactaaggatgttatgaagcgaaaagctagtgagattgttaaaagcacgattgaaaagaacagaggggttaaaggaggatttggtccattacagtcaatgggctctggaagaattgaaaat

SEQ ID NO: 274053 - DNA, 370 bp, Glycine max
  unsure (1)..(370): unsure at all n locations
ggacaaatgattgatttacctattcaaagcaatttgcgcgaagggctttctttaacagaatatataatttcttgctacggagctcgtaaaggggttgtagatactgctgtacgaacatcagatgctggatatcttacacgcagacttgttgaagtggttcaacacattgttgtacgtcgaacggattgtggtaccattcaaggaatttcggtgaatacccagaatggaatgatgccggaaagaatatggatacaaacattaattggtcgtgtattagcagacgatatatacagaggttcacgatgcattgncgttagaaatcaagatattggaattggacttatcaatcgatttaaaacccttcaaaccc

SEQ ID NO: 274054 - DNA, 447 bp, Glycine max
ggaggcaagaagttgtattttggcatccccgtggcttcaagaagagaatctcaatggaggcccatgagctgaagcgcgtgttccagatgttcgaccgcaacggcgacgggagaataacgaagaaggagctgaacgactcgctggagaacctgggcatcttcatctctgacaaggacctgatccaaatgatccagaggatcgacgtcaacggcgacggttgcgtggacatggacgagtttggggagctgtatcagaccataatggacgagcgcgacaatgaggaggacatgagggatgccttcaacgtcttcgaccagaacgccgacggcttcatcaccgtcgacgagttgaggaccgtcttgtcctccctcggctagaatcaaggaagaaccgtccaagactgcaaggccatgatctccaatgtcgatgttgatggagatggcatgg

SEQ ID NO: 274055 - DNA, 282 bp, Glycine max
gggggcagagactgatatatggtatggtcgtctctgagtctgaagatctgtgagttaattgcatttgcagagagagagagagagagggaagacggttgtggggattcgatgggggccaccgttcactcgccgctagtcacttatgcttccgtcatatctctgcttacactctgccctccgtttgtcatacttctatggtacaccatgactcttgctgacggatctgtttccgagacattccattatttaaggcagaatgggttgcagggtttgctacatata

SEQ ID NO: 274056 - DNA, 416 bp, Glycine max
ggatctgaatcagtgtgtgactgtctttcttcatttctctcttgcaatatttgcaatggcagaaacacaaacccagagaccctgttcaagcgtcctcgattctctgggggaagaaatcgtgagaatcatcgcacccgtttcaatatgcatgttcctggtcgtaatcctggtctcaactctcaacaccgattcttctctcttcgacgcatcgatgagcatggtcaccatcgcgtacaacgaaacaacctcggactccacctgggacaagttcctaggagcccttctgaactccttagccttcgtcatcctcgtcaccttcgcaaccttcgtcttggtcctcctcttctacttccgatgcaccaggttcttaaaactctacatggctttctccactttcatcgtgctgctattcctcg

SEQ ID NO: 274057 - DNA, 418 bp, Glycine max
  unsure (1)..(418): unsure at all n locations
ggagggagacggagacgattttacaaggaagatctgaaattctgaattcttaactggaatcagggttttggttttttttcattatcttcctcagtaagcaatgtcttctcccgcggagttttatcactctcttccgccaataacgaaggcatatggcaccgtttgcctgttggctaccgcaacttaccatcttggattatatcatccagcttacattgcactattctacgataaagtgttctacggttttcaggtttggaggttgttcacaaacttatttttccttggaccattctctatcaattttgggatccgtctcctaatgatagtaaggtatggtgtccaacttgagaaaggaccatttgatcgacggactgctgatttcttgtggatgatgatattnggtgcctttgcacta

SEQ ID NO: 274058 - DNA, 427 bp, Glycine max
gaagacaagagtgattagggttttggtttggtgtttttcttaagcttgagatcaggaattaatttcagaggttcagagaatggcaacggattcttctaatggtaatggacatcaccaaacatcatcaaagcaacctcctttgccgtctcccctgcgcttttccaaattttttcagtccaacatgagaatcttggttactggaggagctggattcattgggtctcacttagttgacagattgatggaaaatgaaaaaaatgaggtaattgttgctgacaactacttcactggatccaaggacaacctcaaaaaatggataggtcatccaagatttgagcttatccgtcatgatgtcacggagcctttattgatcgaggttgatcagatctaccatcttgcatgtcctgcctctcctattttctacaaa

SEQ ID NO: 274059 - DNA, 421 bp, Glycine max
ggcagcgcttgatttgaggccaggcaagccccactcaaccaccacacctctcctcgttcacgctacccctttctgctcttcttctacctttcaagttttaaaagtataaagatggcagagacattcctatttacctcagagtcggtgaacgagggacaccctgacaagctctgcgaccaaatctccgatgctgtcctcgacgcttgcctcgagcaggacccagacagcaaagttgcctgcgaaacatgcaccaaaaccaacttggtcatggccttcggagaaatcacgaccaaggccaacgttgactacgagaagatagtgcgtgacacctgcaggaacatcggcttcgtctcaaatgatgtgggactggatgccgacaactgcaaggtcctcgtcaacattgagcagcagagccctgata

SEQ ID NO: 274060 - DNA, 343 bp, Glycine max
  unsure (1)..(343): unsure at all n locations
ggacacgacgagtacatcgtaaaaggaggcagggatttgtttcacttgttgcccgatgctttcaaggggatcaagcagattggtgttatcggttggggatctcatggacctgcgcaggctcagaatctacgggactcacttgctgaagcaaagtctgatattgtggtcaagattggactcaggaagggttctcgttcctttgctgaagctcgcgcagctgggttttctgaggagaatgggactctatgtgatatatgggaaactgtctctggaagtgatcttgtgatgctngtaatttctgattctgcacatggctgatactatgagaagatattgtctcaca

SEQ ID NO: 274061 - DNA, 365 bp, Glycine max
ggagagtgagtgagattgagagagacgcctcgcagatctcaatcgaatctcagaaaaatgagagaaatcatcagcattcacataggtcaggccgggatccaggtcggaaactcctactgggaactctactggctcgaacatggcattcagcccgacggcatgatgccttctgactccaccttcggtgtagcccacgacgccttcaacaccttcttcagcgaaaccggatctggcaagcacgttccccgtgctgtcttcgtcgacctcgaacccaccgtcatcgacgaggtccgctgcggcacctaccgtcaactcttccaccccgaacaactcatctccggcaaggaagacgccgtcaacaactt

SEQ ID NO: 274062 - DNA, 227 bp, Glycine max
tctgagatagcacttttctctgtgattcatcaatggcaaccgcgaggaccgtgaaggatgtttcgcctcacgatttcgtgaaggcttacgccttccatctcaagcgttccggcaagatggagcttcctgagtggactgatattgtaaaaacatcataatttaaggaattggctccatatgatcctgactggtattatgtttaggctggctcaatggcaagaaagatt

SEQ ID NO: 274063 - DNA, 398 bp, Glycine max
gacggctaaaagctaaaaatcatcgaagtactcaaattagcatggctgtcacggttgcattcttgaatttgatcatcatgttttcagtagtctctacaagcaagtcactgagcttaaactactattcaaaaacatgccctgatgtggaatgcattgttgccaaggcagtgaaggatgccactgctagggacaaaactgttccagctgcacttctgcgaatgcacttccatgactgtttcgttcgggggtgtgatgcctctgtgctgctaaattcaaaaggaagcatcaaagcagaaaaagatgggccaccaaatgtttctttgcatgcattctatgtcattgatgcatcgaagaaagcactagaagcttcatgcccatgtgtggtctcttgtgctgac

SEQ ID NO: 274064 - DNA, 410 bp, Glycine max
gggcgtgttatagatgttaaaggcacaacagttcgtgttgagttggaatcccaaatgaaggttgtgacagttgaccgcatccatatatctgacaatgtggctgtaaccccatatcgtgatacatctcgctatggaatgggaagtgaaacaccaatgcatccttctcgaactcccttacatccatatatgactccaatgagagatcctggagcaacacctattcatgatggaatgagaacacctatgcatagccgagcatggaatccttatactccaatgagtcctccaagggataactgggaagatggaaatccaggctcttggggagccagtccacagtatcatcctggaagccctccttcacggccatatgaatcccctactcctggtgctggttgggctatcactcc

SEQ ID NO: 274065 - DNA, 422 bp, Glycine max
ggatcaaaacaagtgtttcgaatagattatcctaagtctttgggaatagtgctgcggtggcttcaagtcaggaggaggtgacccttttgggagctactggaagcccatttgtgtgcagggttcatattgccctcaagttgaagggagttcaatacaaatatgtcgaagaaaatttgaggaacaagagtgaactgcttctcaaatccaacccagttcacaagaaggttccagtgtttattcacaatgagaagcccatagcagagtctcttgtgattgttgaatacattgatgagacatggaagaacaaccccatcttgccttctgatccttaccaaagagccttggctcgtttctggtccaaattcattgatgataaggcttttggtgctgcatggaaatccgttttcacagctgatgagaaa

SEQ ID NO: 274066 - DNA, 270 bp, Glycine max
ggaaaccgagaagaagaagatggagatgtatcagatctggagcaggggaatagcgttgggagcgttcgcgtttggtctgcttttcctatcggcctcagcagacgacgtccttgggctctctgaagattacttcgagaaggaagttggtcaggacagaagaactctcggtgaggtctatgctccttggtgtggacactggaaaaagcttgctccagaatatgaaaagcttggtagcagcttcaagaaagccaaatctggtttaatcggcaa

SEQ ID NO: 274067 - DNA, 363 bp, Glycine max
ggcctccggcatgcagtagaccgatctgtctctggtctctagctggggaatagctggtctagcgtgcgtatttcacctgcttttcctatcgatcttagcagacgacgccggcgtgctctctgaagataactacgagaaggaagttgttcatgccataggagctttcggtgaactctatgctccttctcgttgacactgcataaagcttgctccagaatttcaaaagcttggtaccaacttcaagaaagcccaacctgacccaatcggcaacgtcgactgtgatgagctcatcagtcttgtcaagacatatggagtcttatgttacgcatctattcattggtttccaaaccgatctcttgtacc

SEQ ID NO: 274068 - DNA, 450 bp, Glycine max
atgaatcaaaatcaaatgaaactcctgcatccggtagctcaaactctcagataactcaagcagtgtttgagaaggagaaaggagagttccaggtgaaggttgttaagcagatcttatgggtaaatggaatgaggtatgaacttcaggagatatatggtattggaaattcagtggagagtgatgtggatgggaatgacccgggaaaagagtgcgttatatgcttgtcagagcctcgggacacaactgtccttccatgtcgccacatgtgtatgtgtagcggttgtgcgaaggttttgaggttccagacaaatagatgtccaatctgcagacaaccagtcgagaggcttttggagatcaaagttggacccgatcttgaggagtgaagattcattgttagtgacacaagctttctgttcaatccatactgtatagctaatactattcacttac

SEQ ID NO: 274069 - DNA, 324 bp, Glycine max
atgaatcaaaatcaaatttaactcctgcatttgttatctcaaactctcagataactcaagcggtgtttgagaaggagaaaggagagttccaggtgaaggttgttaatcagatcttatgggtaaatggaatgaggtatgaacttcaggagatatatggtattggaaattcagtggtgagtgatgtggatgggtatgaccctggaatagagtgtgttatatgcttgtcagatcctttgtactcatctgtccttccatgtcgccacatgtgtatgtgtatcgtttgtgcgaaggttttgaggttccatgacttatatatgttcaatc

SEQ ID NO: 274070 - DNA, 420 bp, Glycine max
attgaaacatatgacgtgactacaattagagcaagcacacctatgtttctcatgtgtcggaagattaaatcacttggtgtcaaatgggttatctcaggagaaggatctgatgagatctttggagggtatttgtacttccacaaggcacccaacaaggaggagttccacagagaaacatgccgcaagatcaaagcacttcaccaatatgattgcttgcgagccaataaatcaacatttgcttggggtctagaagcccgtgtaccatttttggacaaggcgtttatcaatgctgcaatgagtattgaccctgagtggaagatgataaaaagagatgaaggacgaattgagaagtggattctgaggagagcctttgatgatgaagagcatccttatctgccaaagcacattttatacaggcag

SEQ ID NO: 274071 - DNA, 401 bp, Glycine max
gagtgtgtgagttcattaacatatacaaattctgtgtgttgtgttgtgtacttgtgttaattgtgttgttgttgtaggaaatttaagtgaagagagaatgatgatgaagtctgctatgtgtgcattggtgcttgtggcactggttgtggttgaagtggggcccatggctgaagctgcggtgacttgcaacccaacacagttgactccttgtcttccggcaattaattcatgttctgcaccttcgagtgcttgttgccagaagctgaatgatcatatgccatgcttctgtggtacctcaaaaccctagcttgaacagatgtaaacttctatgccaaaaaccgtagtcttgggattgctatcaactgtaagactctattattattaaatgggatcatttttat

SEQ ID NO: 274072 - DNA, 351 bp, Glycine max
tcgtccacgcgtccgtagcgagaagacgacatattgggggagtggaagtagtatctagtacgtcgtatatgtggttgatcttttgctggttgactgttttgttccttccaattgtcagatctgaatcaccggactcactcttcacactcactcacactgaatggcttctgaaggcgaccatctccaccaccaccaccaccatcaagatcacgatcatcatcatcatgatcatgatcaccatcatcatcacgatggagagggagagaccaactcatgggtaggtaaggatgggaaggtgtaccatatccacgatggtctggcgccgcattctcacgaacccatttactcccc

SEQ ID NO: 274073 - DNA, 280 bp, Glycine max
gtatcaaggggataataatcggaccggtccctaaaattttgtaaggccttaaggggaccggattaagtgaaaatctcatgtacggttctggaatagagatggggacaggaatgtcatcaccgactaggattatctaacaggttaagtacaggtgatatagttgatgcacaatcaaaatagggttttggggatggaatttgtgggcgtaacctatgggtttcattgactttctaatctcgtacctatcagaatgtgaaagaataccttttggattaccgga

SEQ ID NO: 274074 - DNA, 405 bp, Glycine max
cccacgcgtccgaattcgagcggccgctttttttttttttttttttttgggttttttggttattccgatattcggacgcatcaacttgttatgaaatcacattgatagcctctactcgtgtcctagctcgtctaagagctagatttgcctcaattgttcgcctcttgccttccgccttattcaaattagcttctgctatttcaagagtttgctgtgcttcttgtggatcaatgtcactacccttttccgcatcattgactaaaacagtgatctcattattggttattctagcaaaaccggccatcagagccatcgttaaccattggtctttaagaagacgtattctcaaaatacctatatctacggctgtggcaataggcgcatgatttggtaatactccaattt

SEQ ID NO: 274075 - DNA, 349 bp, Glycine max
gagagtgagtgagatagagagagacgcttcgcaaatctcaatcgaatctcagaaaaatgagagaaatcatcagcattcacataggtcaggccgggatccaggtcggaaactcctgctgggaactctactgcctcgaacatggcatccagcccgacggcatgatgccttctgactccaccttcggtgtagcccacgacgccttcaacaccttcttcagcgaaaccggatctggcaagcacgtcccccgtgctgtcttcgtcgacctcgaacccaccgtcatcgacgaggtccgctgcggcacctaccgtcaactcttccaccccgaacaactcatctccggcaaggaaga

SEQ ID NO: 274076 - DNA, 399 bp, Glycine max
gaatacaaggagtggaatgacaagaatccacaggtaacatcatgcaataaagataccaagaatttgatgcaaggtagtactgtcccacaagaagttgatacaagcaaggatattgtattcacatatgatgcttacttcacggaaagtgatatcaaatgggcatcacggtgggacacatatcttttaatgaatgatgatcagatccactggttctacatcattaactctctgatgattgttcttttcctgtctggaatggtggcaatgatcatgatgagaactcttttcagagacattgccaattataatcagctagaaacccaagatgaggcccaagaagaaacagggtggaaaacttgtcatgggaaatgttttatgccaacaatcaaattaaatttg

SEQ ID NO: 274077 - DNA, 379 bp, Glycine max
ggagcaagagtgaagagcttagagaatggctcccaagggtttaatcttgttggctgagttatgcttctcagcactgtcactgagtcgttgtcttgcggaggataatggacttggtatgaacttctacaaggaatcatgccctcaggctgaagacatcatcaaagaacaagtcaagcttctctacaagcgccacaagaacactgctttctcctggctcagaaacatcttccatgactgtgctgttcagagttgtgatgcttcactgttgctggactccacaagaaggagcttgtctgagaaggaaacagatagaagctttgggttgagaaatttcaggtacattgagaccatcaaagaagctttggaaagggaatgccca

SEQ ID NO: 274078 - DNA, 405 bp, Glycine max
gacacacaacattttcagtgaaactgaaaaggggaagaagagagtgaaatgggggagctttacgcgttggacttcgatggagtcatatgtgatagctgcggagaaagctctctctctgctctcaaggctgccaaagtgagatggcctggtttgtttgatggggtggattcaaccacagaaaattggattattgaccagatgcacacagtgcgaccagtagtggaaactggatatgaaaacgttttacttgtgagattgttgcttgagagcagaacaccaaccatccggaagtcttcggttgcagaggggctaacagttgagggtatattggagaactggtcaaagttgaagcctattatcatggaagaatgggatgagaagagggatgatctgatagatcttttt

SEQ ID NO: 274079 - DNA, 313 bp, Glycine max
ggttctagtgtgcgattgcatgtcggtgtatctcgctcttcttcttttgttgatctgtgtctgggtttgatctttctctcacctgaaaatgtcttgctgcggtggtaactgtggttgcggaagctcctgcaagtgcggcaacggctgcggaggctgcaagatgtacccagacttgagctacactgagtcaaccaccaccgagaccttggtcatgggagtggcacctgttaaggctcaatttgagggtgctgaaatgggtgtgcccgctgagaacgatggcttgaaatgtggaccaaactgctcctgcaacccc

SEQ ID NO: 274080 - DNA, 227 bp, Glycine max
cgataagacaacacaacgggacacaagtgagtatgttgatcgatatagctagaggcagtgtgatgaatatgaaggtgcttgtaatattcgttgctacaatattgggagcatgggaatgccatgcgtacgatatgttccctctccgaatgaacactggctatggtgcccgtactcctgaagtgaaatgcgcacgttagaagcttgctgaggaagcacacaacatcttt

SEQ ID NO: 274081 - DNA, 399 bp, Glycine max
gacggctaaaagctaaaaatcatcgaagtactcaaattagcatggctgtcacggttgcattcttgaatttgatcatcatgttttcagtagtctctacaagcaagtcactgagcttaaactactattcaaaaacatgccctgatgtggaatgcattgttgccaaggcagtgaaggatgccactgctagggacaaaactgttccagctgcacttctgcgaatgcacttccatgactgtttcgttcgggggtgtgatgcctctgtgctgctaaattcaaaaggaagcaacaaagcagaaaaagatgggccaccaaatgtttctttgcatgcattctatgtcattgatgcagcgaagaaagcactagaagcttcatgcccaggtgtggtctcttgtgctgaca

SEQ ID NO: 274082 - DNA, 406 bp, Glycine max
ggagtagcgatggagaagaagaagggtgagctaaagtcaatgttccttcctttcctttccactagtcacataatcccgctagtggacatggccagactcttcgccttgcacgacgtcgacgtcaccatcatcaccaccgcacataacgccaccgttttccaaaagtccatcgatttagatgcgagtcgcggtcgccccatcagaacgcacgttgtcaacttccccgccgcacaagtgggtctccccgttgggatccgagccttcaacgtcgatacgcctcgggaaatgacccccaaaatctacatgggcctatcccttctccaacaagtcttcgaaaaactcttccatgacttggaaccggatttcatcgtcaccgacatgttccacccttggagtgtcgatgctg

SEQ ID NO: 274083 - DNA, 415 bp, Glycine max
  unsure (1)..(415): unsure at all n locations
gacgacagaagggggcacaaaaatacaatacaaaacaaaacagagcaaagagagagtgtgtgaaaagtgaaacaaaagacagaacaacaatggcgacacttaaggttcctcagcctcttccccccgttgcagatgattgtgagcagctccgaaaagccttctcaggttggggaactaacgaggagctgattgtatcgatcttggctcataggaatgctgctcagaggaagcttatcagagaaacttatgcccagacctatggagaagatctcctcaaggccttggacaaagaactcacgagtgattttgagaggctggttcatctttggacacttgattctgctgaacgtgatgcatttttggcaaacgaggcgactaanaaatggacttcaagcaatcaggttctggtggaaat

SEQ ID NO: 274084 - DNA, 363 bp, Glycine max
gaagacatgggaagaagaagcacacatagagcaagcgttgcatgatcattttctcttccgaaaacttactgattctcagtgccatggtttattggattgcatgcaaagagtggaggtccaacctggggatattatagtcaaacagggtggtgaaggtgactgtttttatgttgttggtagtggagaatttgaggtcttggcgactcaggaagaaaaagatggggaggtgcctagggttttgcagcgctacacagctgaaaaactttcatgctttggagaacttgctctaatgtataataaacccctccaggcttctgtacgtgctgtaacaaaaggaactctttgggctttaaaacgagaaga

SEQ ID NO: 274085 - DNA, 323 bp, Glycine max
gcccgaacaagagagcatggccgtagctgatcccaagcctgactccgaacctaaggtctggaacttcttcaagcttccgttccgccattccgtcgtcaccaatacgacgccgacttacgataaccttcaccatcttcatcatcaccataaccaccaccaccaccaccaccaccaccacaaccctaataatctaccactcgagggatccacttcccacacctgcaattccgtttactccgtcgagagatctcttctgccaacacgacatcgtctcaagctcgatcccttcaacaagctctactttccttatgagccgggcaaac

SEQ ID NO: 274086 - DNA, 371 bp, Glycine max
gtcaacactctaagcaaggcacccatgaagaaggccatgaatgactttgtattcatcatgtactccaatgccttcgctgcatgcctcctccttctcttagccttattcttttataggaaaagaacacttccgccactctcctgtaacacccttggcctattccttgttgttggcatgctcagttgcattaatcagtcgatcaagtttttcggcataggttacagctctccaactttggcctcagcactgtccgatttggtgcccgcctttaccttcatacttgccgtcatcttcaggatggaaaaattagatcggaaagctaatagcactctggccaagtccattggcacagtggtatcgatcgctggggc

SEQ ID NO: 274087 - DNA, 371 bp, Glycine max
gtcaacactctaagcaaagcagccatgaagaagggcatgaatgactttgtattcatcatgtactccaatgccttcgctgcatgcctcctccttctcttagccttattcttttataggaaaagaacacttccgccactctcctgtaacacccttggcctattccttgttgttggcatgctcagttgcattaatcagtcgatcaagtttttcggcataggttacagctctccaactttggcctcagcactgtccgatttggtgcccgcctttaccttcatacttgccgtcatcttcaggatggaaaaattagattggaaagctaatagcactctggccaagtccattggcacagtggtatcgatcgctggggc

SEQ ID NO: 274088 - DNA, 418 bp, Glycine max
gaaggtgcaagagtttgttgtgagctataagctagtttatcgtgaggagaatatgaagttgtttgttttctttgttgctgcagtagttttggtagcatggccatgccatggcgcaggctaccaaaggttccctctccgaatgaaaactggctgtggtgagcgttcttcggaggtaaaatgcgcaagttttaggcttgctgtggaagcacacaacatccgagcctttaaaaccattcctgaagagtgcgttgaaccaacaaaggactacattaatggcgaacaatttagatcagactctaaaacagttaaccaacaagctttcttttatgctagtgaacgcgaagtccatcacaacgacatatttatattcggcatagataacaccgtactctctaatatcccatactatgaaaaacat

SEQ ID NO: 274089 - DNA, 261 bp, Glycine max
ggcacaagtgagtttggtgatcgagataactagaaacagtgtgatgaaaatgaaggtccttggtttcttcgttgctacaattttggtagcatggcaatgccatgcgtacgatatgttccctcttcgaatgaacactggctatggtgcccgtactccggaagtgaaatgcgcaagttggaagcttgctgtggaagcacacaacatctttggctttgaaaacatttcttgaaaagtgcgttaaaccaccaaaggattccttcc

SEQ ID NO: 274090 - DNA, 371 bp, Glycine max
gaaggtgcaagagtttgttgtgagctataagctagtttatcgtgaggagaatatgaagttgtttgttttctttgttgctgcagtagttttggtagcatggccatgccatggcgcaggctaccaaaggttccctctccgaatgaaaactggctatggtgagcgttcttcggaggtaaaatgcgcaagttttaggcttgctgtggaagcacacaacatccgagcctttaaaaccattcctgaagagtgcgttgaaccaacaaaggactacattaatggcgaacaatttagatcagactctaaaacagttaaccaacaagctttcttttatgctagtgaacgcgaagtccatcacaacgacatatttatattcg

SEQ ID NO: 274091 - DNA, 393 bp, Glycine max
ggttctagtgtgtgattgtttgttgttgtaactcgttcttcttcttttgttgttctgtgtttgtgtttgttttttctctcacctgaaaatgtcttgctgcggtggtaactgtggttgcggaagctcctgcaagtgcggcaacggctgcggaggctgcaagatgtacccagacttgagctacactgagtcaaccaccaccgagaccttggtcatgggagtggcacctgttaaggctcaatttgagggtgctgaaatgggtgtgcccgctgagaacgatggctgcaaatgtggaccaaactgctcctgcaacccctgcacttgcaagtgaagtgttgggagagcaagcttcaagcagagatagcccttaattaggaataatgataaactattaat

SEQ ID NO: 274092 - DNA, 283 bp, Glycine max
  unsure (1)..(283): unsure at all n locations
gagagagaatgagtacggtgggagaagggaaggcgagtagtaatggtcatggatgttgcaaatcagggccaggctatgcttccccactggaagccatttctggtcccagagagtctctcatttatgtaacctctgtctacacagggaccggaatagaaaagcccgactatttggcgacagtggatgtggatccaaactctncaacttattccaaagtcatccataggcttcctggtccttatttaggtgacgaattgatcacacaggctggaattcatgcagc

SEQ ID NO: 274093 - DNA, 408 bp, Glycine max
tatgcaaagattgaaaatatagagggaatgaaacattttgatgaaatattgagagaagcagatggtatcatcctcgctcgtggaaatttagggatagaactcccacctgagaaggttttcttattccaaaaggctgctatttacaagtgtaacatggttggaaagccagttgttgttacacgtgttgtggactctatgactgataatctaagacctactcgtgctgaagcaacagatgttgccaatgcagtgttggaatgaagtgacgcaattcttcttggagcaaagaaccttgcgggaacataccctggagagaccatttctattggtggaaaaatatgtgctgaggcagagaaaggtcataatcaagaattggatttcaagaaggctcgtaaatatgtgggagag

SEQ ID NO: 274094 - DNA, 387 bp, Glycine max
gaaggtgcaagagtttgttgtgagctataagctagtttatcgtgaggagaatatgaagttgtttgttttctttgttgctgcagtagttttggtagcatggccatgccatggcgcaggctaccaaaggttccctctccgaatgaaaactggctatggtgagcgttcttcggaggtaaaatgcgcaagttttaggcttgctgtggaagcacacaacatccgagcctttaaaaccattcctgaagagtgcgttgaaccaacaaaggactacattaatggcgaacaatttagatcagactctaaaacagttaaccaacaagctttcttttatgctagtgaacgcgaagtccatcacaacgacatatttatattcggcatagataacaccgt

SEQ ID NO: 274095 - DNA, 397 bp, Glycine max
  unsure (1)..(397): unsure at all n locations
ggcaaaagaaagagagagaaatggcactgagggcagccgtgctccgccacgttcgtgtgccactccaagccgctccaaaactgcagccatggcgtgccatgtcatcacacggcgacgatcatctctccaaagaggaggtcgtcgaaagagtcctcgccgtcgtcaaagatttccccaaagtcgatccttccagggtgagtccagatgtacatttccagaaggatttgggtttggatagcttggacaatgtggaaattgtaatggcactagaagaggagttcaagctagagatcccagacaaggaagctgataaaattgactcttgtcatcttgctattgagtacatttctaaccatcccatggctggntaaactaatgtgtccttttcctatttggc

SEQ ID NO: 274096 - DNA, 390 bp, Glycine max
ggttttgagcatgagtagattgggtggagttggtgcagtggcgccactggtaactgatatcccattatcgtcagtcgaggaagaaggcggtgagggaagaaaccagccagcctgggagaagtggtcaaatgatggcacagaaagacaggtagccaagcttatggaagaaaatgtgggtgctgccatgcagtttcttcaatcaaaagcactctgcatcatgcccgtctcactagcttcagcaatataccagtcacaaccctcaggcacttctagtatagttaagcctgaaactaatcctccttcataatcatagtcagaactctggcacagatgcaccatccagtggtcccatcaagggctcacctaacactgctaggacccacgtgtaat

SEQ ID NO: 274097 - DNA, 397 bp, Glycine max
ggatgtggaatgtgggaaaccacgaagtagagtttttgcctgaagtgggagaagttgaacctttcaaaaactatctttaccgatatactactccctattcggcttccaaaagcaccagccccctctggtatgcagtcaggcgtgcctctgctcatatcattgtgctatcaagctattctccatttgtgaagtacacgcctcaatacatatggcttaaagaagagctggcgcgggttgatagaaagaagacaccttggctcattgtgctcgtgcacaagccactctacagcagcaacgtagctcactacatggagggtgaagccatgcgatcagtttttgagacatggttcgtccaatacaaagttgatgtcatctttgccggccatgtccatgctta

SEQ ID NO: 274098 - DNA, 334 bp, Glycine max
ggagagtgagtgagatagagagagacgcctggcaaatctcaatcgaatctcagaaaaatgagagaaatcatcagcattcacataggtcaggccgggatccaggtcggaaactcctactgggaactctactggctcgaacatggcatccagcccgacggcatgatgccttctgactccaccttcggtgtagcccacgacgccttcaacaccttcttcagcgaaaccggatctggcaagcacgttccccgtgctgtcttcgtcgacctcgaacccaccgtcatcgacgaggtccgctgcggcacctaccgtcaactctttcaccccgaacaactca

SEQ ID NO: 274099 - DNA, 399 bp, Glycine max
ggagtgcggtgttggttaaacatgtggaagtttggtgcttgaacttgaacgccgaacattgcgattcagagagagagagagaagagaatggccatggcccgaagagtccctcgtaatgttttgggattggtcaaaaggaacatgtccttcaaatctttggatcccccttcctccctcacccacggaatccacgtctttcattgccccgatgccgttggaattgtagccaagctatccgactgtattgcctctagaggtggaaacattctcgccgctgatgtttttgttcctgaaaataaacatgtcttctactccagaagtgattttgttttcgatcctgttaaatggccacgggtgcaaatggaagaggacttcctaaagctttcacaaacattcaaa

SEQ ID NO: 274100 - DNA, 418 bp, Glycine max
gaagaagaagaagaagaagaagaagaagggttgggtggtcccattccataggaagagatcaaagagaagagaaaagatgtttgagccgaatcagctatacactcgagcgaagaccgaggaattcgacctcgaatcaggggaaaccctctacccagggctgagcgtcggcgagaaccagctccgatggggcttcatccgcaaggtctacggcatcctctccgtccagatcgtcctcaccaccctcgtctatgtcaccaccgatttctatactccaatcaatgacctcctcaagggcaattccaccctcctcctcatcctgctcttccttcctttcatctttttgaatcccctgctgaagtaccagcagaagcatcctcataattacatattgcttgcactcttcaccgtgtctatcaac

SEQ ID NO: 274101 - DNA, 351 bp, Glycine max
cgcgagaagacgacagcagggggagaaaaacgagccaattcatcattatctctctgctctgcttcttcttgttcaaatcttaggagctgaggagaatcaatcgagagaaatatgtctggtatcgctcgtggacgccttgctgaggaacgaaagtcatggcgcaaaaaccatccacacggtttcgttgccaagcccgagactctacctgatggcaccgtaaatttgatggtctggcattgcactattcctggcaagaccgggactgattgtgacggtggatatttcccactgacaatgcacttcagtgaagattaccctagcaagccttcccagggcaaatcccctcaaggt

SEQ ID NO: 274102 - DNA, 271 bp, Glycine max
tatgttaaactatttattgtaatgaattattgtattgttaatttttttatttatatgtaaatatttggtccctaaaaaagttaataagaaaaccaagattatatgaaaaaaaaacaaattttctttgttgtttaaaaagaatattcttaaataaaatatttaaatattaaaaaaattaaaaaatataagcttatttaatttaattataatctataaaaaatgaacattttatttaaaatcatattagttgataaaaatacttaaatatgta

SEQ ID NO: 274103 - DNA, 348 bp, Glycine max
gggagtgaagaagattaacgaaggatggaagctgggtctagcgaaggagaagaggtgcagcatcgcgtgccgttgagggagagagtggagtggtcagatgttacttcggttcctcaaaacgacggccctaaccctgtcgttccgatccagtacactgaagaggtttccgaagttatggattactttcgcgccgtttaccttaccgatgaacgctcccctcgcgccctcgctctcacagtcgaagccgttcaattcaacttcggcaactacactgtgtggcatttccgacggctgttacttgagtcgctaaaagtcgactcgaacgatgaactggagtttgaggagcgt

SEQ ID NO: 274104 - DNA, 390 bp, Glycine max
gggctcaaggaatttcgcttagttctttgcagaaaaagcagtgcagatgagagcaaattgaatttagaagccaagatcaagatcagtatggaatatcctctaaggcctcctctttttgcattgagcattagttgtatatcttctggggaaaaccatgatgagacaggtttggagtggtacaatgaacttcgtgcaatggaagcagctgtcaatctacacatactaaagatgttacttgtcaatcaacaaaattatgtattggctcatcaagtgaattgtcttgctatgttgttcgactattatttggacgaggcatccccatcatctgaaaggacaaattgtacttccgtggttgatattggcttatgcaagcctgttactggtagattc

SEQ ID NO: 274105 - DNA, 362 bp, Glycine max
ggggcgaggtagccagagagtgatacaatacagagtgcgttgttgctccttcgccacaactccctgccaacatgggtatctccagagattctatgcacaagaggcgtgccactggtggcaagaagaaggcatggaggaagaagagaaagtatgagcttggtcgccagcctgctaacactaagctgtcaagcaacaagacagtcaggaggatccgggttagaggtggaaatgtgaagtggagggcactgagattggatactggaaattactcctggggaagtgaagctgtaactcgcaagactcgtatactaaatgtggtttacaatgcctcaaacaacgagcttgtgcgtactcagactctt

SEQ ID NO: 274106 - DNA, 231 bp, Glycine max
tttaggcaatagtagcagcaattcacactggtgtttgcttctcgttactcatttctcacctaactttctattcttctcagtctcagatcagaaccttagccatggcagcgttccagaagatcaaagtcgccaaccccatcgtcgagatggacggagatgaaatgactaaggttatctggaagtcaatcaaggacaagctcattttgcccttcttggagttggacatcaagt

SEQ ID NO: 274107 - DNA, 232 bp, Glycine max
gagcttcaggtcagagagagtgagagacggcaaagacggaggagaggtcgcaaacgcaaaaatggtgaagtttctgaaaccaaacaaggccgtcattgtccttcagggacgctacgccggcaagaaagccgtgatcgttcgaaccttcgacgaaggaactcgcgagcgcccctacggccactgtttggtggcggggataaagaagtaccctgcgaaagtgatcaagaaagac

SEQ ID NO: 274108 - DNA, 393 bp, Glycine max
ggagtgaagaagccaaaaagaacttcgccggagctctaacggcgaggcccaactccgatgagccgaaaccggcaccggtgccagctgttcccccgaagaaggtcatcatcaagagcgctgatatgatccccgacatgcagaaggaggccgttgatatcgccgtcgccgcgtttgagaagtacaatgtggagaaagacgttgcggagcagataaagaaggagttcgataagaggcatggccccacgtggcattgtatcgttggacgtaattttggctcatatgtgactcatgaaacaaaccactttgtttatttctacttggatcagaaagcggttttactctttaaatctggctagccttattgtggtagcaaagaagttgagatctatggga

SEQ ID NO: 274109 - DNA, 306 bp, Glycine max
ggagagaaaaaatgaccaaatcaatcaaattctttgagttgaacacaggggccaagattccttctcttgggttagggacttggcaagctgaacctggtgttgtagctgaagctctcaccacagccattcaggttggatacaggcatattgactgtgctagtgcgtataagaatcaagcagagattgggtctgctcttaagaagctttttgatgatggtgtggtgaagcgtgaagacttatggatcactttcaaactctgggggtcaaatcatgcaccagaagaagtgcccaaagccttggattaaa

SEQ ID NO: 274110 - DNA, 377 bp, Glycine max
ggagcaagagtgaagagcgaagagaatggctcccaagggtttaatctttttggctgtgttatgcttctcagcactgtcactgagtcgttgtcttgcggaggataatggacttgttatgaacttctacaaggaatcatgccctcaggctgaagacatcatcaaagaacaagtcaagcttctctacaagcgccacaagaacactgctttctcctggctcagaaacatcttccatgactgtgctgttcaaagttgggatgcttcactggtgctggactccaccagaaagaacttggcttagaagggaaccgattgaagctctgggttgagaaatttcaaggaccttgagacccttcaagaagctttggaaagggaatgcc

SEQ ID NO: 274111 - DNA, 354 bp, Glycine max
  unsure (1)..(354): unsure at all n locations
tcctgaagagtgcgttgaaccaacaaaggactacatggatggcgaacaatttagatcagactctaaaacagttaaccaacaagctttcttttatgctagtgaacgcgaagtccatcacaacgacatatttatattcggcatagataacaccgtactctctaatatcccatactatgaaaaacatggatatggggtggaggaatttaatgaaaccttatatgatgaatgggttaacaagggcgacgcaccggcattgccagagactcttaaaaattacaacaagctgttgtctcttggctttaagattgtattcttgtcaggaagatatcttgacanaatggccgtaacagaagc

SEQ ID NO: 274112 - DNA, 395 bp, Glycine max
  unsure (1)..(395): unsure at all n locations
ggaagtttgaaacaacaaagtattattgcacagttattgatgcgcctggacatagggatttcattaagaatatgattactgggacatcccaagctgactgtgctgttcttatcattgattcgaccactggtggttttgaagctggtatttccaaggatggacagactcgtgaacatgctctgctttcattcacccttggtgtgaaacagatgatttgctgctgtaacaaaatggatgctactacacccaagtattccaaggccaggtatgatgaaattgtgaaggaagtctcttcctacttgaagaaagtaggatacaaccctgacaagattccttttgttcctatctctggttntgaaggagacaacatgattgagaggtccacaaaccttgac

SEQ ID NO: 274113 - DNA, 205 bp, Glycine max
aggcgtgcgtacacgtccgagaagacgacagagaggcatgcatctcaaccatgggggctaaggtttcaagatgcggtaacacctataatgcgcggaattatatacttacatcacgacttcttgatcttgctcattgaaagcggccgttatggatcatggctattgcttcgtgctttgtgcaattccaggattaaaatgaacccaa

SEQ ID NO: 274114 - DNA, 395 bp, Glycine max
ggtgtgagttcattaacatatacaaattctctgtgttgtgttgtgtacttgtgttaattgtgttgctgttgtaggaaatttaagtgaagagagaatgatgatgaagtctgctatgtgtgcattggtgcttgtggcactggttgtggttgaagtggggcccatggctgaggctgtggtgacttgcaacccaacacagttgactacttgtcttccggcaattaattcaggttctgcaccttcgagtgcttgttgccagaagctgaacgagcaaaagccatgcttctgtggctaccttaaaaaccctagcttgaagcagtatgttaactctcctaatgcctaaaaaaccgttagttcttgtggtattgcctatccaacttgttaagcacctgttatat

SEQ ID NO: 274115 - DNA, 248 bp, Glycine max
ggcatcaaaattgcttattattttggtattagggatgcgatggctctgttctgattgactccactaaggataatacagcagaaaaggattctccagggaatttgagcctgagaggctttgaagtcatagatgccatcaaagaagagcttgaaagacaatgccctggggtggtttcatgcgctgatattcttgccatggctgctagagatgcagttttctttgctggaagcccagtgtatgacatacct

SEQ ID NO: 274116 - DNA, 297 bp, Glycine max
gattccactgagtgtggtaatcaatcatcttttgattggtcttcagtactttagtgtgtgatttaattcccagattttgagaatgtctagctgtgggtgtggaagtagctgcaactgtggcagcaactgctgttgcaacaagtactctgttgacttgagctatgttgagaagacaaccacagagactcttgttttgggtgttgggtctgtgaaggcccaattggacggtgctgaaatgggtgttgcagctgagaacggtggctgcaactgtggatcaagctgcacctgcgacccatg

SEQ ID NO: 274117 - DNA, 344 bp, Glycine max
  unsure (1)..(344): unsure at all n locations
gatagcatcctaagatacagagactgtcaccatcgtcctgctcatttggcacatgcttctccccctgaatactttgtccgcctggagaacacaacttacaaagacgatctatatttaaggaagaggacaaggatgcgtcggtggctttgttgtacttgtcaggtggaagagtcttacccatcaaatgaaaatgaacacctgaaaagcccaaggaattatggagatggcaaccaaaaaggctcaaaggtgtcagctcctgtcaaacctgaaacacanaaggcacctncacctattgaagctccaaccttgtctntagatgagctgaaggagaagactgacaactt

SEQ ID NO: 274118 - DNA, 402 bp, Glycine max
ggcacaagtgagtttgttgatcgagataactggaaacagtgtgatgaaaatgaaagtccttgttttcttcggtgctacaattttggtagcatggcaatgccatgcgtacgatatgttccctctccgaatgaacactggctatggtgcccgtactccggaagtgaaatgcgcaagttggaggcttgctgtggaagcacacaacatctttggctttgagaccattcctgaagagtgcgttgaagcaacaaaggaatacatccatggcgaacaatatagatcagacttccaaacagttaaccaacaagcttacttttatgccagagacctcgaagtccatcccaaggacacatttgtgttcagtatagatggcaccgtactctctaatattccatactacaaaaa

SEQ ID NO: 274119 - DNA, 381 bp, Glycine max
gaagtgtgaagcactgagcattgaggaaatgggatcccttgggagagcgatctacagcgttggtaactggattcgagaaactggacaggccattgatcgtctcggttcccgtcttcagggcggttactacttccaagagcagctctctaggcatcgaactctgatgaacatatttgataaggctcctgttgttgataaggatgtatttgttgcgccaagcgcctccgtcattggagacgttcaacttggaagaggatcatccatttggtatggagttgtcttgagaggtgatgttaacatcatcagagttggaaatggaactaacattcaggacaactctctggtgcatgttgcaaagtcaaatttaagtgggaaggtgtt

SEQ ID NO: 274120 - DNA, 361 bp, Glycine max
gacactaaacaagttaaaagaagagcatcgctgaactaacaaagcaaccctatgtcgaaggtggtttgtgtcaccggagccagcggcgccatcggatcatgggtggtcctactcctcctccagcgtggttacaccgtccatgccaccgtccaagatatcaaggatgaaaatgagacgaaacatttggaggaaatggaaggagcaaagagtcatctccatttttttgaaatggatcttcttgacatcgactccattgccgctgccataaagggttgttccggcgtaatccaccttgcatgtcctaacatcattggtcaagtcgaagatcccgagaaacagatattggaaccggcgattaaag

SEQ ID NO: 274121 - DNA, 350 bp, Glycine max
ggagagcgagttgattaaggcaaagggtgtgatgagattagttttgagaagaaaccagcaatcggcgattaggagtgagagagatatggagggaattgaaggaaatagcagcagatacagtctgaaaccctcgcgaatttgcaacgaagatgttctgatctgcgtcgacgtcgatcctcagtgcctcgtcgaaatgaaaggtgccaccggtcccaatggcagacccctcacccgtttggactccatcaaacaagccatcgttcttttcgtaaatgccaaattaaccttcacccccgaccaccgtttggccttcgccattttttccaaaaccttgggtttttggttcagga

SEQ ID NO: 274122 - DNA, 299 bp, Glycine max
  unsure (1)..(299): unsure at all n locations
atagggatagggttaaggccatggagcgcatcatcggcgccaagtacaagctatgtcgcaagatcggaagcggatccttcggcgaaatctacctcgccactcatattgataccttcgagatcgtcgccgtcaagattgaaaacggtaaaacgaagcatccgcaattgctttatgaggccaagctctacaatattcttcaaagaggaagtggaatcccgagcataaaatggtgtggtgtagacggngaggataatgtgcttgttatggacttgctgggacctagtcttgaggatcttttt

SEQ ID NO: 274123 - DNA, 188 bp, Glycine max
tcttgaatttgatcatcatgttttcaagagtctctacaagcaagtcactgagcttaaactactattcaaaaacatgccctgatgtggaatgcattggtgccaaagcagtgaaagatgccactggtatggacaaaactgtttcaactgcacttttgcgaatgcactttcatgactgtttcggtcggggg

SEQ ID NO: 274124 - DNA, 363 bp, Glycine max
gtcaacactctaagcaaagcaggcgtgaagaagggcatgaatgactttgtattcatcatgtactccaatgccttcgctgcatgcctcctccttctcttagccttattcttttataggaaaagaacacttccgccactctcctgtaacacccttggcctattccttgttgttggcatgctcagttgcattaatcagtcgatcaagtttttcggcataggttacagctctccaactttggcctcagcactgtccgatttggtgcccgcctttaccttcatacttgccgtcatcttcaggatggaaaaattagattggaaagctaatagcactctggccaagtccattggcacagtggtatcgatc

SEQ ID NO: 274125 - DNA, 367 bp, Glycine max
gacgacagaagggggcacaaaaatacaatacaaaacaaaacagagcaaagagagagtgtgtgaaaagtgaaacaaaaaacagaacaacaatggcgacacttaaggttcctcagcctcttccccccgttgcagatgattgtgagcagctccgaaaagccttctcaggttggggaactaacgaggagctgattgtatcgatcttggctcataggaatgctgctcagaggaagcttatcagagaaacttatgcccagacctatggagaagatctcctcaaggccttggacaaagaactcacgagtgattttgagaggctggttcatctttggacacttgattctgctgaacgtgatgcatttttggcaaa

SEQ ID NO: 274126 - DNA, 401 bp, Glycine max
gcccgaacaagagagcatggccgtagctgatcccaagcctgactccgaacctaaggtctggaacttcttcaagctttcgtttcgccatttcgtcgtcaccaatacgacgccggcttccgctaaccttcaccatcttcattatcaccattaccaccaccaacaccatcatcatcaccacaaccctaataatctacccctcggagggtccaacttccacaccctgccattgcgtttactccgccgcgagatctcttctgccaacacgacatcgtgttaagctcgatcccttcaacaagctctactttccttatgagccgggcaaacaggttaggagtgccatcaggattaaaaacacccgttaatctagcgtagctgtcaagtttcaaacaactgcacccaaa

SEQ ID NO: 274127 - DNA, 403 bp, Glycine max
gtcaacactctaagcaaagcagccatgaagaagggcatgaatgactttgtattcatcatgtactccaatgccttcgctgcatgcctcctccttctcttagccttattcttttataggaaaagaacacttccgccactctcctgtaacacccttggcctattccttgttgttggcatgctcagttgcattaatcagtcgatcaagtttttcggcataggttacagctctccaactttggcctcagcactgtccgatttggtgcccgcctttaccttcatacttgccgtcatcttcaggatggaaaaattagattggaaagctaatagcactctggccaagtccattggcacaagggtatcgatcgctggggcattgttattgtctttgtacaaaggccaagtca

SEQ ID NO: 274128 - DNA, 416 bp, Glycine max
  unsure (1)..(416): unsure at all n locations
gaaggtgcaagagtttgttgtgagctataagctagtttatcgtgaggagaatatgaagttgtttgttttctttgttgctgcagtagttttggtagcatggccatgccatggcgcangctaccaaaggttccctctccgaatgaaaactggctatggtgagcgttcttcggaggtaaaatgcgcaagttttaggcttgctgtggaagcacacaacatccgagcctttaaaaccattcctgaagagtgcgttgaaccaacaaaggactacattaatggcgaacaatttagatcagactctaaaacagttaaccaacaagctttcttttatgctagtgaacgcgaagtccatcacaacgacatatttatattcggcatagataacaccgtactctctaatatcccatactatgaaaaac

SEQ ID NO: 274129 - DNA, 407 bp, Glycine max
  unsure (1)..(407): unsure at all n locations
ggatgtggaatgtgggaaaccacgaagtagagtttttgcctgaagtgggagaagttgaacctttcaaaaactatctttaccgatatactactccctattcggcttccaaaagcaccagccccctctggtatgcagtcaggcgtgcctctgctcatatcattgtgctatcaagctattctccatttgtgaagtacacgcctcaatacatatggcttaaagaagagctggcgcgggttgatagaaagaaaacaccttggctcattgtgctcgtgcacaagccactctacagcagcaacgtagctcactacatggagggtgaaaccatgcgatcacgttttgagacatggntcgtccaatacaaaagtgatgtcatctttgcccggcatgtncatgcttatgaaagatca

SEQ ID NO: 274130 - DNA, 414 bp, Glycine max
  unsure (1)..(414): unsure at all n locations
gaaggtgcaagagtttgttgtgagctataagctagtttatcgtgaggagaatatgaagttgtttgttttctttgttgctgcagtagttttggtagcatggccatgccatggcgcangctaccaaaggttccctctccgaatgaaaactggctatggtgagcgttcttcggaggtaaaatgcgcaagttttaggcttgctgtggaagcacacaacatccgagcctttaaaaccattcctgaagagtgcgttgaaccaacaaaggactacattaatggcgaacaatttagatcagactctaaaacagttaaccaacaagctttcttttatgctagtgaacgcgaagtccatcacaacgacatatttatattcggcatagataacaccgtactctctaatatcccatactatgaaaa

SEQ ID NO: 274131 - DNA, 419 bp, Glycine max
ggcaaaagaaagagagagaaatggcactgagggcagccgtgctccggcacgttcgtgtgccactccaagccgctccaaaactgcagccatggcgtgccatgtcatcacacggcgacgatcatctctccaaaaaagaagtcgtcgaaagagtcctcgccgtcgtcaaagatttccccaaagtcgatccttccaaggtgagtccagatgtacatttccagaaagatttgggtttggatagcttggacaatgtggaaattgtaatggcactagaagaggagttcaagctagagatcccagacaaggaagctgataaaattgactcttgtcatcttgctattgagtacatttctaaccatcccatggctggttaactaatgtgtcctttttcctatttggcttcatgttgaacttaaacacag

SEQ ID NO: 274132 - DNA, 371 bp, Glycine max
  unsure (1)..(371): unsure at all n locations
ggttttgagcatgagtagattgggtggagttggtgcagtggcgccactggtaactgatatcccattatcgtcagtcgaagaagaaggcggtgagggaagaaaccagccagcctgngagaagtggtcaaatgatggcacagaaagacaggtagccaagcttatggaagaaaatgtgggtgctgccatgcagtttcttcaatcaaaagcactctgcatcatgcccgtctcactagcttcagcaatataccagtcacaaccctcaagcacttctagtatagttaagcctgaaactaatcctccttcataatcatagtcagaactctggcacagatgcaccatccagtggtcccatcaagggctcacctaacact

SEQ ID NO: 274133 - DNA, 404 bp, Glycine max
ggggcgaggtagccagagagtgatacaatacagagtgcgttgttgctccttcgccacaactccctgccaacatgggtatctccagagattctatgcacaagaggcgtgccactggtggcaagaagaaggcatggaggaagaagagaaagtatgagcttggtcgccagcctgctaacactaagctgtcaagcaacaagacagtcaggaggatccgggttagaggtggaaatgtgaagtggagggcactgagattggatactggaaattactcctggggaagtgaagctgtaactcgcaagactcgtatactagatgtggtttacaatgcctcaaacaacgagcttgtgcgtactcagactcttgtaaaaagtgctatcgttcaggttgatgctgctccattcaaa

SEQ ID NO: 274134 - DNA, 391 bp, Glycine max
gggagtgaagaagattaacgaacgatggaatgtgggtctagcgaaggagaagaggtgcagcaacgcgtgccgatgagggagagagtggagtggtcagatgttactccggttcctcaaaacgacggccctaaccctgtcgttccgatccagtacactgaagagttttccgaagatatggattactttcgcgccgtttacctcaccgatgaacgctcccctcgcgccctcgctctcacagccgaagccgttcaattgaactccggcaactacactgtgtggcatttccgacggctgttacttgagtcgctaaaagtcgacttgaacgatgaactggagtttgtggagcgtatggccgctggaaattctaaaaattatcagatgtggcatcata

SEQ ID NO: 274135 - DNA, 193 bp, Glycine max
  unsure (1)..(193): unsure at all n locations
atgaaagactagggtatctggaagtaatcaaggacaagctcattttgcccttcttggagttggacatcaagtattatgacttangccttccttaccgtgatgagaccgatgataaaggtacaattgaaagtgcggaagcaactctcaagtataatgtggcaattaagtgcgcaactattactccagatgaagc

SEQ ID NO: 274136 - DNA, 404 bp, Glycine max
ggagagaaaaaatgaccaaatcaatcaaattctttgagttgaacacaggggccaagattccttctcttgggttagggacttggcaagctgaacctggtgttgtagctgaagctctcaccacagccattcaggttggatacaggcatattgactgtgctagtgcgtataagaatcaagcagagattggttctgctcttaagaagctttttgatgatggtgtggtgaagcgtgaggacttatggatcacttgcaaactctggtgttcagatcatgcaccagaagatgtgccaaaagcattggataaaacattacaggaattgcaacttgactatcttgacctctatctgatccactggccagtccgcatgaaaagtggaacatttggactcaataaagaatatctt

SEQ ID NO: 274137 - DNA, 387 bp, Glycine max
ggcagttcaaagcgaagaaagattcgaaacgaagaaagaaagcgttgtgaagaatggcggaagagggacaagtgatcggtgtccacagcgtagaggagtggaaggaacatctcaagaagggagaagagtccaagaaattgattgtggtggattttactgcttcttggtgcggtccatgccgtttcattgccccaattcttgcagagtttgctaaaaagttgccgaatgtcaccttcctcaaggtggatgtggatgaattggagactgtttccaaggagtggggaattgaggctatgccaaccttcctgttcttgaaagaaggcaagctggtggacaaggttgtgggtgccaagaaagaggagctgcaattgacaatagccaaacatg

SEQ ID NO: 274138 - DNA, 408 bp, Glycine max
ggaagaagaagaatcagttccgtcgtgagacactgtcataacataagagtcgtggacgcggttggctgttgctgtctacggttccaacttccaagttacaagcttcacccattttataaaagttacggttcggttccgctgcattcgtgcaacacaaaatgagcgccatctctttcagttccacccatttgcacagttggaaaaatcccaaggggtttggaaaggtgagaaagcaacgagatgggaagctacttgtcaagtgttccagcaagagtgggaacccaacttcattgcaaaatggggttcgtgttggtgttcttggagctagtggctacactggttctgaggttatgcgactcttggctaatcatccacagtttgggattgcactgatgactgctgatagga

SEQ ID NO: 274139 - DNA, 121 bp, Glycine max
ggaagcttgaaacaacaaagtattattgcacaattattgatgcgcctggacataaggatttcattaagaatatgattactgggacattccaagctgactgtgctggtcttatcattgattc

SEQ ID NO: 274140 - DNA, 418 bp, Glycine max
ggtgtgagttcattaacatatacaaattctgtgtgttgtgttgtgtacttgtgttaattgtgttgttgttgtaggaaatttaagtgaagagagaatgatgatgaagtctgctatgtgtgcattggtgcttgtggcactggttgtggttgaagtggggcccatggctgaggctgcggtgacttgcaacccaacacagttgactccttgtcttccggcaattaattcatgttctgcaccttcgagtgcttgttgccagaagctgaaggagcaaaagccatgcttctgtggctacctcaaaaaccctagcttgaagcagtatgttaactctcctaatgccaaaaaaaccgttagttcttgtggtattgcctatccaacttgttaagcacctgttatatatatatataaaatgtgtgaacaa

SEQ ID NO: 274141 - DNA, 286 bp, Glycine max
  unsure (1)..(286): unsure at all n locations
ggagcgaaaaatgaagaaaatggcttccaagggtttaacctttcttgctggggtaatatgccgttcaacacttgcccttgagtcctcttgtggcgggggaaggccaaaataatggcctggttatgaccttttccaaggaatcatgccttcagcttgaagacatcatcacaaaacaggtcaagcttttctacaagcgccacaagaacactgctttctcctggctcaagaacatcttncatgactgtgctgttcaaagttgtgatgcttcactgttgctggactccac

SEQ ID NO: 274142 - DNA, 406 bp, Glycine max
  unsure (1)..(406): unsure at all n locations
ggcacaagtgagtttgttgatcgagataactagaaacagtgtgatgaaaatgaaagtccttgttttcttcgttgctacaattttggtagcatggcaatgccatgcgtacgatatgttccctctccgaatgaacactggctatggtgcccgtactccggaagtgaaatgcgcaagttggaggcttgctgtggaagcacacaacatctttggctttgagaccattcctgaagagtgcgttgaagcaacaaaggaatacatgcatggcgaacaatatagatcagactccaaaacagttaaccaacaagcttacttttatgccagagacctcgaagtccatcccaaagacacatttgtgttcagtatagatggcaccgnactctctaatattccatactacaaaaaacat

SEQ ID NO: 274143 - DNA, 403 bp, Glycine max
gaagaagggttctttcttccctgcgaagattcagagtgctaagtgtgagagaaagaaaatgccaaagtctcaatttcgaaccccatttcttgtttctttttctcttttgttattcatcttcaacctcaccccttcatacgcactctatggagcatccacacccgtgcttcaactcactccctctaacttcaagtccaaggttctgaattcaaatggagttgttcttgttgaattctttgctccatggtgtggacactgtcaggctcttactcctatatgggagaaggcagctactgtgttgaaggcgtgtgttactgttgcagcaattgatgctgatgctcacccgtctttggctcaggaatatggaattagaggatttccaactataaaaagtgttgcacct

SEQ ID NO: 274144 - DNA, 389 bp, Glycine max
ggatagagagatggcagctgcaacatctggtgctgtgttaaatgggttgggatcttccttcttgagtggaggaaacaggagccaaacccttctggcctctgctattggaggcaaagttggtgctgctgttactgttaatcccagaagactcattgtggtagctgctgctgcaccaaagaagtcatggctccctggtgttagaggtggtggcaatctcgtcgacccagaatggcttgatggatcgctaccaggtgactatggttttgatccactaggccttgggaaggacccagcattcctcaaatggtacagagaagctgagctcattcatgggaggtgggcaatggctgcagttctaggaatctttgtggggcaggcatggagtggag

SEQ ID NO: 274145 - DNA, 394 bp, Glycine max
ggaagcagaagccaaatggcaccgggccgtcattccataaaccccaaaacccatggcgactttgacttctaaaaccaacgtcgttttcatagacaccaacctcgatacccacttggccctcgtcgtttccgacctcgacactgtctgcaaccttaaaaagagttttctgtcggaacatccttaatgctttccgaaaattgggaaaattcagattcatgggataaaggttgagcgcatggggtacttttaccaccttacagattccatgcctgtgagaagtgccttcagtggtgtcaaagagagctggtttctcactgttgatgtttctgtgttgagggagtgtgctcagaatgactcaatattttctctgggcattgcaaataatgctttgact

SEQ ID NO: 274146 - DNA, 259 bp, Glycine max
  unsure (1)..(259): unsure at all n locations
ngggtgttgtgttaatctcattcacacattcacaggtatactctctctctctttgtcgcttggatcactgatctcatctcaattttcagatatgtcgacatctgataagccagaagtggtggaaaggggtagcaaggatgaaaaacacaaggaagatgatcaagaggaggggaagggtggattcattgagaaggtgaaggatttcattcatgacattggtgagaagattgaggaagctattgggtttgggaagccaact

SEQ ID NO: 274147 - DNA, 378 bp, Glycine max
aaccaaaaatggttctcacatccactgccacacacccagatgaacaagaccagaggctaaactatacttttgcttccagatatgtgcgtgaacctattccaaagttcaagatgccggagaaatccataccaaaagatgctgcttatcagataataaacgatgagttgatgttggatggtgcaccaagggctaacttggcctcggttgtgaccacttggatggagcctgagtgtgacaagctcataatggcttcacttaacaagaactatcttgacatggatgagtatcctgttaacactgagcttcagaaccggtgtgttaatatcatagcaaatctattccatgctcctataagtgatgatgagactgcaataggtg

SEQ ID NO: 274148 - DNA, 388 bp, Glycine max
gacacagggtcctttcttacctgctaagattcagagtgctaagtgtgatacaatgaaaatgcctaagcctcaacttcgaaccccatttattgaatgtttcactgttttattaaccatcatcgacgttacctctgcatacgcgctctatggagcatccactcccgtgctatagctcactcactgtgacttcaagtccatggatctcaattcagatggagttgtgctcattgaatgctttgctccatggtgtggacactgtcaggctctgactgctatatgggataaggcatctactgacttgaacggtgtcgttactgtggcatcaatagatgctgatgctcacacatgtttggctcacgaatattgaatcagaggattttcaactatt

SEQ ID NO: 274149 - DNA, 394 bp, Glycine max
gatccaaaaccatttgatcctaaaacatatgtggaggaggatacttttgtaaccgatgaatctggaaccagaaaacgcatacgtttggagaacaatattgtacgctggaggactactaaaaatcctgatggcacaacatcatgtgaaagcgatgctcgctttgtgagatggtccgatggcagcctgcagttgctaattgggaatgaagttcttgacatatcagtgcaagatgcacagcatgatcaagcacatctttgtcttagacatggaaagggtatcctccaatcacaaggaaggttgttaaggaaaatgaggtttatgccatcttccttgtcatcaaattctcatcggctgttgactgcccttgttgactcaaggcataagaaggttttta

SEQ ID NO: 274150 - DNA, 233 bp, Glycine max
gatagaaaaaaataaaaaactttgcaaagattttatccaattggaattttaaaaatgactgggataaacttaagaattcaattattgaaattgaataaggtaaccatttaattggattggtccaatggtattaaaaaatggagtacttacttccaattcctatttattattggaatacccgaccacttggtttggtatcggaccattttttttggatttcaaaaattttccgg

SEQ ID NO: 274151 - DNA, 409 bp, Glycine max
  unsure (1)..(409): unsure at all n locations
gatggacttgatcattttcgtctatctccgacacaactccgtgcagagttcacaaggcgcaatgcggatgctgtgtttgccttccagctccggaatcctgttcacaatggccatgctttgctaatgactgacacccgaaagcgccttcttgagatgggctataagaatcctgtcctcttgcttcatccacttggaggctacaccaaagctgatgatgtcccacttgattggcgaatgaagcaacatgagaaggtacttgaggatggtgttcttgatccagagacaactgtggtatccatattcccatctcccatacactatgctggacccacggaggtgcagtggcatgcaaaggctaggatcaatgcangggctaacttctatatcgntggtcgtgaccccgcaggca

SEQ ID NO: 274152 - DNA, 348 bp, Glycine max
gacagcggagcatttgatagatggaaactgcaacagcctttggtgtgctaccctgattatgcctaatcataagcttagaacgacacacatggaatcttccattgctctagtgactatcattgatgttatctttgtctacatgctcattcaaggagccactgctgactatggtagtagtcacagtgcttatgccactatttatgtcgatgctgatgcttctggcacaatgggaggagcatgtgcatatggaaatcactatagccatcgctatggaactgacactagggctctaaccactgctttggtcaacaatactttaacctgtggagcttgctatgcaatgacatg

SEQ ID NO: 274153 - DNA, 376 bp, Glycine max
  unsure (1)..(376): unsure at all n locations
ggatgatgatgcgttggcagtggtggaaaccaaagacgggaaatcggtaacgttgtctataatgagacagggtgttaacggctagaaacgaaggaaggagtaacataaaatggaggttcaatttgccctcccattccactaacacacatcacatctccctctcgcacgcgacgagggagctacgcttcggaatctcactccctctttctgctaattgacaagatggttgctcagaaattcgttgttgatttgaacaagccccttgtgttccaggttgggcatcttgtggaagcctatgatgagtgggttcacgatcctatcgtaagcaagggaggccctacgtttttccaaaatgggtntctcgagttggtcacgc

SEQ ID NO: 274154 - DNA, 389 bp, Glycine max
  unsure (1)..(389): unsure at all n locations
ggggagatagatggcacgcttgtcactgctcattttcgcgttctgcgccgtcggcgtcgccgtcgccgtcgcgggcttctccttcgatgatgccaaccctatccgtttagcgtcggacttggagtcgcatgtgctggacgtgatctgacagagccgncacgctctctccttcgcccgtttcgctcgccgncacggcaagcgctaccgttccgtcgacgagatccgcaaccgctttcggatcttctctgataatcttaaactcatcagatccaccaacaggaggtctctcacctacacgctcggcgtcaatcatattgctgactggacttgggaagagttcaccagacacaagctcggcgctcctcaaaattgctctgccacgctcaaag

SEQ ID NO: 274155 - DNA, 417 bp, Glycine max
gacactaaacaagttaaaagaagagcatcactgaactaacaaagcaaccctatgtcgaaggtggtttgtgtcaccggagccagcggcgccatcggatcatgggtggtcctactcctcctccagcgtggttacaccgtccatgccaccgtccagatatcaggatgaaaatgagacgaaacctttggaggaaatggaaggagcaaagagtcatctccatttttttgaaatggatcttcttgacatcgactccattgccgctgccataaagggttgttccggcgtaatccaccttgcatgtcctaacatcattggtcaagtcgaagatcccgagaaacagatattggaaccggcgataaaaggaacggttaatgtgttgaaggccgcgaaggaagcaggggtggagcgcgtggtggcgac

SEQ ID NO: 274156 - DNA, 447 bp, Glycine max
  unsure (1)..(447): unsure at all n locations
acgcgtncgaacacgcctgactacggctttgagaagacgacataaagggacggcttaaggctaaaaatcatcgatgcactcgaattagcatggctgtcacggttgcattcttgaattcgatcatcatgttttcagtagtctctacaagcaagtcactgagcttaaactactattcaaaaacatgccctgatgtggaatgcattgttgccaaggcagttaaggatgccactgctaggtacaaaactgctccaactgcacttctgcgaatgcacttccatgactgtttcgttcgggggtgtgatgcctatgtgctgctaaattcagaaggaagcaacatagcagaaaaagatgggccaccaaatgttactatgcatgcattctatgtcattgatgcagctaagaaagcactagaagctttatgcccaggtgtggtctctagtgctgaca

SEQ ID NO: 274157 - DNA, 340 bp, Glycine max
aatgtggaagctgacctattatgctgcacatggggcattgggtcttaaaattacgtaccatgaaccctcgttcactaatacgaagccatacttcaatgactggtcaaatcatgagtcgaagagttcactactgttgtactacatgtgccagtgtcggctctacatatatagcattgctgctattctcacatgggacactcgaatgaaggatttttcaaagacgtttacttaccatgtaattactgcactactgattgggatctcatatctaacaagtatctttagggatggctacataatcctcgcccttcatgatgcacgtgacgtattcatggaagct

SEQ ID NO: 274158 - DNA, 280 bp, Glycine max
  unsure (1)..(280): unsure at all n locations
ggttctagtgtgtgattgtttgttgttgtaactcgttcttcttcttttgttgttctgtgtttgtgtttgttttttctctcacctgaaaatgtcttgctgcggtggtaaccgtggttgcggaagctcctgcaagtgcggcaacggctgcngaggctgcaagatgtacccagacttgagctacactgagtcaaccaccaccgagaccttggtcatgggagtggcacctgttaaggctcaatttgagggtgctgaaatgggtgtgcccgctgagaacgatggc

SEQ ID NO: 274159 - DNA, 318 bp, Glycine max
  unsure (1)..(318): unsure at all n locations
gacacacataaaagcatgtgtggactttacaaggccatgatggagagggaagaagagctggctataatgattttcatgttcccatgttctgctgaccagccttgtaagtggcttgaatcattaggtgtccaccagaagggtatgtggaggagaaagtgcagttgctattcacactgcccttttggtctcctttctgggaaaggtgggctgcaagaactatggggtggaattgatgaatttgaataccctcatgattctncatttaataaccatttcatctcaagcccatttcttctctctgggtggtctgagtactac

SEQ ID NO: 274160 - DNA, 429 bp, Glycine max
gaatatgaaaaagaaaaaaaagattctaaagaaatgtaactaatattctttagaataatcaaaaagaatattaaattcaaataaattttagatagaaaaaagacttaaaaaggaggatttgaaatgcgagatctaaaaacatatctttccgtggcaccagtagtaagtactctatggttcggggctttggcgggtctcttgatagagatcaatcgtttttttccagatgcattgatattcccttttttttcattctagttattgacacggaaaggggtgaagaagattatagatccaattaagtattaaatatatgtaattaatatgtaattaatctcctcttctttatttcgtcttttatttcttcttttttttacaattggaatagaataagttaggaaagagaaagaataaagggtaatttggcct

SEQ ID NO: 274161 - DNA, 311 bp, Glycine max
gttggggagaacatgcagcctaatgtcatatcatcgaagtcatcttcagattctgagaattttgctgagtctcaacttgttcccaagatgccaaaacaagcttctgaggagcctaagaagaaaaagaaagtgaagctgccacttccattagttccagctgataacaatcaaaatgcctcacaacctgttaggaaatgcatgcattgtgagataaccaagacaccacagtggagggcagggccaatgggaccaaaaacactatgcaatgcttgtggtgttcgttacaagttcggccggctctttcccgagta

SEQ ID NO: 274162 - DNA, 408 bp, Glycine max
gataacatacaagatcaaaagataaaagtggaacacatggccacactctgtggctttacctacatcaccggatcacagaacagaatcgatatcgaaaatctcgctcgctttgctgttgatgaacacaacagaaaagagaatgcagttctggagtttgtgaaggtgattagtgcaaagaaacaagtggtttctggcaccttgtactatatcacttttgaagcaaatgatggtgtgacgaaaaaagtttatgaaactaacgtggtggagaaaccatggttgaacatcaaggaagttcaagaattcaagcccatcacttgtgctggtaaatccttttcggtgaccggctagcacataactaggttatggagtgactagcttggcccgaagaataataatatgtatgaactg

SEQ ID NO: 274163 - DNA, 259 bp, Glycine max
gacgatgagtcgatttgataactaagatattgatattcgtgatattgatccaatttgatatcatcgaaatccaatttataccattgttgaattaattatcgatgaaagatttatcatctctatgggattaaattccgaattttttattggaaatttaagagaaataaaacataattaagattatgggaggtaatattcctgcattattgctactgcactggatatctaggtactactgctttttacttataatttacgt

SEQ ID NO: 274164 - DNA, 263 bp, Glycine max
  unsure (1)..(263): unsure at all n locations
ggggttaaaatggaattggtggatgctgcattccctcttcttaaaggtgttgttgccacaactgatgtggttgaggcatgcactggggtcaatattgccgtgatggttggtggattcccaagaaaagaaggtatggagaggaaggatgtgatgactaagaacgtctccatttacaagtcccaggcttctgcccttgaaaagcatgctgctgccaactgcaaggttcttggtgntgctaacccagcanacaccaatgcattgat

SEQ ID NO: 274165 - DNA, 349 bp, Glycine max
agtcacaagtatggtcttgtctaccctggtgttggttgggttgtatggaggagcaaagatgacttgccagatgaacttgtttttcacataaattatcttggatctgatcagcccactttcacattgaatttctccaaaggatctagtcaaattattgctcaatattatcaattgattcggcttggctttgagggttacaaaaatatcatggaaaattgctgggagaatgcaagagttctgaaggaaggaatcgagagaacaggtcggtttaacatcatctccaaagatatcggtgtgccaattgtagccttctgcttgaaagacaatagtcaacacacaagtgttgaga

SEQ ID NO: 274166 - DNA, 377 bp, Glycine max
  unsure (1)..(377): unsure at all n locations
ggagcaaagagaaaagcttccttcaatgtagttgtgattcttcaataccatatattctctttctctttcttgatttgtgttgtgaaacagttaaaagtggtcttgatgtctgaggcattggaagaggttgttccttcaatgaaaggagggtgtgaagaagaagggttgaacctggaggctactgagctgaggcttgggttgccagggtgtgagtcaccagagagggagggtgtgtttaagagtgtggtggtgtctggggccaagaggggtttctctgatgccattgatggaaactggaatggtggaggatctgaaaaagatgccgcttccttgaattctccaacttcaaagggtgctgctagtgntagtgttagtgc

SEQ ID NO: 274167 - DNA, 138 bp, Glycine max
gaccccaaagccataatgtctcaaaacgaggaggccatatagaaattttgtattactttgtcttgaactttgtgaaaaactccattttatatcttcctcgtttcgaacaaaaaaatggggctttgccccaattttaca

SEQ ID NO: 274168 - DNA, 315 bp, Glycine max
gaatgggaagtctagatgttttggttttgtgaatttccagaatccggattcagcagctgctgcagttgagaggttaaatggaactactattaacaatgacagggttttatatgtggggagagctcagaggaaagccgaaagagaggcccagttgaaagccaaaattgggcaggaaagaatcagtagatatgaaaaattaccaggggctaatttgtacctggaaaatcttggtgaccgtttcagtgatgagaaagtgaaagatctattttctgagtttggaactattacatcttgcaaggtgatgattgattcaaa

SEQ ID NO: 274169 - DNA, 288 bp, Glycine max
gcttgtggagggccacaccgaggtcccaaactggaggtttaactgcaacgttgagcttgtccaatcgccgcaaaaacatggtgggatgatcctcatccaaccgtagggtagacacgcggtcaggctcgtcaacgactccgagatcagtcagcatctgccagttgagaagggtatccatttactcgctcacgttcagtgcggttcgcacctgccctcactttgagtccatcaacatctcggttctgcctgcgtcgaatacgatagacttgcagacactctacaacgtcc

SEQ ID NO: 274170 - DNA, 251 bp, Glycine max
gtagccaaagttagtaagtctgggtggatgactgatgaggaatttgctagagaggtgattgccggtgtaaacccaaatgtgatccgtcgtcttcaagaattcccaccaaagggcacacttgatcccacactctatggtgatcaaaccagtaccataacaaaagaacaattggagattaacatgggaggggtcacagtagaagaggcacttaatactcagagattattcatattagattaccaagatgcatt

SEQ ID NO: 274171 - DNA, 224 bp, Glycine max
ggttctagtgtgtgattgtttgttgttgtaactcgttcttcttcttttgttgttctgtgtttgtgtttgttttttctctcacctgaaaatgtcttgctgcggtggtaactgtggttgcggaagctcctgcaagtgcggcaacggctgctgaggctgcaagatgtacccagacttgagctacactgagtcaaccaccaccgagaccttggtcatgggagtggcac

SEQ ID NO: 274172 - DNA, 369 bp, Glycine max
gggtggaaggagccgtagcagcagcggaagctctagcttgggcagcgaatcacaatggcgagaggattgaagaagcatttgaagaggcttaatgccccaaagcattggatgcttgacaaactgggtggtgcatttgctcctaagcccttatctggaccacacaaattcagggaatgcctgccactcatactcattttgcgaaaccggctgaagtatgctctgacataccgtgaagtcattgctattctgatgcaacgacatgtccttggtgatggccaaatcaggaccgaccagacatattctggtgggttcatggatggtggatcaattccttaaaccaatgagaactttcggctggtggatgacacc

SEQ ID NO: 274173 - DNA, 452 bp, Glycine max
  unsure (1)..(452): unsure at all n locations
gaccggttgcaagaagccaccggaagggtgggccaaatatgtactacaacccctttgggagtcgggtttgttaattttttccccctatggatgcctncaaacatgataactcttatggggattatgttcctactagtgtctgcattgcttggttatatatactccccacaattggacacacctncttcaagatgggttcattttgctcatggactacttcntgttttataccaaacatttgatgctgttgacgggaagcaagctagacgaacaaattccttaagcccattgggggagctctttgatcatgggtgtgacgcacttgcttgcacatttgaagcattggcttttgggagcacagccatgtgtggatgaaatactttctggtggtggttaatatctgcaattacattttatggtgcaacctgtgagcactatttcaacaatacact

SEQ ID NO: 274174 - DNA, 414 bp, Glycine max
gaccacaccgagtcgcagaaaaggaaaaaagtgatcatagtttcacttcggccttatccagtttagggtttcggttctctaccctatctttcacgtatcgaaaccttaaatttacgatcaggtctgagcaatctggttggtagaacctttggtcttagtgagtcaagatttatgtctgaattagacgatcaaattcctactgccttcgatccttttgctgatgcaaatgctgatgactcgggtgctgggtcaaaagagtatgtgcatattcgtgtacagcagcgaaatggcatgaaaagcctgacaaccgttcacggattgaaaaaggaattcagctataacaagatacttaaagacgtcaagaatgagttctgttgcaatggaacagttgttcaggacccagaactaggacag

SEQ ID NO: 274175 - DNA, 391 bp, Glycine max
cacagtgaagttgatgctcctagccgaagacttgctaaaccactaatcttttgtaggactgaaagtgactgccccatggaaaatggctatgcccgtcctgttgatggaatccatgtacttgttgacatgcaaaatatggttgttcttgaatttgaagaccgtaaacttgtcccactttcacctgctgatccactaagaaattatacttctggtgaaacccggggaggagttgaccgaagtgatgtgaaacccttacagattattcagcctgaaggtccaagttttcgtgttaatgggcacttcattgaatggcagaagtggaattttcgtattggattcactcctaaggagggtttggtaattcattcagtagcctatattgatggaagtc

SEQ ID NO: 274176 - DNA, 407 bp, Glycine max
ggcacaagtgagtttgttgatcgagataactagaaagagtgtgatgaaaatgaaggtgcttgttttcttcgttgctacaattttggtagcatggcaatgccatgcgtacgatatgttccctttccgaatgaacactggctatggtgcccgtactcccgaggtgaaatgcgcaagttggaagcttgctgtggaagcacacaacatctttggctttgagaccattcctgaagaatgcgttgaagcaaccaaagaatacatccatggcgaacaatatagatcagactccgaaacagtttaccaacaagcttacttttatgccagagacctcgaagtgcattccaaggacacatttgtgttcaagatagatggcaccgtactctctaatattccatactacaaaaaacatg

SEQ ID NO: 274177 - DNA, 323 bp, Glycine max
ggggaagaggtagggtacagctgaagaggatagagaacaagatcaatcgccaggtaactttctccaaaaggagaggtgggttgctcaagaaagctcatgaaatatctgtactctgtgatgctgaggtagctttgattatcttctctcacaaaggaaagctctttgagtatgctactgattcatgcatggagaagatactggaacgccatgaaaggtatgcctatgcagagaggcagctagtagcaaatgattctgagacacaggaaaactggaccattgaatacactagactgaaggcaaaaattgaccttttacagagaaac

SEQ ID NO: 274178 - DNA, 96 bp, Glycine max
gatgctggttttgttaagatgattccaaccaaacccatggctgttgaaactttcttcgagtattctgcacttggtagggttgctgttagggacatg

SEQ ID NO: 274179 - DNA, 287 bp, Glycine max
ttgggatagagaaatatagataagtacagtgcgaaaagagtgaggcggttaaaaatgaattgcccgtactgttcggcggcgcatgggcgttgcgccaccacgagcagcgggcgttcgatcacggaatgcacgtcttgcggacgcgtgctggaagagcgacagtcgcatccccaccacgtgttccacgttcgcgcccagtacaaccttctgggtctggtcccatcggatctggttctccctgtgttcaatcaaaacaactaggaggaggaccttttcgagccaacggc

SEQ ID NO: 274180 - DNA, 210 bp, Glycine max
ggagcgaataatatgtgaaggggtttgagtgcagtgcggcgatgctagcactctcttttgcagctttcgccgacagcttcattcaccatggctgagtaaaccgagaaagcttttttgaaacaaccaaaagtgtttttcagctcgaagaaaactggcaagggaaagagacccccaaagggtgtggaaccgcttttggaaatccattgggct

SEQ ID NO: 274181 - DNA, 390 bp, Glycine max
ggttctagtgtgtgattgtttgttgttgtaactcgttcttcttcttttgttgttctgtgtttgtgtttgttttttctctcacctgaaaatgtcttgctgcggtggtaactgtggttgcggaagctcctgcaagtgcggcaacggctgcggagggtaagattttcgttgtaacattgtttttttcttgggaaaatagagtttttccgggaaaattttctttttggatttttaattggtattatggttacccttttggttcaattgcatgaaaaaactatgcttttgttattttcttgcatggggggggagattctgatcacccgaaccttttgtttggttttaccgaacatgtccatttggtttcttttcatgggaagggtttctgggggg

SEQ ID NO: 274182 - DNA, 354 bp, Glycine max
aatagagagaggtgcaaaatcaatggatatgagatgccagctaagaccagggtctttatcaatgcttgggcaattggaagggatcccaagtattggactgaagctgaaagtttcaaacctgagaggtttcttaatagctctattgattttaagggcacaaactatgaatttatcccatttggtgctggaaggagaatctgcccaggcatttcatttgctacacctaacattgagctgccacttgctcatttgctttaccattttgattggaagcttcccaacaatatgaagaatgaagaacttgacatgactgagtcatatggggctacagcaagaagagcaaaagacctatgc

SEQ ID NO: 274183 - DNA, 355 bp, Glycine max
gacactaaacaagttaaaagaagagcatcactgaactaacaaagcaaccctatgtcgaaagtggtttgtgtcaccggagccagcggcgccatcggatcatgggtggtcctactcctcctccagcgtggttacaccgtccatgccaccgtccaagatatcaaggatgaaaatgagacgaaacatttggaggaaatggaaggagcaaagagtcatctccatttttttgaaatggatcttcttgacatcgactccattgccgctgccataaagggttgttccggcgtaatccaccttgcatgtcctaacatcattggtcaagtcgaagatcccgagaaacagatattggaaccggcga

SEQ ID NO: 274184 - DNA, 328 bp, Glycine max
tcgacgaagacgacagaaggggacactaaacaagttaaaagaagagcatcactgaactaacaaagcaaccctatgtcgaaggtggtttgtgtcaccggagccagcggcgccatcggatcatgggtggtcctactcctactccagcgtggttacaccgtccatgccaccgtgcaagatatcaaggatgaaaatgagacgaagcatttgtaggaaatggaaggagcagagagtcatctccatttgtttgaaatggatcttcttgacatcgactacattgccggtgccataaagggttgttccggcgtaatccaccttgcatgttctaaca

SEQ ID NO: 274185 - DNA, 422 bp, Glycine max
tcggcaacagctacttgattggtggaacaggcattataaatggccatacccttcggaatctcaaaagcaggcacttgcagaatccacaggcctagatctgaaacaaatcaacaactggttcatcaatcagagaaaacgtcattggaagccttctgaggatatgcaatttgccgtgatggatgcaactaactactacatggaaaatgttatgtgcaagccattttcaatggatggcatgcctatgcttctttaaactaatcctctactagaatattcaaaagcttagccgagaaaaccctatctattttaagttgcctaggtcgccaggttgctatatataatgtgtcattgatgaatgttttactttaaattgtagaaagcaggatgaaaattctcggttatccctgaactgcaatctatgt

SEQ ID NO: 274186 - DNA, 244 bp, Glycine max
gatgttgtggttcaacgtgacttgcctccactctgggaaattgatatgaatggaaaagttaatggagctgtggaaacttgcagaggggacgatcagtgggtaatgtctaagcattttaggaactacttcaatttttcccatcctcttgttgcacaacatttggatcctgatgagtgtgcttgggcttatgggatgaatgtatttgatctgcgtgcatggagaacaacaaacataagagagacat

SEQ ID NO: 274187 - DNA, 446 bp, Glycine max
  unsure (1)..(446): unsure at all n locations
gcgagacgacagaaggggaagtttttgatggaaaagaacaccactaatgctcttcatggacaagtcactattgggaccctgattttgcaggactgtgctgttggattgctctttgcattgcttccagttctgggtggcacctcangtgtttttcaaggagtgttatcaatgaccaagctgttggtgacattgattgcattcctctctgttctgtcaatattgtctcgcacttgccttccatggttgcttaaactgatgataagcctctcatcacagacaaatgaactctatcaattggcgtcagttgcattctgcttgctagtagcctggtgtagcgataagctgggactaagtctagaactaggttcctttgctgctggagtgatgaatgcaaccactgatctggctcaacatacactagagcaaattgaacctattcgcaatct

SEQ ID NO: 274188 - DNA, 415 bp, Glycine max
ggttgttcaggcgaaacaatggcgacggtggagctctggtggatgacgtgctttctctaacaactgctcttagaaaagagagagagaatggcggtggagtacacatgctgctcaacggcgttcttcgttcacatagtggtaatcgtgctgctggtgctgttcgcgggcctcatgtcgggcctcaccttgggcctcatgtcgctcagcctcgttgatcttgaggttctcgctaagtccggcactcctcaggatcgtaaacacgctgagaagatattaccagttgtcaaaaaccaacatttattgctatgtactcttctaatttgcaatgctgcggccatggagacacttcctatttttcttgatggtcttggtactgcttggggcgctatcctgatttcagtaacattaattcttt

SEQ ID NO: 274189 - DNA, 316 bp, Glycine max
  unsure (1)..(316): unsure at all n locations
gaagtttgaaagacaaatacaccatggcagatatcctgagtgaagaacagattgttgattttaaagaggcctttggcttgtttgacaaagatggggatggttgcattactgtggaagaacttgccactgttattcggtcgttggatcagaaccccaccgaagaagagctccaagatatgataagcgaagtggatgcagatggcaacggaaccatngaattcgatgagttcttgagcttgatggccaagaaagtgaaagacaccgatgcagaggaggagctcaaagaggctttcaaggtttttgacaaaaatcaaaa

SEQ ID NO: 274190 - DNA, 143 bp, Glycine max
ttgggaagagggttttgggtaaaactcccacggtcaagaggcaatcttgtgggaaatacaaaggtgttcggatgcggaaatggggcaaatgggctgcagagattcgtgaccctttcaagggcgcgcgaatctggttgggtact

SEQ ID NO: 274191 - DNA, 180 bp, Glycine max
ggcccatggacgtcgcagacaccgggtatgaggaccacgccgaccacaaagcacgaggtaacaaacacatcactggcgacgaacgagaggggcacggagaagaggtaaacgggaagggaacaacggaaaagaggaaggacgacgggctaaaggagaagaaacggaacaaggaatggggag

SEQ ID NO: 274192 - DNA, 409 bp, Glycine max; identical to SEQ ID NO: 273679

SEQ ID NO: 274193 - DNA, 422 bp, Glycine max
gacccatattttgatcaaattggctgttctcatgctggttgtgagccagcttatcggactcccaagtgtgttaaaaagtgtgtaagtggaaaccaagtttggaagaagtcaaagcactatagtgttagtgcatacagagtcaactctgatccccatgatatcatggcggaagtttacaagaatgggccagttgaagttgcatttaccgtttatgaggattttgcttactacaaatcaggagtttacaaacacatcactggttatgaactaggtggtcatgcagtaaagctaattgggtggggaacaactgatgatggggaggactattggcttctcgcaaatcagtggaacagagaatggggagatgatggttacttcaagatccgaagagggacaaacgaatgtgggattgaagaggatgt

SEQ ID NO: 274194 - DNA, 424 bp, Glycine max
  unsure (1)..(424): unsure at all n locations
ggtgagagagagagcgagcagtttcagacacagagagaggggtttgggattggagggattgacgctgcgtctcttcctcttctctttcgatccatccctcattcctaatcctccaatccaaccacctcagcctcacactcacatatacacatatctgaacgcgtatcgtccctcctatggcttcaaagcgcatcctcaaggagctcaaggacttgcagaaagacccaccaacttcttgcagcgctggtccagtagctgaggacatgttccattggcaagcaacaataatgggtcctgctgatagtccttatgctggaggtgtattcctagtcactattcacttccctccggattatcctttcaagcctcctaaagttgcctttaggactaangtgtttcacccgaacatcaatagcaatggtag

SEQ ID NO: 274195 - DNA, 247 bp, Glycine max
ggatgaagagcgaatagtgaatagaatggctggcaaaggtttaacctttgcggctgtgataatatgcgtttcagcactgtcactgagtacttctgtcgcggtggcagcggccaatgatggccttgtattaacttgtacaaggaatcatgccctcatgctgaagacatcatcacagaacaagtcaagcttctctacaagcgccacaagaacactgctatctactggctcatgaacaatgatcatgact

SEQ ID NO: 274196 - DNA, 364 bp, Glycine max
gcatgttatttgggtaaagaatggaaataatggctatgatgatattcgtgctgccattaaggaagcaaaagctgtcaaagacaaacccacattaatcaaggtcacaacaaccattggttatggttctcctaacaaggctaactcctacagtgtgcatggaagtgcactgggtgccaaagaagttgatgccacaaggcagaaccttggatggtcacatgagccattccacgtgcctgaagatgtcaaaaagcattggagtcgccacacccctgagggtgctgcacttgaagctgaatggaatgctaaagttgctgagtatgaaaagaaatacaaggaggaagctgcagaattgaaatctattatc

SEQ ID NO: 274197 - DNA, 419 bp, Glycine max
gattaacaagaagaagaagaagaaacggtgtcttgctccaatctgacaatgttggtgtcctcaaaaccttccctttccgacccctcgaacctctccttccgctctgtcctgaacccttttcagctccctacacaaaacccagcttcatgcaccccttcacgctcctcaagcacccaaattcagtgtggtctgagagaactgagaacccgcattgagtctgtgaagaacacgcagaaaatcacggaggcaatgaagcttgttgctgcagccaaagtgagaagagctcaagaagctgttgtgaacggaagacccttctcagagaccctggttgaagtcctctacaacatcaacgagcagctccaaactgatgacgtagacatccctctcacaaaggttagacctgtcaagaaagttgcact

SEQ ID NO: 274198 - DNA, 416 bp, Glycine max
ggtaaagagatagatgaagcaagcaagcgatttgtgaaagcgttgaccagaaagtgtgaactacaaagtgtaggaatgagcatataccaccagatacctgcgttgattctggattcttgaagccattccttctattttctggtgacagcttcgtcttgtgctatactatataacaactcaccctctctccttacctcttcattcccaacacaaaacactctctcctccttcaacctagccctggtcactaccaaccaagtgtcccccctcctctcccttgttaacaggtagctgagttagtgagtgatggcgggaggacaactaggagtgcttaatgcactcgatgtggcaaagacacaatggtaccacttcacagctattgtgattgctggaatgggattcttcaccgatgccta

SEQ ID NO: 274199 - DNA, 385 bp, Glycine max
gatccaaagcagaacaaagagccattgaactttgactataatgttcagagttcagattactcactctaatcttctaagttttcattttggggtttaagtttctgaaggaaaaaaaaatgataaagtttgttctatttttgttctgctttgcctctgcactgaccctttcagtatcggagtccaaatcagcttcagtgcaacctcatgctgctgaatctttctctgttggatatattcagatgaagactgcagcgaactgttcttacctggtagttatatctacgagttgttcatcgcctaagttcacaacggataagatcggtatcacgtttggggatgctaatggcaaccaggtatatgaaccaagactggatgatccaatttc

SEQ ID NO: 274200 - DNA, 387 bp, Glycine max
aaccaccttttgggattttgcaagagattgatgtaaccggtaaactggcttattgagaggggaatatgaagttgtaacttttctttgttgctacaatatttttgctaacatggccatgccttgtctcaggctacccaaggtcccctcttcaaatgataactcacctattctgagctttctttcctggtaaactgctcacactttatgcttgcttcttagctcacaacatccgcaccttttataccattcctccagagcgcgttcaaccaacacaagactacattaatctcgaacatttaagatcagactctaaaacaattaaccaacaagctttcccatatgctagtgaacgcgacattcatttctgcgacatatttatgttccccc

SEQ ID NO: 274201 - DNA, 382 bp, Glycine max
gggagttgagttgagaaggaaaggctgaagaacacatagagagagagagagaagtgcagaaaaaatgagactgttcgatccatggcctgttttcttcaagagagaatggaagcggaattggcccttcttggttggattcgccatcaccggaactctcatcaccaaactttcccttggtctctctgaggaggaagccaaaaagtcgaaattcgtccaggcacacaagaggtgactttagaatggaagatttgcagtggctttgcacattgtattagatgtgtgaagagagcttttgtttgtaataaatgaagagagatgttgtatacactccatgttcctatttccattttggttgtttactttaatgtgattgagaaattca

SEQ ID NO: 274202 - DNA, 355 bp, Glycine max
gggccatgaacgttgtcagctccggcggaattagtatggccaacaaacagcttatgtccaacaatggctatgctttcagctttgccagttcgttaactgggttccactttgccgtaactgctctcgttggtctggtgtcaaatgctaccggttactcagcgtcaaagcatgttcctatgtgggagctcatttggatctcactggttgccaatatgtctatcacggggatgaactttagcctcatgctcaactccgttggattctaccacatatcaaaactgagcatgattactgtggattgggtgatggaatggatacttcacaacaaacactactcaagggaagtgaaaatgtc

SEQ ID NO: 274203 - DNA, 423 bp, Glycine max
ggaagcgtgagggcaaaaagtcggaaccaccggggaggagggcttcacacagagaattacgcggttgcagcagtcaacgcccgggattcccacgtccataccaaccacaacaggcggagagagagtttaggccttagtgagaaggataacgccatttggttttggcttggaatacgtcatccactatcaatcaactgggctttgaaatggtgaaggagaccgaatactatgacgtgctgggtgtcagccctacggcatccgaagccgagattaagaaagcttattacattaaggcacggcaagtgcatccagataaaaacccaaatgaccctcttgctgcacaaaattttcaggttttaggtgaggcttaccaagttctgagtgacccagctcaaagacaagcttatgatgctcatggaaaat

SEQ ID NO: 274204 - DNA, 283 bp, Glycine max
  unsure (1)..(283): unsure at all n locations
gacagcagcagagcaaaagaaagaaagaaagaaagtgcaacttcctctgttttgctcccctgtttaagccttatcataagcttagaatggcacacaaggaattttccattgccctagtgactctcattgttctctttgtcaacacgaacctncaaggtgccacggctgactatggtggtggttggcagagtgctcatgccactttctatggtgggggtgatgcttctggcacaatgggtggagcatgtgggtatggaaatttgtatagccagggatatggaac

SEQ ID NO: 274205 - DNA, 380 bp, Glycine max
gggtcaaagtgctactattacaggaacctacgcaggacagtatgtcatgcagggatttctggatttacgactggagccatggattcggaatatgttaactcgttgcttagccatagttcctagtttgattgttgcagtcattggtggctctgctggggctgggaagctcataataattgcatctatgatcttatcatttgagcttccttttgctttggttccactcctcaagtttacaagcagcaaaaccaagatggggacacatgtcaactctaccatgatttcggctgttacttggataatcggtaccctcctcatggccattaatatatactacttaataactggcttcatcaagctgctgcttcatagtcacttaa

SEQ ID NO: 274206 - DNA, 433 bp, Glycine max
ggcacaagtgagtttgttgatcgagataactagaaacagtgtgatgaaaatgaaggtccttgttttcttcgttgctacaattttggtagcatggcaatgccatgcgtacgatatgttccctctccgaatgaacactggctatggtgcccgtactccggaggtgaaatgcgcaagttggaggcttgctgtggaagcacacaacatctttggctttgagaccattcctgaagagtgcgttgaagcaacaaaggaatacatccatggcgaacaatatagatcagactccaaaacagttaaccaacaagcttacttttatgccagagacctcgaagtccatcccaaggacacatttgtgttcagtatagatggcaccgtactctctaatattccatactacaaaaaacatggatatggggtggagaaatttaactcg

SEQ ID NO: 274207 - DNA, 421 bp, Glycine max
gggagagagaatgagtggcggaggagaagagggggcaactctggagttcactccgacgtgggttgtggccgccttttgcacagtcatcgtcgccatttccctcgccgctgagcgcctccttcattatggcggaaagtttctcaaagccaaggaccagaagtcgctctacgaagctctccagaagatcaaagaagagctgatgcttttggggttcatttccctgcttttgacggttacacaaaacggcattaccaaaatctgcgttcgaccctctttgacgctccacatgctcccgtgtaatctccacgacgctccagcaaaccacgaatctcatttccagacatttttccctggaacagccaggcgccttctctctggggaacactccacccccgagtccgcctctaaaattggttattgc

SEQ ID NO: 274208 - DNA, 397 bp, Glycine max
ggtgagaagagtggtgtgatggcgcagagagctcaaccagtattggccacagatgttttccaaatgggaaacatccaatggaagcaattcaatgttgatacatccagtgcttccttctcacctccaaaaccattgctaatttttacaccaactgttcctggcgcataccctgtaatattgttcgtccatggctttttcattcgcaatttctactactcaaagctcctagcccacatagtctcacatggattcataatcgttgctcctcaactgttttccaatgggcttcctatgtatggacccactgaagtggaatatgcaggaaaagttgcggattggatagctgaggagcttcaacatttgcttccagagaacgttgaagccaatttggacaaac

SEQ ID NO: 274209 - DNA, 268 bp, Glycine max
ggttctagtgtgtgattgtttgttgttgtaactcgttcttcttcttttgttgttctgtgtttgtgtttgttttttctctcacctgaaaatgtcttgctgcggtggtaactgtggttgcggaagctcctgcaagtgcggcaacggctgcggaggctgcaagatgtacccagacttgagctacactgagtcaaccaccaccgagaccttggtcatgggagtggcacctgttaaggctcaatttgagggtgctgaaaatgggtgtgcccgc

SEQ ID NO: 274210 - DNA, 333 bp, Glycine max
  unsure (1)..(333): unsure at all n locations
ggttggagagagagatgggaaggtccccttgctgtgagaaagcacacacaaacaaaggtgcatggaccaaagaagaagatcatcgcctcatttcttacattagagctcacggtgaaggctgctggcgctctctccccaaagccgccggccttctccgttgcggcaagagctgtcgtctccgctggatcaactatctccgccctgacctcaagcgcggcaatttcaccctcgaagaagaccaactcatcatcaaactccatagcctncttggcaacaagtggtctctaattgctggaagattgccggtagaacggacattgagataaagattac

SEQ ID NO: 274211 - DNA, 421 bp, Glycine max
gaagaagaagggtgttgatgagtttcctttctgtgtccatctggttagttgggagaaggaaaacgtttctagtgaggccctggaagctgctcgtattgcttgcaacaagtacatggccaaatttgctggaaaggatgctttccacttgagagtcagggtgcacccattccatgttcttaggatcaacaagatgctttcgtgtgctggagctgataggctccaaactggaatgagaggtgcttttggaaagccacagggtacttgtgctagagtggctattggacaggtccttctttctgtccgctgcaaggacagcaacagccatcatgcccaggaggcccttcgccgtgccaagttcaagttccctggtcgtcaaaagattattgttagcaggaaatggggcttcaccaagtttagtcgt

SEQ ID NO: 274212 - DNA, 421 bp, Glycine max
gattgagaaggctgatggatttgctggagtattggctgaacacaaatatgaaattgtgaagaggctgcaagagaggaagcatatttgtggaatgacaggtgatggtgtcaacgatgctcctgcattaaagaaagcagacattggaattgctgttgctgacgctacagatgctgctagaagtgcttcggacattgtcctcactgaacctggtctgagtgtcattattagtgcagtgctcaccagcagggcaattttccaaaggatgaagaattatactatctatgctgtgtcaatcaccattcgtatagtgtttggtttcatgtttattgcattgatttggaaatttgattttgcacccttcatggtgttgattattgccatactaaacgatggtaccatcatgacaatatccaaggatcga

SEQ ID NO: 274213 - DNA, 396 bp, Glycine max
ggtattacaaaaacctattttggcttgtgcctttgcttttccagggagcttattgacaatggctgaaacaaaaggggtcatgaaagacaaaagatggtcttttcatggaatgaccgctctagtcacaagaggcacccgaggcattaggcatgccattggtgaaaaggtaactgagtttggagcaactggtcatatatgtgcacgtaatcaagatgatattgattaatggttaaaaaagtggaaaaaccagggacttaatgtgactggttcaagatgggatttactatggtctgaccaacgtaaaagattaatggaaattggtggcttcatctttcatggaaaggtcaatattctagtgaacaatgcttcttccaattttaccaagaagattaccga

SEQ ID NO: 274214 - DNA, 416 bp, Glycine max
  unsure (1)..(416): unsure at all n locations
gtattgacaagcgtgtgattgagaggttcgagaaggaggctgccgagatgaacaagaggtcattcaagtatgcctgggtgctcgacaagctcaaagctgagcgtgaaagaagaattaccattgatattgctttgtggaagtttgaaaccaccaaatactactgcacggtcattgatgctcctggacatcgggactttatcaaaaacatgattactggtaccttccaagccgactgggctggccttattattgactccaacactggtggttttgaagctggtatttctaaggatggacagacccgtgagcatgctcttcttgctttcaccctangtgtgaagcagatgatctgttgctgtaacaagatggatgccactacccccaagtactctaaggctaggtatgatgaaatcgtg

SEQ ID NO: 274215 - DNA, 417 bp, Glycine max
  unsure (1)..(417): unsure at all n locations
gattgtatatcatttacaatttcaatctctctctctctctgtctctctctctagacttagattttgtgaatggctgaagtggaagagggacaggtcatcggcgtccacaccgttgatgagtggaagctgcaactccagaatgcaaaagactccaaaaaactgattgtggtggattttactgcttcctggtgtggtccatgccgttttatggccccagttcttgcagagattgcaaagaaaactcctgaattgatcttcctcaaagtggatgtggatgaagtgaggcctgttgctgaggaatattccattgaagccatgccaaccttnctcttcttgaaagatggcgagatcgtggacaaggtggttggtgctagtaaggatgnaccttcagccaccatagccaagcatgcatctgct

SEQ ID NO: 274216 - DNA, 195 bp, Glycine max
ggagctgacatcattgttgagtccaccggagttttcaccgataaggataaggctgccgcacatttgaagggtggtgcaaagaaggttattatttctgcccccagtaaggatgcccccatgtttgttgttggtgttaacgagcacgagtacaagccagagcttgacattatttccaatgctagctgcacaaccaac

SEQ ID NO: 274217 - DNA, 421 bp, Glycine max
acagttcatccagggaactgatgaacaaacaatacccgatgtgaggctgaccaaatcaagggatggaacaaatggcatggctatcttcacatttgatcaaccctcagttttcgattcttcgggtgaaataggcgatatcactggattttatatgattgatgaggaaggggtccttcagtcagttgatgtaagtgctaaatttgtcaatgggaagccctcaataattgaagccaagtatgtaatgcggagtccacgggactgggatagattcatgagattcatggagcgatactcaaatgcaaatggtttgcaattcatcaaaaaatgagttaatgtgctaactctgcccttctattcttttgcccttttcaggaagtttgtgttctacgatatagtcacatataaaacctgagtgaaatgc

SEQ ID NO: 274218 - DNA, 416 bp, Glycine max
ggaacacatgagaaagcagaaaccaaagaaccatgaagtctctggggtccatcttagcaacttttgtggttctattatcaatttcactcactatctcacttccaattgaagaagctttcaaccattgtctaacacaacactctcagactccaaaccaatttccctcatcaatctacacttacaccaatggttccttcacttcaatccttgagtccacagctcaaaatctaaggtacttgttgccctcagtgccaaaacctgatttcatattcaccccactggatgactctcaagtccaagcagcagtggtttgtgcaaaaaagcttggtattcacatgagagtgcgaagtggagggcatgactatgaagggctctcttatgtttccctcattgagaagcctttcatgatcctagac

SEQ ID NO: 274219 - DNA, 417 bp, Glycine max
  unsure (1)..(417): unsure at all n locations
gtgaaagaaagtgattacaagagctgcaccacaggcaattcactaagcacagacagcagtggcaccaccacaatcaccctcaagactgccggcactcactacttcatatgtgcttctcctggccattgtgatggtggtatgaagcttgctgttaaagtaaaggctaaaaaagcatctgctcctgctacagcaccttcaccagctgcaaaggactcaccttctgattctgatgacaccaaagacacacccacttncacctgcactaaccctaaaacttcaacctccaccaccccttcaactgaaacctccaccactaccacatcttcttatacatcatctgcaactgctgctggctccccaaattgtgctatgttttttgcttctttgatcccatactttgtgttgccgttgatgtga

SEQ ID NO: 274220 - DNA, 319 bp, Glycine max
  unsure (1)..(319): unsure at all n locations
gcacaaaagagaagaagaaaagtctaggaaaactaaagcatggagaggccaattcattcatccccctcttcagagagccaagtagcattgagaaaatctttggggactttgaaagggagcaacaactactggggttaaggcctgccactcctccggagaggcctaaaacgccaccttatgcccctccaagagctccttctcctaggcctccctctccaagggttccttcttcaaggcctncattcccaaagggctgttcttccagggccggtttttccgcaggtaacctttccaaaggcacgtttttccggaatggtta

SEQ ID NO: 274221 - DNA, 402 bp, Glycine max
ggagactcgaagtgtgaagcactgagcagttgaggaaatgggaacccttgggagagcgatctacagcgttggtaactggattcgagaaactggacaggccattgatcgtctcggttcccgtcttcagggcggttactacttccaagagcagctctctaggcatcgaactctgatgaacatatttgataaggctcctgttgttgataaggatgtatttgttgcgccaagcgccttcgtcattggagacgttcaacttggaagaggatcatccatttggtatggaagtgtcttgagaggtgatgttaacatcatcagagttggaaatggaactaacattcaggacaactctctggtgcatgttgcaaagtcaaatttaagtgggaaggtgttgcctacaattat

SEQ ID NO: 274222 - DNA, 173 bp, Glycine max
ggagcgaagaagatattaaggtttttgagtgcggtgcggcgatcctagcactctcttctgcagctttcgccgacagcttcattcaccatggctgagtaaaccgagaaagcttttttgaaacaaccaaaagtgtttctcagctcgaagaaaactgggaagggaaagagaccccg

SEQ ID NO: 274223 - DNA, 428 bp, Glycine max
ggagagagaagggttagaagggtgaagaagcatgtgttcactcaagaagaagaaaccctattacccgcttccgttaattcctatctagtactactactttacttctgattcaaaagggtgatcttcttcttcttccaagcttatcaattatcatgcatatgctactttcttctctcttctcggggaattgaagcgttgtggtccgattgtttgctagatcaagcaaattaacctatatactggtctatatcatcatcaccttgcacctctctctctctctctctctctatatatatatatatatatatgtgggtttaatctcttactttctttatcttttcacttttttcagttttggtttgatttaattacttgattaaaacttacatatatggatttgaatatatagtacgtggttttcgagcttg

SEQ ID NO: 274224 - DNA, 370 bp, Glycine max
ggagaaaaagttcttgttcaggttgaagattttgcaaaccacaatgctttgagttgcttgcaaaatatggcacaactcatcttgttttcaacgatgatattcaggggactgcatctgttgttcttgctggggttgtggcagccttgaagctcattggaggtactctggctgaccacacattcttgtttcttggtgctggagaggcaggaactggaatagcagaactaatagctcttgagatgtcaaagcagacaaagacacctatagaggagactcgcaagaagatatggcttgtagactcaaaaggtttgattgttggttcaagaaaggcttcacttcaacacttcaagcagccttgggctcatgagca

SEQ ID NO: 274225 - DNA, 431 bp, Glycine max
gatcacaacaagacataaacaagaatgttgacatgagtgctgctaggcgtagagaacgtgagtactttaatagtacccctgaatataaacaccttgcaaacagaatgggttctgaacatctggcgaagatgctctcaaagcatttggagacagtaatcaagtccaaaattcctggcattcaatccctaattaacaaaacaattgccgaacttgaagctgaactaactcgtttaggaaaacctgttgcagctgatgctgggggaaagttgtatgctatcatggaaatatgccgctcatttgatcaaatatttaaagaccatcttgatggcgtgcggcctggaggtgataaaatttataatgtctttgacaatcagctccctgctgctttaaaaaggttgcagtttgataagcagctttcaatggaaaatata

SEQ ID NO: 274226 - DNA, 383 bp, Glycine max
ggagtagcgatggagaagaagaagggtgagctaaagtcaagggtccttcctttcctttccactagtcacataatcccgctagtggacatggccagactcttcgccttgcacgacgtcgacgtcaccatcatcaccaccgcacataacgccaccgttttccaaaagtccatcgatttagatgcgagtcgcggtcgccccatcagaacgcacgttgtcaacttccccgccgcacaagtgggtctccccgttgggatcgaagccttcaacgtcgatacgcctcgggaaatgacccccagaatctacatgggcctatcccttctgcaacaagtcttcgaaaaactcttccatgacttgcaaccggatttcatcgtcaccgacatgtt

SEQ ID NO: 274227 - DNA, 418 bp, Glycine max
gggctcaaggaatttcgcttagttctttgcagaaaaatcagtgcagatgagagcaaattgaatttagaagccaagatcaagatcagtatggaatatcctctaaggcctcctctttttgcattgagcattagttgtatatcttctggggaaaaccatgatgagacaggtttggagtggtacaatgaacttcgtgcaatggaagcagctgtcaatctacacatactaaagatgttacttgtcaatcaacaaaattatgtattggctcatcaagtgaattgtcttgctatgttgttcgactattatttggacgaggcatccccatcatctgaaaggacaaattgtacttccgtggttgatattggcttatgcaagcctgttactggtagattcctgggtagatcttttagaggaagggatc

SEQ ID NO: 274228 - DNA, 422 bp, Glycine max
gaagatgggtggctgtaattatctgcagctacaagtgtgcttaagctgatactcttcaactggagaacattcataagtgagcgaggttaatggatcttgaatccagcaagtgttgggacacctcaaagggctcttggaagactattctgctcttggcctaccaaagccttggtgttgtatatggggacttgagcatttctccattgtatgtttacacaagcacatttgctgaagatattgagcattcagagaccaatgaagagatttttggtgccctttcttttgtcttctggactctgacactggtgccactcttcaagtacgtttttgtggttcttcgagctgatgataatggagagggaggtacttttgctctatattccttgatttgtaggcatgctaaagttagtctcctaccaaat

SEQ ID NO: 274229 - DNA, 418 bp, Glycine max
  unsure (1)..(418): unsure at all n locations
gatggaaatggaacaaccaatggggatgaagtgcgaaagggcgattgaaaaccgagtgatggtgctgagaatggagatatggaagaaggaaaagattaagatgtggtgaaaaggatggttactgtggaggactggcttcttcaatttgcaaggatgttcaagaaccatgtanggtttgagtctgattcttatctagatactcatgagtatgcaatgaaactgtatgaagaaacaatagaggattcagtggcaagcaatgatgctcaagaactttttagaatggctgcggataaatttcaagagatggctgctttggctttgnttaattggggtagtgttcagatgtccctggcaaggaaccaaggtttctttttggaggatggggcaagagagtcttncttggagcatataaaagctg

SEQ ID NO: 274230 - DNA, 425 bp, Glycine max
ccaaggctgatggtgggaaaggaaaaattggagagagtacaaatttaagaggaaagataacattaccaaccttgggagctggcgaacaagcatacgatgttaattttgaatgggacagtgacttcggaattcccggtgcattttatattaagaacttcatgcaaaatgagttctacctcaagtctctaattctcgaagacattccaaaccacggtaccattcacttcgtatgcaactcctgggtttacaattcagaaaactacaagactgatcgcatttactttggcaacaatacatatcttacaagcgagacaccaactgcacttttgaagtacagagaagaagaattgaagaatgttagaagggatggaactggaaagcgcaaggaatgggataggatctatgattatgaagtctacaatgac

SEQ ID NO: 274231 - DNA, 431 bp, Glycine max
ggaagtgaagcgggaaagagacagaaccgaaaatggttgcgactttgagtcttccgatcatagacctctcttctccccatcgtctttccacagccaattccattcgtcaggcatgcgtggaatatggtttcttttaccttgtgaaccatggggtggacaccgattttgtgagcaaagtcttcgaccaaagttgcaagttcttctcgcttccggtccaacgcaaaatggacctggcccgcaaggaatatagaggctacactcctctctatgctgagacacttgatcctacttcactctccaaaggtgatccaaaagagacctattacattggtcctatagaagatacctctattgctcatctgaatcaatggccttctgaagaattactgccaaactggagacctacaatgaaatccttatattggaaacta

SEQ ID NO: 274232 - DNA, 341 bp, Glycine max
  unsure (1)..(341): unsure at all n locations
gaaagcaaggaaggaagaaataaaccgaatgagagcattaacctcttcttcttccactttcattccaaagcgttattccttcttcttcttcctctccattctcttcgctcttcgatcctcgtccgggggctgctccgaataccaccaccaccacgcgccgatggccacgataggaggcttacgcgactcccaaggctctcagaacagcgtccaaaccgaggccctcgctcggttcgccgtcgatgaacacaacaagaagcagaattcacttctggaagtttctaaggtggtgaggacacangaacaggtttgtgcgggaaccctgcatcaccttactctcg

SEQ ID NO: 274233 - DNA, 422 bp, Glycine max
gagataaagagtggcttagtccaaaacctcacacgactccctttgttgcgttgtgtttcctttcgccgaaaccctcgctcgcaacttctacagaatccctttcaccatggatattgaggaggacatccgttctttacagctcgattcagcagaagacaataatggggtggtaaatgcagaggatggaaggccagaagaagttgagaaatctgataagatggatgaagatccaaagcaggatgttgaggctgagccaaaagctgttgaagctgagccaaaagtgaaggataaggaggttccttctgttcaagatgaagaagatgaaccagagatgacaaaaagacacttgaatgttgtttttattggtcatgttgatgctggtaagtctacaactggaggccagatacttttccttagtggtc

SEQ ID NO: 274234 - DNA, 389 bp, Glycine max
gacaaacaagtgtagaagaagtttttcattatagctccttttgtacttaaaatgaaattgtatcatatacatattgcagtactggcaaagaagtttatgaatgctaggaggcactactactgcacagattaatcatgagtcttccacaaactgcaactagccctactgcacatctgtatccacaggaacttcagcttaagctttaccaagccttcatattctcaattccaatactcttctgcatcattctcttcctcttgctttactagttctaccttaagagaagggcttcctatgtatcttcctgttctcacttgcttccaaggaccattgtcaatccaccaaccaccactgcgtatcattcctcaccttgtcgtttggatctgacc

SEQ ID NO: 274235 - DNA, 428 bp, Glycine max
ggtgatttgaaagataagccatggtggcaaaagatgcaaacttgtgaagagttgattgaagcctcggccaccctcatatggatcgcttcagcccttcatgcagctgttaactttggacagtatccatatggaggtttaatcttgaacaggccaaccattagcaggagattcatgcctgagaaagggtctgctgagtatgctgctttggctaagaaccctgagaaggggtttttgaaaactattactggcaagaaggagaccctcattgaccttacaattatagaaatcctgtcaaggcacgcatctgatgagttctaccttggggagagagatggtggtgacttctggacttctgatgctggtccactagaggccttcaagaggtttggaaagaagcttcaagagattgaacataagcttatacagaa

SEQ ID NO: 274236 - DNA, 433 bp, Glycine max
ggtgacaaatggagggtccttagttctgtttctctttcttccctctgttctctcaaccaagttctcaattcaatcttcttcacccttttgatctgctaattctcaaggtattcaaaattgggaggttttcgtttgaattgtgatgtccaagccactgctaggcataggggaggaggaaggtcaaagcaatgtcactttgttggtttcttcctcagtcatcatggaaagtgtgtgcctgaatagctcaaaattgaaagagcgcaactacatggggttatctgattgttcatctgtggacagctccgcgccgtccttctcagatgagactaaaagcaatctgaaccttaaggctactgagctgagactggggcttccgggattgcagtctcccgaacgagattcagatctttgcttgagaagttcaattcagttt

SEQ ID NO: 274237 - DNA, 378 bp, Glycine max
gggactgcatagggggagattgtcacttgtcagcactcaggagtgatatcaggtgaagaagcagaagcagacgaaagaggcagaagatggtgagggtggacatatatcggccaatgaccctggagcaggttatggtccacaccgacatcgctggcaatgccaagaaatgggcaacggctcaggattgaccgcatttactattatatggaccatgtggctgcgactagaaaacgctaatgatggctctgatgcggcaaaagttcggacctggcgccgaaaaggtgaatgcggatgataggacctgtgaagcggatgctgggagtagagctagtgatgtagagctagcagcagtatcaagcgccaatcacattgaaatga

SEQ ID NO: 274238 - DNA, 388 bp, Glycine max
gttgaaggaaatcttcgtgtacttgcatatgagtttgctactatgggctctcttcatgacatattgcacggtagaaagggagttcaaggtgctcaaccaggaccaactcttgattggatacagcgagttagaattgcagttgatgctgctcggggattggaatatttacatgagaaagttcaaccaccgattatacacagggatatcagatcaagtaatgtgctaatctttgaagattacaaggccaagatagccgactttaacctttctaatcaggcccctgacatggctgcacgccttcattcaactcgtgtattgggaacttttgggtatcatgctccagaatatgcaatgactgggcagttgactcaaaaaagtgatgtctata

SEQ ID NO: 274239 - DNA, 412 bp, Glycine max
  unsure (1)..(412): unsure at all n locations
gatcacagaagcaattaacatattctcctctcattctcactcaaaacacaaaatcctaactaaggtgaaaatgaaggcatcacgcattgctttgttcactttggtggtgcttctttttgtggctgaagttcaagtgtcaaaggcagtgacctgcagcccagtgcagctgagtgcatgtgtgagtgcaataacctcttcaacccctccatcaaacctatgctgctccaagatcaaggaacagaaaccatgcctttgccaatatctcaagaaccccaatctcaagaagtttgttgactctcctaatgcaaggagagttgctaacacttgtggaactcccttcccaaggtgctaaggtgttactaaatttgaagtggttntaatttctctgcctgattatgcatcttgatatcta

SEQ ID NO: 274240 - DNA, 434 bp, Glycine max
gaaggtgcaagagtttgttgtgagctataagctaggttatcgtgaggagaatatgaagttgtttgttttctttgttgctgcagtagttttggtagcatggccatgccatggcgcaggctaccaaaggttccctctccgaatgaaaactggctatggtgagcgttcttcggaggtaaaatgcgcaagttttaggcttgctgtggaagcacacaacatccgagcctttaaaaccattcctgaagagtgcgttgaaccaacaaaggactacattaatggcgaacaatttagatcagactctaaaacagttaaccaacaagctttcttttatgctagtgaacgcgaagtccatcacaacgacatatttatattcggcatagataacaccgtactctctaatatcccatactatgaaaaacatggatatggggtggagg

SEQ ID NO: 274241 - DNA, 433 bp, Glycine max
ggcacaagtgagtttgttgatcgagataactagagacagtgtgatgaaaatgaaggtccttgttttcttcgttgctacaattttggtagcatggcaatgccatgcgtacgatatgttccctctccgaatgaacactggctatggtgcccgtactccggaggtgaaatgcgcaagttggaggcttgctgtggaagcacacaacatctttggctttgagaccattcctgaagagtgcgttgaagcaacaaaggaatacatccatggcgaacaatatagatcagactccaaaacagttaaccaacaagcttacttttatgccagagacctcgaagtccatcccaaggacacatttgtgttcagtatagatggcaccgtactctctaatattccatactacaaaaaacatggatatggggtggagaaatttaactcg

SEQ ID NO: 274242 - DNA, 401 bp, Glycine max
tttggcacccaaaggtgcaaaaatattaataggataaacatttgagcacttgaggtactctctgcatttctcttcctcagctgtgcctatgcacaagacacaacaacccttgtgcctgcaatcataacttttggtgactcagtcgtggatgtaggaaataatgactatcttcccacccttttcaaggctgattaccctacttatgggagggactttgctaaccaccaacctactgggaggttttgcaatggcaaattagctactgattttactgcctacactttaggttttaagacctatgcatcaacatatcttatcccacaggcatcagggaaaaacctccttatcggagcatactttgcttctgctgtatctggatatgattaaaatgcttcttcttt

SEQ ID NO: 274243 - DNA, 408 bp, Glycine max
gggttgaagggtagggatgaaatgagagcgagaggagatgaagctgataaagggcagtgttgtgttaacaatcacaatcacattaagtagcgccattctgttgctactattgttcccacaaaaccaaaagccatcttcttcttccatgtcgagggcgcgaagctttgttctgtggcttcacggcctgggtgactctggtcccgccaacgaacccatcaaaaccttattcacttcttcccaattcagagacaccaaatggtccttcccttctgcccctttcgcccctgtcacttgcaactatggttctgtaatgccttcatggtttgacattcttgagattcccgtggcagctgattcttcaaatgacgagagtagtttacttaaagctgttcgaaatgtgcatgctac

SEQ ID NO: 274244 - DNA, 401 bp, Glycine max
gacggcaacagaagaataatcaaatttctcagatctatccgacgtcgtcgcagatccaccaaccgttatggctgccttcagcggtgatgaaacggctccgtttttcggcttccttggagccgcagctgccctcgtcttctcctgtatgggagctgcctatggcacagcaaagagtggtgtgggcgtggcttccatgggtgtgatgagacctgagctggtgatgaagtctattgtccctgttgtcatggctggagttttgggtatttatggccttattattgctgttattatcagtaccggtattaatccaaaggccaaatcttattacctctttgatggttatgcacatctctcctctggtcttgcctgtggcttggctggcctttctgctggcatggcta

SEQ ID NO: 274245 - DNA, 409 bp, Glycine max
gggggaagtttatttcaaaaccttttctatgagtccttggctttaacatcagcaacgtttgcgtccgctctctacaacctcattccagccattacctttgtcttggccatctcctgcggtttcgaaaggttaaatttgagggtggcagcaggaagggccaaggtgttgggaactttacttggaattggtggagcaatgttgttgacctttatcaaaggggcagaaattaatatctggcctttccacatcaaccttatgcatccagatcagcaccaaaacagccacgtggcatcattaaatactgactctggcaataataagttgttgggagcaatttgctccctagcaagctgcttctcttttgctttgtggctcaccattcaggctaagatgagcaaagaatacccat

SEQ ID NO: 274246 - DNA, 404 bp, Glycine max
ggaggcaaaaaggagaagtgagataaagatgtgttgccagacataggcaatattggggtggtgggaggatattgagctctggtgatcataatggtgatcttgtgactaatttgcctggccagcctggggtgaatttccagcactatgctggatatgtcacagtcaatgaaaccagtggaagagcactcttttactggttctatgaggctatcaccaagccagaagagaaaccattggtgctttggcttaatggaggccctgggtgctcttctgtgggatatggagcaacacaggagattggtccatttttagtggacactgatggccaaggcctcaaatttaataacttctcttggaacagagaagccaacatgttattcttggaatctcctgttggagtgggc

SEQ ID NO: 274247 - DNA, 425 bp, Glycine max
ggaaattctattattatgcacacaaaggaggaaaaatcaacacgaagatctcattctcgcagctgcaccgtttcaccttctaaatcagagtaccgttttttcatcagatccgtatacaaaactcctcagggaatgttgaattacgatattttaattcttgattggtagccggttttggctggatttgggttgttggtttttatatcagaaggagaaaggaataggttgagagttgaaagtgaaagtaaatttctgtttcaatggctgctgcttctggtgaaaggtggatggaccgtcttcagttttcctcattgttctggcctcccccactagatgatcaacaaagaaaggatcaagttgctgcgtatgttgaatacattggccaatttacatcataacaagtttctgaggatattgctgagttg

SEQ ID NO: 274248 - DNA, 422 bp, Glycine max
ggcgcacccagagaggaggaagctttgagagagagagagggaggagggagagtgttgacgctccatcaagatgggtatttctagggattccatgcacaagaagcgtgccactggtggcaagaagaaagcatggagaaagaagagaaagtatgagcttgggcgtcaggccgcaaacaccaagttatcaagcaacaaaactatccggaggattcgtgttcgaagtggcaatgttaaatggaaggcattgaagttggataccggcaattactcatggggtagtgaagcagttactcgcaagactcgtattctaagatgttgttacaatgcctcaaacaatgagcttgtgcgaactcagaccctggtcaagaatgctattgttcaagttgatgctgctcctttcagcagtggtaccttcagcacta

SEQ ID NO: 274249 - DNA, 434 bp, Glycine max
gccttccaaacctttggctaccaacaaacacacacgcacacacacttggatcaactttcctcgtcccttgctttccactccaacacggtaccaaccaacctaccaaatggcagccaaaccagctgaagaagctcctcaaggagaaaccctcaagtaccagacgtgggctttgaaagtattgatccactgcgatggctgcaaaaggagagttaagaaaattcttcagggaattgatggggtttatacaacagaggttaattctctgctgcacaaggttacggtcaccggtaacgtggacgctgagactctcatcaagaggctttcaagatcagggagggtagtggagctttggccagaaaaaccacctgagaagaaagataataagaagtctgggaaatccaataagggtggtgctggtgatgctaataaggaga

SEQ ID NO: 274250 - DNA, 402 bp, Glycine max
gactgaagtgaagagagaaacaatggccaatgtttcaattccactcccacgaaacggtttctccaaacccaattactcgacaaaacgcccatgtttcaccccttcagcttcaacactcagaatttcttgctctggagtggctgagtttgatggatctcatcagaaaaaaggaggtttgtttaatttcaatggaatcaagggcgtggcttgtggtattcttgcagcttgtgctgttacttctgctgcatttcctgttactgctgctactcagaggcttcccccattgtcaactgagcccaatcgctgtgagcgtgcatttgttggcaacacaattggtcaggcaaatggtgtatatgataaaccattagatctccggcaatgtgatttcacaaatgagaaaac

SEQ ID NO: 274251 - DNA, 456 bp, Glycine max
aattcgagcggccgcttttttttttttttttttttttttttttttgtgattgaatacaaacctgtaacatgaaggctacgactattacagtaagaaatagtgctgcagtctcaaaaagttgaaagtttaagtccataggttgccctattatccagccaataacaacacaaaatggtatctgcataaggaaaaggaaaacgtgaaggaaatgaaagactttttgttattaggaggaacttataaatgaaaaaagcagattactgtccatgaatgctgcatcaagccatcaactactacataaaggaagaagttgaaaaaattcagtggtttcatcacttagtttcaatcgtactattatgttatatatcctactaaattttgctttttcttatttagacaacatgccaatcttttagcatggtgaactccatcagaaaaatgcatcactaaagttct

SEQ ID NO: 274252 - DNA, 404 bp, Glycine max
ggcagtgaaagaaacaacaccagatggtgaggaggatcaagagaaaggagtgcctgcattttggcttactgccatgaaaaacaatgaagtgttggctgaggagatttcagagcgtgatgaaggtgctcttaagtatctcaaagatatcaagtggagcaggatagaaaacccgaaaggattcaaacttgagtttttctttgacaccaacccttattttatcaattctgtcttgacaaaaacatatcatatgattgatgaggatgaaccaatattggagaaagcaattgggactgaaattcaatggcacccaggaaaatgcctgacacagaagattcttaagaaaaagcctaagaagggttcaaagaatgctaaaccaattaccaaaactgaaaattgtgaaagct

SEQ ID NO: 274253 - DNA, 417 bp, Glycine max
ggtatggatattgatggtgatacacctagcaaaaaacagcgtctgagtagatcactgtcacggtccaagtcagtgtcacgcccaccacatgaaggtgtgcctggagaaagttacaaggattctgctcaaaaggtcaaggcaattaaacttgcaaagaaatctgtcaagaagagaaacaaggatgcccgtcgtggagaagctgatagagtcatacctaatctgaagcccaagcacttgttttctgggaagcgttccaatggaaaaactgagagacgctaggacaggggatgcttgtttcttcattttagagacacctgttggcatttttcgtggctgccaaaattttggtatttcatattagtgttttgtgttggagtttaaggtgctgtgttggcaacatagtttacttatacatct

SEQ ID NO: 274254 - DNA, 420 bp, Glycine max
ggcaatcagcaaccaagatgactcaagcccagattcaaccagttaaacttggaacccaaggctttgaggtactattaactacattacttgctcttattttgataattgatacaattaatctcattctaggtttcaaaattgggattcggatgtatgggccttactggagcgtacaatgaccctctccaagaacaggatggcatatctgttatcaagtatgcgttcagtaagggaatcacatttttgatactgcggatgtttatggagccaatgctaatgaacttttggttggaaaggctttgaagcagctgcccagagaaaagattcagatagccacaaaatttggtattgcttcacgaggttttcctgatatgaagatcaagggttcgcctgaatatgtgcgatcatgctgtgaagcta

SEQ ID NO: 274255 - DNA, 437 bp, Glycine max
gtatgaagaggattacaatgagttggttgacatatactcttttggaatgtgcatcttagagatggtcacttttgaatatccttatagtgaatgcaaccatcctgctcaaatttacaagaaagttgtatctgggaagaagccagaagctctttacaaagtagacaatcccgaggttaggcagtttgtagagaaatgcttagcaactgtgtccctcagactttcagctagggaactcttggaggacccttttctccaaattgatgattatggatttgactcaaaagttttgcagtatcaaagagattgttatgaagtaacgccattaattagacaacctgtgaatggaatttgtatcattaacaacaacttaatgagtggggacactgataatattggtggttatgggcctgtatctgaattggattatcatcaagacg

SEQ ID NO: 274256 - DNA, 417 bp, Glycine max
  unsure (1)..(417): unsure at all n locations
ggagtgagcaagagtgaagagcgaagagaatggctcccaagggtttaatctttttggctgtgttatgcttctcagcactgtcactgagtcgttgtcttgcggaggataatggacttgttatgaacttctacaaggaatcatgccctcaggctgaagacatcatcaaagaacaagtcaagcttctctacaagcgccacaagaacactgctttctcctggctcagaaacatcttccatgactgtgctgttcagagttgtgatgcttcactgttgctggactccacaagaaggagcttgtctgagaaggaaacagatagaagctttgggttgagaaatttcaggtacattgagaccatcaaagaagctttggaaagggaatgcccaggaagttgttcctgtgctgatatcctcgntctct

SEQ ID NO: 274257 - DNA, 314 bp, Glycine max
ggcacaagtgagtttgttgatcgagataactagaaacagtgtgatgaaaatgaaggtccttgttttcttcgttgctacaattttggtagcatggcaatgccatgcgtacgatatgttccctcttcgaatgaacactggctatggtgcccgtactccggaggtgaaatgcgcaagttggaggcttgctgtggaagcacacaacatatttggctttgagaccattcctgaagagtgcgttgaagcaacaaaggaatacatccatggcgaacaatatatatcagactccaaaacagttaaccaacaagcttactttt

SEQ ID NO: 274258 - DNA, 418 bp, Glycine max
ggtttaagagaggactatatctggagattcatactatggctctcacgtgatgcagtatggtgatgtacggcttagcagtgatgttctcttccattatttgggtacagatcctgctaatgataatttcacttttgtggacgaaaactccttatggtcaccttcaaaaccagtcaaccaacgtgatgctgatctcatccatttttgggataagttccgcaaagctcctgagggttctctcaggaaaaatgcagctcagaaacaagttttggaagcaatgtctcatagaatgcatgtagacaacagtgtaaaacttattgggaagcttttatttggtattgaaaagggtccagaagtactcaacgctgttagaccggcaggatcggcacttgttgatgattggcactgccttaaaaccatg

SEQ ID NO: 274259 - DNA, 408 bp, Glycine max
ggaggaaaagaggattagagggtcgccacgtttagcaataaccaaaccctctctactcttttttcttctccttctcttcgctagggttttagcttcttcctcttcacttcgttctttttcgcctctacaatgagcaacgacaaggacacattcaacgtcgccgatctcacttctgctctcaacgaggacaatagagcagaccttgtcaatgctcttaagagcaagatacagagtttggctggacaacactcggatattctagagtctctgtcgcccaatgtccgaaagcgtgttgaggttcttagagagatccagggccaacatgatgaattagaggctaaattttttgaagagagagcagctctcgaggccaaataccaaaaattgtatcaaccactttacacaaag

SEQ ID NO: 274260 - DNA, 357 bp, Glycine max
agcgcaagagtgaatagcgaagagaatggctaccaagggtttaatctattcggctgtgttatgcttcttagcactgtcactgaatcgttgacttgcggatgataactgcactagttatgaacttctacaaggaatcatgccctcaggctgaagacatcatcaaagaacaagtcaagcttctctacaagcgccacaagaacactgatttctcctggctcagatacatctgccatgactgagctgttcatagtctgtatgcttcactgttgctggactccacaagactgagcttgcctgagaaggaatactatagaatctttgggttgagaaatttcaggtacattgagaccatcaaag

SEQ ID NO: 274261 - DNA, 397 bp, Glycine max
ggaccacataggattcatcattttccaaacgagcatcttcgtagtttcttaagtcaagagaagaagtgaagtgctgcttcaatggcttcaagtcaggaagaggtgatccttttgggggttattggaagcccatttctgcacagggtgcagattgctctcaaattgaagggagttgaatacaaatatttggaagatgatttgaacaacaagagtgatttgctcctcaagtataacccagtttataaaatgattccagtgtttgttcacaatgaaaagcccatatccgagtcccttgtgattgttgagtacatcgatgacacatggaaaaacaaccccatcttgccttctgatccttaccatagagccttggctcgtttctgggccatgttcattgatg

SEQ ID NO: 274262 - DNA, 454 bp, Glycine max
aattcgagcggccgctttttttttttttttttttttttttttttgtaatgttgatgatttggggcttgcattttgattgttgttagttagggattgcattagctgctatttctttatgcagttgttgtgatttgtggaagtagactagacactaggaacatgaaatttgatgtttgattttgttaaaactgatgttaattgaatgtgtttagaatgtttgaatttgaacctcggaagaagagtaataggcgtttgtttagaatgtttgaatttgaacctagggattgcgttagctgttatttctttatgcagcagttgtgatttgtggaagtagactagacactaggaagatgcaatttgatgtttgattttgttaaaactgatgttaattgaatgtgtttagaatgtttgaatttgaacctagaagagtaataggcatttgtttagtttgttt

SEQ ID NO: 274263 - DNA, 422 bp, Glycine max
ggcctcaagaaggagaacatggggtttgaggaaactgagttaaggcttggactgcctggaaacggaggcactgaagaagtgctcatcaggaagaggggtttctctgagactgaaactggtcatgaagatgagtctgccaccactgtggatttgatgcttaatctttcttctaaggaggccgcaaccactgctgctgctgctgcagatccaactgataagcacaagactttgcctaaggagaagacccttctgccagcagatcctgctaagccttcagccaagacgcaggtggtgggttggccacctgtgcggtcctttcggaagaacatgttggctgtgcaaaagagcgttggagaagagagcgagaagaacagcagccctaatgcaagctttgtcaaagttagcatggatggagcacctta

SEQ ID NO: 274264 - DNA, 393 bp, Glycine max
  unsure (1)..(393): unsure at all n locations
ggttctagtgtgtgattgtttgttgttgtaactcgttcttcttcttttgttgttctgtgtttgtgtttgttttttctctcacctgaaaatgtcttgctgcggtggtaactgtggttgcggaagctcctgcaagtgcggcaacggttgctgaggctgcaagatgtacccagacttgagctacactgagtcaaccaccaccgagaccttggtcatgggagtggcacctgttaaggctcaatttgaaggtgctgaaatgggtgtgcccgctgagaacgatggcttgcaatgtggaccaaactgcttctgcaacccctgcacttgcaagtgangtgttgggagagcaagcttcaagcagagatagcccttaattaggaataatgantaactattaat

SEQ ID NO: 274265 - DNA, 387 bp, Glycine max
  unsure (1)..(387): unsure at all n locations
gaatcaagagagtgactactggtcggcgacagcgaactacttccgggtaatggcgaacctcgtcgcaatcgccggcgctttgaacggcgcatgatcgccggattctgacagcggtgaacgtcggagcgtcgagcctgtcgttggccggttccagcttcattgtagtgtgctacctnctcttcaaagagctccgcaagttctccttcaagctcgtcttctacctcgctctctctgatatgctttgcagtttcttcggcataatagggtatacatgctagatcaagcaagattttcttcaatggacccgtccaaaggtttcttttgttatgctcagggctatagcacacatttcttttgtgtggcatcttttctatggactacaacaat

SEQ ID NO: 274266 - DNA, 413 bp, Glycine max
gtggtctgtgtgaaacaataagtgaggttgtcttagaaagatggaagaggggacatttgaacaaccatctttggagaaacactattatgggaactgtcctggttgtaaggtggatcaagccaaagagctgagaaaggatgtttccattagaaatctttcttatatttggatggcagtgttatgtggcatacagcgctgcctgtagcatcactctttccctttgtttatttcatggtgaaggattttaatattgcaaaaactgaggcagatataagtacctatgctggttatgtgggattatcattcatgcttggcagggctttgacatccatattttggggaatgctatctgatcgctatggtagaaaacctgtattatttcagggatattacttgtgcattttcaacacata

SEQ ID NO: 274267 - DNA, 424 bp, Glycine max
gggggaagacggactggaatgggaacaggaacagcttcttatcatagaaatcaacaaactcctgggtccgtccattctcacggaagtgccccttcggcggggagaaaagctcagacggtgaacgggaattacttgctgaattttcaatatgacccgatatcccgttctcaaccacggggtcctcctcctacccctaccactacaagaaggtatcggaagaggaagccgtacaacaaagatttgtttctgcaggcaaattacaagttcatggtgctaggtttgggaaattattcacctgagtcgatggatccagataaaatgttgcagtgggaagatattatatgtgtgacatatttgacccccttttcagttcagtgtccaatttgtttggagtatcccatgtgtccgcagataaccacatgtg

SEQ ID NO: 274268 - DNA, 401 bp, Glycine max
gacactaaacaagttaaaagaagagcatgactgaactaacaaagcaaccctatgtcgaagatggtttgtgtcaccggagccagcggcgccatcggatcatgggtggtcctactcctccttcagcgtggttacaccgtccatgccaccgtccaagatatcaaggatgaaaatgagacgaaacatttggaggaaatggaaggagcaaagagtcatctccatttttttgaaatggatcttcttgacatcgactgcattgccgctgccataaagggttgctacggcgtaatccaccttgcatgtgctaacatcattggtcaagtcgaagatcccgagaaacagatattggaaccggcgataaaaggaacggttaatgtgttgaaggcggcgaacgaagcatgggt

SEQ ID NO: 274269 - DNA, 411 bp, Glycine max
gaatataaaaaatattactttttctcttctattattatctgaataagtgacatataaagtatttattgactttaattgattaatggttttggttgaagaaattgattaattatcagtctctttttttaataattatgcttctagctagagatttttcttaacatattatctctttacgtctatcttcattttttacttttaaatttaattttaatatattttttttaaatattaatagttaaacattttgtctcaaaatataaattatttttcataaatttaaaatatttatttattatgtataataaatatttatctcgtgtattgcataagcactataatactaataataataaatttccgttaaaaggtgtaacaaagggaaatgcatagaactactctatataagga

SEQ ID NO: 274270 - DNA, 426 bp, Glycine max
ggatcatgcttttaaacagataggattgaaaatcgggcaaatctctcatttttgtggtagatcttacggcatcaaatccctggttgctttcgcagatcgctcccttttgcaactccaactcccttctcttgatgtccaccatcagaataggtgtgctcctctcctccatggggactgtgatgcttaagatccaagcttgggagacagagaaagagaaagagaatggacgccattgattctgtgttcgatccgctgagagaattcgcaaaggacagcgtgaggctcgtgaagcgctgccacaaacccgatcgcaaagaattctccaaggttgccgtccgtactgcaattggtttcgtcgtgatgggattcgtcggtttcttcgtgaagctcattttcattccaattaacaacatcattgtcggatct

SEQ ID NO: 274271 - DNA, 408 bp, Glycine max
gaagagtgaagagcgaagagaatggcgcccaagggtttaatctttttggctgtgttatgcttctcagcactgtcactgagtcgttgtcttgcggaggataatggacttgttatgaacttctacaaggaatcatgccctcaggctgaagacatcatcaaagaacaagtcaagcttctctacaagcgccacaagaacactgctttctcctggctcagaaacatcttccatgactgtgctgttcagagttgtgatgcttcactgttgctggactccacaagaaggagcttgtctgagaaggaaacagatagaagctttgggttgagaaatttcaggtacattgagaccatcaaagaagctttggaaagggaatgcccaggagttgtttcctgtgctgatatcctcgttctc

SEQ ID NO: 274272 - DNA, 391 bp, Glycine max
gggaaaactgtgtatctacaatattccaataggcaagaaatagtgaataacaaaactgcagcagatgttgctggaaatgtactgttagttacaattgagggtgaagatgcacgccttgtcagcattgatgtcttacacttggtcttttcagcctttgggtttgtgcataagattactacttttgagaagacagcaggattccaggcattggtgcaattctcagatgcagaaactgctacttctgcaaaggatgctttggatggaagaagcatacctaggtacctgcttcctgaacatatgggaccatgtagccttaagatcacatattctggacattcagacttaagtgtcaagtttcaaagtcacagaagcagagactacactaatcctt

SEQ ID NO: 274273 - DNA, 407 bp, Glycine max
attgacaagcgtgtcattgagaggtttgagaaggaagctgctgagatgaacaagaggtctttcaagtatgcctgggtgctggacaaacttaaggctgagcgtgaaagaggaatcaccattgatattgctttgtggaagtgtgaatcaacaaagtattattgcacagttatcgatgcgcctggacatagggatttcattaagaatatgattactgggacatcccaagctgactgtgctgttcttatcattgattcgaccactggtggttttgaagctggtatttccaaggatggacagactcgtgaacatgctctgctttcattcacccttggcgtgaaacagatgatttgctgctgtatcaaaatggatgctactacacccaagtattccaaagccaggtatgatga

SEQ ID NO: 274274 - DNA, 418 bp, Glycine max
ggttaaacaattgaatgtccgtgggctcatgaattgtcagtatgcaataactccatcaggggatgtatttttactagaggccaaccctcgagcttctcgtacagttccatttgtatcaaaagcaattggccatcccttggctaaatatgcttcccttgtcatgtctggaaagatcctctatcatttacagtttacaaaagaagttatccctaattatgtgtcagtcaaggaagcagttcttcctttttcaaagttcccaggctgtgacgtgtttttaattcctgagatgcgaagtactggtgaggtcatgggtattgacccttcatataatattgcatttgctaaggctcaaattgctgctggccagaagttaccacttgttggtactgtgttccttagcctgagcgacttaacaaag

SEQ ID NO: 274275 - DNA, 305 bp, Glycine max
  unsure (1)..(305): unsure at all n locations
gacagcagcagagcaaaagaaagaaagaaagaaagtgcaacttcctctgttttgctcccctgtttaagccttatcataagcttagaatggcacacaaggaattttccattgccctagtgactctcattgttctctttgtcaacacgaacctncaaggtgccacggctgactatggtggtggttggcagagtgctcatgccactttctatggtgggggtgatgcttctggcacaatgggtggagcatgtgggtatggaaatttgtatagccagggatatggaactgacactgtggctctaagcact

SEQ ID NO: 274276 - DNA, 435 bp, Glycine max
ggttctagtgtatgtgattgttgtgactcgttctgcttcgtcgttatcttcttcttttgttgtttgtgtgtttgttttttctctcacctgaaaatgtcttgctgcggtggtaactgtggttgcggaagcgcctgcaagtgcggcaacggctgcggaggctgcaagatgtacccagacttgagctacaccgagtcaaccaccaccgagaccttggtcatgggagtggcaccagttaaggctcaattcgagagtgctgaaatgggtgttcccgctgagaacgatggctgcaaatgtggagctaactgcacctgcaacccctgcacttgcaagtgaggtgttggagagctaaagcttcaagcagaaatggcccttagaaataatgataaaaactatatgtagtttcaaaacttcaaaattatgtagtatgtattatgt

SEQ ID NO: 274277 - DNA, 435 bp, Glycine max
ggagcaagagtgaagagcgaagagaatggctcccaagggtttaatctttttggctgtgttatgcttctcagcactgtcactgagtcgttgtcttgcggaggataatggacttgttatgaacttctacaaggaatcatgccctcaggctgaagacatcatcaaagaacaagtcaagcttctctacaagcgccacaagaacactgctttctcctggctcagaaacatcttccatgactgtgctgttcagagttgtgatgcttcactgttgctggactccacaagaaggagcttgtctgagaaggaaacagatagaagctttgggttgagaaatttcaggtacattgagaccatcaaagaagctttggaaagggaatgcccaggagttgtttcctgtgctgatatcctcgttctctctgccagagatggcattgtttc

SEQ ID NO: 274278 - DNA, 437 bp, Glycine max
ggaagaatcaaatatccttgagccagacatgtgcaggaacgctgcttcacgtcttagggtcatcagtgcccgttcgtgcagcagcagcaggatacctgccagtgccagatttgcaagttccgttgccacacaacaatcctcttctggtttgggtggtttatttggatggctcactggagaccgatccagttctttaccatctctggatttcccgctttcgggcgttacacttcccccttcattgcctgattttgttgcgcccggaaaaactattattactacactcccaaatggactcaaagtggcctctgaaacatcaccgactcccactgcgtcggttggcttatatgtagattgtggttcaatatacgagactccgataagttttggggctacacatctgctagaacgaatggctttcaagaccactagaaacc

SEQ ID NO: 274279 - DNA, 196 bp, Glycine max
gagagcaaacgttaccttgagatgtcctatgctgggaagtaccgcaaattggctgagtctgtgccccttgctattgaagagtaaaatcatgtttgaagagaacatgaatggagaaaccggcttttggtcgtttgaagtcttatggagctttcataaataacgccattgattttggatgggaacatgtttttgaatt

SEQ ID NO: 274280 - DNA, 430 bp, Glycine max
gatagaaaggaaacgaaaaaacagagtacccgacagaatttgaaaacaaaggctgaaatttgaagaaactgagatcattgggtgtgaaatatatggcagaggttgtcctgctagtcgatgatttgaaattactttctgcgagtcctcgttgtagaatttgtcatgaagaagagtttgaaagcgtagaaaccttggaagcaccttgtgcttgttctgggaccgttaagtttgctcatagagattgcatacagagatggtgcaacgaaaaaggaaatacaacctgtgaaatatgtctccagcaatatgaacccggatatacagctcctccgccaaagaagtctaagataaatgatgaaacaatgtccattatggaggaggaagaaccgtcaaacgcaagaatagagattatggttgaaggagtggaaatgga

SEQ ID NO: 274281 - DNA, 399 bp, Glycine max
gagagggaggaggcactgagagagatggtgttggatgggtggaattggaaatcgaagtgaaaagaacggttgaaagtgaaagagtaagatgctattacaattgcgctgctctcattctcaccacaaactgacacttgcctgcagttgaagaaagaatagaggatcgtggtcgatggcgtctgctagccttggaagtggtggggtcggcagttcgaggtctgttaatggtggcttcaggggttcttccagttccgtcgattggcttggcagagagatgcttgagatgaggttgagagaccacgaagacgatagagatagtgagcctgacatcattgatggtgtgggtgctgagacaggtcacgtcataagaaccagcattggtggccgaaatggtcagtc

SEQ ID NO: 274282 - DNA, 389 bp, Glycine max
ggatacaagtctgttattattccgatttttgctattgccattagtatttttgttagtttcacctttgctgccatgtatggtattgctgttgctgcgcttggcatgctgagtaccattgccaccggattggccattgatgcatatggtccaatcagtgacaatgctggaggtattgctgaaatggctggtatgagtcacagaattagagagagaactgatgcccttgatgctgccggaaacacgactgccgctattgggaagggatttgccattggttctgctgcccttgtatcactggccctctttggtgcctttgtgagccgagctgctattacaactgttgatgtgttgactccaaaggttttcattggtttgattgtgggtgcaat

SEQ ID NO: 274283 - DNA, 375 bp, Glycine max
gccacgcgtcgtacgctgcagaagacacgaggggacggcacagagaatatcaggttctagatctatccgacgtcgccagatccaccaaccgttatggctgcttcagcgggatgaaacggctcgttttcggttcttggagccgcactgcctcgtcttctctgatgggagctgctatggccacaaagaggggtgggcgtggcttcatgggtgtgatgagacctgactgggagaagctattgtcctgtgcatggtggattttgggattatggcttatatgctgtattatagaccggattaatcaaggccaatttattacctttgaggtatgcacatcttctctggcttgctgtgctggctggcttctgtgcatggtat

SEQ ID NO: 274284 - DNA, 437 bp, Glycine max
  unsure (1)..(437): unsure at all n locations
gaccggaaaaggggttacttttagtgaggtggtgacgggtgtacacaggttttctaaggccttaagaactcttggtctgaggaaagggcatgttgtgattgtagtgcttccaaatgtggtagagtatgccattgttgctttggggataatggctgctggtggggtgttctcaggtgcaaatccaacatcacatgtatcagaaattaagaaacaggcagagtctgctgatgccaaattgattgtcacaaatgtcacaaactatgaaaaggtaaaggctttggagctacctattattttgctaggagatgaagttgttgaaggtgccatgaattggaacaagttgcttgaagcagcagaccgtgcaggggatgatttgacaaaggagcctattcagcagaatgatctntgtgccatgccattctcatcaggcaccacag

SEQ ID NO: 274285 - DNA, 532 bp, Glycine max
  unsure (1)..(532): unsure at all n locations
tcgtctcgtaccggctgtcgagaagaccgatcagaagggggacgtgtctaaaagcttaaatanntcatcaaagtacctcaaggatgtagcatggcttggtcatggttgggcgattctnnngaatttgatccatcatcnnnttttcagtnnagtctcttacccaacaggnncaagtcacttgagccttaaaccctactanntgcaaaaacccatgtccctaatnngtggagttcaattggttgccataggggcagtaaagggatgcctnactgctagggaccaaatactgtnntccagcagctnaattctgcgaatgccacttcnncatgattgtttcgttcgggnggtgtgatgncctctgtgccctgctaaattcaaaagggaaacaaccaaagcagaaaaagacgggccaccaaatgtttctttgcatgcattctatgtcattgatgcagcaaagaaagcactagaagcttcatgccctggtgtggtctcttgtgctgacatccttgctctggcagcaagggacgcagtt

SEQ ID NO: 274286 - DNA, 389 bp, Glycine max
gtgcagtagttgagttgaggaagtgatggaagcagtttacaggttgaaacctcttttggatgtggttagagttgggaacgctaccacttctgagatgcgtcttgaatcaacggctaattgttacctgcagctagaagctcctcaactctatgagtttcatcgattaacatgactcatcaataagatatgactggatcggataatcaagatccagatcgccaatcaccctctttatccagatttactctctgcatatattgaatgccaaaaggttggagcaccgtcagaactgacatgccttcttgaagaaataggccgagaaagccaccgcatgaatgctcgccgtgagataggggaaggccctgaacttgaccacttcatggaaacat

SEQ ID NO: 274287 - DNA, 426 bp, Glycine max
ggaattggaactgtgcctgtgggacgggttgagactggtgtcttgaagcctggaatggtggtgacttttgcaccaactggactgacaaccgaagttaagtctgtggaaatgcaccatgaagctctcacagaggctcttcccggtgataatgttggattcaatgttaagaatgttgctgttaaggatctcaagcgtggttatgttgcctcgaactcaaaggatgatcctgccaaggaggctgctaacttcactgcccaggttatcatcatgaaccatcctggtcagattggaaatggctatgcccctgttcttgactgccacactttccacattgctgtcaagtttgctgaactcatgaccaagattgacaggcgatctggcaaagagcttgagaaggaacccaagtttttgaagaatggtgatgct

SEQ ID NO: 274288 - DNA, 410 bp, Glycine max
gactgataaaagctaataatcatggaagtactcaggtgagcatggctgtcactgttgcattcttgaatacgatcatcatgttttcagtagtctgtacaagcaagccactgagcttaaactactattcaaaaacatgccctgatgtggaacgcattgttgccaaggcagtgaaagatgccactgctagggtcataactgttccagctgcacttctgcgaatgcacttacatgactgagacgctcggcggtgtgatgcctttgtgctgctaaattgaaaacgaagcatcagaccacaaatagatggtccaccaaatgtttctttgcatgcattctatgtcattgatgcagcgaataaagcactatacagctcatgcccagctgcggcctcttgtgctgacatccttgctcta

SEQ ID NO: 274289 - DNA, 407 bp, Glycine max
gggccagcagccaataacttttgtccgagaggttcttgcattatgtgaccatccagctatattggacaaaagtgaaacacagggtttgttcagtactgatgcaatacagcgagcatggcagattgtggatcagattcctgggagagcaactggtgcctatagccatagtcagggtgtcaagggcttgcgtgatacaatagctgctggaattgaagagcgtgatggttttcctgccaatcctgatgacattttcatgactgatggtgcaagccctgctgtccataatatgatgcaattactcattagatcagaaaatgatggtattctgtgtcccattccacagtaccctctgtactcagcctcaattgccctccatggtggctgcctggtaccttattatctagatg

SEQ ID NO: 274290 - DNA, 422 bp, Glycine max
gacggctaaaagctaaaaatcatcgaagtactcaaattagcatggctgtcacggttgcattcttgaatttgatcatcatgttttcagtagtctctacaagcaagtcactgagcttaaactactattcaaaaacatgccctgatgtggaatgcattgttgccaaggcagtgaaggatgccactgctagggacaaaactgttccagctgcacttctgcgaatgcacttccatgactgtttcgttcgggggtgtgatgcctctgtgctgctaaattcaaaaggaagcaacaaagcagaaaaagatgggccaccaaatgtttctttgcatgcattctatgtcattgatgcatcgaagaaagcactagaagcttcatgcccaggtgtggtctcttgtgctgacatccttgctctagcagcaagggat

SEQ ID NO: 274291 - DNA, 422 bp, Glycine max
gggtacagctgatgaagttgtgaggactcctgagaagggaactgtttttgttgaagatcttccagaagaagaacaagtagttgctgttggacatactgctggtcttttcaacttgggaaacacatgttatatgaattcaacattgcaatgcctccattccgtacctgagttaaagtcagctttgactaattattcacattcaggacgaaacaacgatgtcgatcaatcttctcatttgttgaccattgcaacccgtgacttgttcaacgagcttgataaaagtgtgaagcctgtggcgccaatgcaattttggatggtattgcggaaaaaatatcctcaatttggccagctgcataatggagttttcatgcaacaggatgctgaagaatgttggacacaacttctatacactctctctcagt

SEQ ID NO: 274292 - DNA, 432 bp, Glycine max
cggtccccatgatcagcagtctattgctgatgctctgttgaagcttgttagcaacaaacaactttgggcaaaatgtagacagaatgggttaaagaatattcatttattttcatggcccgagcactgtaagacttacctttctaaaatagccacttgcaagccaaggcatccacaatggcagcgaagtgaggatggaggtgaaagttcagaatcagattcaccaggtgattccttgagagatttacaggacttgtctctaaatctgaagttttcattagatggagagaagagtgagggtagtggaaatgacaattctttgaattctgatggaaatgctgctgatagaggggcaaaattagagaatgctgatttgtcatggtcaaagggcatctctaaggacacacgcaagggtggtgctacagaaaaatccga

SEQ ID NO: 274293 - DNA, 290 bp, Glycine max
ggttctagtgtgtgattgtttgttgttgtaactcgttcttcttcttttgttgttctgtgtttgtgtttgttttttctctcacctgaaaatgtcttgctgcggtggtaactgtggttgcggaagctcctgcaagtgcggcaacggctgcggaggctgcaagatgtacccagacttgagctacactgagtcaaccaccaccgagaccttggtcatgggagtggcacctgttaaggctcaatttgagggtgctgaaatgggtgtgcccgctgagaacgatggcttgcaatgtg

SEQ ID NO: 274294 - DNA, 424 bp, Glycine max
gaaggtgcacagagtttagttgtgaagctataagctagttttactcgatgaggagcatatgaagactgttgtgttttctttgttgctagcagtagctttggtagcatggccatgccatggcgcacgctaccaaaggttccctctccgaatgaaaactggctatggggagcgttcttcggaggtaaaatgcgcaagatttaggcttgctgtggaagcacacatcattcgagcctttaaaaccattcctgaagagtgcgttgaaccaacataggactacattaatggcgaacaatttagatcagactctaaaacagttaaccaacaagctttcttttatgctagtgaacgcgaagtccatcacaacgacatatttatattcggcatagataacaccgtactctctaatatcccatactatgaaaaa

SEQ ID NO: 274295 - DNA, 340 bp, Glycine max
ggactcaaaagctcaataaatgcacgttaccaagcgaacgaatcaaatctctctctcaatctagccttctttctttttttcaatttccaaatcacgaaactcaagaagatggagaaagcgatcaacagacagaagattttgcttcatcatctcaacccttcatcatccacccaccccaacgaatcatcctccctccatgcttcagcatgtgtggcgggggatagcgctgcttatcaaaggacatcgacattcggggacgatgttgtgatcgtgggtgcttatcagactgctcattgcaaaagctaacgaggtggttcaaagacactcttcctgatgatct

SEQ ID NO: 274296 - DNA, 419 bp, Glycine max
ggggaacagaaacaagaaaaaaaaactcccacaatagggatgaggagtgccgacaggattaattgaggtcagggactgaaagggggtgttctgttctgatcggatctgaaatcatcgggaaaatgtcgtcgtttctgcaccagagaagcagtctccagaacccattctcgaatccattcccggcatcaactccatcatcatcgaattcgaagaaatccctgtccatcatgggccccaccaccctcctagccctaatctccctcatagtcatactcggcgtcttctgcccctgggtgggcttttcccagggctttcccttcactcccacttccactttcaaatgggctcactacactttagaacaagcgctctccttcgtcgccaaaaacggttcctccgtcatcgtctgcattgtgagc

SEQ ID NO: 274297 - DNA, 403 bp, Glycine max
gggcaaaaaaggaggtaatatggagcatgatgggagggcagaccactgaacaaggggattgttcaaaatttaagggaggcattccacattgctgtaagaaagatccgacggttgtagatttgctacctggaacaccttacaatcaacaaattgcaaattgctgcaaaggtggggtgctcagttcatgggtgcaggatccaaccaatgcagtttcctcatttcaagtcagtgttggtagagctggaaccacaaatagaactgtcaaagtcccaaaaaacttcaccttgaaagcaccaggaccaggttatacttgtgggccagctaagaatgtggcacccactaaattcattacttcagacaaaaggagagtgacccaagcactgatgacatggaatgtgacatg

SEQ ID NO: 274298 - DNA, 378 bp, Glycine max
ggcgcaagagaagagagagggagtaatggacagagacgaagcagaaaccatggagaatgtggaattcgatgcttctgagattgagtacgttagttacggtggcgagcatcacctccctctcgtaatgaacctggtggaccaagaactcagcgaaccttattccatcttcacgtaccgttacttcgtctatctctggcctcagctttcattcctggcgttccacaagggtaaatgcgtgggcaccgtggtatgtaagatgggggaacaccgtaacactttcagaggctacattgccatgctggttgtcatcaagccctacagaggaagaggcattgctacggagcttgttactaggtctatcaaggtgatgatggaatc

SEQ ID NO: 274299 - DNA, 382 bp, Glycine max
  unsure (1)..(382): unsure at all n locations
gattacttaaaggacaagattcagccctcgtttgtaaaagagcgacgggcaatgaagagagaatatgaagaattcaaagtacggatcaatgcccttgtagccaaagctcataagatgccagaggaaggttggacaatgcaggatggaacttcttggcctggaaataatcctagggatcatccgggaatgattcatgtgtttttaggtcatagtggggggctggatacagatggaaatgagctgnctaggacttgatatgtttctcgtgagaagcgaccaggcttccaacatcacaagaagggctggagctatgaatgctttgattcgagtttctgcttgcttgaccaatggtgcatatcttctgaatgtggattgcgatcac

SEQ ID NO: 274300 - DNA, 388 bp, Glycine max
gggagaattaggcaaaatgtttgatatcccaatggatggctctaaatctagaaaatccggtcccataagtaatgctccttcaaggacaggatcatttgcaggtgctgcttcacactctggacctatcatgcaaaatgctgcagctcgttctgcttatatcacatctggtaatgtatctactggaggcatgtctgcttcagcctcaatgaaaaagaccaactctggtccattgaataagcatggggaaccagtcaagaagtcatctggccctcaatctggtggagttacacgccaaaactctggtccaattcctgcagttcttcctacgactggtcttattacatctggcccattaaattcatctggagctccaaggaaagtgtctggt

SEQ ID NO: 274301 - DNA, 523 bp, Glycine max
  unsure (1)..(523): unsure at all n locations
aattcccggtgtcgactccacgtcgtctcgtaccggggctgtcgagaagaccgaccagaagggggacctctttaagatgaatggaattgggctttctcgtctgatgggacccaagaatttttcactttcatantgatnngaagtctatgatanngttttgatgcannatgggcctnntcaagaaaatcttctcagaggcatatanttcttatggnttttgagagggccttctgcaatacagcaaaggggaattgttcctttctgcaagggtctggatgtgattcagcaggctcagtctggaactggaaagacagcaacattctgttcggggattttgcaacagcttgactatggattggtacagtgtcaggctttggttttggcaccaacaagggagcttgcacaacagattgagaaggttatgcgagctctaggtgattaccttggtgtcaaggttcatgcttgtgttggtgggaccagtgttcgtgaggatcagcgcattctccaagctggtgtccatact

SEQ ID NO: 274302 - DNA, 249 bp, Glycine max
ggacgaaggtgataataatcggtgccggaacttctggtatcgccaccgccggttgcttaacgaagcaatcaataccttacataatgctcgagagagaagactgtttcgcttcgctgtggcagaaatacacctacgatcgtttccaccttcatttgaggaagcaagtttgcaagttaccgaacttaccgtttcccaagtcttaccttaactacgtgcctcggaagcagttcataaacacctgggaaactt

SEQ ID NO: 274303 - DNA, 422 bp, Glycine max
ggactggccagagggtgcaatctcacgagagagtattaaagctgttatgaagcttccccgactacagaaccttataatgcagcatgttgatcattcagctggagatcttatacatcttttgcaggggctacttagatatgacccctttgaaagacttacagctagggatgctttgaggcattccttctttatgagagatcatcttaggagatgatttttatgtgtttgtaaacgattggtctgcttttaggtgaaagatcactcgagggcaaatatggctgtaaggagcctatgtgccaatgtaaataaatatttaaatttacgcttgtgtggcaagtgaggatgggtattcagcagcatttacacctcaacctcaaagcctgtgtttcaaacgttttattaacaaaaaatgggaataaaaa

SEQ ID NO: 274304 - DNA, 348 bp, Glycine max
gaggaagaatttgatgaatcagacaagtcacatgataatgaagctccagaatatagacgtctaattgcaattcatgctgggaagcctaaaggtggattagcagaatgcctcaaagtggatcctgataaagtgagacgtctaagtttaagtgagcaacagcttgaaaaggctgccataaatcatggacaacaaattgtcaggtttactcagcggaatatactaagggtgtatccaaaaggtactcgcattgactcatcaaattataacccattaattgggtggatgcatggagctcagatggttgcatttaacatgcaggggtatgggagatctctttgggtgatgcat

SEQ ID NO: 274305 - DNA, 414 bp, Glycine max
gagagcgaagagcgaagagaatggctcccaagggtttaacctttctggctgtgttaatatgcgtttcagcactgtcactgagtccttctgttgcgggggaagggcaaaataatggccttgttatgaacttctacaaggaatcatgccctcaggctgaagacatcatcacagaacaagtcaagcttctctacaagcgccacaagaacactgctttctcctggctcaggaacatcttccatgactgtgctgttcagagttgtgatgcttcactgttgctggactccacaagaaggagcttgtctgagaaggaaacagatagaagctttgggttgagaaatttcaggtacattgagaccatcaaagaagctttggaaagagaatgccctggagttgtttcatgtgctgatatcctcg

SEQ ID NO: 274306 - DNA, 381 bp, Glycine max
ggcacgttgttaaggatgttcctaacaatttgttgaggcacattaccctggataacaatgagaacaaacctgtcactaacagtagggatacacaagaggtaatgttggagcctggcctgaaattaatcaaaattttcaaggaatataccagcaagacatgcattctggatgattttggcttctatgaggcccgtcagaagactattttggagaagaaagcaaagcaacaattcccaaagcaggtatgggaagggaaacctgctgatgagaagattgagataaatggggaagtcaatactcaaaaatctgaagttagctcggaagtgctcaaggagtcccttgctgaggaggatagtgatgaccacaaagttcccgagaatg

SEQ ID NO: 274307 - DNA, 442 bp, Glycine max
ggagcaagagtgaagagcgaagagaatggctcccaagggtttaatctttttggctgtgttatgcttctcagcactggcactgagtcgttgtcttgcggaggataatggacttgttatgaacttctacaaggaatcatgccctcaggctgaagacatcatcaaagaacaagtcaagcttctctacaagcgccacaagaacactgctttctcctggctcagaaacatcttccatgactgtgctgttcagagttgtgatgcttcactgttgctggactccacaagaaggagcttgtctgagaaggaaacagatagaagctttgggttgagaaatttcaggtacattgagaccatcaaagaagctttggaaagggaatgcccacgagttgcttcctgtgctgatatcctcgttctctctgccagagatggcatagattcgctagga

SEQ ID NO: 274308 - DNA, 351 bp, Glycine max
ggatttagagtgaagagctaagagtatggctcccggggtgtgaatcacttaggctgggtaatgcttcttagcactgtcactgaatcgctgtcttgccgaggataatggacttgtcatgaacttctacaaggattcatgccctcaagcttaaaacatcatcaaagaacaagtcaagcttctctactagcgccacaagaacactgctttatcctggctcataaacatcttccatgactgtgctgttcatagtactgaatccacactgatactagacttcacaacaatgagcctgtctaataaggaaacaaatagaaactctatagttgataaattacaggttccttactacca

SEQ ID NO: 274309 - DNA, 309 bp, Glycine max
ggcacaagtgagtttgttgatcgagataactagaaacagtgtgatgaaaatgaaggtccttgttttcttcgttgctacaattttggtagcatggcaatgccatgcgtacgatatgttccctcttcgaatgaacactggctatggtgcccgtactccggaggtgaaatgcgcaagttggaggcttgctgtggaagcacacaacatctttggctttgagaccattcctgaagagtgcgttgaagcaacaaaggaatacatccatggcgaacaatatagatcggactccaaaacagttaaccaacaaggcta

SEQ ID NO: 274310 - DNA, 333 bp, Glycine max
gacgaaacaatggtagaactagtctctcaatacccgagaacgtgtgaacgaaaaatagcgtctattttaaactagaagactagaagattacgtctttgattatgcaaagcggtgcacaaattacataatccagagtccagaactcacactatatatataagcacgacctaagcttcttctttgcactgcacatcacttttctactttgagtcttcttgatccttctgtgtctccttgaactcaaacatggcagatgatgtggttctgctagatttctggccaaggccatttgggatgaaggtcatgattgcacttgctgaaaagggtatgaaa

SEQ ID NO: 274311 - DNA, 336 bp, Glycine max
  unsure (1)..(336): unsure at all n locations
gacacacaacatttacatttctctctccagtatggcttctactcacaatgagttttatgcacttatgctagtggtggtggttggctccatggtggcttcctgtggtgctaacttcaaccaagactttgatctaacatggggtgatcaccgtgctaagatattcaatggtggtcagcttctatctctttctctggacaaagtctctggctccggcttccaatccaagaaagagtacctatttgggaggatcgatatgcaactcaagctcgttgcttgcaactctgccggcactgtcactgcttactactngtcgtctcagggccaactcatgatgag

SEQ ID NO: 274312 - DNA, 420 bp, Glycine max
  unsure (1)..(420): unsure at all n locations
catgccacaggttaaaatgatggtagtacttggggaacttggtgggcgtgatgagtattccttagtggaggccttaaaacaaggaaaggtatccaaaccggttgttgcctgggtcagtggcacatgtgcacgactcttcaaatctgaagtacaatttggtcatgcaggagccaaaagtggtggtgagttagagtctgctcaagcaaagaatcaggcactaagggacgctggagctgttgttcccacatcatatgaagcttttgaagctgcaattagggaaacatttgataaattggttgaagaagggaagatcacaccaatcaaggaaatcacacctgcaccaatccctgaagaccttagtactgcaattaagagtggaaaagtccgtgctccaactcatattatntccaccatttctga

SEQ ID NO: 274313 - DNA, 418 bp, Glycine max
gtggaacatggagacattgcaaacagaaagtactccggaggaacacagtcttattattactgatgttcgcttcagaccaaattcaactcagctggcaacatcttcgtttgatacaactgtgcggctgtgggatgctgcagatccaaccttccctttacatacatatagtggtcatacttcacatgtggtgtcccttgatttccacccaaagaaaactgagcttttctgttcttgtgacaataacaatgagattcgcttctggagtattagtcaatattcttccacacgtatttttaagggaggatctacacaggtgaggtttcagccaaggcttggtcaccttctggctgcagcaagtggcagtgttgtgtctctctatgatgttgagactgacaggcagatacacacattacaggga

SEQ ID NO: 274314 - DNA, 402 bp, Glycine max
ggaagaggaaggggctagagaggaaagaactagctggctggaagctgagaactttagcatggactagtactactagtacattcatgcatattacgttggactatggtggcttaaccatagcatcgagagcgcaaagatggtgtgagctccttggtgagaaaagatgcgcctgaagaaagagccttgggctatcgaggaagatcaaattctaagatgttacattgacaaacatggacatggcgaattggcctgccctttcaaagcaagcaagcttgttaaggtgtgggaaaagctgtatactacgctggattaactatgtgaggcccgatgttcaaagacggaatttcacaattgacgaagaagatactatcattgagctggatgacatgctgaggaacaggt

SEQ ID NO: 274315 - DNA, 381 bp, Glycine max
  unsure (1)..(381): unsure at all n locations
ggagaaaagaaggaggatcccaacgcgctttccaacttcaggatttcggaacccttgaggcaaaaattgaaggagaagggtatcgaatcactgtttcccattcaggccatgaccttcgacaccgttctcgatggttctgatttggtcggtcgggctcgcaccggtcagggtaaaactctggcatttgtgttgcccatattagagtctttaataaatggtccaacaaaagcttcaagaaagactggcttcgggaggactccaagtgttcttgtgcttctacctactagggaattggcctgtcaggtgcatgctgattttgatgtttatggtggggcaatgggattgagttcatgttgnttatatggcggagctccgtatcaa

SEQ ID NO: 274316 - DNA, 223 bp, Glycine max
ggttctagtgtgtgattgtttgttgttgtaactcgttcttcttcttttggtgttctgggtttgggtttggtttttctctcacctgaaaatgtcttgctgcggtggtaactggggttgccgaagcttctgcaagtgccgcaacggctgccgaggctgcaagatgtacccagacttgagctacactgagtcaaccaccaccgagaccttggtcatgggagtgggg

SEQ ID NO: 274317 - DNA, 401 bp, Glycine max
gaccacttggataaacgaacttggacttatatctttggagcttgctgtgccacctctgtgttcataccttcttttcacaattaccgtatttggtcttttctgggacttggaatgaccacttacactgcttggtacttggcaatagcagcccttattcatggccaggcagaaaatgtgacacacacgggtccaacgaagctagtgctgtacttcacaggagccaccaacatactgtacacgtttggtggacatgcagttactgtagagattatgcacgccatgtggaagccacagaagttcaagtacatatacttgctggccactttgtacgttttcacactaacgattccttctgctgctgcccgttactgggcttttggtgatgaacttctcaatcattc

SEQ ID NO: 274318 - DNA, 415 bp, Glycine max
gggggaaggtcgagtagtgtgccagataaatcctcccagcgttcctctcgcagcatgtctgtcagtcctgatcgtgttcgtgtgagggggcggtctccagcctttaatgctctagcagctaattttgagaaccctaattctaggaacctttcaaccccacctccagtaattagaaagctgtatcctaaatctgtgacaacagattctgcaatactggcgccaaaatcttctgccatagctgcacttagttcttcttttgaacaaccaccttcagcacgagaaaccatgatacctcgctcacttaaagtgagtccagtaatgcccaaatcaaaccctgagaaaaatgacaaggagaattctgtgagcaccagagtggaatctcttaccatacaggaagatgtgaaagaggatgaag

SEQ ID NO: 274319 - DNA, 414 bp, Glycine max
ggatgactgatgaagaatttgcaagagaaacgattgctggcttaaatccaaatgtcattaagattatagaggagttcccactaagtagcaagctagatactcaagcctatggtgatcatacctgtataatagcaaaagaacatttggagcctaacttaagtgggctcactgttgagcaggctatccaaaacaagaagttgttcatcttagatcaccatgactatctcattccttatttgaggaaaataaatgcagataccacaaagacttatgctacaagaaccatatttttcttgaaagatgatggaactttgacaccattggccattgagttaagtaagccacatactcagggtgaagaatatggtcctgttagcgaagtctacgtgcctgccagcgaaggagtggaagctt

SEQ ID NO: 274320 - DNA, 400 bp, Glycine max
ggacccgaaggcctgaagaacattgcacaccgtgttcatggtcttgctggggcatttgctcttggattaaagaaacttggaactgtggaagttcaagaccttcccttctttgacactgggaaggttaagacttctaatgcacatgcaattgctgatgctgctctcaagagtggaataaatttgcgagttgtagatggaaacactatcactgttgcttttgatgaaacaaccacattagaggatgttgataatcttttcaaagtttttgctggtggaaagccggtccccttcactgctgcatctcttgcaccagaagttcagagtgcgattccttctggattagttaggaagagcccttatctgacacactctatctttaacatgtaccaaactgagcatg

SEQ ID NO: 274321 - DNA, 442 bp, Glycine max
ggtagtttaagtgtgaatccctttccctctctactcttctttcactttccatttccatttccattttttctggttcactttctcgatggcctccgagaaccccaccgccgacgacgccgtcaacggcttcaatcggccggaaatgttctcggaaaacctcgccggcaccgtcgacgcctacgaccgccacgtgttcctctgctacaagagtcacctgtcctggcccccgcgcatcgaggcctccgacgccgatcccttccccaagcgcgtcgccaccaccttcaaagcccgcaagaacgacttgcccctcaagacgaaaatcaccgtgtgcgaggtgcgtgaggaggctggcttcctcgacggtgacgtgttgattttccccgacatgatcaaatacaggggtttggaggaatcaaatgttgatagctttttcgaagatgtt

SEQ ID NO: 274322 - DNA, 340 bp, Glycine max
  unsure (1)..(340): unsure at all n locations
ggagggtgcattgtgtcaaacctgttggaggtaaaaagacccagtttattgtaatgggcaatgtgttttgctcggagtaccagatccacaagaggtttgacctcaaaggctcttctcatggtcaatctacagataagccaagggaacaaattgatgagactaccactctcaaagaccttgatcttaactttgtctttcgccttgaatagtcttggtttcaagagcttatatggcaacttggtagagattgtgagttcctggaagcaaagggaatcatggattacagtcttctaattggcctgcatttctgtgatgatagctcanttgatgaaatgaaaag

SEQ ID NO: 274323 - DNA, 419 bp, Glycine max
  unsure (1)..(419): unsure at all n locations
ggagcctgagtgtgacaagctcataatggcttcacttaacaagaactacgttgacatggatgagtatcctgtcaccactgagctccagaaccggtgtgttaatatcatagcaaatctattccatgctcctataagtgatgatgagactgcagtaagtgtgggaactgtggggtcatcggaggcaataatgttggcaggtctagctnttaaaaggaaatggcagacaaagagaaaagcagaaggcanaccatatgataagcccaacatagtaactgnggctaatgtgcaggtttgttgggaaaaatttgcaaggtactttgaggtagagctcaaggaagtgaaactcatagaaggatactatgtgatggaccctgcgaaagcagttgaaatggtagatgagaacaccatctgtgttgcaa

SEQ ID NO: 274324 - DNA, 407 bp, Glycine max
gtatgttaaaagtgttcaaagaactgtcatttggatgggaaaaagacaggaaactgtggaagatgtcccctgtggtaacactgttgctatggttggtttggatcagttcataacaaagaatgctactttgactaatgaaaaggaagttgatgcccatcccattcgagctatgaagttttctgtctcacctgttgttcgtgttgctgttcaatgtaaggttgcatcagatcttcccaagcttgttgaaggtcttaagcggttggccaagtcagatcctatggttgtttgtaccattgaggagtctggtgaacacattgttgctggtgcaggagagcttcatcttgagatctgtttgaaggacttgcaagatgatttcatgggtggagctgagatcattaaatctgacc

SEQ ID NO: 274325 - DNA, 405 bp, Glycine max
gaagtacaagcagagagttacgacacatatttctttttcttttccctttttcctaggcacagcacacgccctctcaaatagaaactgagagatgaattctgatcagtttcagaagaacagcatgttcgtagaaacccctgaagatggtggcaaaaacttcgacgatgatggacgagtcagaagaacgggtacatggataactgcgagtgcccatatcataacggcagtgatagggtcaggagtgttgtcacttgcatgggcaattgcacaaatgggttgggtggctggccctgccgctctctttgccttctctttcatcacttacttcacttccactcttcttgccgactgttatcgctcacctgatcctgttcatggcacgcgaaactacacctattccgatgt

SEQ ID NO: 274326 - DNA, 364 bp, Glycine max
ggtatcgcttcagagttgagaccaagacacactcgttcatatatctctctgctcttctcttctcttctacctctcaagtttttgaagtataaagatggcagagacattcctattcacctggagtccgtgaacgagggacaccctggtaagctctgcgaccaatctcgagctgcctgaccttgctcgaacggcccagacagaaggtgctgcaaacatgcccagacaatggtatggcttgagagacacacaagcaacgtgactacagagatcgtgcggaaccttcaggcatggcttattcaacgattgggacttgatgctgacaactgcaaggtccttgtaaacattgagcagcagagccctgata

SEQ ID NO: 274327 - DNA, 440 bp, Glycine max
gacacacagagacatttttctttcttagaagcgtgcaccacacggaacctcgcaattccttcacacccaccataataataatatcttcattgttcttttcttctttgttaccattaaaaacacacacacacacacaacaacactctgaaactaacaacaacaataaaagaccatgtcggtgaaggagtgcgagcaccacaaggggaagaagaggaagatcttccggcaagtgttctggtgcttagtggtgttccttttcatcgtgctggtcacaattcttttgatatgggcaatccttagacccaccaaacccaccttcacgctccaagacgtcaccgtctacgccttcaacgccaccgtggcgaacttcctcacttcgaattttcaggtcacgctcatctcgcgtaacccgaacgaccgcattcgtgtttactatgatc

SEQ ID NO: 274328 - DNA, 436 bp, Glycine max
ggagttagggtgagttgcaggcagtgtcatctctgctttgacgacaagatgagcatcccaattccccatcggcagttattcatagacggagactggaaagtccccgtcctcaagaatcggattcccatcatcaacccttccacccaacacatcatcggggatatcccagcagctactaaggaagacgttgatctcgctgtcgctgccgccaaagctgccctctcccgcaacaagggcgccgattgggcctccgcttccggctccgttcgggctcgctacctccgcgccatcgctgccaagatcaccgagaaaaagcctgaactagcaaaactcgaagctattgactgtggaaaaccgctcgatgaagccgcctgggacatcgacgatgttgctggttgctttgagttctatgctgaccttgctgaaaaattggacg

SEQ ID NO: 274329 - DNA, 375 bp, Glycine max
gacaagaagaagaagaagaagaagaagaagaagggttggttggtcccattccataggaagagatcaaagagaagagaaaagatgtttgagccgcagcagctatacactcgagcgaagaccgaggaattcgacctcgaatcaggggaaaccctctacccagggctgagcgtcggcgagaaccagctccgatggggcttcatccgcaaggtctacggcatcctctacgcccagatcgtcctcaccaccctcgtctctgtcaccaccgttttctatactccaatcaatgacctcctcaagggcaattccaccctcctcctcatgctcctcttccttcctttcatctttttgattcccctgttgaagtaccagcagaag

SEQ ID NO: 274330 - DNA, 405 bp, Glycine max
ggtggttggcttgctttcagtctgttcattgcaaatgcttcattccaagatggttaggactctgtaagctgatgaagacaacactcataccgttggaaagaacgatgctgctggccaatgttgttaatttagatcttgcttcctttgtcttcttgagtattatcagagacgggagtgcatggatcactagctctttcattcggtcagagtggccggcagttgacattcctcttgatcatgaagcatttgcagttccaaagggttataatgcacctcaacaagtgcacatcacgcaaggtgactatgatggaaaagcagtaatcatctcatgggtgaccacagaagagccagggcacagccatatacagtatggcacatcagagaataaatttcaaactagtgaag

SEQ ID NO: 274331 - DNA, 362 bp, Glycine max
  unsure (1)..(362): unsure at all n locations
ggaggaagaggaggagtaacaaagcaagtatgtcagaatcaaacgcaattgcaaatggtttggctggtgcaagtggtggaattattgctcaaatcataacttatcctcttcaaacggtaaacacgcgccagcaaactgagagaacactcaagaagaacaagcaaagtttgcccttcaactcaaccactgctcctggcactcttcttcagatctttcaggtcattggaactganggttggggtggactctatagtggcctcaagccttctcttcttggaactgctgcttctcagggaatttactactatttctatcaagtttttaagaacaaggcagttgccattgcagctgcacggatggtg

SEQ ID NO: 274332 - DNA, 331 bp, Glycine max
gagtgagagacggaaagtgcaaagccaccgtcttgtcttttcagagcttggctttgcttatcgaatctctctcctctcatctttctcaatcaaggtttggaaaagattgccgatgcttaggatattcaaccccttggttgtgacaatggaactggaatggtcaaggctcgatttgctggtgatgatgcttccaaggctggctttcccaggattggtggccggcctcgacacactggtggtatgggtgggatgggtcaaaaggatgcccttgttggtgatgaagcccaatcaaaaagaagtattcctactctcaaggatcccattgagcatg

SEQ ID NO: 274333 - DNA, 370 bp, Glycine max
gggaagatgtgaacagggaaggtcttagaaagacaccacttcgtgttgccaaggcccttcgtgaaggaaccagaggttacagacaaaaggtgaaggacattgttcaaggtgctttattccccgaagctggtctagataatagagttggtcatgcagggggagcaggtggactcgtgattgttcgagatcttgacttgttttcctattgtgagtcctgcttgcttccattcccggtcaagtgtcatgtgggttatgtcccctctggtgaaagagttgttggtttaagcaagctctctcgtgttgctgatgtatttgcgaaacgacttcaagagcctcagcgtctggcaaatgaggtatgctctgctttaca

SEQ ID NO: 274334 - DNA, 350 bp, Glycine max
ggtacaagcagagagttacaagacatatgtaacggttttttccgtttttactatgcacatgttaagccctattaaatagaaactgagagatcaattctgatgagcttcacaataaccgcgtgttcagagaaacccatgaagattgggtcaaaactttacgatgatggacgacgtaaaagaaccgtggcatggataactgttagtgcccatatcgttactgcagtgatctggctccgaatgctggtacttgcattggccatttgccacatgggttgggtggctggccctggcggtcactttgtcttttatgttattactgacttgacttacactcttcttgacgactgtta

SEQ ID NO: 274335 - DNA, 395 bp, Glycine max
ggaagagaatggctcccaagggtttaacctttctggctgtgttaatatgcgtttcagcactgtcactgagtccttctgttgcgggggaagggcaaaataatggccttgttatgaacttctacaaggaatcatgccctcaggctgaagacatcatcacagaacaagtcaagcttctctacaagcgccacaagaacactgctttctcctggctcaggaacatcttccatgactgtgctgttcagagttgtgatgcttcactgttgctggactccacaagaaggagcttgtctgagaaggaaacagatagaagctttgggttgagaaatttcaggtacattgagaccatcaaagaagctttggaaagagaatgccctggagttgtttcatgtgctgat

SEQ ID NO: 274336 - DNA, 329 bp, Glycine max
ggcatccaaaatggcgcattcttctgttatagtcttcctctgcactctccttctcttcttttctccgtcaattcgtgcctccgacgatgacgtggctcttcacgcgaagaagctcatcagagacctcaacttgttccccgacgctgacgtcaacatcgttcccgttgctaattgcacccttcaaccccgcaggatcgtcgagaagcgcctgatgttcccgaagctgctagcttccgattccgagccttcggttgaagattttgggcaccacgctggctattaccccattcagcattcacatgccgcaagggatgtctactttttcttcg

SEQ ID NO: 274337 - DNA, 325 bp, Glycine max
ggcatacaaagtggcgcattcttctgttatagtcgaactctgcactctgcttctattcatttctacgtcaattcgtgcctccgacgatgacgcggcgctgcacgcgaagaagctcatcacagacctcaacttgttccccgacgctgacgtcaacatcgttcccgttgctaattgcacccttcaaccccgcacgatctgcgagaagcgcctgatgttcccgaagctgctagcttcggattccgagccttcggctgaggatttgggtcaccacgctggctattaccccattcagcattcacatgccgcaaggatgttctactttttc

SEQ ID NO: 274338 - DNA, 396 bp, Glycine max
ggtgggattttgagagagagaaatagagagagaacttcaagtgagggtgagagtgacacaaatctagagagagcactagtactctaaaagtctattatattcttcaaaatatgaccatgcatcgcgagtcttgggcttttgtcttcggcgttatgggcaacatcatctcctttggagtgatccttgctccattgccaaccttttaccaaatctacaagaagaaatccactgaaggtttccagtcacttccttatgttgttgcactgttcagtgcaatgctttggatttactatgctttcgtgaaaagggaaactgccctacttctcattaccattaacacatttgggaattgtgtggagtcaatttacctttctatcttcctaatttatgccccca

SEQ ID NO: 274339 - DNA, 391 bp, Glycine max
agggagagccaacagtgaagagaatggcttccaagggtgtaacctttctggctgtgttaatatgcgtttcagcactgtcactgagtccttatgatgccggggaagggcaaaataatgggcccgttgtgaacttctacacggaatcatgccctcaagctgaagacatcatcacagaacaagtcaacgcttttctacaagcgccacatgaacactgctttctcctggctcaggaacatcttccatgactgtgctgctcacagttgtgatgcttcactgttgctggactccacaagaacgatcttgtctgagaaggtaacagatcgaagctttgggttgagaaatttcaggtacattgagaccatcaaagaagctttggaaagagaatgccctg

SEQ ID NO: 274340 - DNA, 426 bp, Glycine max
gggttgttaaaggagcagttgatgtacacattggtgcaaacccttctgctgagggtggaggagaagatgagggagttgatgatgcaactgttaaggttgttgacattgttgacacattcagacttcaggagcaacccgcattcgataagaagcagtttgttaccttcatgaagaggtttatcaagaatttgactcccaagctcgatgcagagcaacaggagttgtttaagaagcacatcgagggagcaactaaatacctgctctctaagattaaagatttccaattttttgctggtgagagcatgggtgatgatgcttgcttggtctttgcctactacaaggacggcgctgccgatccaacattcctgtactttgcatatgccttacaggaggtcaagtgctaagtgacttaatgtaccgagctat

SEQ ID NO: 274341 - DNA, 417 bp, Glycine max
ggttctagtgtgtgattgtttgttgttgtaactcgttcttcttcttttgttgttctgtgtttgtgtttgttttttctctcacctgaaaatgtcttgctgcggtggtaactgtggttgcggaagctcctgcaagtgcggcaacggctgcggaggctgcaagatgtacccagacttgagctacactgagtcaaccaccaccgagaccttggtcatgggagtggcacctgttaaggctcaatttgagggtgctgaaatgggtgtgcccgctgagaacgatggctgcaaatgtggaccaaactgctcctgcaacccctgcacttgcaagtgaggtgttgggagagcaagcttcaagcagagatagcccttaattaggaataatgataaactattaatgtgtaactaaaaacttatgtatta

SEQ ID NO: 274342 - DNA, 419 bp, Glycine max
gagagcgaacagtgaagagaatggctcccaagggtggggcctttctggctgtgttaatatgcctttcagcactgtcactgagtccttatgttgcggaggaagggcaaaataatggcctcgttatgaacttctacacggaatcatgccctcaggctgaatacatcatcacagaacaagttaagcttctctacaagcgccacaagaacactgctttctcctggctcaggaacatcttccatgactgtgctgttcacagttgtgatgcttcactgttgctggactccacaagaaggagcttgtctgagaaggaaacagatcgaagctttgggttgagaaatttcaggtacattgagaccatcaaagaagctttggaaagagaatgccctggagttgcttcatgtgctgatatcctcgttctc

SEQ ID NO: 274343 - DNA, 145 bp, Glycine max
gaaggtgcaagagtttgttgtgagctataagctagtttatcgggaagagaatatgaaggtggttggtttctttggtgcttgcataattttgggaaccatggcattgcattgggcaaggttaccaagggttccttttccgatggaa

SEQ ID NO: 274344 - DNA, 425 bp, Glycine max
gcagctgagatgtcgtgacatggaatggtggatgaggaggaggcagttgccatcgcgattaagacagagagttcgccattttgaacgtcagagatgggcagcaatgggaggagaagatgagatggaaatgatcaaagacttgccagaggggctgaggagggacatcaagcgccatctttgcctcgatctcattagaaaggttcctctattccacaacttggatgatcttattcttgacaacatctgtgacagggtgaaacccctagtcttctctaaagatgaaaagataatcagagaaggtgatcctgtaccaaggatggtgttcatcgtccgagggcgcataaaacgcaaccaaagccttagcaaaggcatggtagcctcaagcatccttgagccaggagggtttttgggtgacgagctgcttt

SEQ ID NO: 274345 - DNA, 394 bp, Glycine max
gaatgtaaaaaatagaggttgaagaagcaagcaccaacgtgaataccctaattcggagggtttcagttttcgccctcttttctcatctccaacatcttcgtcgtcacggaggctagtcttcctgttatcacaaacaatgtctgacggtcaagaatcagacaagaatattgagatatggaagatcaagaaattgataaaggcattggaagctgctcgaggtaatggtaccagcatgatttctctgataatgcctccacgtgatcaaatatctcgggtcactaagatgttgggagatgaatttggaactgcttcaaacatcaaaagtagggtgaaccgacagtctgtgttgggagccattacttctgctcagcagaggttgaaactatataacaag

SEQ ID NO: 274346 - DNA, 276 bp, Glycine max
gggcaaaaaaggaggtaatatggagcatgatgggaaggcagaccccttgaccaaggggatgttcaaaatttaagggaggcattccacattggtgtaagaaagatcccaccggtggagatttgctacctggaacaccttaccatcaaccaattgcaaattggttcaaaagtggggtgcttaagttaatggtgccaggatcaacccaaggcagttctcacatttaaagacagtgttgatagactctggacccacatatagctctgtaaaagtcccaaa

SEQ ID NO: 274347 - DNA, 417 bp, Glycine max
ggcgcaagagaagagagagggagtaatggacagagacgaagcagaaaccatggagaatgtggaattcgatgcttctgagattgagtacgttagttacggtggcgagcatcacctccctctcgtaatgaacctggtggaccaagaactcagcgaaccttattccatcttcacgtaccgttacttcgtctatctctggcctcagctttcattcctggcgttccacaagggtaaatgcgtgggcaccgtggtatgtaagatgggggaacaccgtaacactttcagaggctacattgccatgctggttgtcatcaagccctacagaggaagaggcattgctacggagcttgttactaggtctatcaaggtgatgatggaatcaggttgcgaagaggttacattagaagcggaagtgacaaa

SEQ ID NO: 274348 - DNA, 398 bp, Glycine max
gggagaattaggcaaaatgtttgatatcccaatggatggctctaaatctagaaaatccggtcccataagtaatgctccttcaaggacaggatcatttgcaggtgctgcttcacactctggacctatcatgcaaaatgctgcagctcgttctgcttatatcacatctggtaatgtatctactggaggcatgtctgcttcagcctcaatgaaaaagaccaactctggtccattgaataagcatggggaaccagtcaagaagtcatctggccctcaatctggtggagttacacgccaaaactctggtccaattcctccagttcttcctacgactggtcttattacatctggcccattaaattcatctggagctccaaggaaagtgtctggtcaattagatt

SEQ ID NO: 274349 - DNA, 261 bp, Glycine max
gactctaagatgaatgaattgctttccgctgatggacaagaatttttcacttcatatgatgaagtctatgatagttttgatgcaatgggccttcaagaaaatcttctcagaggcatatatgcttatggttttgagaggccttctgcaatacagcaaaggggaattgttcctttctgcaagggtctggatgtgattcagcaggctcagtctggaactggaaagacagcaacattctgttcggggattttgcaacagcttgac

SEQ ID NO: 274350 - DNA, 423 bp, Glycine max
  unsure (1)..(423): unsure at all n locations
ggacgaaggtgataataatcggtgccggaacttggggtatcgccaccgccggttgcttaacgaagcaatcaataccttacataatgctcgagagagaagactgtttcgcttcgctgtggcagaaatacacctacgatcgtctccaccttcatttgaggaagcaagtttgcgagttaccgcacttaccgtttcccaagtcttaccctcactacgtgcctcggaagcagttcatagactacttgggaaactacgttaaccactttgagatcaagcctctgtaccagcgtgcagtggagttggtggagtatgatggatggaaagggatttggagagtgaaggctcanaatagaagatctggtgagcttgaggaatacgctggaaagtacctggtcgtggccagtggcgaaaccgccgagcctcgtt

SEQ ID NO: 274351 - DNA, 406 bp, Glycine max
ggactggccagagggtgcaatctcacgagagagtattaaagctgttatgaagcttccccgactacagaaccttataatgcagcatgttgatcattcagctggagatcttatacatcttttgcaggggctacttagatatgacccctttgaaagacttacagctagggatgctttgaggcattccttctttatgagagatcatcttaggagatgatttttatgtgtttgtaaacgattggtctgcttttaggtgaaagatcactcgagggcaaatatggctgtaaggagcctatgtgccaatgtaaataaatatttaaatttaggcttgtgtggcaagtgaggatggttattcagcagcatttacacctcaacctcaaagcctgtgtttcaaacgttttattaaaaa

SEQ ID NO: 274352 - DNA, 427 bp, Glycine max
gaggaagaatttgatgaatcagacaagtcacatgataatgaagctccagaatatagacgtctaattgcaattcatgctgggaagcctaaaggtggattagcagaatgcctcaaagtggatcctgataaagtgagacgtctaagtttaagtgagcaacagcttgaaaaggctgccataaatcatggacaacaaattgtcaggtttactcagcggaatatactaagggtgtatccaaaaggtactcgcattgactcatcaaattataacccattaattgggtggatgcatggagctcagatggttgcatttaacatgcaggggtatgggagatctctttggttgatgcatggaatgttcagagccaatggagggtgtggttatgttaaaaaaccaaattttctattggagactggtccagatgacgagg

SEQ ID NO: 274353 - DNA, 418 bp, Glycine max
gagagcgaagagcgaagagaatggctcccaaggggttaacctttctggctgtgttaatatgcgtttcagcactgtcactgagtccttctgttgcgggggaagggcaaaataatggccttgttatgaacttctacaaggaatcatgccctcaggctgaagacatcatcacagaacaagtcaagcttctctacaagcgccacaagaacactgctttctcctggctcaggaacatcttccatgactgtgctgttcagagttgtgatgcttcactgttgctggactccacaagaaggagcttgtctgagaaggaaacagatagaagctttgggttgagaaatttcaggtacattgagaccatcaaagaagctttggaaagagaatgccctggagttgtttcatgtgctgatatcctcgttct

SEQ ID NO: 274354 - DNA, 418 bp, Glycine max
ggcgagagttctgagaagaaaagagaagatcggtgagtgaggaagcaaatagcaatagcaccgccaccgtcaccactgccactgccactgccactagcaacagcagaatgggaaccttgggcagagttttctacgccgtcggattttggatccgcgagaccggccaagccatcgatcgcctcggctctcgtctccaaggcaactacctctttcaagaacagctgtctaggcatcgacctctgatgaatctgttcgacaaagctccctcggttcacagggatgcatttgtggcccctagtgcctccctcctcggcgatgtccacgttggccccgcttcctccatttggtatggatgcgttctcagaggtgatgttaacagcattactattggatctggaactaatatacaagacaattc

SEQ ID NO: 274355 - DNA, 387 bp, Glycine max
ggcacgttgttaaggatgttcctaacaatttgttgaggcacattaccctggataacaatgagaacaaacctgtcactaacagtagggatacacaagaggtaatgttggagcctggcctgaaattaatcaaaattttcaaggaatataccagcaagacatgcattctggatgattttggcttctatgaggcccgtcagaagactattttggagaagaaagcaaagcaacaattcccaaagcaggtatgggaagggaaacctgctgatgagaagattgagataaatggggaagtcaatactcaaaaatctgaagttagctcggaagtgctcaaggagtcccttgctgaggaggatagtgatgaccacaaagttcccgagaatggatgtg

SEQ ID NO: 274356 - DNA, 416 bp, Glycine max
ttggggggcaagagtgaagagcgaagagaatggctccgaagggtttaatctttttggctgcgttatgcttctcagcactggcactgagtcgttgtcttgcggatgataatggacttgttatgaacttgtacatggaatcatgccctcacgctgaagacataatcaaagaacacgtcaagcttatgtacaagcgccgcaagaacactgctttatcctggctcagaaacatcttccatgactgtgctgttcaaagatgtgatgcttaactggtgctggactccacaagaaggggcttgtctgataaggaaacatatagtatctctgggttgagaacattcaggtacattgagaccatctaagaagctttggaaaggggatgcccaggagtagtttccttggctgatattctcgttctc

SEQ ID NO: 274357 - DNA, 407 bp, Glycine max
ggcccaagtgagttggttgatggagttaactagaaccagggggatgaaaatgaaggtcctggttttcttcgttgctacaattttggtagcatggcaatgccatgcgtacgatttgttccctctccgaatgaacactggctatggtgcccgtactccggaggtgaaatgcgcaagttggaggcttgctgtggaagcacacaacatctttggctttgagaccattcctgaagagtgcgttgaagcaacataggaatacatccatggcgaacaatatagatcggactccaaaacagttaaccaacaagcttacttttatgccagagacctcgaagtccatcccaaggacacatttgtgttcagtatagatggcaccgtactctctaatattccatactacaaaaaacatg

SEQ ID NO: 274358 - DNA, 407 bp, Glycine max
gacgaaacaatggtagaactagtatctcaatacccgagaacgtgtgaacgaaaaatagcgtttattttaaactagaagactagaagattacgtatttgattatgcaaagcggtgcacaaattacataatccaaagtccagaactcacactatatatataagcaggacctaggcttcttctttgcactgcaaatcacttttctactttgagtcttcttgatccttctgtgtctccttgaactcaaacatggcagatgaggtggttctgctagatttctggccaagtccatttgggatgagggtcatgattgcacttgctgaaaagggtatgaaatatgagtacaaagaagaggacttgaggaacaagagtcctctactgctccaaatgaacccggttcacaagaagat

SEQ ID NO: 274359 - DNA, 425 bp, Glycine max
gacacacaacatttacatttctctctccagtatggcttctactcacaatgagttttatgcacttatgctagtggtggtggttggctccatggtggcttcctgtggtgctaacttcaaccaagactttgatctaacatggggtgatcaccgtgctaagatattcaatggtggtcagcttctatctctttctctggacaaagtctctggctccggcttccaatccaagaaagagtacctatttgggaggatcgatatgcaactcaagctcgttgctggcaactctgccggcactgtcactgcttactacttgtcgtctcaagggccaactcatgatgagattgattttgaattcttgggaaacgtgagcggtgacccttacattctccacacaaacgtgtttaccaaaggccaagggaacagagagc

SEQ ID NO: 274360 - DNA, 157 bp, Glycine max
catgccacaggttaaaatgatggtagtacttggggaacttggtgggcgtgatgagtattccttagtggaggccttaaaacagggaaaggtatccaaaccggttgttgcctgggtcagtggcacatgtgcacgactcttcaaatttgaagtccaattt

SEQ ID NO: 274361 - DNA, 384 bp, Glycine max
gtggaacatggagacattgcaaacagaaagtactccggaggaacacagtcttattattactgatgttcgcttcagaccaaattcaactcagctggcaacatcttcgtttgatacaactgtgcggctgtgggatgctgcagatccaaccttccctttacatacatatagtggtcatacttcacatgtggtgtcccttgattttcacccaaagaaaactgagcttttctgttcttgtgacaataacaatgagattcgcttttggagtattagtcaatattcttccacacgtatttttaagggaggatctacacaggtgaggttttagccaaggcttggtcaacctctggctgcaacaagtggcaatgttgtgtcttcttttgatgt

SEQ ID NO: 274362 - DNA, 401 bp, Glycine max
ggaggaaggaagatgagtttgagggcatcagagatagcgaagaagttgaatctgcaacctcacccagaaggtgggttttacgtggagacattccgagaccattccgtccagctttcgacctctcagctcccccccgaatacaaagtggatcgccctgtatcgacctccatctattttctcgttccttctgggagtgtgtctcgcctccatcgcataccctgcgccgaaacctggcatcattacatcggcgaccctctcaccgtagtggaattgaatgagaaagatgggagcgtaaaattcacttgccttggatcagatctgactcagaatcaggtgccgcagtacacggtgcctcccaacgtctggtttggctcttttcctaccaaggactttacctactc

SEQ ID NO: 274363 - DNA, 399 bp, Glycine max
ggaagaggaaggggctagaaaaaaaagaactagggggctggaatctgagaactttaacatgtactagtactactactacattcatgcatattactttgtactatttttttttaaccatagcatcaagaacacaaagatggtgtgagctccttcgtgtgaaaagatacgcatgaagaaaggtccttgagctatcgaggaagatcaaatcctcacatcttacattgacaaacatggacatgggaattgtcctgccctcccatagcaagcaagcttggtaaggtgtgggaaaagctgtatactacactggattaactatgtgtggcccgatattctaagacggactctcacaattgaagaagaagaaactatcattaagctgcatgacatgctggagaacag

SEQ ID NO: 274364 - DNA, 249 bp, Glycine max
ggagggtgcattgtgtcaaacctggggggggtgaaaagacccagatcattgttatgggcaatgggctttgctcggagtaccagatccacaagaggtttgacgctgaaggctcttgtcatggtcaatgtacagataagcctagggcacaaattgataatactaccactctcaaagtccttgatcttaactttgactttggccttgaatagtattggtttcaagagcttatatgtcaacttggcatagatt

SEQ ID NO: 274365 - DNA, 292 bp, Glycine max
ggttctagtgtgtgattgtttggtgttgtaactcgttcttcttcttttgttgttctgtgtttgtgtttgttttttctctcacctgaaaatgtcttgctgcggtggtaactgtggttgcggaagctcctgcaagtgcggcaacggctgctgaggctgcaagatgtacccagacttgagctacactgagtcaaccaccaccgagaccttggtcatgggagtggcacctgttaaggctcaatttgagggtgctgaaatgggtgtgcccgcttagaacgatggctgcaaatgtgga

SEQ ID NO: 274366 - DNA, 410 bp, Glycine max
gaccacttggataaacgaacttggacttatatctttggagcttgctgtgccacctctgtgttcataccttcttttcacaattaccgtatttggtcttttctgggacttggaatgaccacttacactgcttggtacttggcaatagcagcccttattcatggccaggcagaaaatgtgacacacacgggtccaacgaagctagtgctgtacttcacaggagccaccaacatactgtacacgtttggtggacatgcagttactgtagagattatgcacgccatgtggaagccacagaagttcaagtacatatacttgctggccactttgtacgttttcacactaacgattccttctgctgctgccgtttactgggcttttggtgatgaacttctcaatcattccaatgcatt

SEQ ID NO: 274367 - DNA, 306 bp, Glycine max
gggggaaggtcgagtagtgggccagataaatcctgccagcgttcctctcgcagcatgtctgtcagtcctgatcgtgttcgtgtgagggggcggtctccagcctttaatgctctagcagctaattttgagaaccctaattctaggaacctttcaaccccacctccagtaattagaaagctgtatcctaaatctgtgacaacagattctgcaatactggcgccaaaatcttctgccatagctgcacttagttcttcttttgaacaaccaccttcagcacgagaaaccatgatacctcgctcacttaaa

SEQ ID NO: 274368 - DNA, 322 bp, Glycine max
ggatgactgatgaagaatttgcaagagaaacgattgctggtttaaatccaaatgtcattaagattatagaggagttcccactaagtagcaagctagatactcaagcctatggtgatcatacctgtataatagcaaaagaacatttggagcctaacttaggtgggctcactgttgagcaggctatccaaaacaagaagttgttcatcttagatcaccatgactatctcattccttatttgaggaaaataaatgcaaataccacaaagacttatgctacaagaaccatatttttcttgaaagatgatggaactttgacaccatt

SEQ ID NO: 274369 - DNA, 402 bp, Glycine max
ggacccgaaggcctgaagaacattgcacaccgtgttcatggtcttgctggggcatttgctcttggattaaagaaacttggaactgtggaagttcaggaccttcccttctttgacactgtgaaggttaagacttctaatgcacatgcaattgctgatgctgctctcaagagtggaataaatttgcgagttgtagatggaaacactatcactgttgcttttgatgaaacaaccacattagaggatgttgataatcttttcaaagtttttgctggtggaaagccggtccccttcactgctgcatctcttgcaccagaagttcagagtgcgattccttctggattagttaggaagagcccttatctgacacactctatctttaacatgtaccaaactgagcatgag

SEQ ID NO: 274370 - DNA, 418 bp, Glycine max
ggtagtttaagtgtgaatccctttccctctctacgtcttctttcactttccatttccatttccattttttctggttcactttctcgatggcctccgagaaccccaccgccgacgacgccgtcaacggcttcaatcggccggaaatgttctcggaaaacctcgccggcaccgtcgacgcctacgaccgccacgtgttcctctgctacaagagtcacctgtcctggcccccgcgcatcgaggcctccgacgccgatcccttccccaagcgcgttgccaccaccttcaaagcccgcaagaacgacttgcccctcaagacgaaaatcaccgtgtgcgaggtgcgtgaggaggctggcttcctcgacggtgacgtgttgattttccccgacatgatcaaatacaggggtttggaggaatcaaa

SEQ ID NO: 274371 - DNA, 304 bp, Glycine max
  unsure (1)..(304): unsure at all n locations
ggctcttctcatggtcaatctacagataagccaagggaacatattgatgagactaccactctcanagaccttgatcttaactttgtctttcgccttgaatagtcttggtttcaagagcttatatggcaacttggtagagattgtgagttcctggaagcaaagggaatcatggattacagtcttctaattggcctgcatttctgtgatgatagctcagttgatgaaatgaaaagttcacctcgcagttctcattcaggcaagagagacatgnctgataatgagatgctcacatgctggtaagttc

SEQ ID NO: 274372 - DNA, 379 bp, Glycine max
ctccacgcgttctacatgcgagatgacgaccgagggggaggctgcattgtgtcaaacctgggggaggtaaaaagacccagtttattgtaatggtcaatgtgtgttgctcggagtaccatatccacaagaggtttgacctcatatgctcttctaatggtcaatctacagataaaccaagggaacaaattgatgagactaccactctcaaagaccttgatcttaactttgactatcgccttaaatagtcttgtcttcaagagcttatatggcatcttgttagacattgttagttcctggatgcaaagggattcatggattacagtcttttaattgtcctgcatttcgtgcattaatagcttcagagattaattgaaaagtt

SEQ ID NO: 274373 - DNA, 287 bp, Glycine max
ggagcctgagtgtgacaagctcataatggcttcacttaacaagaactacgttgacatggatgagtatcctgtcaccactgagctccagaaccggtgtgttaatatcatagcaaatctattccatgctcctataagtgatgatgagactgcagtaagtgtgggaacctgggggtcatcggaggcaataatgttggcaggtctaacttttaaaaggaaatggcagacaaagagaaaagcagaaggcaaaccatatgataagcccaacatagtaactggggctaatgtgc

SEQ ID NO: 274374 - DNA, 181 bp, Glycine max
gtatgttaaaagtgttcaaagaactgtcatttggatgggaaaaagacaggaaactgtggaagatgtcccctgtggtaacactgttgctatggttggtttggatcagttcataacaaagaatgctactttgactaatgaaaaggaagttgatgcccatcccattcgagctatgaagttttct

SEQ ID NO: 274375 - DNA, 289 bp, Glycine max
gtctgttacaagtgtgcaaagagctgtcatgtggcatggtaaaaagacaggaaactgtggaagatgtcccctgtaggaacactgatgctatggttggattggatcagttcataacatagaatgctactttgactaatgaaaaggaacttgatgcccatcccattcgatctatgaagttttctgcctcacctgttgttcgtgctgctgttcaatgtaaggttgcatcaaatcttcccaagcttgctgaatgtcttaagcggctggccaagtcagatcctaaagttgtttg

SEQ ID NO: 274376 - DNA, 412 bp, Glycine max
ggtcaacttaggctggagaaccgatatcaaaatgtaatgcacacacaacacaacacaacagcgtggaacgagacaactaagtacgaaaatcgttatccgccgcaacagccactaagatgttctttgagtcttggcacgccacgtgtcagaactgccaacagatagccccatctctttctccttctccctaaacctcgaactcagcacccccatccactggtgattgtttgattgagccttgaagaaatggaccacagcgctgatgcacatcgcacggacttgatgaccataacgcggttcgtgctgaacgagcaatccaagcaccccgagtcacgcggcgatttcaccatcttgctcagtcacattgttctcggttgcaagttcgtttgttccgctgtcagcaaggctggtc

SEQ ID NO: 274377 - DNA, 404 bp, Glycine max
gaagtacaagcagagagttacggcacatatttctttttcttttccctttttcctaggcacagcacacgccctctcaaatagaaactgagagatgaattctgatcagtttcagaagaacagcatgttcgtagaaacccctgaagatggtggcaaaaacttcgacgatgatggacgagtcagaagaacgggtacatggataactgcgagtgcccatatcataacggcagtgatagggtcaggagtgttgtcacttgcatgggcaattgcacaaatgggttgggtggctggccctgccgttctctttgccttctctttcatcacttacttcacttccactcttcttgccgactgttatcgttcacctgatcctgttcatggcaggcgaaactacacctattccgatg

SEQ ID NO: 274378 - DNA, 417 bp, Glycine max
ggtatcgcttcagagttgagaccaagacgacactcgttcatatatctctctgctcttctcttctcttctacctctcaagtttttgaagtataaagatggcagagacattcctattcacctcggagtccgtgaacgagggacaccctgataagctctgcgaccaaatctccgatgctgtcctcgacgcttgcctcgaacaggacccagacagcaaggttgcctgcgaaacatgcaccaagaccaacttggtcatggtcttcggagagatcaccaccaaggccaacgttgactacgagaagatcgtgcgtgacacctgcatgagcatcggcttcatctcaaacgatgtgggacttgatgctgacaactgcaaggtccttgtaaacattgagcaccagagccctgatattgcccagggcg

SEQ ID NO: 274379 - DNA, 420 bp, Glycine max
gacacaaaaacggctaaaaccataacaagaatggtgtttggctcaaaaaaaaagaagaagaagaaatgttagggttaggatgcttaaacctcaatcgattctctcacttcccatcccctccctctctaccatcctctcgttccgatttacttaaggttgcgtctcgtagattcgctttatcagtgactaaaacgcagcaatctccagtcactaagccacaatccaccttcaccgctataattgaaatagataacccggccagtgtcaaaaggcaattggcgcagctgtttgacttgtctctgagggcaactgtgcccgatgagccagatgttgtgccgttaattgatgcttgtgctgttaaaggtggcgtaaaatttggtgattatcaatgtaataatgcaatgggtatatggtctaaga

SEQ ID NO: 274380 - DNA, 415 bp, Glycine max
ggagttagggtgagttgcaggcagtgtcatctctcctttgacgacaagatgagcatcccaattccccatcggcagttattcatagacggagactggaaagtccccgtcctcaagaatcggattcccatcatcaacccttccacccaacacatcatcggggatatcccagcagctactaaggaagacgttgatctcgctgtcgctgccgccaaagctgccctctcccgcaacaagggcgccgattgggcctccgcttccggctccgttcgggctcgctacctccgcgccatcgctgccaagatcaccgagaaaaagcctgaactagcaaaactcgaagctattgactgtggaaaaccgctcgatgaagccgcctgggacatcgacgatgttgctggttgctttgagttctatgctg

SEQ ID NO: 274381 - DNA, 360 bp, Glycine max
gacatgaagaagaagaagaagaagaagaagaagggttggttggtcccattccataggaagagatcaaagagaagagaaaagatgtttgagccgcagcagctatacactcgagcgaagaccgaggaattcgacctcgaatcaggggaaaccctctacccagggctgagcgtctgcgagaaccagctccgatggggcttcattcgcaaggtctacggcatcctctgcgcccagatcgtcctcaccaccctcgtctctgtcaccaccgttttctatactccaatcaatgacctcctcaagggcaattccaccctcctgctcatcctgctcttgcttcctttcatctttttgattcccctgttg

SEQ ID NO: 274382 - DNA, 357 bp, Glycine max
ggtggttggcttgctttcgctctcttctctgcaaatgcttcattccaagatggttaggactctgtacgctgataaagacaacactcataccgttggaaagaaggatgctgctggccatgttgcttaatttagttcttgcttcctttgtcttcttgagttttatcagagacgggagtgcagggatcactagctctttcattcggtcagagtggccggcagttgacataccccttgatcatgaagcatttgcagatccaaagggttataatgcacctcaacaagtgcacatcacgcaaggtgactatgatcgaaaagcaggtatcatctcatgggtgaccacagaagagccaggggaca

SEQ ID NO: 274383 - DNA, 405 bp, Glycine max
  unsure (1)..(405): unsure at all n locations
ggaggaagaggaggagtaacaaaacaagtatgtcagaatcaaacgcaattgcaaatggtttggctggtgcaggtggtggaattattgctcaaatcataacttatcctcttcaaacggtaaacacgcgccagcaaactgagagaacactcaagaggaacaagcaaagtttgccctccaactcaaccactgctcctggcactcttcttcagatctttcaggtcattggaactganggttggggtggactctatagtggcctcaagccttctcttcttggaactgctgcttctcagggaatttactactatttctatcaagtttttaagaacaaggcagttgccattgcagctgcacggatggtgaaagggcgtggagatggtacttgtgggatgtttggttggcttg

SEQ ID NO: 274384 - DNA, 415 bp, Glycine max
gagtgagagacggaaagtgcaaagccaccgtcttgtcttctcagagcttggctttgcttatcgattctctctcctctcatctttctcattcaaggtttgtaaaagatggccgatgctgaggatattcaaccccttgcttgtgacaatggaactggaatggtcaaggctggatttgctggtgatgatgctcccagggctgtctttcccagtattgttggccgacctcgacacactggcgttatggttgggatgggtcaaaaggatgcctatgttggtgatgaagcccaatcagaaagaggtattcttactctcaagtatcccattgagcatgggatagtcagcaactgggatgacatggaaaagatctggcatcacacattttataatgaacttcgtgttgctcctgaggagcacc

SEQ ID NO: 274385 - DNA, 405 bp, Glycine max
ggtacaagcagagagttacagcacatgtgactctgtctcttccctttttactatgctcagatcacgccctctcaaatagaaactgagagatgaattctgatcagcttcagaagaacagcatgttcgcagaaacccatgaggatggtggcaaaaacttcgacgatgatggacgactcagaggaacggttacatggataactgctagtgcccatattataacggcagtgatatggtcacgagcgctggcacttgcatgggcaattgcccacatgggctgagtggctggccctgccgttgactttgtcttctatgtcatcacttactgtacttacactcttcttgacgactgatatcgttcaccagatcctgtggatggctagcgaaactacacctattccgatgttg

SEQ ID NO: 274386 - DNA, 388 bp, Glycine max
ggaagagaatggctcccaagggtttaacctttctggctgtgttaatatgcgtttcagcactgtcactgagtccttctgttgcgggggaagggcaaaataatggccttgttatgaacttctacaaggaatcatgccctcaggctgaagacatcatcacagaacaagtcaagcttctctacaagcgccacaagaacactgctttctcctggctcaggaacatcttccatgactgtgctgttcagagttgtgatgcttcactgttgctggactccacaagaaggagcttgtctgagaaggaaacagatagaagctttgggttgagaaatttcaggtacattgagaccatcaaagaagctttggaaagagaatgccctggagtggtttcatg

SEQ ID NO: 274387 - DNA, 433 bp, Glycine max
  unsure (1)..(433): unsure at all n locations
ggcatccaaaatggcgcattcttctgttatagtcttcctctgcactctccttctcttcttttctccgtcaattcgtgcctccgacgatgacgtggcgctgcacgcgaagaagctcatcagagacctcaacttgttccccgacgctgacgtcaacatcgttcccgttgctaattgcaccctccaaccccgcaggatcgtcgagaagcgcctgaggttcccgaagctgctagcttcggattccgagccttcggttgaggatttgggtcaccacgctggctattaccccattcagcattcacatgccgcanggatgttctactttttcttcgaatcacgcaataggaaggaggatcctgtcgtaatttgggtgactgggggacctgggtgtagcagtgaattggctttgatttatgaaaatggccctttcaaaatt

SEQ ID NO: 274388 - DNA, 418 bp, Glycine max
ggcatacaaagtggcgcattcttctgttatagtcgtactctggactctgcttctattcttttctacgtcaattcgtgcctccgacgatgacgtggctctgcacgcgaagaagctcatcagagacctcaacttgttccccgacgctgacgtcaacatcggtcccgttgctaattgcacccttcaaccccgcaggatcgtcgagaagcgcctgaggttcccgaagctgctagcttcggattccgagccttcggttgaggatttgggtcaccacgctggctattaccccattcagcattcacatgccgcaaggatgttctactttttcttccaatcacgcgataggaaggaggatcctggcgtaattagggtgactgtgggacctgggtgtatcagtgaatgggctttgggctatgaaaat

SEQ ID NO: 274389 - DNA, 411 bp, Glycine max
ggaggatagataggcctcagaagaagaagagagaggtctctcaacaatggccactgccactgtttcaatttcaactttatgcgctactttcggaacccattgcgccatttcccacaacccaaaacctctattttctcaacctttcaatctcaatcactttccttctaactcttacaagctcgctttctcgcctcgctcacctgtttcaccccttcccaaggcctctgaatccgcggtagccgaaaccgaacccggttcggccgagcccgaaccggcccaaatttccccggcccaacctgcctcctgggaacccggtctcttcgctgtcgtaatgattggcggacgccaatatattgttcacccggggcgacatcttactgttcagaggttaaaaggtgctaatgttaatga

SEQ ID NO: 274390 - DNA, 413 bp, Glycine max
ggtgggattttgagagagagaaatagagagagaacttcaagtgagggtgagagtgacacaaatctagagagagcactagtactctaaaagtctattatattcttcaaaatatgaccatgcatcgcgagtcttgggcttttgtcttcggcgttatgggcaacatcatctcctttggagtgttccttgctccattgccaaccttttaccaaatctacaagaagaaatccactgaaggtttccagtcacttccttatgttgttgcactgttcagtgcaatgctttggatttactatgctttcgtgaaaagggaaactgccctgcttctcattaccattaacacatttggaattgttgtggagtcaatttacctttctatcttcctaatttatgccccaaggaagccaaggcttaca

SEQ ID NO: 274391 - DNA, 419 bp, Glycine max
gagagcgaacagtgaagagaatggctcccaagggtttaacctttctggctgtgttaatatgcgtttcagcactgtcactgagtccttatgatgcggaggaagggcaaaataatggcctcgttatgaacttctacacggaatcatgccctcaggctgaagacatcatcacagaacaagtcaagcttctctacaagcgccacatgaacactgctttctcctggctcaggaacatcttccatgactgtgctggtcacagttgtgatgcttcactgttgctggactccacaagaaggagcttgtctgagaaggaaacagatcgaagctttgggttgagaaatttcaggtacattgagaccatcaaagaagctttggaaagagaatgccctggagttgcatcatgtgctgatatcctcggtctc

SEQ ID NO: 274392 - DNA, 428 bp, Glycine max
gggggccgtgtgtggaagagttgccagcgtcagaaagtcagaaacaacttgacttcttctccttcttcttcttcttcttctctttgaacagaacaacaactcaactcatctcacgattcattcagctttttaaataaataaaattcctttctccctcacaatcacaatgctcttctacccttcaaacccaacatcacacccctcttccttccttccttccctaatactataatttgttacgtcacggagcccaaatgtctgttacggagctcaaagagcgtcactccgctgccaccgacaccgtcaacaatctcagacaccgtttaaagcagaagcgcctttcgttgctcgacacagatgtttctgggtatgcaaggtctcagggtagaacacctgtgacctttggacctacggatctggtttgctgg

SEQ ID NO: 274393 - DNA, 409 bp, Glycine max
gggttgttaaaggagcagttgatgtagacattggtgcaaacccttctgctgagggtggaggagaagatgagggagttgatgatgcaactgttaaggttgttgacattgttgacacattcagacttcaggagcaacccgcattcgataagaagcagtttgttaccttcatgaagaggtttatcaagaatttgactcccaagctcgatgcagagcaacaggagttgtttaagaagcacatcgagggagcaactaaatacctgctctctaagattaaagatttccaattttttgttggtgagagcatgggtgatgatgcttgcttggtctttgcctactacaaggacggcgctgccgatccaacattcctgtactttgcatatgccttaaaggaggtcaagtgctaagtgac

SEQ ID NO: 274394 - DNA, 393 bp, Glycine max
  unsure (1)..(393): unsure at all n locations
ggttctagtgtgtgattgtttgttgttgtaactcgttcttcttcttttgttgttctgtgtttgtgtttgttttttctctcacctgaaaatgtcttgctgcggtggtaactgtggttgcggaagctcctgcaagtgcggcaacggctgcggaggctgcaagatgtacccagacttgagctacactgagtcaaccaccaccgagaccttggtcatgggagtggcacctgttaaggctcaatttgagggtgctgaaatgggtgtgcccgctgagaacgatggctgcaaatgtggaccaaactgctcctgcaacccctgcacttgcaagtgangtgttgtgagagcaagcttcaagcagagatagcccttaattaggaataatgataaactattaat

SEQ ID NO: 274395 - DNA, 408 bp, Glycine max
gaaggtgcaagagtttgttgtgagctataagctagtttatcgtgaggagaatatgaagttgtttgttttctttgttgctgcagtagttttggtagcatggccatgccatggcgcaggctaccaaaggttccctctccgaatgaaaactggctatggtgagcgttcttcggaggtaaaatgcgcaagttttaggcttgctgtggaagcacacatcatccgagcctttaaaaccattcctgaagagtgcgttgaaccaacaaaggactacattaatggcgaacaatttagatcagactctaaaacagttaaccaacaagctttcttttatgctagtgaacgcgaagtccatcacaacgacatatttatattcggcatagataacaccgtactctctaatatcccatacta

SEQ ID NO: 274396 - DNA, 299 bp, Glycine max
gcatctgacatgtcgtgacatggaacgttggatgattgtggggcaggtggcatcgcgattaacacatacacatcgccattttgaacgtgaaagatgggcatcaatgggaggagaagatgagatggaaatgatcaaagacttgccacaggcgctgaggagggacatgaagcgccatcttcgcctctatctcattagaaaggttactgtattccacatcttggatgatcttattcttgacaacatctgcgacagggtgaaaccgctagccttctctatagatgaaaagataatcagagaag

SEQ ID NO: 274397 - DNA, 342 bp, Glycine max
gaatgtaaaaaatagaggttgaagaagcaagcaccaacgtgaataccctaattcggagggtttcagttttcgccctcttttctcatctccaacatcttcgtcgtcacggaggctagtcttcctgttatcacaaacaatgtctgacggtcaagaatcagacaagaatattgagatatggaagatcaagaaattgataaaggcattggaagctgctcgaggtaatggtaccagcatgatttctctgataatgcctccacgtgatcaaatatctcgggtcactaagatgttgggagatgaatttggaactgcttcaaacatcaaaagtagggtgaaccgacagtc

SEQ ID NO: 274398 - DNA, 353 bp, Glycine max
gggcaaaaaaggaggtaatatggagcatgatgggagggcagaccactgaacaaggggattgttcaaaatttaagggaggcattccacattgctgtaagaaagatccgacggttgtagatttgctacctggaacaccttacaatcaacaaattgcaaattgctgcaaaggtggggtgctcagttcatgggtgcaggatccaaccaatgcagtttcctcatttcaagtcagtgttggtagagctggaaccacaaatagaactgtcaaagtcccaaaaaacttcaccttgaaagcaccaggaccaggttatacttgtgggccagctaagattgtggcacccactaaattcattact

SEQ ID NO: 274399 - DNA, 406 bp, Glycine max
ggcgcaagagaagagagagggagtaatggacagagacgaagcagaaaccatggagaatgtggaattcgatgcttctgagattgagtacgttagttacggtggcgagcatcacctccctctcgtaatgaacctggtggaccaagaactcagcgaaccttattccatcttcacgtaccgttacttcgtctatctctggcctcagctttcattcctggcgttccacaagggtaaatgcgtgggcaccgtggtatgtaagatgggggaacaccgtaacactttcagaggctacattgccatgctggttgtcatcaagccctacagaggaagaggcattgctacggagcttgttactaggtctatcaaggtgatgatggaatcaggttgcgaagaggttacattagaagcg

SEQ ID NO: 274400 - DNA, 383 bp, Glycine max
gggagaattaggcaaaatgtttgatatcccaatggatggctctaaatctagaaaatccggtcccataagtaatgctccttcaaggacaggatcatttgcaggtgctgcttcacactctggacctatcatgcaaaatgctgcagctcgttctgcttatatcacatctggtaatgtatctactggaggcatgtctgcttcagcctcaatgaaaaagaccaactctggtccattgaataagcatggggaaccagtcaagaagtcatctggccctcaatctggtggagttacacgccaaaactctggtccaattcctccagttcttcctacgactggtcttattacatctggcccattaaattcatctggagctccaaggaaagtgt

SEQ ID NO: 274401 - DNA, 418 bp, Glycine max
ggacgaaggtgataataatcggtgccggaacttctggtatcgccaccgccggttgcttaacgaagcaatcaataccttacataatgctcgagagagaagactgtttcgcttcgctgtggcagaaatacacctacgatcgtctccaccttcatttgaggaagcaagtttgcgagttaccgcacttaccgtttcccaagtcttaccctcactacgtgcctcggaagcagttcatagactacttgggaaactacgttaaccactttgagatcaagcctctgtaccagcgtgcagtggagttggtggagtatgatggatggaaagggatttggagagtgaaggctcagaatagaagatctggtgagcttgaggaatacgctggaaagtacctggtcgtggccagtggcgaaaccgccgagcc

SEQ ID NO: 274402 - DNA, 401 bp, Glycine max
ggactggccagagggtgcaatctcacgagagagtattaaagctgggatgaagcttccccgactacagaaccttataatgcagcatgttgatcattcagctggagatcttatacatcttttgcaggggctacttagatatgacccctttgaaagacttacagctagggatgctttgaggcattccttctttatgagagatcatcttaggagatgatttttatgtgtttgtaaacgattggtctgcttttaggtgaaagatcactcgagggcaaatatggctgtaaggagcctatgtgccaatgtaaataaatatttaaatttaggcttgtgtggcaagtgaggatgggtattcagcagcatttacacctcaaccttcaagcctgtggttcaaaacgtttatt

SEQ ID NO: 274403 - DNA, 422 bp, Glycine max
gaggaagaatttgatgaatcagacaagtcacatcataatgaagctccagaatatagacgtctaattgcaattcatgctgggaagcctaaaggtggattagcagaatgcctcaaagtggatcctgataaagtgagacgtctaagtttaagtgagcaacagcttgaaaaggctgccataaatcatggacaacaaattgtcaggtttactcagcggaatatactaagggtgtatccaaaaggtactcgcattgactcatcaaattataacccattaattgggtggatgcatggagctcagatggttgcatttaacatgcaggggtatgggagatctctttggttgatgcatggaatgttcagagccaatggagggtgtggttatgttaaaaaaccaaattttctattggagactggtccagatga

SEQ ID NO: 274404 - DNA, 409 bp, Glycine max
gagagcgaagagcgaagagaatggctcccaagggtttaacctttctggctgtgttaatatgcgtttcagcactgtcactgagtccttctgttgcgggggaagggcaaaataatggccttgttatgaacttctacaaggaatcatgccctcaggctgaagacatcatcacagaacaagtcaagcttctctacaagcgccacaagaacactgctttctcctggctcaggaacatcttccatgactgtgctgttcagagttgtgatgcttcactgttgctggactccacaagaaggagcttgtctgagaaggaaacagatagaagctttgggttgagaaatttcaggtacattgagaccatcaaagaagctttggaaagagaatgccctggagttgtttcatgtgctgatat

SEQ ID NO: 274405 - DNA, 418 bp, Glycine max; identical to SEQ ID NO: 274354

SEQ ID NO: 274406 - DNA, 365 bp, Glycine max
ggcacgttgttaaggatgttcctaacaatttgttgaggcacattaccctggataacaatgagaacaaacctgtcactaacagtagggatacacaagaggtaatgttggagcctggcctgaaattaatcaaaattttcaaggaatataccagcaagacatgcattctggatgattttggcttctatgaggcccgtcagaagactattttggagaagaaagcaaagcaacaattcccaaagcaagtatgggaagggaaacctgctgatgagaagattgagataaatggggaagtcaatactcaaaaatctgaagttagcttcgaagtgctcaaggagtcccttgctgaggaggatagtgatgaccac

SEQ ID NO: 274407 - DNA, 347 bp, Glycine max
ggttcgagagtgaagagcgaagagaatggctcccgttgtggaatctttttggctgcgttatgcttctaagcactggcactgagtcgttgtcttgcggaggataatggacttgttatgaacttctacatggaatcatgccctgaggctgaagacatcatcaaagaacaagtcatgcttctctacaagcgccgcatgaacactgctttctcctggctcagaaacatattacatgactgtgctgttcagagttgtgatgcttcactgtcgctggactccacaagaaggagcttgtctgataaggaaacagatagaaactttgggttgagatatttcaggttcattgagac

SEQ ID NO: 274408 - DNA, 412 bp, Glycine max
ggcacaagtgagtttgttgatcgagataactagaaacagtgtgatgaaaatgaaggtccttgttttcttcgttgctacaattttggtagcatggcaatgccatgcgtacgatatgttccctctccgaatgaacactggctatggtgcccgtactccggaggtgaaatgcgcaagttggaggcttgctgtggaagcacacaacatctttggctttgagaccattcctgaagagtgcgttgtagcaacaaaggaatacatccatggcgaacaatatagatcggactccaaaacagttaaccaacaagcttacttttatgccagagacctcgaagtccattccaaggacacatttgtgttcagtatagatggcaccggactctctaatattccatactacaaaaaacatggatat

SEQ ID NO: 274409 - DNA, 403 bp, Glycine max
gacacacaacatttacatttctctctccagtatggcttctactcacaatgagttttatgcacttatgctagtggtggtggttggctccatggtggcttcctgtggtgctaacttcaaccaagactttgatctaacatggggtgatcaccgtgctaagatattcaatggtggtcagcttctatctctttctctggacaaagtctctggctccggcttccaatccaagaaagagtacctatttgggaggatcgatatgcaactcaagctcgttgctggcaactctgccggcactgtcactgcttactacttgtcgtctcaagggccaactcatgatgagattgattttgaattcttgggaaacgtgagcggtgacccttacattctccacacaaacgtgtttacc

SEQ ID NO: 274410 - DNA, 415 bp, Glycine max
catgccacaggttaaaatgatggtagtacttggggaacttggtgggcgtgatgagtattccttagtggaggccttaaaacaaggaaaggtatccaaaccggttgttgcctgggtcagtggcacatgtgcacgactcttcaaatctgaagtacaatttggtcatgcaggagccaaaagtggtggtgagttagagtctgctcaagcaaagaatcaggcactaagggacgctggagctgttgttcccacatcatatgaagcttttgaagctgcaattagggaaacatttgataaattggttgaagaagggaagatcacaccaatcaaggaaatcacaccttcaccaatccctgaagaccttagtactgcaattaagagtggaaaagtccgtgctccaactcatattattttcaccatt

SEQ ID NO: 274411 - DNA, 409 bp, Glycine max
gtggaacatggagacattgcaaacagaaagtactccggaggaacacagtcttattattactgatgttcgcttcagaccaaattcaactcagctggcaacatcttcgtttgatacaactgtgctgctgtgggatgctgcagatccaaccttccctttacatacatatagtggtcatacttcacatgtggtgtcccttgatttccacccaaagaaaactgagcttttctgttcttgggacaataacaatgagattcgcttctggagtattagtcaatattcttccacacgtatttttaagggaggatctacacaggtgaggttttagccaaggcttggtcaccttctggcttcagcaagtggcagttgtgtgtctctccttgatgttgagactgacaggcataatcacaca

SEQ ID NO: 274412 - DNA, 403 bp, Glycine max
ggaagaggaaggggcaagagaaaaaagaactagcgggcggggggctgagaaccctaacatgtactagtactactactacattcctgcatattactttgtactatttttttttaaccatagaatcaagagcacaaagatggtgagagctccttcttgtgaaaagatgcgcctgaagaaagagccctgagctacccaggaagatcaaatcctcacatcttacattgacaaacatggacatgggaattgtcccgcccttccataacaagcaagcttgttaaggtgtgggaaaagctgtatactacactggattaactatgcgaggcccgatattaaaagacggactctcacaattgaagaagaagaaactatcattaagctgcatgacatgctgaagaacaggtgg

SEQ ID NO: 274413 - DNA, 136 bp, Glycine max
gaccacttggataaacgaacttggacttatatctttggagcttgctgtgccacctctgtgttcataccttcttttcacaattaccgtatttggtcttttctgggacttggaatgaccacttacactggttgggact

SEQ ID NO: 274414 - DNA, 399 bp, Glycine max
gggggaaggtcgagtagtgtgccagataaatcctgccagcgttcctctcgcagcatgtctgtcagtcctgatcgtgttcgtgtgagggggcggtctccagcctttaatgctctagcagctaattttgagaaccctaattctaggaacctttcaaccccacctccagtaattagaaagctgtatcctaaatctgtgacaacagattctgcaatactggcgccaaaatcttctgccatagctgcacttagttcttcttttgaacaaccaccttcagcacgagaaaccatgatacctcgctcacttaaagtgagtccagtaatgcccaaatcataccctgagaaaaatgacaaggagaattctgtgagcaccagagtggaatctcttaccatacaggaagat

SEQ ID NO: 274415 - DNA, 417 bp, Glycine max
ggatgactgatgaagaatttgcaagagaaacgattgctggtttaaatccaaatgtcattaagattatagaggagttcccactaagtagcaagctagatactcaagcctatggtgatcatacctgtataatagcaaaagaacatttggagcctaacttaggtgggctcactgttgagcaggctatccaaaacaagaagttgttcatcttagatcaccatgactatctcattccttatttgaggaaaataaatgcaaataccacaaagacttatgctacaagaaccatatttttcttgaaagatgatggaactttgacaccattggccattgagttaagtaagccacatcctcagggtgaagaatatggtcctgttagcgaagtctacgtgcctgccagcgaaggagtggaagcttata

SEQ ID NO: 274416 - DNA, 402 bp, Glycine max; identical to SEQ ID NO: 274369

SEQ ID NO: 274417 - DNA, 414 bp, Glycine max
ggagggtgcattgtgtcaaacctgttggaggtaaaaagacccagtttattgtaatgggcaatgtgttttgctcggagtaccagatccacaagaggtttgacctcaaaggctcttctcatggtcaatctacagataagccaagggaacaaattgatgagactaccactctcaaagaccttgatcttaactttgtctttcgccttgaatagtcttggtttcaagagcttatatggcaacttggtagagattgtgagttcctggaagcaaagggaatcatggattacagtcttctaattggcctgcatttctgtgatgatagctcagttgatgaaatgaaaagttcacctcgcagttctcattcatgcaagagagacatgcttgataatgagatgctcacatgctggtaagttcttt

SEQ ID NO: 274418 - DNA, 409 bp, Glycine max
ggagcctgagtgtgacaagctcataatggcttcacttaacaagaactacgttgacatggatgagtatcctgtcaccactgagctccagaaccggtgtgttaatatcatagcaaatctattccatgctcctataagtgatgatgagactgcagtaggtgtgggaactgtggggtcatcggaggcaataatgttggcaggtctagcttttaaaaggaaatggcagacaaagagaaaagcagaaggcaaaccatatgataagcccaacatagtaactggggctaatgtgcacgtttgttgggaaaaatttgcaaggtactttgaggtagagctcaaggaagtgaaactcatagaaggatactatgtgatggacccttgcaaagcagttgaaatggtagatgagaacaccatc

SEQ ID NO: 274419 - DNA, 335 bp, Glycine max
gtatgttaaaagtgttcaaagaactgtcatttggatgggaaaaagacaggaaactgtggaagatgtcccctgtggtaacactgttgctatggttggtttggatcagttcataacaaagaatgctactttgactaatgaaaaggaagttgatgcccatcccattcgagctatgaagttttctgtctcacctgttgttcgtgttgctgttcaatgtaaggttgcatcagatcttcccaagcttgttgaaggtcttaagcggttggccaagtcagatcctatggtcgtttgtaccattgaggagtctgttgaacacattgttgctgatgcttgagagc

SEQ ID NO: 274420 - DNA, 417 bp, Glycine max
ggtcaacttaggctggagaaccgatatcaaaatgtaatgcacacacaacacaacacaacagcgtggaacgagacaactaagtacgaaaatcgttatccgccgcaacagccactaagatgttctttgagtcttggcacgccacgtgtcagaactgccaacagatagccccatctctttctccttctccctaaacctcgaactcagcacccccatccactggtgattgtttgattgagccttgaagaaatggaccacagcgctgatgcacatcgcacggacttgatgaccataacgcggttcgtgctgaacgagcaatccaagcaccccgagtcacgcggcgatttcaccatcttgctcagtcacattgttctcggttgcaagttcgtttgttccgctgtcagcaaggctggtcttgct

SEQ ID NO: 274421 - DNA, 396 bp, Glycine max
gaagtacaagcagagagttacagcacatatttctttttcttttccctttttcctaggcacagcacacgccctctcaaatagaaactgagagatgaattctgatcagtttcagaagaacagcatgttcgtagaaacccctgaagatggtggcaaaaacttcgacgatgatggacgagtcagaagaacgggtacatggataactgcgagtgcccatatcataacggcagtgatagggtcaggagtgttgtcacttgcatgggcaattgcacaaatgggttgggtggctggccctgccgttctctttgccttctctttcatcacttacttcacttccactcttcttgccgactgttatcgttcacctgatcctgttcatggcaggcgaaactacaccta

SEQ ID NO: 274422 - DNA, 364 bp, Glycine max
ggtatcgcttcagagttgagaccaagacacactcgttcatatatctctctgctcttctcttctcttctacctctcaagtgtttgaagtataaagatggcagagacattcctattcacctcggagtccgtgaactagggacaccctgataagctctgcgaccaaatctcctatgctgtcctcgacgcttgcctcgaacaggacccagacagctaggtttgctgctattcatgcaccaagaccaacttggtcatggtcttcggagagatcaccatcaaggccaacggtgactactagtagatcgtgcgtgacacctgcaggagcatcgtcttcatctcatacgatgcgggacttggttcttgtcaa

SEQ ID NO: 274423 - DNA, 416 bp, Glycine max
gacacacagagacatttttctttcttagaagcgtgcaccacacggaacctcgcaattccttcacacccaccataataataatatcttcattgttcttttcttctttgttaccattaaaaacacacacacacacacaacaacactctgaaactaacaacaacaataaaagaccatgtcggtgaaggagtgcgagcaccacaaggggaagaagaggaagatcttccggcaagtgttctggtgcttagtggtgttccttttcatcgtgctggtcacaattcttttgatatgggcaatccttagacccaccaaacccaccttcacgctccaagacgtcaccgtctacgccttcaacgccaccgtggcgaacttcctcacttcgaattttcaggtcacgctcatctcgcgtaacccgaacg

SEQ ID NO: 274424 - DNA, 248 bp, Glycine max
ggagttagggtgcgttgcaagcagtgacatctggcctttggcgactagatgaccatgccacttccccatcggccgttattcatagacagatactggaaagtgcccgtcctcaagaatcggatttcgattatcaacccttacaccctacacctaatcatggatatcccatttcctactaatgaagacgtagatctcgctgtcgctgtcgccaaagctgaactttccctcttcaaggacacgggttgggc

SEQ ID NO: 274425 - DNA, 367 bp, Glycine max
gacaagaagaagaagaagaagaagaagaagaagggttggttggtcccattccataggaagagatcaaagagaagagaaaagatgtttgagccgcagcagctatacactcgagcgaagaccgaggaattcgacctcgaatcaggggaaaccctctacccagggctgagcgtcggcgagaaccagctccgatggggcttcatccgcaaggtctacggcattctcttcgcccagatcgtcctcaccaccctcgtctctgtcaccaccgttttctatactccaatcaatgacctcctcaagggcaatttcaccctcctcctcatccttctcttccttcctttcatccttttgattcccctgttgaagtacc

SEQ ID NO: 274426 - DNA, 326 bp, Glycine max
ggaggaagaggaggagtaacaaaacaagtatgtcagaatcaaacgcaattgcaaatggtttggctggtgcaggtggtggaattattgctcaaatcataacttatcctcttcaaacggtaaacacgcgccagcaaactgagagaacactcaagaggaacaagcaaagtttgcccttcaactcaaccactggtcctggcactcttcttcagatctttcaggtcattggaactgaaggttggggtggactctatagtggcctcaagccttctcttcttggaactgctgcttctcagggaatttactactatttctatcaaggttttaag

SEQ ID NO: 274427 - DNA, 396 bp, Glycine max
gagtgagagacggaaagtgcaaagccaccgtcttctcttctcagagcttggctttgcttatcgattctctctcctctcatctttctcattcaaggtttgtaaaagatggccgatgctgaggatattcaaccccttgcttgtgacaatggaactggaatggtcaaggctggatttgctggtgatgatgctcccagggctgtctttcccagtattgttggccgacctcgacacactggtgttatggttgggatgggtcaaaaggatgcctatgttgctgatgaagcccaatcaaaaagaggtattcttactctcaagtatcccattgagcatggtatagtcagcaactgggatgacatggaaaacatctggcatcacacattttataatgaacttcgt

SEQ ID NO: 274428 - DNA, 393 bp, Glycine max
ggaagagaatggctcccaagggtttaacctttctggctgtgttaatatgcgtttcagcactgtcactgagtccttctgttgcgggggaagggcaaaataatggccttgttatgaacttctacaaggaatcatgccctcaggctgaagacatcatcacagaacaagtcaagcttctctacaagcgccacaagaacactgctttctcctggctcatgaacatcttccatgactgtgctgttcagagttgtgatgcttcactgttgctggactccacaagaaggagcttgtctgataaggaaacagatagaagctttgggttgagaaatttcaggtacattgagaccatcaaagaaactttggaaagagaatgccctggagttgtttcatgtgctg

SEQ ID NO: 274429 - DNA, 402 bp, Glycine max
ggcatccaaaatggcgcattcttctgttatagtcttcctctgcactctccttctcttcttttctccgtcaattcgtgcctccgacgatgacgtggcgctgcacgcgaagaagctcatcagagacctcaacttgttccccgacgctgacgtcaacatcgttcccgttgctaattgcacccttcaaccccgcaggatcgtcgagaagcgcctgaggttcccgaagctgctagcttcggattccgagccttcggttgaggatttgggtcaccacgctggctattaccccattcagcattcacatgccgcaaggatgttctactttttcttcgaatcacgcaataggaaggaggatcctgtcgtaatttggctgactgtgggacctgggtgtagcagtgaattggc

SEQ ID NO: 274430 - DNA, 404 bp, Glycine max
tccgaggggggcatccaaagtggcgcattcttctgttatagtcttactctggactgtgcttctattcttttctccgtcaattcgtgcctccgacgatgacgtggctctgcacgcgaagaagctcatcagagacctcaacttgttccccgacgctgacgtcaacatcgttcccgttgctaattgcacccttcaaccccgcaggatcgtcgagatgcgcctgaggttcccgaagctgctagcttcggattccgagccttcggttgaggatttgggtcaccacgctggctattaccccattcagcattcacatgccgcaaggatgttctactttctcttcgaatcacgcgataggaaggaggatcctgtccgaatttgggtgactgtgggacctgggtgtatcagtg

SEQ ID NO: 274431 - DNA, 411 bp, Glycine max
agggagagcgaacagtgaagagaatggctcccaagggtttaacctttctggctgtgttaatatgcgtttcagcactggcactgagtccttatgttgcggagcaagggcataataatggccttgctatgaacttctacaaggaatcatgccctcaggctgaagacatcatcacagaacacgtcaagcttctctacaagcgccacaagaacactgctttctcctggctcaggaacatcttccatgactgtgctgttaagagttgggatgcttcactgttgctggactccacaagaaggagcttgtctgagaaggatacagatagaagctttgggttgagacatttcaggtacattgagaccatcatagaagctttggaaagagaatgccctgcagttgcttcatgtgctgata

SEQ ID NO: 274432 - DNA, 410 bp, Glycine max
gggttgttaaaggagcagttgatgtagacattggtgcaaacccttctgctgagggtggaggagaagatgagggagttgatgatgcaactgttaaggttgttgacattgttgacacattcagacttcaggagcaacccgcattcgataagaagcagtttgttaccttcatgaagaggtttatcaagaatttgactcccaagctcgatgcagagcatcaggagttgtttaagaagcacatcgagggagcaactaaatacctgctctctaagattaaagatttccaattttttgttggtgagagcatgggtgatgatgcttgcttggtctttgcctactacaaggacggagctagcgatccaacattcctgtactttgcatatgccttaaaggaggtcaagtgctaagtgact

SEQ ID NO: 274433 - DNA, 412 bp, Glycine max
ggatggcacacgttgacgccatgacttgtgggttgccgacatgcgccacatgcaatggtggtcctgctgagatcattgtgcatggcaagtctggcttccacattgacccttaccatggtgaccgtgctgctgatctccttgttgacttctttgagaagtgcaagcttgacccaacccactgggaaacaatctcaaaggctggtctccagcgtattgaagagaagtacacatggcaaatttactcacagaggcttctcactctcactggtgtctatggcttctggaagcatgtgtctaaccttgaccgccgtgagagccgccgctatctcgagatgttctatgctctcaagtaccgcaaattggccgagtctgtgccccttgctgttgagtaaactgaggatgaagagttgga

SEQ ID NO: 274434 - DNA, 410 bp, Glycine max
acaaaaggggcggacagtttgtaagattgatgaacgggccttttggatgaactatgtattctctatatctggtccattaacaataccacttgggtatcctaagatgatggctatccatgatcttgactcaaaagaagatgatgactctggtattcctacctttcttactctttctagtgaacacatcagtgatgatggaatatatcttcttgagaatggacatgattgtttgatatatgttggagactctgtgaatacagacatcgtgcagaaactgtttggtgttgctacagatgacaaagaccctaccctgtttgtattgcagcaatacgacaatccactatgaaagaagttaaatgaagtggtaaatgagatacggcggcaaagatgttcctacttccggttcaagc

SEQ ID NO: 274435 - DNA, 412 bp, Glycine max
  unsure (1)..(412): unsure at all n locations
gatagttntatataataataagggggtggcaacagaacacacagctctcacttccttttgccacattacacaagaactctccaaggatcctccttcccacgaaattcatttggtgggaaaatccaagaagagggtggaatttcaagccagggaagatggattatttcaatgcaccaggaagaaaccatctctttgttccggggccggttaacatcccggaccagatcattcgggccatgaacagaaacaatgaggactaccgttctccagcaattccagctatgaccaaaacactgcttgaggatgtcaagaagattttcaagaccataactggaatcccatttctcatccctacaactggtactggtgcttgngagagtgctctcacaaacacactgtctcctggggatcg

SEQ ID NO: 274436 - DNA, 388 bp, Glycine max
ggtggcacacatctatacttgtgcagaagaagaaagatccatgaactaacattcccacacgctcgcttcaccatatttgccacccttttaaccctcacttcttgggtttattttgctccttttttttttccttgtttggggtttgcatttttcctggttgaaaaagggaagaacttgaactaattggttaagttacctatctatctatctatctaaggtataatattttatatcagttattaaaggaaagaaagaaagaaacgaagatgggaaggggtaaggtacagctgaagaggatagagaacaagatcaatcgccaggtaactttctccaaaaggagaagtgggttgctcaaaaaagctcatgagatctctgtactctgtgatgc

SEQ ID NO: 274437 - DNA, 378 bp, Glycine max
  unsure (1)..(378): unsure at all n locations
gcacggcaacagaagaataatcgagacacagatcatggtgatcattttttaatttctcagatttatccgacgtcgctgcagatccaccaaccgttatggctgccttcagcggtgatgaaacggcaccgtttttcggctttcttggcgccgcagctgccctcgtcttctcctgtatgggagctgcctatggcacancgaaaagtggcgtgggcgtggcttccatgggtgtaatgagacctgagctggtgatgaagtcgattgttccttgtgtcatggctggagttttgggcatttatggccttattattgctggtattatcagtaccggtattaatccaaaggccaaatcctattacctctttgatggttatgcacatc

SEQ ID NO: 274438 - DNA, 413 bp, Glycine max
  unsure (1)..(413): unsure at all n locations
gatggtgatgagcggtttattgagcctacaccaaaatcactggaaaatttaaccctgcaatctgttaaggatgcagtgatgaatcaattttttggtgataacatggaggtatgcattgtaggtgacttcactgaggaggacattgaatcttgcattcttgattaccttggcacagctcaggccacaagaaatcatgaaagagagcaaaaattcaacccacccttatttcgaccatctccatctgatttgcagtttcaagaagtatttttgaaggacaccgatgagagggcatgtgcttatatagcaggaccagcgccaaaccgttggggttttacttgtgatggagtagacttngtagagtcaattaataatgcatcaataatcaatgatgatcagtcaaaatctgatgcaca

SEQ ID NO: 274439 - DNA, 415 bp, Glycine max
ggaagtgaagtggctgcaatggcttcaagtcaggaagaggtgacccttttgggagttgtgggaagcccatttctacacagggttcagattgctctcaagttgaagggagttgaatacaaatatttggaagacgatttgaacaacaagagtgatttgctcctcaagtataacccagtttacaaaatgattccagtgcttgttcacaatgagaagcccatttcagagccccttgtgattgttgagtacattgatgacacatggaaaaacaatcccatcttgccttctgatccctaccaaagagccttggctcgtttctgggctaagttcattgatgacaagtgtgtggttccagcatggaaatctgcttttatgactgatgagaaagagaaagagaaggctaaagaagagttatttg

SEQ ID NO: 274440 - DNA, 410 bp, Glycine max
gaggttgatgggcatgaaagcaacctagattctcaagctgaagatcgtgaactcaaagtccagcttttgcgcaagtatagtggatatctagggagcctcaagaaggaatttttgaagaagaaaaagaatggaaagttgccaaaggaagctcggcaacagctacttgattggtggaacaggcattataaatggccatacccttcggaatctcaaaagcaggcacttgcagaatccacaggcctagatctgaaacaaatcaacaactggttcatcaatcagagaaaacgtcattggaagccttctgaggatatgcaatttgccgtgatggatgcaactaactactacatggaaaatgttatgtgcaagccatttccaatggatggcatgcctatgcttctttaactcaatcc

SEQ ID NO: 274441 - DNA, 365 bp, Glycine max
gagggaaaaatttgcttgaaaaaatttctaatctattctattctatatacaattatgtcttttccatctggtattctgaaaaggctagtttaatttatttgtggaaagagatataaagcaagcaattaataaaaacatgggtaggggaaaggtggagctgaagaggattgagaacaagataaaccgtcaagtgacatttgcaaagaggaggaatggtttgctcaaaaaggcttatgaactctctgtcctctgtgatgctgaggttgcccttattatcttctccaaccgtggcaagctgtatgagttctgcagccgccatagcatggccaagacacttgaacggtatcacagatgcagttatggag

SEQ ID NO: 274442 - DNA, 341 bp, Glycine max
gagagcgaagagtgaagagaatggctcccaagggttgaacctttctggctgtgttaatatgcgtttcagcactgtcactgagtccttctgttgcgggggaagggcaaaataatggccttgttatgaacttctacaaggaatcatgccctcaggctgaagacatcatcacagaacaagtcaagcttctctacaagcgccacaagaacactgctttctcctggctcaggaacatcttccatgactgtgctgttcagagttgtgatgcttcactgttgctggactccacaagaaggagcttgtctgagaaggaaacagatagaagctgtgggttgagaaatttc

SEQ ID NO: 274443 - DNA, 418 bp, Glycine max
tggggagccagagtgaagaacgaagaggatggcttccaaagggttaatctttttggctgtggtatgcttctcaacacttgcacttgagtcgtgtcttgcggaggataatggacttgttatgaacttctacaaagaatcatgccctcaggctgaagacatcatcaaagaacaagtcaagcttctctacaagcgccacaagaacactgctttctcctggctcagaaacatcttccatgactgtgctgttcagagttgtgatgcttcactgttgctggactccacaagaaggagcttgtctgagaaggaaacagatagaagctttgggttgagaaatttcaggtacattgagaccatcaaagaagctttggaaagggaatgcccaggagttgtttcctgtgctgatatcctcgttctctct

SEQ ID NO: 274444 - DNA, 419 bp, Glycine max
ggagcgaagagtgaagagaatggctcccaagggttgaacgtttctggctgtgttaatatgcgtttcaacactgtcactgagtccttctgttgcgggggaagggcaaaataatggccttgttatgaacttctacaaggaatcatgccctcaggctgaagacatcatcacagaacaagtcaagcttctctacaagcgccacaagaacactactttctcctggctcaggaacatcttccatgactgtgctgttcagagttgtgatgcttcactgttgctggactccacaagaaggagcttgtccgagaaggaaacagatagaagctttgggttgagaaatttcaggtacattgagaccatcaaagaagctttggaaagagaatgccctggagttgtttcatgtgctgatatcctcgttctct

SEQ ID NO: 274445 - DNA, 235 bp, Glycine max
catatcagccatggatgtggaacgtgcgaaaccacgaagtgaaaccattgcctgaaggataacttcatccttccaaaatctatctctaccgatttactacttgctattcgcctctcaaaaacaccagcctgctctagtatgcaagcttgcgtaccatctctcatattatcgtgctatcaagctattctccattatcgaagatcacggcctaatacatattgcttaaaaaatagct

SEQ ID NO: 274446 - DNA, 386 bp, Glycine max
gagggtgagagagaattatcaaaggtgaaacgaagaagccctaactacgcacgcattcgtgagaaaactcaatattcgtcgctcatggcactctcttctcgtctcttttccaaatccaaattgatctatggcagtcaaatacttctacaaaaggagcatgctattccagttcgtcactttgctaaagagtctgcccctcctgcccttaagggagacgagatgctgaagaacatttttgtggaggtgaagaacaaatttgagaccgccataggaatattaaagaaggagaaaatcaccattgacccagaagatccagctgctgtttctcattatgcaaaggtcatgaaaacaattagagagaaggcaagcttattgtcggagtccca

SEQ ID NO: 274447 - DNA, 400 bp, Glycine max
ggagagaaatgagtgaagaagccaaaaagaacttcgccggagctctaacggcgaggcccaactccgatgagccgaaaccggcaccggtgccagctgttcccccgaagaaggtcatcatcaagagcgctgatatgatccccgacatgcagaaggaggccgttgatatcgccgtcgccgcgtttgagaagtacaatgtggagaaagacgttgcggagcagataaagaaggagttcgataagaggcatggccccacgtggcactgtatcgttggacgtaattttggctcatatgtgactcatgaaacaaaccactttgtttatttctacttggatcagaaagcggttttactctttaaatctggctagccttattgtggtagcaaagaagttgagatctatgg

SEQ ID NO: 274448 - DNA, 419 bp, Glycine max
gagcttcagtgtctgcgtctcttcctcctctctctgcatcgctgcgttttccgaatcgaaaggtgaggttagtaagtaacaatggtggagaaggccaagggtaggaaggaggaggttgtcactcgagagtacaccatcaacctccacaaacgcttgcatggctgcacatttaagaagaaggctcctaaagcaattaaggagataaggaagtttgctcagaaagcgatggggacgaatgatgtaagagtggatgtgaagctcaacaaggctgtgtggagccaggggatccggagcgtcccaaggaggattagggttcgcattgctcgcaagaggaacgacgatgaggatgcaaaggaagagctctattcccttgttactgtcgtcgaaatccccaaggaggagctcaaaggtttggaaac

SEQ ID NO: 274449 - DNA, 434 bp, Glycine max
gggcttacacttgtaaaaaaaattcacagcagcctaatcagcaagcaggaattggcactaataatccacagattccaccacctctgcagccgtcaccaccttcatcggtgacgacaggtatcggaggtagtgactatattcaaggctctatcagaccaggatcaatggctgatagagccaggatggccaagatacaccaacccgatgcagcactcaaatgtccacgatgtgaatccacaaacaccaagttttgctactacaacaactacagcctctcacagcctcgccacttttgcaagacttgtcgtcgttactggaccagaggaggtgcactcaggagcgtgccagttggaggtggctgcagaaggaacaaaagaaacaaagggaacagtgctagatcaaagtctcctatgaaaccttcagcaagtgctaat

SEQ ID NO: 274450 - DNA, 413 bp, Glycine max
  unsure (1)..(413): unsure at all n locations
gatgtagataaggatgttgatgacgcttttgccagttgaagttaaagaacagcgcctcancaatctgctgcaggcattgatggttgcagcttgtgttgctgctatgcctctcttgaagaagataccaacctcagtgctttggggttactttgctttcatggcaattgaaagcttgcccggaaaccagttttgggagagaatactatatcttttcactgctccaagtcgaagatacaaagtgatggaggaacaccatgcagcctttattgagaccgtgccattcaaaacggttgccatgtttaccttattccagacagcttacttgcttctctgctttggtctaacctggataccaattgctggggtcctattcccattgttaatcatgcttctaatcccagtacgccaatatt

SEQ ID NO: 274451 - DNA, 414 bp, Glycine max
gggatggtctgcgtccaaaaaataaggggcgtgtacttgttctggctgctacaaacaggccttttgatcttgatgaggctgttattaggaggcttcctcgacgattgatggttaatttgccagatgctccaaacagagaaaaaattctcagagtcattttagtgaaagaagatttggcacctgacgttgattttgaagcaatagctaatatgactgatggatattctgggagtgacctaaagaatctgtgtgtcacagcagctcactgtccaatacgagagatcttggagaaggaaaagaaggagagaagcttagctttgtctgagagcaaacctttacctggattgtgtggcggaggtgacattcgtcccttaaagatggatgattttagatatgcacatgagcaggtgtgtg

SEQ ID NO: 274452 - DNA, 451 bp, Glycine max
aattcgagcggccgcttttttttttttttttttttttttttccggcaaaatagatgagcatgccatttaaaatatcaagacagaataattcctacgaacaaagtgtaaaacaatgagtattctcatctaatgaaataaagcaaatgacataatgcgtaaagcaacgttcatatcacacgggcaaaacaattagtatcccatccaacaaaaatcataaaagttaaaattcaataaaaaagcatcaaataagttttaaacagataaatggatgaaagcaactacacatttagtccacttcctcaatcttggggccagcaccacttccaccagaaggagcagcataatcatcctcggctgccccagcaccagcaccacccatgtcaggaccagcaccaccttggtacatcttggcaatgataggattgcagatgctttccaattccttcatttt

SEQ ID NO: 274453 - DNA, 432 bp, Glycine max
ggaacaaagtgatgatgattattctctgtcagattctgatgagactggtggactgatgcatgggcagagaaacataaacatgcttcagagttgcagaagtgtgtgcgagtttgagatgattaagaagataaacgaaggaacttatggtgttgtctacaaggctagggataagaagactggagaactagtggcattgaagaaggtaaagacgaacatagagagggatggctatccgatgtcatccttgagggaaataaacattctcttgtcttttaatcatccctccattgtgaatgttaaagaagtagttgttgatgattttgatggtacttttatggtaatggagcacatggagtatgaccttaaggggctgatggaggttaagaagcagccctttagcatgagtgaaattaaatcgttgatgcgacaact

SEQ ID NO: 274454 - DNA, 400 bp, Glycine max
ggagcaagagtgaagagcgaagagaatggctcccaagggtttaatctttttggctgtgttatgcttctcagcactgtcactgagtcgttgtcttgcggaggataatggacttgttatgaacttctacaaggaatcatgccctcaggctgaagacatcatcaaagaacaagtcaagcttctctacaagcgccacaagaacactgctttctcctggctcagaaacatcttccatgactgtgctgttcagagttgtgatgcttcactgttgctggactccacaagaaggagcttgtctgagaaggaaacagatagaagctttgggttgagaaatttcaggtacattgagaccatcaaagaagctttggaaagggaatgcccaggagttgtttcctgtgctgat

SEQ ID NO: 274455 - DNA, 434 bp, Glycine max
  unsure (1)..(434): unsure at all n locations
ggatgtggaatgtgggaaaccacgaagtanagtttgggcctgaagtgggagaagttgaacctttcaaaaactatctttaccgatatactactccctattcggcttccaaaagcaccagccccctctggtatgcagtcaggcgtgcctctgctcatatcattgtgctatcaagctattccccatttgtgaagtacacgcctcaatacatatggcttaaagaagagctggcgcgggttgatagaaagaagacaccttggctcattgtgctcgtgcacaagccactctacagcagcaacgtagctcactacatggagggtgaagccatgcgatcagtttttgagacatggttcgtccaatacaaagttgatgtcatctttgccggccatgtccatgcttatgaaagatcatatcgatactccaatatagactacaac

SEQ ID NO: 274456 - DNA, 373 bp, Glycine max
gggagcgagagcgagaaacaaaaacctatttttattttctctcttcatatcacttaaactgagactggatgcttctgtatccatcatattatatgatgattattgaattgattatgcgttcagatttcacttcaagatcactttgacagtttgacttgtccggcaccaacttctggtattactattgtctgagttctcaggagttctttcacagaaagtagatgggttctagaatcccatctcataagcttagcaatggcctctacgtatcaggacggccggagcagcccaaagaaagaactccaacaatgacatcaacagccgtgccatataccggtggagacataaaaaagtctggagaattggggaagat

SEQ ID NO: 274457 - DNA, 422 bp, Glycine max
tgatgaactattggttctggacatgccacgtgaaatgagattcgcttctggtgcaatgatgttagaatatggaaaagcagttcaagagagtgtatatgagcagcttcgtgttgttcgtgaaggtcaacttcgtatcatattcactcaagacttgaagatattgtcttgggagttctgtgcaaggcgccatgaagaacttcttcctcgaaggttggttgcaccacaggtcaaccagttagttcaggtagctaaaaaatgtcaaagtacaattgctgaaagtgggtctgatggggcttctcaacaagacattcaaacaaacagcaacatgttgttgacagctgggggtcagcttgcgaagattttggagatgcaatcactaaatgagttgggcttttctaaaagatatgtgagatgtttgcaaa

SEQ ID NO: 274458 - DNA, 291 bp, Glycine max
  unsure (1)..(291): unsure at all n locations
ccttctattctcttcgtttcactctaaagacgtgcgcttggggctgctgcggctgtttcattgagcagcaaagtgcctctttttttacggaaagaacggttctggaaatggatccgcttcttcatcatcatcatcatcatggatttcaggagctcttgctcttcctgccgcagcttacatgttccaagatcaggaggtgcangcagctgagctggagcgcactttcattgccattaagcctgatggagtgcanagaggcctgatttctgagattatatctcgttttgagcg

SEQ ID NO: 274459 - DNA, 419 bp, Glycine max
gtagataaagctgatgttttggtgcagaatagtttgttgcaggcattaagaacaggaaaattttcatattcgcatggaagggcgattagcatcaataacactatctttgttgtaacctcaactgtctgtaaaggtaatgactcttttgttttggaagagtctaagatgttttctgaggaaagaatgcttgaagccaaaagatgccaaatgcaattattaattggacgtgcctctgaggatgccaaaagaattggtggcacaaatgttaaagttgtacccagaaaagggttttccaaatcatcatctctgaacaaaagaaagcaggctgatattagtgactccaaggagggagcaacaagcaagatgcagaaacaagacagcgaggcatctcgatcctttctagatctaaatatgcctgt

SEQ ID NO: 274460 - DNA, 114 bp, Glycine max
cgaggaagggcgtagtaagcgacgaaatgcttcggggagttgaaaataagcgtagatccggggattcccgatataggtcaacctttcgaactgctgctgaatccacgggccgac

SEQ ID NO: 274461 - DNA, 439 bp, Glycine max
  unsure (1)..(439): unsure at all n locations
ggatctctgggagtattnggctttcaacactggagaacgctcgaatacnagttgtacgtttttgggctgggtctagtctaatgcttcagttacanncctactgttcttncctttcatanatagttttctnttgggccttcgcctatnngttgtgttccgtcattcagattattcaatgtttatanatcaagagtaccgagagtggtnngcagcattctggcctgatgtccattnttcgtgtcattattgcactgatagtgtcacagatagttctgatgggactccttaccactaaagaggctgcttcatcaactccatttctaattgtactcccagtactgacgatatggttccatatatactgcaaaggccgtttcgaacctgcatttgttagatatcccttacaggaagcgatgatgaaagacacattggaacgagc

SEQ ID NO: 274462 - DNA, 414 bp, Glycine max
gaagtgtgagtgatatttgagctgaaaccctagccgctcttctcttcattcttcactttggaaacaatcataatggcgttctgtaataaggttggaaatgtcttgaggcagggtgctgctcgcagcacacatgcccctgttgcgtccatgcttaattacatccgctgcatgtcttcaagcaagcttttcattggaggcctttcatatggagttgatgaccagtctcttaaggatgcattttctggctttggagatgtggttgatgcaaaagttataactgatagagacagtggaagatcaaggggatttggatttgtcaacttctccaatgatgagtctgcaagttcggcactctctgcaatggacgggaaggatctaaatgggcgaagcattcgggtatcctatgcaaatgat

SEQ ID NO: 274463 - DNA, 412 bp, Glycine max
ggcacaaaaatacaatacaaaacaaaacagagcaaagagagagtgtgtgaaaagtgaaacaaaaaacagaacaacaatggcgacacttaaggttcctcagcctcttccccccgctgcagatgattgtgagcagctccgaaaagccttctcaggttggggaactaacgaggagctgattgtatcgatcttggctcataagaatgctgctcagaggaagcttatcagagaaacttatgcccagacctatggagaagatctcctcaaggccttggacaaagaactcacgagtgattttgagaggctggttcatctttggacacttgattctgctgaacgtgatgcatttttggcaaacgaggcgactaaaaaatggacttcaagcaatcaggttctggtggaaatagcctgcact

SEQ ID NO: 274464 - DNA, 357 bp, Glycine max
tgatcatcatggtttcagtagtctctacaagcaagtcactgagcttaaactactattcaaaaacatgccctgatgtggaatgcattgttgccaaggcagtgaaggatgccactgctagggacaaaactgttccagctgcacttctgcgaatgcacttccatgactgtttcgttcgggggtgtgatgcctctgtgctgctaaattcaaaaggaagcaacaaagcagaaaaagatgggccaccaaatgtttctttgcatgcattctatgtcattgatgcagcgaagaaagcactagaagcttcatgcccaggtgtggtctcttgtgctgacatccttgctctagcagcaagggatgcag

SEQ ID NO: 274465 - DNA, 405 bp, Glycine max
gtgggtaattatgaatggtaccaaaaattggattgggaagttcaatggcgaaaaaaaagagattccttaactcgttatttaattcgaattggtgaaatgatggaatccataaaaattattcaacaggctttggaaggaattcccggcggaccatatgaaaatttagaaattcgctgctttgatagagaaaaagagccagaatggaatgagtttgagtatcgatttattagtaaaaaaccgtctccgacttttgaattgccaaaacaagaactttatgtaagaattgaagcccccaagggagaattgggaatttttctaataggggatcaaaatggttttccctggagatggaaaattcgtccgccaggttttatcaatttgcaaattcttcctcaattagttaaa

SEQ ID NO: 274466 - DNA, 348 bp, Glycine max
gatgcaatgatgcagttgaaaaacgagatacacacagtggctgttggatctgctataggtcaagcctgtttgctactttcagcagggactcctggtaaacgctttatgatgccacatgctaaagccatgattcagcagcctcgtattccttcctctgggttgatgcctgcaagtgatgttcttattcgtgcaaaggaggtgataattaacagggacaatctggttaaactacttgccaaacacacgggaaattcaaaggaaacagttgctaatgtggtgaagagaccgtattatatggatgccacaagggcaaaggaatttggggtcattgacagaattctttggcgt

SEQ ID NO: 274467 - DNA, 391 bp, Glycine max
gatagtagaaggtcaggtggtgattccagaaaatcttcatctaattcaagaccatccaaaactttgtttgttataaattttgatcccgttaatgccaggacaagggatctggagagacattttgattcctatgggaaaatattaaatataagaatcagaaggaattttgcttttattcagtttgaatcccaggaggatgctactagagctttggaggcgaccaacctgagcaagtttatggaccgtgttatcactgtggagtatgccataagagatgatgatgacagagacagaaggaatggatacagtcctgatagaagaggccatgactctcctgatgggagatatggtcgtggtagatcccccagtccatatcgtagaggtaggggta

SEQ ID NO: 274468 - DNA, 430 bp, Glycine max
cacgtgaagctgcaatacttccatgtttcaaaagacttgagctggggccaaggcattggaagtcctaaattccctggagtgccttacacttctcacacagagacaagggtgtaaggtttctctgtaccaagatgctcatgtcccagacaactttgtccctaaaataccacttgctggaggccacacttaccaacctcatagatgttgggaagatgtttttgatgcaatcaataacgcacaacacttgatatacattacaggatggtctgtttacactgagattacgttggtaagagattctaggaggccaaagcgtaggagatgcaacacttggtgagcttctcaagaaaaaagcacgtgatggtgtcagggttttgatgcttgtttgggatgatagaacttcggttcctttgttaaaagaagatggctt

SEQ ID NO: 274469 - DNA, 402 bp, Glycine max
aaaccgagaagaagaagatggagatgtatcagatctggagcaggagaatagcgttgggagcgttcgcgtttgttctgcttttcctatcggcctcagcagacgacgtcgttgtgctctctgaagataacttcgagaaggaagttggtcaggacagaggagctctcgttgagttctatgctccttggtgtggacactgcaaaaagcttgctccagaatatgaaaagcttggtagcagcttcaagaaagccaaatctgttttaatcggcaaggttgactgtgatgagcacaagagtttgtgcagcaaatatggagtctctgggtacccaacaattcagtggtttccaaaaggatctcttgaacccaaaaagtatgaagggccacgcactgctgattcacttgctg

SEQ ID NO: 274470 - DNA, 428 bp, Glycine max
caatgggaaacgagaaagcaaattgtttctgggaggcagaattacctccaaattatgatagagttggaattgagaatttcattcgtgcaaagtatgatgaaaagagatgggttccaagagatgggaattcaaaaacaccttctggatttcgggaagagaaaagtccttcacattggcagaggcctgtggagagaagtggttatgccgctgtttctgaaaataaatttgaggaaaggaagaaaatccaaccatcaactgcaattcctgccgcaagaattaatgttcctgctcctcccagagcacctgagcaggtaactcctattaccaaacctcagcatgtggagaaagtggaatcagtagcaccacaaccacaagctccccaaccactaactgaaacatcaaagcaagctacagacacaggtaaaaat

SEQ ID NO: 274471 - DNA, 410 bp, Glycine max
gaagaagattttggttgacggaggacaagctaccatgtcggacatggagtttggaacttatccctttgttacttcttctagcccatcaactggtgggatatgcactgttcttggtattgctccaagggtacttggtgatttaataggagtggtgaaggcatacactacaagagatggttctggtcctttttcaactgaaattttgggttcaggaggtgacctactcagatttgctggtcaggagtttggcacaactactggccgccctcgacagagaggctggctcgatttagttgcactgaaatactcttgtcagatcaacggtttctcatcggtgaatcttaccgaggtagatgttctatcacatcttgaagaaatacagataggtgtctattacaaacttgctgatg

SEQ ID NO: 274472 - DNA, 410 bp, Glycine max
  unsure (1)..(410): unsure at all n locations
gtgacaagaagtggagtgaggagatatgnngtactgcaaaacacgcttccacgccttggtgttcttctcaagatacttctgtccatggaacaaagtacgagaaagggtggagaaagatagtgcgaagggaacatatcggcgtcgtttacaagagcttcgcgaccgcgtcaccaatagagaaccatcgctctcaagaaagattncgcctcgagcanggaggacgaaggcgttcccacgcaccgccatttcgcgagatttcttctcctcanaagagatgcnnagcataggaacaattgttaaggttgcagggatgtagtacacnagtgaagaagcgattgtatctggtttttgagtatctggacttggatctaaagaaacatatggattcatctccagagtttgtgaaagat

SEQ ID NO: 274473 - DNA, 436 bp, Glycine max
agactcaaagggtttgattgttggttcaagaaaggcttgacttcaacacttcaagcagccttgggctcatgagcatgagcctgtaggcagtctcttagaagctgttaaggtaatcaagcctacagttttgattgggtcatcaggagtgggaaaaacatttacaaaggaagtaattgaggctgtgacttctataaatgaaaaacctcttgtcctggctctctccaatccaacttcacagtctgagtgtacagctgaagaggcttatcaatggagtgagggtcgtgcaatttttgctagtggaagtccatttgatcctgtagaatacaagggcaaagtgtactattctggccaggccaacaatgcttacattttcccgggctttggtctggggttggtaatctcaggagcaatcagagtgcatgatgatatgcttcta

SEQ ID NO: 274474 - DNA, 379 bp, Glycine max
  unsure (1)..(379): unsure at all n locations
ggagacagaaaagaatgagtacggtgggagaagggaaggtgagtagtaatggtcatggatgttgcaaatcagggccagactatgcttncccactggaagccatttctggtcccagagagtctctcatttatgtaacctctgtctacacagggaccggaatagagaagccagactatttggcgacagcggatgtggatccaaactctccaacttattccaaagtcatccataggcttcctgttccttatttaggtgacgaattgcatcacacaagctggaattcatgcagctcttgccatggagacccctcagcagaccgacgatttctcatcgtacctgcactcgtatcacgtcgagtatatgtggttgatgtgaaaac

SEQ ID NO: 274475 - DNA, 407 bp, Glycine max
  unsure (1)..(407): unsure at all n locations
ggaggagactgagaaaacagaagaaaacaaaatggaagacacagtttctgcgttgaggtctttgatggtttctcactctccgccgctggatgccttaatggtgccctctgaagattatcacctgagcgaatatgtgtctgcacgagacaagcgccgcgaattcgtttccggcttcactggaagtgccggcttggcacttataacaaagaaagaagcactgctgtggaccgatggaccgtattttttgcaggctgagaaagaacttagtgctgggtggaagctaatgcgaattggtgaagatcctgctgtagatatctggatggccgataatttgccaaaagaagcattcgntggggttgatccctggtgcatttcaattgatactgctcaaagatgggagcgtgctt

SEQ ID NO: 274476 - DNA, 328 bp, Glycine max
acctgtccttggcaagctagagaatctgaggggtgttgctcttcataacaacaacttctatgggtcaattccaccagagttgggaaattgcactgaattggacggaatatttttacagggtaatcaccttagtggagcgattccaagtgaaataggaaacctttcacagcttcaaaattaggatatatcaagcaattcccttagagggaatattcctgcatcactagcgaaggtgtataatctcaaaaatgtcaaagtatcaaccaattttctggtcggacctataccttgtgatggtgtccttgacaactttactggaagctccttt

SEQ ID NO: 274477 - DNA, 384 bp, Glycine max
gatggcagaggctgcgcagagtttgaactttgaacgttgaaggaacatagaggcagaggtttttcttctctcaccgtagaatcgaatcgagttcactttgatcgtgtgtgtctccgatcttcaaatccgcaacaaccatggtgaggggattgctcaacaagctcgtctctcgctccctctccgtcgccggaaaatggcagcacaaccaactccgccgcctcaacatccacgagtaccagggcgctgaattgatgagcaaacacggagttaatgttccgagaggcgtggctgtttcctctgttgaagaggtcagaaaggccatcaaggaccttttccctaatgaaaatgagttggtggttaagagtcaaattttaacccggtgga

SEQ ID NO: 274478 - DNA, 416 bp, Glycine max
gaggccaagagcttggaaaattagcctcacaaaagcaaagatcaaacaaaccaaggacgagaacacgatgttgcttgaacttgcacttggtttattggttttggctctgtttctgcacttgcgtcccacacccactgcaaaatcaaaagcacttcgccatcttccaaacccaccaagcccaaagcctcgtcttcccttcataggacaccttcatctcttaaaagacaaacttctccactacgcactcatcgacctctccaaaaaacatggtcccttattctctctctactttggctccatgccaaccgttgttgcctccacaccagaattgttcaagctcttcctccaaacgcacgaggcaacttccttcaacacaaggttccaaacctcagccataagacgcctcacctatgata

SEQ ID NO: 274479 - DNA, 360 bp, Glycine max
gagggcgactataagttagaacaaaaggccaatgctgcggtattatatgaatagcttgaccgtagctactcaactttttgaagattataatgctgatcctacacaaatagcacatatggaggatgggcgctcaacagtgattgacaaaagcgaatcacgtaagcacttcgagctgcatggtggtgaagaaactggtaagaaagacactgaatgtagcgatttaactaatgcccgctataaaggaacaagcagtttcttcaaatgttcgaattgcttgataagtagctaacgagatgcacactctcaacaagttgtatgttcacacactacacatgatgctgaaacaccttgtatcaccac

SEQ ID NO: 274480 - DNA, 410 bp, Glycine max
ggggtggggcgtcgtagggctttccagttgtgtgctctgccaatgataattggtgcttctatgagtgcagcaacaaacaacttgtttggcatgcttgtaggaaggttgtttgttgggactggcttgggcctgggccctcctgttgcctctctgtatgtgacagaggtttctcctgcttttgtgcggggcacctttggagctttcatccagattgcaacatgccttggtctaatgggagctttatttattggaatccctgtcaaagaaatttctggatggtggcgggtttgtttttgggtatctaccattccagctgctatacttgccgcagctatggtcttctgcgcagagagtccgcattggttatacaagcaaggaagaactgcttgagcagaagctgagtttgagag

SEQ ID NO: 274481 - DNA, 395 bp, Glycine max
  unsure (1)..(395): unsure at all n locations
agaggggatggacaagaatggtatgttggaaagctcnaaagaaatgctgaagggagaatgaattgaaacaacgatttgagcagagcatgaaagaagctgctgataaatatcaaggggcaaacttgtatgtcaaaaatttagatgatagcctcggtgatgataaacttaaggagctgttctccccttttggtaccataacttcttgcaaggttatgagagacccaaatggcataagtcgtggatcaggatttgttgcattctcaactcctgatgaggcatctagagcactcttggagatgaatggcaaaatggtggtaagcaaacctctgtatgtgactctagcccaacggaaagaagataggagagctagactgcaggctcagtttgctcaaatg

SEQ ID NO: 274482 - DNA, 425 bp, Glycine max
cttaataaagtgatacaggagcagaataacatgcttgcaaagaagatcaaggagaaagaaaaggttgcagcgcatcaagcacaatgggagcatccaaaccacggagttaatgcatctttcttgctaccgcagccacttttgaacatgggtggcaattaccgtgaggaagcatcagaagtagggaggaatgaacttgacctgactctggaaccattatattcctgtcaccttggatgcttttgaatactttctttgaggtggatgatattatatagctttggtatggcatttgacaacatatttgagggcttatatatgcctctatgttttaggggtttccctactctgcaaacgttaatgtttattgggtgttggaagtttataatttggtcacaaggctaagctttcttaagtggaagctttgc

SEQ ID NO: 274483 - DNA, 283 bp, Glycine max
ggcatgtgtgtgcatgaaggaaaagcgaacagaaggggatgcatgggactgatgctgtcgactctaccttcctcgtcagaagagcctctgtttcactatctcgcggaggatactgaactggggatgtactatctcaagggatcatgccctcaagctgaatacatactaaactaacacgcgaaggtgctattcctgcgccacttgatcactgagtggtcctgaacaagaaacatgacacacgaccgggccttgctgaataggcttgctctactgccgctctact

SEQ ID NO: 274484 - DNA, 420 bp, Glycine max
  unsure (1)..(420): unsure at all n locations
gggaaggaaggtaaaggaagcaaacgcaagagcaagagcaagagcgaaagcggcagagaagatggaaggagaagagggttctcagcagccacagttggtgctcgcggacaagctattccttctccggcaacccgatgtgcaagacattgacaaggttcgctacaaagaggatgtcttcactcatgtcaaggaaaacgatatggtccctctgtacgaaaccctagtcgctgattccgtgttggacttggatcgtgcccttttggactctatgcgcgctaaaattgacgacgagctcaccaagctcgacgaaaagattgctgatgccgaggaaaacttangagagagtgaagttcgtgaggctcatttggcaaaatccttgtttttcatcccgattatggacaaggagaaagccttggaaca

SEQ ID NO: 274485 - DNA, 377 bp, Glycine max
gcaatcgagaagaagaacaagaagcagatggtgaagtatgagatctggagcatgagaatagcgacggcagtgtttgcgtttgctctgatggttccatcggactcagcagacgacgtcgatgtgctctctgaagataacttcgagaaggaagctggtcaggacagaggagctctcgttgagttctaagctccttggtaacacaccaatcttatcgatctatttctctctgtgtatatcagacaattcgctattccatcgttactttgatttcttgaaatcgctattaaggagggcttattattaaccgagtctgatgttatactttatagactatgcctgaacagattgcatgagctctttgcgtgtaacggctcaac

SEQ ID NO: 274486 - DNA, 424 bp, Glycine max
ggaaggaattggaattagaattgtaaaaaggaaaggggaaggaagcaaggcaaggaaggagagtggatcgattcctcagcagcaccagacatttataaaagctctttcccttccctcaaatcgctcatactcttccaatctttttttttttttttttttacctttctccctcgctcaataatacaaaacaaaaaagaagaagaagaaggttttcgcgatggcatcgaaacggatcttgaaggaactcaaggatctccagaaggatcctcctacctcttgcagcgccggtcctgttgctgaagacatgtttcactggcaagcaacaattatgggtcctccagacagtccttatgctggaggtgttttcctagtcactattcatttccctccagattatcccttcaagccacccaaggttgcattc

SEQ ID NO: 274487 - DNA, 418 bp, Glycine max
gtctccaagtttgacaagattgggggggagaaatccactgtcccttgtgaaactgctgaggccataaaaaaaattttgactcacaatggaaagggaatcaagttccaaatcctttcaaaccctgaattccttgctgagggaactgcaatccaagatcttttcaacccggatcgagtcctaattggaggcagggagaccccagaaggccaaaaagcaattcaaacattgaaaaatgtgtatgctcattgggttcctgagaagaaaattctaaccacaaacctctggcctgctgagctatccaagcttgctgctaatgcctttttggcacagagaatttcatctgtgaatgctatgtcagcactttgtgaggccactggggcaaatgtcacacaagtttcctatgctgttggcacagaca

SEQ ID NO: 274488 - DNA, 450 bp, Glycine max
  unsure (1)..(450): unsure at all n locations
ggttctagntgtatttgtgattgttgtgacctcgttctgtcttgcggcgntattcttcttctttgtggtgtttggtgtttgttttnttctctcaaacctgaaaatggtcttgctgcggtggtaacctcgtggttgcggaagccgcctgcnaagtgcggcaaccggctgcggaggctgcaagatgtacccagacttgagctacaccgagtcaaccaccaccgagaccttggtcatgggagtggcaccagttaaggctcaattcgagagtgctgaaatgggtgttcccgctgagaacgatggctgcaaatgtggagctaactgcacctgcaacccctgcacttgcaagtgaggtgttggagagctaaagcttcaagcagaaatggcccttagaaataatgataaaaactatatgtagtttcaaaaacttcaaattatgtagtatgtattatg

SEQ ID NO: 274489 - DNA, 400 bp, Glycine max
  unsure (1)..(400): unsure at all n locations
gcagatattgaagtttaaaccagacttggtgatcgcgagataacgggctaacaagttccgcatgtcnctgggtcttccagtggcggcgacggtgaactgcgccgacaacacgggggcgaagaacctctacatcatttcggtgaaagggatcaaaggccgtttgaaccgtcttccctcggcctgcgttggcgacatggtgatggccaccgtgaagaagggaaaacccgatctgaggaagaaggtcttgccagctgtcatcgttcgccagcgcaagccatggcgccgaaaggacggcgtctacatgtacttcgaagataatgctggtgttattgtcaatcccaagggagaaatgaaaggttctgctatcactggtcccattggaaaagagtgtgctgatttg

SEQ ID NO: 274490 - DNA, 411 bp, Glycine max
ggatgcaaagaaatgggcgcaggttattgcttttcgctttgccatccaaggccacataaacccaatgctccaactcgcacagatccttcactcaaagggtttttccatcaccatcatccacacaacttttaactcgcccaacccttcaaactaccctcactttagcttctcttgcatccaagacaacttgtccgaaaccgagacctcggcctcggatctcttgaatttcatcgttgcactcaacgttaagtgtctggtgcctttcaaagattgcgtggaaaagctactaagtgatgtgtccgaggaagctgttgtttcgtgcttcatctcagatgctttgtgttacttcactcaagcgggtgccgacaaccttcagctgcccaggattgtgttgagaactggtggagtttc

SEQ ID NO: 274491 - DNA, 420 bp, Glycine max
gagagaagagaggagaaagcaatgggcattgatagtgaatacgtgatatctcacaaggcctatgcgagggtgggattgcttgggaacccgagcgatgtctactacggcaaaacgatagcgttaagcgtcgccaacttgttcgccaccgtcacgctgcgttcctgcgaccagttaatcctccaaccccaccccctacacgatctccttcatttctgatcgctccctcaattggtcaacaggttgagctcccaaggttactatggaggcgtgcgattgcttatggctatttgcaatgtcttctacgcgtattgcagaaagaacgccatcgatcttggcgacgacaatatcactctatgctacgacaccaatatccctcgccaggctggtctttccggatctagcgggatcgtgtgtgctgcg

SEQ ID NO: 274492 - DNA, 417 bp, Glycine max
gggggattttgagttacaacatttgccagttggagctagtgacgctgatcttgaagagcgtataatccaacacttagcggctgcagcagcgatgggaagagcacgccacattgctagaagagaaggccagagaaacaggtcatcagctcaaggtcgcccacattttttggttttttcaactaatcctaattcacctcccatggctcctgcttcttcctctccatctcagaggggggatgatgaaccaattcctacaattgctgttgccaatctgtctccaactcctgcaactggagaagaatcatcacagctgactttagttccgcctattcaagcagaacaggtgtctgcttcaggatctggatctactgctcttgctacagatcatcagggatcatcttacaacaataggagatc

SEQ ID NO: 274493 - DNA, 382 bp, Glycine max
ggataagaaactgcgagaagaaaggaaaaggttcaatttttacccttttttcttcccagaagcgatctctgaagccgacccattttggaattcggaaaacccagtgctgatcgctctctgggtgttcccaaaatgaagcttcggagatcttcgctgtgcgtctttctagggtttctggtgctgttcctttcgccgccgccatctatggcgaaattcgtggtggagaagaacagcttgacggtgacgtcgccggacgacatcaagggcacgcacgatagcgcgattgggaacttcgggataccccaatacggtggcagcatggccgggaacgtgttgtacccaaaggacaacaaaaagggttgcagggagttcgatgagtatg

SEQ ID NO: 274494 - DNA, 420 bp, Glycine max
gcagatattgaagtttaaaccagacttggtaatcgcagagaagggtctgagtgatttggcttgccattatctcagcaagcatggagttagtgcaatcaggaggctgaggaaaactgataataatagaattgcaaaggcttgtggtgctgttattgtgaatagaccagatgaattgcaggagtctgatgttggtaccggcgctgggttatttgaggttaagaaaattggagatgagtactttgcatttattgttgattgcaaagaacccaaggcttgtactgttctactaaggggtgctagtaaggatctattaaatgaagttgaaagaaacctacaggatgccatgtctgttgcaaggaacattataaaaaatccaaaacttgttcctggaggtggtgctacagagttgacagtgtcagc

SEQ ID NO: 274495 - DNA, 458 bp, Glycine max
gcactatatccagtttcaaaagagcagctgtacagagagatcgtagatgacttgcgtgggggcgatccatgcattggttcaggatctcaggtggcatgccaagagacatattgaactttgggtgctattttttaaagtccaactttctttcttcatgtttttttatttttttttattgttttatatctattttatgttattttatattattttttttaaaaatttttattgttttttattttattattattaatactttattatttcttttcataattttttttatttttttttttacattcttttattattttttttttgttattttcattatttttctttattttttttttctgtattataattatacttcttttttttctataattctatttattttttttttttatatttttattttttaataattgtttttatactttattttgttttttttt

SEQ ID NO: 274496 - DNA, 304 bp, Glycine max
gaatgttgaatccaacaggcgtgctcttagggagctgcttttcaccgctcccggtgctcttaaatatctcagtggtgtcatcctctttgaggaaactctctaccagagcacagctgcaggcaagccctttgtggaagtcttgaaggaggctggtgtgcttcctggcatcaaggttgacaagggcacagttgagcttgctggcactaatggagaaaccaccactcagggtctagatggccttggtcagcgttgcgccaagtactatgaagccggtgcacgttttgccaagtggcgtgctgtgctg

SEQ ID NO: 274497 - DNA, 314 bp, Glycine max
gaaaataatagaagaaaaatttttgaataataattaaaaaattccttcatatttttagagataggagacaaaatttacatggatatagtaagtcttgcttgggctgctttaatggtagttttttcattttctctttccctcgtagtatggggaagaagtggactatagggatactcaaaattgagttaagggatcaaagtacccattttgttttctacttgggtttttcaatttcttaactttaactattgaattaaagtatttcatttatactaattaattgagttcaaatattaacaaatataaaatagatc

SEQ ID NO: 274498 - DNA, 352 bp, Glycine max
tgggggatgagtccagctttcaatctttatgggtgtgcattaattgtgcttgctgaatggaagcccccagtatatgataatacacgtggtatagttcttgtaactgctacaacacgccgtaattcaccaaataatttggattcgaagattcatcacaataaccttctcaataacatacttgcaaagattgaaggcaataatgcaaaagcagatgatgcaatcatgctcgaccaagatggttatttatcagaaaccaatgcaactaacatttttgttgttaaaaagggccgtgttttgacccctcatgctgattacttgtcttctggcattactcgtgcaactgtaatggatt

SEQ ID NO: 274499 - DNA, 245 bp, Glycine max
actttaggggggggttgaaagacacagtataaatgaataaaccaacaagcgacgcaattaatatggggaaaaggagcctggagggtggagaagatgatcagtccgaacgaaagaggcctgctcttgccagtgtaattgtggaagctttcaaggtggacagtttgcagaagctttgctcatctttagaacccattcttcgtagagttgtcagtgaagaagaggagcgtgctttggcaaagttaggt

SEQ ID NO: 274500 - DNA, 351 bp, Glycine max
gagagagagagagagaaagagagagagagagaggttaggctatggctgatgagagcgtcgttgagtccccagtgaagaggcagagagatgatgatgaagaaaatgaggtctctgtttccatggatgtggagggtggcaaagaccctcttggtaacggtttatcatctgtgattcctgggtggttctctgaaattagttcaatgtggcctggagaggctcactccttgaaggtggaaaagattttgtttcaaggaaagtctgaataccagaatgtcatggtcttccagtcatcaacatatggcaaggttcttggtttagatggagtaattcagcttacagaaagggatgaat

SEQ ID NO: 274501 - DNA, 385 bp, Glycine max
gtagacaagttgtgtagaattggagtgaaaactatattttgcttacaacaagatccagaccttgaatatttcggagttgatattaatgccatacgagaatatgccaagacatgcaatgacattcaacacttgcgtgcggagataagggactttgatgcatttgatctacggaggcggcttccagttgtagttagcaaattatacaaggcaataaattccaatggaggtgtaacatatatacattgcactgctggacttggaagagctccagctgttgcgttggcttatatgttttgggttttgggttataaacttaacgaggctcatacactacttcagagcaaaaggtcatgctttccaaaactggatgccattaaagtgcaac

SEQ ID NO: 274502 - DNA, 268 bp, Glycine max
gaggcgcggcgggatcagcacaagattgcaaaatggagttcaacattgcaaatcccaccactgagtgccagaagaagctggaaatcgatgacgacctgaagcttcgagcattttgggacaagacgatctcccaggaggttcttggtgatgctctgggtgaggagtttaaaggatatggtttcaaaatcaccggtgggtgtgaccaacaaggattccctatgaagcagggagagctgacccctggtcgagttcgacttttgctacatag

SEQ ID NO: 274503 - DNA, 216 bp, Glycine max
gatgtggattaagataaggagaaggaggagaagagaaagaagaccattaaggaggtatctcatgagtggtcattgctgaacatgcataagcctatttggatgaggaaacctgaacagatcacaaaacatgaatatgctgcttgctacatcagtcgaaccaaggtacgggttgagcattgggacgtaaagattctgttactcaattgacaattgaag

SEQ ID NO: 274504 - DNA, 345 bp, Glycine max
gatgctgccgagcgggtttctcattgtggggttctggagttcattgctgaggaaggcatgatatacatgccatactggatgatggagaacatacttttacaagagggggacattgtcaaagtgaaaaatgtgacacttccaaaggggacatatgttaagttacagccccacacaaaagactttttggatatttccaatccaaaagctatcttagaaacaacattgaggaatttttcctgcttgactactggagatagcattatggtggcttacaacaacaagaaatattacatagatattatagaaactaagcctgacactgccataagcataattgagactgac

SEQ ID NO: 274505 - DNA, 361 bp, Glycine max
ggctggaatcttggccttcacaaagcttactccttatactgctgtcagtgctatccttcctctgtctatcatcattggggcaactatggtgaaagagggtatcgaagattggcgcaggaaaaagcgggatactgaggtgaacaatagaagagttatattgcttaaaggtgatggcaatttcgaatatactgaatggaagaatctgagagtagggaatatagtgaagataatgaaggatgaattcttccctgctgacctcctactgctttcctccagttatgaggatgcagtctgctatgttgagaccatgaacttggatggtgagacaaatttgaagttaaaacaagggctggatgtaact

SEQ ID NO: 274506 - DNA, 325 bp, Glycine max
gaaggaaggaaggaagagtgagcgtgaaagatgccttgggcgaggctttcagggtctccaaggctcgacgttgctattgacatgggcaatccatttctcaatctcactgttgatggtttccttaagatcggagctgtcgcagccacgcgatcagctgctgaagatacttatcatattatccaaaagggtaagcaagcatttcacaaattctccaccccatttatttttcatgctattttccttttttctcggagcctaaagaggtaaaatttgattcttataacggtttttatttttactttccttgtttaaattcgggttatac

SEQ ID NO: 274507 - DNA, 281 bp, Glycine max
ggcacaagtttgttgagatagctagaagcaataagatgaaaatgaaagtgcttgttttgtttgttgctacagttttggtagcatatgaatgccatggctcagactaccagaagttccctctccaaatgaaaactgggtttggtgggcaatacagcaatgaggtggcatgtgccagttggaggcttggcgtggaagcaaacaacgtagtcaagtggcaaactgttcctgcagcttgcggagagtacatagctgactacgttctaggagaccaatatagatca

SEQ ID NO: 274508 - DNA, 266 bp, Glycine max
ggaagaagaaggttggttgattggtcccatggaggccgaagagaaaagaaaagatgtttgagccacaacagctatacactcgcgcgaagaccgaggaattcgacctcgaatcaggagaaaccctctacccagggctgagcgtcggcgagaaccagctccgatggggtttcatccgcaaggtctacggcatcctctccgcgcagatcgtcctcaccaccctcgtctccgtcaccaccgttttctatactccaatcaatgacctcctc

SEQ ID NO: 274509 - DNA, 338 bp, Glycine max
ggagtgagcaggagtgaagagcgaagagaatggctcccacgggtttaatcttttgggctgggttatgcttctcagcactgccactgagtcgttgtcttgcggaggataatggacttgttatgaacttctacaaggaatcatgccctcaggctgaagacatcatcaaaggacaagtcaagcttctctacaagcgccacaagaacactgctttctcctggctcagaaacatattccatgactgtgctgatcagagttgtgatgcttcactgttgctggactccacaagaaggagcttgtctgagaaggaaacagatagaacgcttgggttgagaaatttc

SEQ ID NO: 274510 - DNA, 293 bp, Glycine max; identical to SEQ ID NO: 238101

SEQ ID NO: 274511 - DNA, 361 bp, Glycine max
gtacgaatgatacaaatgatagtgattccactataggagaaagttctaataatctcgatgaaagtcaaaaatataagcatttgtggcttgaatgcgaaaattgttatggattaaattataaaaaattttttaaatcaaaaatgaatatttgtgaatactgtggatatcatttgaaaatgggcagttcagatagaatcgaacttttgattgattcgggtacttggaatcctatggatgaagacatggtttctctggatcctattgaatttcattccgaagaggaaccttataaagatcgtattgattcttatcaaagaaaaacgggattaactgaggctgttcaaacaggtactggtcaact

SEQ ID NO: 274512 - DNA, 391 bp, Glycine max
  unsure (1)..(391): unsure at all n locations
ctaattaaaaaaaaaacaaaaataatttatattttcttaaagaacaaaatgtttgttatgcttaatatctttaatttggtctgtatttgtattcactccgtcctttattcaagtagttttttctcggcgaaattgcccgaagcctacgctttcttgaatccaattgtggatattatgccagtaatacccttactcttttttcttttagcttttgtttggcaagctgctgtaagttttcgatgatatctgtaatttgagtaatgtcttaaaaaaaaattaagaatttatcagaaaactaaaattcgaacattttaaacaattaaaagatcanataagtcttacagtgtgaattatcgatnccaatattgaaatttttggattatacgaaaaa

SEQ ID NO: 274513 - DNA, 281 bp, Glycine max
ggcacacgtgagtttgttgatcgagagaactagaaacagtgtgatgaaaatgaaggtccttgttttcttcgttgctacaattttggtagcatggcaatgccatgcgtacgatatgttccctctccgaatgaacactggctatggtgcccgtactccggaggtgaaatgcgcaagttggaggcttgctgtggaagcacacaacatctttggctttgagaccattcctgaagagtgcgttgaagcaacaaaggaatacatgcatggcgaacaatatagatcag

SEQ ID NO: 274514 - DNA, 268 bp, Glycine max
  unsure (1)..(268): unsure at all n locations
ggtgcgagggaggaagaggaaaaagaggattggagggtcgccacgtttagcaacaaccaaaccctctctactctttcttcttctcttcgctaggagcttagcttcttcctcttcacttcgttcttctggcctctacaatgagcaacgacaaggacaccatcaacgtcgctgatctcactctcgctctcaacgaggacaatagagcagaccttgtcaatgctctcaagaacaagatacagactntggctggacagcattctgatattct

SEQ ID NO: 274515 - DNA, 277 bp, Glycine max
gctctctcaattgaagtggctgttgttgacgtctgtaaatccaggattgcagcatggaacagtgaccagctccctatctatgagccaggccttgatgatgtggtgaagcaatgtcgtggcaagaaccttttcttcagcactgatgttgagaaacatgtctatgaggccgacatagtgttcgtctccgtcaacaccccgacaaaaactcgtggtcttggagccggaaaggctgcagatttgacttactgggagagtgcagcacgcatgattgctgatg

SEQ ID NO: 274516 - DNA, 305 bp, Glycine max
gggtcttagaatatgtcagtatggttaggtctatgcaatataggaaattagattttgaggagttttgttctgctgctataagtgtgcaccaacttgagggaatggagacctgggagcaacatgcaaggcgtgcctatgagctttttgaaaaggaaggaaatagaccaattatgattgaggagcttgcctcggaacttgggcttagtccatcagtacctgttcatgtaggacttcaagactggataagacactcagacgggaagcttagtttcttggggtttgttaggcttctgcatggggtttct

SEQ ID NO: 274517 - DNA, 241 bp, Glycine max
gcaccgtggataacaactgtgggagcgggaactgtcgaccgcgatttccctgcttacataaccctcggaacagggaaaacatacaccggagcttctctttatagcggtaaacccttgtcggattcgccgcctcctcttgtttacgctgggaacgcgagtaactcttctgtagggtatctatgtttgcaagattctctgattcctgagaaagtttcagggaaaattgctatatgtgagagag

SEQ ID NO: 274518 - DNA, 305 bp, Glycine max
atcgctttcgtgttttgctagatgagagcaactcattgggtgtgcttggaagttctggacgaggtctcactgaatactgtggagttccagctgagaagatagacattataactgcttctatgggacatgcattagccacagaaggaggattctgcactggaaggacaagagttatagatcaccaacgattgagcagctctggctatgtctttactgcttctttggcaccatatcttgcccgtgctgcaattacagctattgatgtcctcggaggaaatcaccatctgataaatatgctgagaaaa

SEQ ID NO: 274519 - DNA, 265 bp, Glycine max
gacggctaaaagctaaaaatgatcggagtactcaaattagcatggctgtcacggttgcattcttgaatttgatcatcatgttttcagtagtctctacaagcaagtcactgagcttaaactactattcaaaaacatgccctgatgtggaatgcattgttgccaaggcagtgaaggatgccactgctagggacaaaactgttccagctgcacttctgcgaatgcacttccatgactgtttcgttcgggggtgtgatgcctctgtgct

SEQ ID NO: 274520 - DNA, 386 bp, Glycine max
ggcaaccaaaatgactcaagcccagattcaaccagttaaacttggaacccaaggctttgaggtttcaaaattgggattcggatgtatgggccttactggagcgtacaatgaccctctccaagaacaggatggcatatctgttatcaagtatgcgttcagtaagggaatcacattttttgatactgcggatgtttatggagccaatgctaatgaacttttggttggaaaggctttgaagcagctgcccagagaaaagattcagatagccacaaaatttggtattgcttcacgaggttttcctgatatgaagatcaagggttcgcctgaatatgtgcgatcatgctgtgaagctagcttgaagcgtcttgatgttgaatacattgatc

SEQ ID NO: 274521 - DNA, 406 bp, Glycine max
ggcttagattgaagagaatggctcccaagggttggaccgttctggctgtgttaatatgcgtttcaacactgtcactgagtccttctgttgcgggggaagggcaaaataatggccttgttatgaacttctacaaggaatcatgccctcaggctgaagacatcatcacagaacaagtcaagcttctctacaagcgccacaagaacactgctttctcctggctcaggaacatcttccatgactgtgctgttcagagttgtgatgcttcactgttgctggactccacaagaaggagcttgtctgagaaggaaacagatagaagctttgggttgagaaatttcaggtacattgagaccatcaaagaagctttggaagagaatgccctggaggtgtttcatgtgctgaaatt

SEQ ID NO: 274522 - DNA, 282 bp, Glycine max
ggatcacattcgaaatcatgtgcaaataaaaaatggtgtttcacctgcgaatttgaaagattgatattgaagtcaaaggacacaaaatctgcggtgtctcctatgggcataatctcccatctacagaatattgggagtcagcttgctaatggaagagaagaagatgcacatgaatttcttaggcatgttattgacacaatgcaatctgtttgccttatggaagctggggttaatgcattgggctcattagaagaggacactactttaatgggtcaaacattt

SEQ ID NO: 274523 - DNA, 274 bp, Glycine max
tccactcgtacgttctgttcgagatttctatttattgggacacaagcgagtttgttgatcgggataactagaaacagggcggtgaaaatgaaggtccttgttttcttcgttgctacaattttggtagcatggcaatgccatgcgtacgatatgttccctctacgaatgaacactgactatggtgcccgaactcctgaggtgaattgctcaagttgcaagcttgctagtgaatcacacagcatctttggctttgagaccatctcttgagagtgcg

SEQ ID NO: 274524 - DNA, 354 bp, Glycine max
  unsure (1)..(354): unsure at all n locations
gaccacactcttattgttttcttcatatcttccttgtcgctgcccgtgtgtcgccgccatggccaccgtcaccacccaagcctccgccgcaattttccggccatgtacctcgaaatcgaggtttttgaccggctcttccggtaaacttaaccgggaagtgactatgcggccaatggggtgccctccttctgcctctttcaaggttgaagccaagaagggagagtggttacctggcttggcctccccaacttacctcaatggcactcttcctggtgacaatggatttgaccctctggggctagctgaggacccagagaactngaggtggtacgttcaagccgagcttgtgaatgg

SEQ ID NO: 274525 - DNA, 345 bp, Glycine max
ggcagccaaagaaaagaaaatcctcaattttctgagcagccaaacactctctctctgtctctcgaaaattctcagtttgcagagaaaatctgaatcatgtcgtggcaagcgtatgtcgacgatcaccttctgtgtgacatcgaaggtaaccacctcactcacgctgctatcatcggccaagacggcagcgtttgggctcagagtaccgacttccctcagttcaaacctgaggagataactgccatcatgaatgactttaatgagcctggatcacttgctccaactggattgtatctcggtggcaccaaatatatggtcatccagggtgaacccggtgctgtcatt

SEQ ID NO: 274526 - DNA, 358 bp, Glycine max
ggatgcagtttaacaaagcaaggaagagaaagaggtttggttctctctaaagagtctccgctgaactttttggtttcttgaagatgtcgttactctccgatcttatcaaccttaacctctccgacatcaccgataaagtgatcgccgagtacatatggctcgacggatttgccttgccttttattaacgcactttttttttgttcgatccgatcaaccttctcgatcaagttcccgaagaccagcttcgatttcaagggtataatgataccgtgtttactgtaaatggggttgaatactaaggaaagcttgctttgtgttggaaatttgctcatgtcttggaaacctaaaaatttttt

SEQ ID NO: 274527 - DNA, 240 bp, Glycine max
ggagtgagcaagagtgaagagcgaagagaatggctcccaagggtttaatctttttggctgtgttatgcttctcagcactgtcactgagtcgttgtcttgcggaggataatggacttgttatgaacttctacaaggaatcatgccctcaggctgaagacatcatcaaagaacaagtcaagcttctctacaagcgccacaagaacactgctttctcctggctcagaaacatcttccatgact

SEQ ID NO: 274528 - DNA, 363 bp, Glycine max
ggggaataggagggggcaaattgagttgggtgttggaaaggcagagcaagaggagtaacataatcaaacatggcggttaggcaaagagccgtgtctgcacttccaactcttctacgcactctccgcaaagaacctttgaagcctcgcaaccacgcacacgtcaatgccttgccctctcttcgacgcgctttctctttgtacgatcagatcaacctcatcgatcaagttcccgaagaccagctccgatttcaagggtataatgatacggggtttactgtaaatggggttgaatacgaaggaagcttgctttgtgttggaaatttgctcatgtcttggaaacctaagaagttttcagagatcact

SEQ ID NO: 274529 - DNA, 432 bp, Glycine max
gcggcaacggctgcggaggctgcaagatgtacccagacttgagctacactgagtcaaccaccaccgagaccttggtcatgggagtggcacctgttaaggctcaatttgagggtgctgaaatgggtgtgcccgctgagaacgatggctgcaaatgtggaccaaactgctcctgcaacccctgcacttgcaagtgaggtgttgggagagcaagcttcaagcagagatagcccttaattaggaataatgataaactattaatgtgtagctaaaaacttatgtattatgtctgtgatggttttcgtgcactctggtgttttgtgttaaacaaacatccttagaataaaatggtcatgtctttgctttcagaagttcaagtggttttgacttgtgatgggtggtgtaagctcaatggtgcttctttttttttttttt

SEQ ID NO: 274530 - DNA, 386 bp, Glycine max
  unsure (1)..(386): unsure at all n locations
ggagagaaaaatataagcggatgtgtgagtttgcatggttggatagcaatggcagcaaagaaggtgtgtgtaacaggtgctggaggattcgtagcgtcttggcttgttaagcttcttctttccaaaggctacattgtccatggaactgtgagagaccctgaacctgctactcagaaatatgaacacttgctcaaactccacggagcttctgaaaacctcactctcttcaaggcagatctcttgaactacgaatctcttcgctcagcaatttctggatgcactgcagttttccatcttgcttgccctgtaccctcaatcagtgttcccaaccctcangttgaaatgattgagcctgctgtgaaaggaacaactaatgtacttgaagc

SEQ ID NO: 274531 - DNA, 378 bp, Glycine max
gtgtgttgtgggtggtcatgcagtggatggggttgcagagatacatagtgaaattgtaaaagatgatgttttcaatgcattttataagttgtggcccgagaagttccaaaacaaaacaaatggtgtgacaccaaggaaatggatcaggttctgcaatccagatctgagtaaaataataaccgagtggataggtactgaggattgggtcctaaatactggaaaattggccgagctacggaagtttgtagacaatgaggatctacaagtgcagtggagggaagcaaagaggagtaacaaagttaaagttgcagcattcatcagagaaaaaacagggtattctgtcagtcctgatgcaaatgttgacattcaggtcaagag

SEQ ID NO: 274532 - DNA, 317 bp, Glycine max
  unsure (1)..(317): unsure at all n locations
tgaagatgatgtaaagctanngggcaagaggagaggatgcgcgtggagaaccacgggcattcagttttggacaaggttaagttaggagagcctggatacaaggaaaggtattatgctgaaaaatttggtgcattggatctggagaagattgaaaaaatcaagaaagatacagtcttaaaatatgtagaaggcctttgttgggtttgtcggtactactaccagggtgtctgctcatggcaatggtactacccataccattatgctccttttgcttctgatcttaaagatctagctgatctggagataacttttttttt

SEQ ID NO: 274533 - DNA, 293 bp, Glycine max
ggctgcggaggctgcaagatgtacccagacgtgagctacaccgagtcaaccaccaccgagaccttggtcatgggagtggcaccagttaaggctcaattcgagagtgctgaaatgggtgttcccgctgagaacgatggctgcaaatgtggagctaactgcacctgcaacccctgcacttgcaagtgaggtgttggagagctaaagcttcaagcagaaatggcccttagaaataatgataaaaactatatgtagtttcaaaacttcaaaattatgtaggatgtattatgttgcac

SEQ ID NO: 274534 - DNA, 348 bp, Glycine max
aagtataaaaaaataaaaaaaaaaaaaaggaatctatataaatataaaaataatatatataaggtacaaatagtaaatcgaggtacccattttatgataaactttccttccatttttgttcctctagtaggcctagtatttccggcaattgcaatggcttctttatttctttatgttcaaaaaaacaagattttttagatacagaaaacaaagtaaaattctggggttttttattccccaattataatactaaattcaaaaaaaggagagtaatgagtataatctttcgctcagacgatgtactgatatattctatggcggaggttcgaagaacaagcaatttatttt

SEQ ID NO: 274535 - DNA, 337 bp, Glycine max
ggatacagaagatgagagagataattagggttcagtattggacaagctggaattcaggtggggaattcatgctgggagttgtattgccttgagcatggaattaaccccgatgggaccatgcctagtgacacctctgttggcattgcacacgatgctttcaacaccttcttcagcgagaccggattcggcaagcatgtgccaagggctttatttgttgatttggaacctagtgttattgatgaagtaagaactggtccttgcagacaactctttcaccctgagcaattaatttctggcaaagaagatgctgctaataactttgcaaggggacactaca

SEQ ID NO: 274536 - DNA, 312 bp, Glycine max
  unsure (1)..(312): unsure at all n locations
gggtgtgttaagtgatttattagataatcgaaaagagaaaatcttgagaactattcgaaactcanaagaattacgggaaggggccattgaacagctggaaaaagcccaagcccgcttaaggaaagtcgaaacggaagcagatcgttttcgggtgaatggctattctgagatcgaacgagaaaaattgaatttaattaattcaatttatacgactttggaacaattagaaaattacaaaaacgaagccattcattttgaacaacaaagagtgattaatcaagtccgacaacgggttttacaacaagccttaca

SEQ ID NO: 274537 - DNA, 300 bp, Glycine max
cacacaagctatttcactatccttgtgttaatttgcccgtatcatcaccatcatgggtgtttttactttcgaggatgagaccacctctactgtagctccagctaggctttacaaagctttggttaaggatgctgataacctcgtcccaaaggcagttgaggccatcaagagtgttgaaatcgttgaaggaaatggtggccccggaaccattaaaaagctcacttttgttgaggatgggcaaaccaagtacgtgttgcacaaagtttgaagcaattgatgaggctaatttgggatacaact

SEQ ID NO: 274538 - DNA, 146 bp, Glycine max
ctttacaagcaagtcactgagcttaaactactattcaaaaacatgccctgatgtggaatgcattgttgccaaggcagtgaaggatgccactgctagggacaaaactgttccagctgcacttctgcgaatgcacttccatgactgtt

SEQ ID NO: 274539 - DNA, 364 bp, Glycine max
gggggaaaaagggaaggtggagtagtaaatgggtcatgggatgttgcaaatcaaggccaggctatgcttccccactggaagccatttctggtcccagagagtctctcatttatgtaacctctgtctacacagggaccggaatagagaagccagactatttggcgacagtggatgtggatccaaactctccaacttattccaaagtcatccataggcttcctgttccttatttaggtgacgaattgcatcacacaggctggaattcatgcagctcttgccatggagacccctcagcagaccgacgatttctcatcgtacctgcactcgtatcaagtcgagtatatgtggttgatgtgaaaacaaa

SEQ ID NO: 274540 - DNA, 395 bp, Glycine max
gtgagctactgtattaaaattggtccctatgcgcttgagatgattggcaagaactgcaagcttctagaagggttgtgtcgaaacatgcacccattggatactgcggagaagccgcatcaagacgatgaagcatatgcaattgcctccacaatgcctaagctcaagcatcttgaaatggcttatcatcttatcagcacttcgggtgtccttcaaatacttgcaaactgccctaagcttgaatttttggatcaaagggggtgttggggtgtgacacttgaccacatgtttttaaagcagaaatttccaaaactgaaggttttggggcctttggttcttgacacttatgagagtgatggctgggatgatttctcagatgtgtctgattcatcagagta

SEQ ID NO: 274541 - DNA, 414 bp, Glycine max
  unsure (1)..(414): unsure at all n locations
ggacattagccacatggcataggctcatcattttagtaacgtcgtactctagtacaaagacattattattattgtcctcatagtgagtagaacgcagagagactagagcggagatagcaatctcatctcattcatttcaatggcaactcaaggtcaagtcattacctgcaaagctgcggtggcctgggaacccaacaagcccttaactgtccaagacgttcaggtggctccgcctcaggccggcgaggtccgtgtccaaatcctcttcaccgctctctgccacaccgatgcttacacttggggcggcaaggatcccgaaggtctcttcccctgtattcttggccatgaagctgcacggattgtggagagtgttggangacggtgtactaatgttcagcctggggatcatgtcat

SEQ ID NO: 274542 - DNA, 417 bp, Glycine max
agggggtggtagtgtggcagcgacgcgtatcaacttcaataatcgcatcgcagaagcagtttccggtgcatctcatcgtctccgaaaatgaacgacgcagatgtctcgaagcaaatccagcagatggtgcggttcatccgccaggaagctgaggaaaaggccaacgagatctctgtctccgccgaagaggaattcaatatcgagaagctgcagttggtcgaagccgacaagaagaagatcaggcaagaatacgaacgcaaagagcgccaagttgaaattcgcaagaagattgagtactcaatgcagctgaatacttctcggattaaagttcttcaagctcaagatgacgtgatcagttccatgaaagaagctgcatccaaaggaactttggctgtgagtcatcatcatgatgatcat

SEQ ID NO: 274543 - DNA, 265 bp, Glycine max
gacggctaagagctaaaaatcatcgaagtactcaaattagcatggctgtcacggttgcattcttgaatttgatcatcatgttttcagtagtctctacaagcaagtcactgagcttaaactactattcaaaaacatgccctgatgtggaatgcattgttgccaaggcagtgaaggatgccactgctagggacaaaactgttccagctgcacttctgcgaatgcactatcatgactgtttcgttcggaagtgcgatgcctctgtgct

SEQ ID NO: 274544 - DNA, 421 bp, Glycine max
ggaaacaagaagtgaggttgtctttcaaagatggaagaggagacatttgaaaaaccattgttgaagaaaaactatcatgagaattgtcctggttgtaaggtggatcaagccaaggagctcaaaaaggatgtttcctttagaaatctttcttatatatggctggcggtgttatgtggcactttgcctgtagcatcattctttccctttgtttacttcatggtgaaggattttaatattgctgaaacagaggaagacataagtacctatgctggatatgtgggatcatcaatgatgcttggcaggtctttgacatccatattgtggggtatgatttctgatcgctatggtagaaaacctgttatcattatagggattatcactgttgtcattttcaacacattatttggtcttagcacgaatc

SEQ ID NO: 274545 - DNA, 422 bp, Glycine max
gacctcactcttattgttttcttaaaatgtcttgcttgccactgccagtgtgtcaccaccatggccaccgtcacaacccaagcctccgccgcgattttccggccatgtgcctcgaaatcgaggtttctgaccggctcttccggtaaactcaaccgggaagtgactatgaggccaatggggtgccctcctcctgcctctttcaaggttgaagccaagaagggagagtggttacctggcttggcctccccaacttacctcaatggcactcttcctggtgacaatggatttgaccctctgggactagctgaggacccagagaacttgaagtggtacgttcaagccgagcttgtgaatggacgttgggccatgttgggtgttgcaggaatgctacttcctgaggttttcaccaagattggaatcat

SEQ ID NO: 274546 - DNA, 403 bp, Glycine max
tggagcaagagtgaagagcgaagagaatggctcccgaaggtgtaatctttttggctgtgttatgcttctcagcactgtcactgagtcgttgtcttgcggaggataatggacttgttatgaacttctacaaggaatcatgccctcaggctgaagacatcatcaaagaacaagtcaagcttctctacaagcgccacaagaacactgctttctcctggctcataaacatcttccatgactgtgctgttcagagttgtgatgcttcactgttgctggactccacaagaaggagcttgtctgataaggaaacagatagaagccttgggttgagaaatttcaggtacattgagaccatctaagaagctttggaaagggaatgcccaggagttgtttcctgtgctgatat

SEQ ID NO: 274547 - DNA, 402 bp, Glycine max
  unsure (1)..(402): unsure at all n locations
ggtgacgggggaagatgcttctggcgtcgatacgcagaggattcactagtcgagtaggtcccatacgaaccctctcttcgcactccgaaatgaaagactntctggattacctcgactccctcaaaaattacgagaaatcaggagttcccaaaggtgccggcaccgattccagcgacggtttcgatcttggtagaatgagatgcctcatggagcgttttggtaaccctcactccaagttcaaggctgttcatattgctggaactaaggggaaggcatcaacagctgcttttgtatctaatattctgaggaatgaaggttattctgttggttgttacactaggctttatttttctcaagcagtccacatatcctgaccatccgggagcgcattttactgggaaa

SEQ ID NO: 274548 - DNA, 418 bp, Glycine max
gtgttataatcaataacatcggtgtgctgattggttacatgattataattggtgatgtgctctctggaacatcttcaagtggagatcatcactatggtatccttgaaggatggtttggtgtgcactggtggacggggcgaacatttgttgtcctttttacaacacttgccatatttgcaccccttgcaagctttaagcgaattgattcattgagattcacatcagccctttcagtcgcacttgcagttgtttttctagtcattgccgtgggaattgcagttgtcaagatattcagtggaagcattgcgatgcccagactcttccctgtcactactgatgtggcatcattctttagactattcactgtagttcctgtgtttgtgactgcatatatctgccactacaatgttcacagcat

SEQ ID NO: 274549 - DNA, 426 bp, Glycine max
  unsure (1)..(426): unsure at all n locations
gaccacanactgtcatgccatcctcagttctatctagtgatagtatgcacattgggcttcttgcagctgctgctcatgctgcagcaactaatagctgctttacagtgttctataacccaagggctagtccatctgaatttgtcataccgctttcaaaatatatcaaagctgtgtaccatacgcgtgtttctgttggtatgcgtttcaggatgctttttgagactgaagaatcaagtgtccgcaggtacatgggtacaataactggcataagtgacctggatcctgttcgttggccgaattctcattggcgatctgttaaggttggttgggacgaatcaaccgctggagagagacagccacgggtatcattatgggaaattgagcctttaacaacgtttccaatgtatccatctctatttcccctca

SEQ ID NO: 274550 - DNA, 383 bp, Glycine max
  unsure (1)..(383): unsure at all n locations
gctggtcagggttggaacaaaacgaaaaccaatcacaacaacgtagtaaaactcaaaaccaggaaattaatatgagctgcaacggttgccgtgtgctccggaaggggtgcagcgacacatgccctctgaggtcgtgcctgcagtggatcgaatcttcggagtcacaacgacacgccactctcttcctcgctaagttctttggccgtagcgacctaatgtccttgatttactccgtccccgaaaccaaaaggcctggtactgtccaacactctaccttgtactcactcataattcatgcttttacgtgtgcttagatttcatgctatatagctgcctacgtcttaaaatataaagtgtattcatattttataagatganatata

SEQ ID NO: 274551 - DNA, 432 bp, Glycine max
ttcagattttggtctgaagaggctgcttagcaagattccgccctcgccatctttttattcctcatgattttgatgccagtgatcatgggacatcgagtttcccggttgcttctgtgcatcctataccgattttcgacattaagattcttaacaccgataggcatgctgggaacttgttggttaggaaacttgatggcattcggagttctggtcaggtggagttgattcccattgatcatgggctctgcctgcctgaaactttggaggatccatattttgaatggattcattggccacaggcttccattccgttctcagaggatgagcttacctacattgaagatcttgacccttatccgcattgtgagatgctgagaatggaactgccgatgatccgagacgcgtgtctcagagtcttggtgctgtgcacta

SEQ ID NO: 274552 - DNA, 409 bp, Glycine max
ttcgcaatgcacttcataaggtagcagcgccattcgaatacggtgccggacacattcagcctaaccttgcaattgaccctggactcgtttacgatttacgcaccaccgattacttgaacttcttatgtgcttctggttacaaccaagctttactcaacttatttgccaaattgaaattcccatacacttgtcccaagtcttacagaattgaagatttcaactatccttcaattacggtgcgtgatcctgggtcaaagaccataagtgttactcgtacagttacaaatgttgggcctacaagcacgtatgttgtgaatactcacgggccgaaggggattaaggtccttgttcaaccaagttcgttgacttttaagagaaccggagaaaagaagaagtttcaggttatact

SEQ ID NO: 274553 - DNA, 403 bp, Glycine max
gtacacaagtggcagtacaggggtgccaaagggtgtcatgattactcacggcaacattgtagccactacagcagctgttatgacagtgattccaaatctaggtagcaaggatgtgtacctggcatacttgccccttgctcatgtttttgaaatggcagcagaggtgatttcttcttagccttctaattgtcaaaaacagctgatgttgatgatattatctctaaattacggtggttgtccagtctgttatgctggctgcaggttgtgcaattggttacggctctcctctgactttaactgacacgtctaataaagtcaagaaaggaaccaagggagatgctactgtgttaaagcccactcttttgacagcagtaccagctattcttgatcggattcgagatgg

SEQ ID NO: 274554 - DNA, 401 bp, Glycine max
gtcttaaagaagggtgggatctggaaagatatttatggaactgatgaaaagaaggttgccgacatggttagaggagatcaagttgatattttaatagagcttactggtcacactgcaaacaataagctgggaatgatggcatgtcgacctgctcccgttcaggtgacttggattggttatcccaatacaacaggattgcctacaattgattatagaataactgattctcaggcagaccctcccgaaacaaagcagaagcatgttgaagagttagttcgattaccggattgcttcctttgttacactccttcccctgaggctggtcctgtttgtccaactcctgctctttccaatggcttcgttacatttggtagttttaacaatcttgccaagattacacc

SEQ ID NO: 274555 - DNA, 203 bp, Glycine max
gagggagaatttctttggaggataaggccttttggttacatttcatgctggaagaaacaacttgtctttacaagtgcatgtgtggttataaaggcttttggtttatggatgagggtgagaagggtttgcctgaccatgttatgggtgatgagaggagggtttttcaagtaattttgcatatggatgggaacctactggaacac

SEQ ID NO: 274556 - DNA, 408 bp, Glycine max
  unsure (1)..(408): unsure at all n locations
ggtacggncatatttcctctcatcagattgaagggtggggagaattagggttctctatctgcanagcanaccttatcttttcacctgaaacttgcttttgttcccaattttctcaaattgctttcggttttcgttctgattctgcaaaatcatggagatggtgcgcatcgttgaattccctcacacatacatggatcgacccccgagaaagagagcgcgtttgggctgggacatcgctgaggtccccaaggctcaagtaggattgttttgtggacaagaggttgagaatatttcaagctttgctccttcagaacatccccctagttctctgtttaagggagttgctcgaaatggttctcccccatggcgagacgatgacaaagatggccattacatgtttgagcttgg

SEQ ID NO: 274557 - DNA, 419 bp, Glycine max
aattttgtcttaaaacgctgtttagcattattgcgccggggcatttatcaataaccaatccctctctactcttttatcttctccttctcttctctaccgttttatcttctccctcttcacttcattctttactctcctctacattaaccaccatacacaacacattcaccgtcgccgatctcacttctactctcaacgaagacaatagaacagaccttgtctatcctcttaacatcaacatacacagtttgactctacaacactcccatattctagagtctctgtcccccaatgtccgaaagcgtcttgaggttcttatacacatccactgccaacatgatgaattacaggctaaattttttgaaaagagaacaacatctcgatgccaaataccaaaaattgtattaaccactttacac

SEQ ID NO: 274558 - DNA, 422 bp, Glycine max
ggcggaagaggctgtttagcaagattgcgtctgtccagcagtttattcctcatgattttgatgccagtgatcatgggacatcgagtttcccggttgcttctgtgcatcgtatagggattttggacattaggattcttaacaccgataggcatgctgggaacttgttggttaggaaacttgatggcattgggagttttggtcaggtggagttgattcccattgatcatgggctctgcctgcctgaaactttggaggatccatattttgaatggattcattggccacaggcttccattccgttctcagaggatgagcttacctacattgaagatcttgacccttatcgggattgtgagatgctgagaatggaactgccgatgatccgagaggcgtgtctcagagtcttggtgctgtgcactatt

SEQ ID NO: 274559 - DNA, 424 bp, Glycine max
gatgttaggaagtatgtcaacacctaccgtcgtacatttacgacaaaagctgggaaaaaggtgagcaaagctcccaagatacaaagactggtcactcctcttacgctccaaagaaagcgggcaagaattgctgataagaagaagaggattgccaaggcaaaatctgaggcagcagagtaccagaaactccttgcctccaggttgaaggagcagagagaccgccgcagtgagagtttggccaagaggagatccaagctttccagtgctgctaaggcagcagctgtataagctgctttcgatagagagatatggtgaagtttaatcatcatatgtagtttttgtttgctatattatgacggctgttgttatgataaactatggttttgctatttttgattacattgagttattcaagtatttctta

SEQ ID NO: 274560 - DNA, 319 bp, Glycine max
ttcgcaatgcacttcataaggtagcaactccattcgaatacggtgccggacacattcagcctaaccttgcaattgaccctggactcgtttacgatttacgcaccaccgattacttgaacttcttatgtgcttctggttacaaccaagctttactcaacttatttgccaaattgaaattcccatacacttgtcccaagtcttacagaattgaagatttcaactatccttcaattacggtgcgtcatcctgggtcaaagaccataagtgttactcgtacagttacaaatgttgggccttcaagcacgtatgttgtgaatac

SEQ ID NO: 274561 - DNA, 428 bp, Glycine max
gggctagggcattgtctggcaacaaggatgtggccttcttctctgctaatgctgcagctcacgcttcaaggaagtcccctccaagagtgaccaacgaggctgttcagaaggctgctgctgcattgaagggttcagatcatcgccgtgcaacaaatgtcagtgccagactggatgctcaacaaaagaagctcaaccttccaatccttccaaccaccactattggatccttccctcagactgtagaactgaggagggtacgccgtgagttcaaggctaacaagatctccgaggaagagtatgttaagtcaattaaggaggaaattcgcaaagttgttgaacttcaagaagagcttgatattgatgttcttgttcatggagaaccagagagaaatgatatggttgagtacttcggtgagcaattgtcaggc

SEQ ID NO: 274562 - DNA, 443 bp, Glycine max
  unsure (1)..(443): unsure at all n locations
cggcccggccgtcgcccacgccttggtgcaagccttccttccggttgggttaagacaccgaatgggggaaaacctttcagggccaaaaatcgttgcccacagtgcatggaatataaggttgtgcaagataagaaagtccttgaagttattgtagaaaaggggatgcataatgggcagaagataacattccctggcgaagctgatgaagcgccggacacaattactggggatatcgtctttgtccttcagcagaaggaacatcccaaattcaaaagaaaggctgaagatctttttgtagagcacactttgtcccttaccgaagccttgtgtggcttccaatttgtgctgactcacttggatagccgtcagcttcttattaaatcaaatcccggggaagntgtgaagcctgattcatacaacgctattaatgatgagggaatgcc

SEQ ID NO: 274563 - DNA, 392 bp, Glycine max
gggggaaacaaaaacaaaacatttcgtccgaaactaatataacgtgttcctccttggaagaagccatagccataacatagccaccagaaaacaaaacccaccttagttattaaaagaaaagaaaactacataaaattaagctttgttcggtggtgaccatggggagcaccgactcatcaagcggttcacaacaaccgaacctgccacctgggtttcggttccaccccaccgatgaagagcttgtggttcactacctcaagaaaaaaacagcttctgctcctcttccggtagccataatcgccgaggttgatctctacaagttcgatccatgggagctacccgctaaggccgcgtttggggagcaggagtggtatttctttacaccgagggac

SEQ ID NO: 274564 - DNA, 421 bp, Glycine max
  unsure (1)..(421): unsure at all n locations
gtagtaagggaggaaccagcattgaagaccttgcggagaaatttccggacatgattataaaggtacctgttgatgtttttgaaggtattactgatgaaggtgctgcaaaggttgttgatggtttggctctcaaagtggctgatagaaataagtcgattgaacaagtgaagaatttgtataaactttttgttgattgtgactgcactcttttggaaatcaatcccatagcggagacagctgataaccaattggtggctgctgatgctaagttgaattttgatgataatgctgcatatcgccagaaagagatattttctctccgtgatacaacacaagaggaccctcgagaggtgactgctgcaaaggcagatttaaattatattgngttagatggagaaattggctgcatggtgaatggagc

SEQ ID NO: 274565 - DNA, 405 bp, Glycine max
ggtgtttagcgaacaaaagagagtaaacaaaatggcattgcaggcaccacctagccttcacaccgtcaatggcaatgctggcctgagacgacccttgatgaatccttcttctttttctctaaagtcatccttcttctctggttccctcaatttctatcttcatcccaatcacctccatcttacttcagctccacccaggatttccatgcgtgttgcttccaaacaggcctatatctgtcgagattgcgggtaaccgggttacccttcttttattttttcataaattcaattaacttatgcttttgctaatgttattcattgaagctaacgctatgctgcaggtatatttacaaagacaggactccctttgagaagttgcctgataactacttctgccctggtaat

SEQ ID NO: 274566 - DNA, 408 bp, Glycine max
ggtcaagaggaacttgtttatgatgaaaactctggacatggattcttaaatgatgtttttgcagggaattctcttgtgaatgatacagatttgaaccctttggagtttttagcttctctattccctggttttgcttcagaaagccttgctgaagttttcttcgccaatgcatgcgatttacatctgaccattgagatgctcactcagttagagattcaagttgatggtggcttcaatcagaatccgagtccaaagactctgtcatctcccaatctgagtgcaatggactttccagctcttacatcatcaaatgggcagaatacttcaaaatatgctgcagataatgttcaacaaagtggcattccatacatatcatctgataaagacatgctcatgttcaaatctggc

SEQ ID NO: 274567 - DNA, 400 bp, Glycine max
gggtctctacttcgcatttccgttctttgctttgctcgggctacgaaaaacgacgtcgttttcccaattttccccggcgaccgggaaatggtggagccggtggagcttcgcggcgaggagcagctctcgttgctgtcagattccagcaatggtgaccggtcgtggcggttggacttcgacgggtttcagctatcttcggagcacacggagaagcaagtgaaaccccctcgcggactccatgactgttatggggttcttggtcaagaagataatattgcggagtactatcagcagcaggtagaagtgcttgagggctttactgaaatggatgctttagcagagcgtggttttattcctggaatgtcaaaggaggagcaagacaagttagcaagaagtgaga

SEQ ID NO: 274568 - DNA, 422 bp, Glycine max
ggttctagtgtgtgattgtttgtcgttgtaactcgttcttcttcttttgttgttctgtgtttgtgtttgttttttctctcacctgaaaatgtcttgctgcggtggtaactgtggttgcggaagctcctgcaagtgcggcaacggctgcggaggctgcaagatgtacccagacttgagctacactgagtcaaccaccaccgagaccttggtcatgggagtggcacctgttaaggctcaatttgagggtgctgaaatgggtgtgcccgctgagaacgatggctgcaaatgtggaccaaactgctcctgcaacccctgcacttgcaagtgaggtgttgggagagcaagcttcaagcagagatagcccttaattaggaataatgataaactattaatgtgtagctaaaaacttatgtattatgtct

SEQ ID NO: 274569 - DNA, 417 bp, Glycine max
  unsure (1)..(417): unsure at all n locations
ggagactcgaagtgtgaagcactgagcagttgaggaaatgggaacccttgngagagcgatctacagcgttggtaactggattcgagaaactggacaggccattgatcgtctcggttcccgtcttcagggcggttactacttccaagagcagctctctaggcatcgaactctgatgaacatatttgataaggctcctgttgttgataaggatgtatttgttgcgccaagcgcctccgtcattggagacgttcaacttggaagaggatcatccatttggtatggagttgtcttgagaggtgatgttaacatcatcagagttggaaatggaactaacattcangacaactctctggtgcatgttgcaaagtcaaatttaagtgggaaagtgttgcctacaattattggggataatgttac

SEQ ID NO: 274570 - DNA, 421 bp, Glycine max
  unsure (1)..(421): unsure at all n locations
gggaggcaacccgaacgagggttttcaagctggggcgggtgggtcttttttccgtgacacagcacanacaaattctcagtgttggagacttgagctcatagagaaatcatagtttgtttaatttcaattctgagcaaaggtcaacatgcaagttttttccattgaaggcgaaagtgctttgtcagttgttggtccaaggccaatggaatggtctactgttccatacaatgcccctcaagctcctgggccaaatggaaagcagcggacctcaagtttggaatcaccgatcatgttgctgtcaggtcaccagagtgctatatataccatgaagttcaatccagcaagatcagtcattgcatctggatctcatgacagggaaattttcctctggaatgtgcatggngattgcaagaacttcatg

SEQ ID NO: 274571 - DNA, 366 bp, Glycine max
ggaagatacggaggctgctgctatcgaatactcggataaggagggtaagggcggtgaactgcactacttcaatccccttttctctcttctccttttatttcatcactctcttcggtcctttcttcttctccaaagttttcaattttcacacttttcgagtaagaacatcttttcaatggcgtcccaaattacccgtgagtggtctggaatcaatacattcgcacctgctacccagactaagttgcttgaactcttgggaaaacttaaacaagagaatgtgaactccttaactatacttgtgatgggaaaaggtggtgttggaaaatcttcaactgtgaactccatcattggggatagagtggtttc

SEQ ID NO: 274572 - DNA, 423 bp, Glycine max
gacagaacaatagtagcaagcagagccccaagacgagcttcaccttgcgccgaagggccacagatggttgaaaccgatatggatgccgaaactgttgcaaatgtggttccaccaaaggagactccaaacagtgttcccatctcttatcattcctcacactcacaccctcctcttaatgagaggattatttcatccatgaccagaagatctgttgctgcacacccgtggcacgaccttgagatagggcctggtgctccaacgatcttcaattgtgtgattgagattgggaaagggagcaaggtgaaatatgaactggacaaaaaatcgggtcttatcaagatcgaccgtgttctttactcatcagttgtgtatcctcacaattatgggtttatcccacgtactatttgtgaggacagtgatccc

SEQ ID NO: 274573 - DNA, 445 bp, Glycine max
ggaaaacgggggccgaccgcacgcgtccgcgcacgcgtgatcagatgtcagattacgactgaacggggattggtcgaatggtcggaaaagaatgttttactaactcccattgcttatttattattgaatcaaccgatcaacttgcttcggtatcgaacatttctttttgatttcaaaaattttccggaaaaaatttgaatctatttttatatgctaatcaattctactacttctgatcctgatgttattgcgcttgaaaaaaaaaatctgtgacgtatcgcccaaataatttgatacagactatatgtatcttttaccccacataagatgcctaatatttacaacactctgatagttaaaggtcgagatactcttggtcaacaaatttatgtgacttgagaagtacagcaactattaggaaataatccaattagagctgtagcta

SEQ ID NO: 274574 - DNA, 399 bp, Glycine max
gatagaagaagcagaaagagaagcattagcaaaagcaagaagaactagtctaagcagaaatggcctcttcagtgatggcatctgtggccctcaaacctgcccctttcactgttgagaagtcctcagttagaggccttccctccctctcaaggaactcctcttcattcagagttgtggccagtggtggcaagaagatcaagactgacaagccttatggaattaatggtggcatggctttgagggaaggagttgatgcatctggcaggaaaggaaaggtttgtgcctcattaaatcttagtacataattaacaatatgtttttttgttaaaatgatttcattcctctaaactgggggtataagtcaagtaatatagtcattgatgagaaaatcaacacttc

SEQ ID NO: 274575 - DNA, 390 bp, Glycine max
ggctgaagacatcatcacagaacaagtcaagctgtgtctacaagcgccacaagaacactgctttctcctggctcaggaacatcttccatgactgtgctgttcagagttgtgatgcttcactgttgctggactccacaagaaggagcttgtctgagaaggaaacagatagaagctttgggttgagaaatttcaggtacattgagaccatcaaagaagctttggaaagagaatgccctggagttggttcatgtgctgatatcctcgatctctctgccagagatggcattgtttcgctaggaggtccccatatccctcttaagactggaagaagggatggtagaaagagcagagctgatgtggttgagcaattctctccagaccacaatgagt

SEQ ID NO: 274576 - DNA, 420 bp, Glycine max
gacaagtgagtttgttgatcgagataactagaaacagtgtgatgaaaatgaaggtccttgttttcttcgttgctacaattttggtagcatggcaatgccatgcgtacgatatgttccctctccgaatgaacactggctatggtgcccgtactccggaggtgaaatgcgcaagttggaggcttgctgtggaagcacacaacatctttggctttgagaccattcctgaagagtgcgttgaagcaacaaaggaatacatccatggcgaacaatatagatcagactccaaaacagttaaccaacaagcttacttttatgccagagacctcgaagtccatcccaaggacacatttgtgttcagtatagatggcaccgtactctctaatattccatactacaaaaaacatggatatggggtggaga

SEQ ID NO: 274577 - DNA, 427 bp, Glycine max
gggagagggaaaagagttgaagacttgaagtgaagaaagaaagaattgagaaaggatagggtttagggttggcaaaggaaggaagggatggaagcagctgtggtggacgtcggctctaagcttctcaaagcggactttgcaattcctgaccagactcccgccatgataattcccactcagatgaagcaattgctcgatgatggatcagtcactgatagttcactggctgacaatgtcgccgttgatcccgtcgtgcgaggatttattagagattgggatgccattgaagatttgttgcaccatgttttgtatactggcctcggatgggaaattggcaatgaaggacaaatactatttactgatccactttgtacccctaaggcgaacaaagaacagttggtgcaactaatgtttgaaacattcaaca

SEQ ID NO: 274578 - DNA, 412 bp, Glycine max
  unsure (1)..(412): unsure at all n locations
ttggggtgtaacaggaattgacggaggcatgcgaaatcggtgaagatggttgctatgaggtttcatcagtaccaggtggtgggaagggctcttcctaccgaatccgatgagcatcctaagatctaccgcatgaaactctgggcaactaacgaggtccgtgccaaatccaagttctggtattttttgagaaaattgaagaaggttaagaaaagcaatgggcaagtgctagccataaatgagatttttgagaggaatcctaccaagattaagaattatggaatttggctgcggtatcagagtcgtactgggtatcacaatatgtacaaggaataccgagatactactctgaacggtgcagttgagcatatgtacaccgaaatggcgtctcgacatanggtgaggcatccatgca

SEQ ID NO: 274579 - DNA, 413 bp, Glycine max
ggttctagtgtgtgattgtttgttgacgtaactcgctcgtcttcttttgttgtgctgtggttgtgtttgttttttctctcacctgaaaatgtcttgctgcggaggtaactgtggttgcggaagctcctgcaagtgccgcaacggctgcggaggctgcaagatgtacccagacttgagctacactgagtcaaccaccaccgagaccttggtcatgggagtggcacctggttaagctcaatttgagggtgctgaaatgggtgtgcccgctgagaacgatggctgcaaatgtggaccaaactggtcctgcaaccactgcacttgcaagtgaagtgttgggagagcaagcttcaagcagagatagcccttaattaagaataatgataaactattaatgcgtagctcaaaacttatgt

SEQ ID NO: 274580 - DNA, 364 bp, Glycine max
gaccacaaattacatagtaactctttttctcgaatccacagagtgagactcatcgtgtgaacaacgataacggcatgtttgagcgtacttgaaaaatttgagcggccatggacgaaaccgccgtaacgacgaagcctgattggctcaacaaccgcgcgagggtcgccggagagagaaccgaagaatttttctgtggcggcgacgacgaagaggaatgcgacgacgaggcttgggacatgttgactcggagcttctggcaggcgcagactgtgctggacgagaaccgtgcgctgatcgacgaagtgaacagcaaccacgagtcgaagattcctgacaacatggcgaagaacgttggcctcattac

SEQ ID NO: 274581 - DNA, 407 bp, Glycine max
gaaagaggaattaccattgatattgctttgtggaagtttgaaaccaccaagtactactgcacagtcatcgatgcccccggacatcgtgactttatcaagaacatgattactggtacctcccaggctgattgtgctgtccttatcattgactccaccactggtggttttgaagctggtatttctaaggatggacagactcgtgagcatgctcttcttgctttcacccttggtgtgaagcagatgatctgctgctgtaacaagatggatgccactaccccgaagtactctaaggctaggtatgatgaaattgtgaaggaagtctcttcctacttgaagaaggttggttacaacccagacaagattccatttgtgcccatctctggtttcgagggtgacaacatgattga

SEQ ID NO: 274582 - DNA, 420 bp, Glycine max
ggatatcaacagcatcaccagtgttggagggatcgttgaccaaggcttaggcttcataggcagtgcagtcgatgcacttacttttgcagccaccaaaatctccatccagttgattagtgctaccaaggctgatggtgggaaaggaaaaattggaaagagtacaaatttaagaggaaagataacattaccaaccttgggagctggcgaacaagcatacgatgttaattttgaatgggacagtgacttcggaattcccggtgcattttatattaagaacttcatgcaaaatgagttctacctcaagtctctaattctcgaagacattccaaaccacggaaccattcacttcgtatgcaactcctgggtttacaattcaaaaaactacaagactgatcgcattttctttgccaacaatacata

SEQ ID NO: 274583 - DNA, 393 bp, Glycine max
gacacaccgtttgtgcgattcttaactcaacttctgctacccactctcttcttccaagtccaaccacgcttttctctacagtcatgggcaaggtcaagatcggaatcaacggatttggaagaattggccgtttggttgccagagtcgctctgcaaagagacgatgtggagctcgttgccgttaacgaccctttcattaccaccgattacatgacatacatgtttaaatacgacagtgttcacggacactggaagcatcacgatgtcaccgttaaggacgagaagacccttctcttcggtgacaagccagtcactgtttttggacacaggaaccctgaagagatcccatgggggtcaactggagctgatatcattggtgagtccaccggagttt

SEQ ID NO: 274584 - DNA, 415 bp, Glycine max
gacactaaacaagttaaaagaagagcatgactgaactaacaaagcaaccctatgtcgaaggtggtttgtgtcaccggagccagcggcgccatcggatcatgggtggtcctactcctcctccagcgtggttacaccgtccatgccaccgtccaagatatcaaggatgaaaatgagacgaaacatttggaggaaatggaaggagcaaagagtcatctccatttttttgaaatggatcttcttgacatcgactccattgccgctgccataaagggttgttccggcgtaatccaccttgcatgtcctaacatcattggtcaagtcgaagatcccgagaaacagatattggaaccggcgataaaaggaacggttaatgtgttgaaagcggcgaaggaaagcagggtggagcgcgtggtgg

SEQ ID NO: 274585 - DNA, 407 bp, Glycine max
ggaggaaaagatagaaagaaaaaaaaacagcgcccgagatttgctcttctttgcttcggaagaaagagaaaaacaaataacaatggcgttcgcttctttcctcggcagagttctcttcgcttccgtcttcatactctctgcttaccaagaatttaacgaatttggagttgatgggggacctgcagcaaaagcactcagacctaagtttgatgcctttacacatcgagtgcattctcaagttggctttcaacttcctgagattgatctgaaatttttaattgctggggctattgctctgaaaggccttggaggggttcttttcatatttggcagctcttttggagctttgcttctgctcctgcaccagctgattgctaccccaatccattatgattgttacaattatg

SEQ ID NO: 274586 - DNA, 303 bp, Glycine max
  unsure (1)..(303): unsure at all n locations
gaaatggctctggtgattctggacttgttctctcaactgatgctaagcctagattgaaatggacacctgatcttcatgcaaggtttatagaagctgtgcagcaattangaggagctgacaaggcaactccaaaaacggtaatgaaactcatagggattccgggtcttaccttatatcatctgaagagccatctncagaaatacagattgagcaagagtctgcatggacaaagtaacaatatgacacacaaaataaccataaattcaggtgcagcaacagacgaaagactcagagaaaataacg

SEQ ID NO: 274587 - DNA, 369 bp, Glycine max
ggttcaccttagaaaaagccacttgacaccatggccacggaaggccatatcaacccattgttcaaattagcaaagctgcttcatctgagaggctttctcataaccttcatctgagatgagtaactctacagagagaaagccacatgcactgttgacaccatatccacttcaaggccatatcaacccattgttcagattagcaaagctgcttcatctgagaggctttcacataacctttgtccacactgaatacaacattaaacgcttgctcaactcaaggggtcctaaagcccttgatggccttcaagactttcattttgagaccataccagatagtcttccccccacatatggtgatggtgatgtcac

SEQ ID NO: 274588 - DNA, 403 bp, Glycine max
gactcgcagttgtattgttgaacaagggtttcggtgtctgcttcttcactttctctcgttgcaatcgaaaccaaaacaaaaacatgggcagaaaattcttcgtcggtggcaactggaaatgcaatgggaccactgaggaggtaaagaagattgttactactttgaatgaggctaaagtccctggagaagatgtcgtagaagttgttgtgagccccccttttgtgttccttcctgttgtaaaaagtttgctgcgccctgatttccatgtttcggcacaaaactgttgggttcgcaaaggtggtgcttataccggtgaggttagtgctgaaatgcttgttaatttgggaattccttgggttattattggtcactctgaacggaggcagcttttaaatgaatcaaa

SEQ ID NO: 274589 - DNA, 427 bp, Glycine max
ttgggggtgactcaatagccatgaaaggaaggagtatgctgtactcaaaactagggtgcgaacaatctaaagcaattaggctatttttgcgtatgaaaaggcttagatatgttgaaatcaacatagatgtgttccccggtagaaaggtggagctggaaaagatttctggatctgcttctgtacccaaggtttttttcaatgaaatactaattggaggctggaatgagctaaaaaacctggatgagtctggtaaacttgatgagaaggttgactttcttattactgaagcaccattatttgaagccccatcaccacctctctctggagaggatgatgtgtccagtagtggaccacttgatgaattggcaattattgtccgtaaaatgaaagaatctattgctgtgaaggatcggctgtataaaatgcc

SEQ ID NO: 274590 - DNA, 404 bp, Glycine max
gggagcaaggcaggatgcgttcagtattttctttgaatgggatgctagttttggaattccaggagcattttacatcaaaaactttatgactgatgagtttttcctcgtcagtgttaaactcgaggacattccaaaccatggaaccattgaatttgtttgcaactcatgggtttacaacttcaggagttacaaaaagaatcgcattttctttgtcaatgatacatatcttccaagtgccacaccagctccactacttaagtacagaaaagaagaattggaggttttaagaggagatggaacagggaagagaaaggactttgacagaatctatgattatgatgtctataatgatttgggcaatccagatggtggtgatcctcgcccaatccttggcgggtctagca

SEQ ID NO: 274591 - DNA, 295 bp, Glycine max
gtgcacaaatgactatattcatttacgcgccgttaaattttgatcagctatcgctactcttaaacatctatactataaaaagaattactcatttaattcttctcagacagaaaattctaaatatctttcatccaaacaggcactctttaatttggctcaacttcttcagtatcatcaggattccttacatgcaaagcttaatataacataaactgaatacccctgtttcatttttcacacctcatatactacaacactcaatacatgattacgtctcaagtttccacatttaaca

SEQ ID NO: 274592 - DNA, 392 bp, Glycine max
catggaaatttttcgaactgatggcgaacaggggctcaagtatccaccacctaaagtgatgcaggtggataagtctgcatggatgactgatgaagaatttgctagagaaacgattgctggtgtaaatccaaacgtcattaagattcttgaggagttcccaccacgtagcaagctagatacacaagcctacggtgatcatacctgtataataacaaaacaacatttggaacctaacttgggtgggctcacttgtgagcaggctattcaaaacaagaaagctgtcatcttaaaacaccatgactatctcattccatatttgaagaaaataaatgcaactaccacaaagacttatgctaccagaaccatatttttcttggaaagtgatggaactt

SEQ ID NO: 274593 - DNA, 393 bp, Glycine max
ggaggagagaggagaagagaagctaaagaaagagaggagatgggagtggagaagcagttgttgaggtctggcaccggtccgaagccaattcccggtcagaacgtaaccgttcactgcactggtttcgggaagaacggtgacctttctcagaaattctggagcacaaaggatcctggccagaacccattcactttcaaaatcggccaaggttctgttatcaaaggatgggatgaaggtgtgcttggcatgcaaattggtgaagttgctcgtctccggtgctctccggattatgcttatggtgctggtggctttcctgcttggggaatacggcccaactctgtcttggaatttgaaatcgaagtcttaagtgcgcaatgaaaaccttggtagtct

SEQ ID NO: 274594 - DNA, 363 bp, Glycine max
gggttaaacaaggaggtaccaaatattgttagtgaatttgttgggggcaccaatttagaaattcacgagaggtacaaaactatcacggaaaagaacattggaaggttggaccagccttctcaaaactcaagagaatatgaatctactattggcatatgtctagagaaaagcctgagtgctgcattagattcttttgataatcttttttgtcgccgctgactgatttttgactgtcagatgcatggctgttctcaacctttaatatatcatagtgaaaagcagacagtttggtctgatcctgaaagagacaggaaaccttgcagtgatcagtgttaccttcagttaaaggtagtgaaaaatgtg

SEQ ID NO: 274595 - DNA, 191 bp, Glycine max
gttaccggtttggatcaaaagacccttctcttgggcgacgggccagtcactgattttggacacactaaccttgaacagatcccatggaagtctactgaagcttacatcattctttaatccaccagaattttcaccgataaagattatgctgccgcacatttgaaggatggtgcatagaaagctattatttc

SEQ ID NO: 274596 - DNA, 430 bp, Glycine max
gatggatgaggagtacgatgtgatcgtgttgggcacgggtgtcaaggagtgcattctcagcggtcttctctccgtcgatggcctcaaggttctgcatatggataggaacgactattacggaggagaatccacttcgctcaatcttattcagctttggaagagattcaggggagatgacaagcctcctccacatttgggcgctagcagggactacaacatcgatatgaaccccaagtttattatggctaatggcaatttggtgcgggttctcatacataccgatgttacaaagtatctctatttcaaagctgtggatgggagctatgtgtttaataaaggaaaggttcataaggtgcctgcaaacgacatggaaggcctgaagtccccacttatggggctatttgaaaaacgccgggcacgcaagtttttc

SEQ ID NO: 274597 - DNA, 408 bp, Glycine max
gatagatagagagcgcggcagggcctaaacttacccttcttcgctctgtgtgtgtgcgcatcaaacgcaaccagaagcagccatggccactgcaagaactgtgaaggacgtttctcctcatgagttcgtcaaagcttactcttctcacctcaagcgatctggcaagatggagctgccagagtggactgatattgtgaaaactgcaagatttaaggagttggctccttatgatcctgactggtactatgtcagagctgcttccatggcaagaaagatctacttgagaggaggacttggtgttggtgcctttcagaggatttatggtgggagcaagaggaatggtagccgccctcctcatttctgcaagagcagtggtgctgttgctcgtcacattcttcaacaagtgca

SEQ ID NO: 274598 - DNA, 360 bp, Glycine max
gatgctgaagcaaggaggatgcggggcaagaaagccaaggtgaatttcccggatgagccttcaggcgctgctgcttcctcaaaacgcctcaaggtgaatccagaggctcagccaatgaaggaaaatctgaacaccgtgaagccgaaaatgaaccagatgttcaattttggtcacaatctggagggctactacagcccaatagatcaggtggaacagaaaccactggttaaccagtatgttaaccctgccccgttccctggaaacggagttcaagtctcacctgttactccatctgctgatgttactgcttacttcagctctgagcattcgagcaactcgtttgattattctgaccttgga

SEQ ID NO: 274599 - DNA, 383 bp, Glycine max
  unsure (1)..(383): unsure at all n locations
ggcacaaaaatacaatacaaaacaaaacagagcagggagagagtgtgtgaaaagtgaaacaaaaaacagaacaacaatggcgacacttaaggttcctcagcctcttccccccgttgcagatgattgtgagcagctccgaaaagccttctcaggttggggaactaacgaggagctgattgtatcgatctcggctcataggaatgctgctcagaggaagcttatcagagaaacttatgcccagacctatggagaagatctcctcaaggccttggacaaagaactcacgagtgattttgagaggctggttcatctttggacacttgattctgctgaacgtgatgcatttttggcaaacgaagcccggnaactaaaaaatggactta

SEQ ID NO: 274600 - DNA, 427 bp, Glycine max
  unsure (1)..(427): unsure at all n locations
ggttctagtgtgtgattgtttgttgttgtaactcgttcttcttcttttgttgttctgtgtttgtgtttgttttttctctcacctgaaaatgtcttgctgcggtggtaactgtggttgcggaagctcctgcaagtgcggcaacggctgcggaggctgcaagatgtacccagacttgagctacactgagtcaaccaccaccgagaccttggtcatgggagtggcacctgttaaggctcaatttgagggtgctgaaatgggtgtgcccgctgagaacgatggctgcaaatgtggaccaaactgctcctgcaacccctgcacttgcaagtgaggtgttgggagagcaagcttcaaagcagaggnaaatagcccttaattaagaataatgantaactattaatgtgtaactaaaaacttatgtattatgtct

SEQ ID NO: 274601 - DNA, 387 bp, Glycine max
gaggaattggaattagaattgtaaaaaggaaaggggaaggaagcaaggcaaggaaggagagtggatcgattcctcagcagcaccagacatttataaaagctctttcccttccctcaaatcgctcatactcttccaatcttttttttttttttttttttttacctttctccctcgctcaataatacaaaacaaaaaagaagaagaagaaggttttcgcgatggcatcgaaacggatcttgaaggaactcaaggatctccagaaggatcctcctacctcttgcagcgccggtcctgttgctgaagacatgtttcactggtaagcaacaattatgggtcctccagacagtccttatgctggagggtgttttttttcctagtcactattca

SEQ ID NO: 274602 - DNA, 385 bp, Glycine max
ggagtagcgatggagaagaagaagggtgaggtaaagtcaattttgcttgctttcctttgcactagtcacataatcccgctagtggacatggccagactcttctccttgcacgacgtcgacgtcaccatcatcaccaccgcacataacgccaccgttttccaaaagtccatcgatttagatgcgagtcgcggtcgccccatcagaacgcacgttgtcaacttccccgtcgcacaagtgggtctccccgatgggatcgaagccatcaacgtcgatacgcctcgggaaatgacccccagaatctacatgggcctatcccttctgcaacaagtcttcgaaaaactcttccatgacttgccccaaaaccggatttcatcgtcaccgacat

SEQ ID NO: 274603 - DNA, 418 bp, Glycine max
  unsure (1)..(418): unsure at all n locations
gaagtacaagcagagagttacaacacataggtcttggtcttttccctttttcctaggcacagcacacgccctctcaaatagaaactgagagatgaattctgatcagtttcagaagaacagcatgttcgtagaaacccctgaagatggtggcaaaaacttcgacgatgatggacgagtcagaagaacgggtacatggataactgcgagtgcccatatcataacggcagtgatagggtcaggagtgttgtcacttgcatgggcaattgcacaaatgggttgggtggctggccctgccgttctctttgccttctctntcatcacttacttcacttccactcttcttgccgactggttaaatttcgttcacctgatcctgttcatggcaagcgaaactacacctattccgatgttgtcagat

SEQ ID NO: 274604 - DNA, 356 bp, Glycine max
ggataaattgaagtatagattgaacgcgcacatagaaacccaacaacaagaatgaagaagatgattctaaccctattgttcaatatcatgatatctgtcctctccctcatgccacgcctccgaggtggatttctgcgtagcagactacacaggccccaatggccccgcaaggtactcatgccagagcccagctgcggtcacggtggacgacttcgtatactacagccttggcaccgacggcaacaccttaaacattatcaaagccgcagtgacgccggcgttcgacgcgcaattgcccggcgtccacgggcttggaatctctattgcacgcctagacctatcaaccggtggagtca

SEQ ID NO: 274605 - DNA, 404 bp, Glycine max
gggttttgaatcggggagatgagtcacaacaacagctacaacgatagagcgaggtaccctatcgggatgggacttgtgcgcgggggtttcaattcgaacctgagccagaacccgaaccagagccagaacccgagcctgaaccagaatcatcacgcgttccaggctcggacgacgtaccaccaacagcaacaggcgcaatatgtgcagaggcatttgatgcagcagcagcagcaacagcagcagtggctgagaagggatgccaacgccgtcgacgaggttgagaagaccgtgcaatctgaagccgtcgattcgagttcccaagattggaaagcaagactaaagattccaccagctgatactcgctacaagacagatgatgtaacggctacttaaggaaatgagtt

SEQ ID NO: 274606 - DNA, 386 bp, Glycine max
  unsure (1)..(386): unsure at all n locations
acctcagaagggtggagatccatgtcctggttatctgcttgtttttttcctggaattgcttttattattctgacaggactgaattttcttctctggggcagcaaaagtactggtgctattcccatttccctgtattttgagttgctcttcctctggttctgcatctcagttccacttaccctcattggaggatttatggggacaaaagctcagcaaattgaatatcccgtgcgaactaaccagattccaagggagattcctgcacgtaaatatccatcatggcttcttgttcttggggcaggaactcttccgtttggaaccctnttcattgagcttttctttattcccccctttccagtatctggcttgngaggttctattatgta

SEQ ID NO: 274607 - DNA, 349 bp, Glycine max
acgtacaggcgtacgtgacgacacaagggaacgactgactttggtagatgagcttctaccctagggggtgggctcaacattcggcagttctggaacaataataatggcgtcctgcaataaggttggaaaccgttcgaggcatggtgctgctcggaaacacatgcgcctgtgcagacatgctatatacatcgatgcacgattggagcacgctttcattggaggcctcacatatggagtcgatgaccattctcatcaagatgcattttctggcttctgagatgtggcttatgcgaaagttataactcgactgaaacagtggcagatcaatgggatttggatttgtcaactt

SEQ ID NO: 274608 - DNA, 393 bp, Glycine max
gtaccgagtgataataaaattggaccggttgttggtgatgaggatctctttgctgtagattatgtcacttgtgtgggacaggttataggagtagttgtggccgatactcatgaaaatgcaaagattgctgcacgaaaagttattgttgagtatgaagagctcccagccatcctttcaatacgggatgccatcaatgctagaagttttcatcccaatacagaaaagtgtttgagtaaaggtgatgttgatcactgttttcaatcaggtcagtgtgaccgaataattgaaagggaagttcatatgggacgtcaggaacacttttatctggaaccacatagcactttgatatggacagtggatggtggaaatgaagttcatatgatatcatctagt

SEQ ID NO: 274609 - DNA, 419 bp, Glycine max
ggcggcaatagagagtagagagtaaacagaaaaggtgaggcgcgagtggctggtgaaggcagcgactgcgagggaagggaagcatctttagctccaaatccaatggcggatacctcaagccgatcaagagacctcgacaagctccttctccgccctggcaatctcgtcggtcctaggttcgaacctggccctgagttgcgagatgaccttcaggccttcgccaattcttgttcagacttgaagatgttggcaaacccaaagccgaggtagctgccaagcgtgtcatggagagaattagtggtgtggaaatcgtgccgcacttttgcaggatcgaggacaaggaaattgaattttacaacaattttaacattattgcccttggtcttgattccattgaggcccgcagttatatcaatact

SEQ ID NO: 274610 - DNA, 416 bp, Glycine max
ggcaagtgtgagtgatatttgagcttaaaccctagccgctcttctcttcattcttcactttggaaacaatcataatggcgttctgtaataaggttggaaatgtcttgaggcagggtgctgctcgcagcacacatgcccctgttgcgtccatgcttaattacatccgctgcatgtcttcaagcaagcttttcattggaggcctttcatatggagttgatgaccagtctcttaaggatgcattttctggctttggagatgtggttgatgcaaaagttataactgatagagacagtggaagatcaaggggatttggatttgtcaacttctccaatgatgagtctgcaagttcggcacttctccttttcaatggacgggaaagatctaatgggcgaaacatcggtatctatgcaatgata

SEQ ID NO: 274611 - DNA, 299 bp, Glycine max
gacggagcagaggacaagatgggtagtgtgagttatagcaatctgaagaacgccatgatagcattcttggtccctctaccctccatcctattctacctctcattccaatcggccattagtactccttcttcttggtcttctctgtggacatggtgctatcaccaccctctgctattggccaatgtccttttcttcttcaatgtcaatttcctcttctggctcatcggcctaatccaatccagccactggatgattgacccgtattggacagtgatacctgtgatgcttggtcattacta

SEQ ID NO: 274612 - DNA, 418 bp, Glycine max
  unsure (1)..(418): unsure at all n locations
ggaaggaaggagtaacataaaatggaggttcaatgtgccctcccattccactaacacacatcacatctccctctcgcacgcgacgagggagctccgcttcggaatctcactccctctttctgctaattgacaagatggttgctcagaaattcgttgttgatttgaacaagccccttgtgttccaggttgggcatcttggggaagcctatgatgagtgggttcacgatcctatcgtaagcaaggaaggccctcggtttttccaaaatgattttctcgagttgttcacgcgcaccgcgtggtgggtgattccaaccgtttgggtgccggttgcaagttggttcatttccaactccgtannaaaaaatcaggcctnccttctcttgatgtagctctgctcgtctntcttggcatcctcgtt

SEQ ID NO: 274613 - DNA, 423 bp, Glycine max
  unsure (1)..(423): unsure at all n locations
ggcacaagtgagtttgttgatcgagataactagaaacagtgtgatgaaaatgaaggtccttgttttcttcgttgctacaattttggtagcatggcaatgccatgcgtacgatatgttccctctccgaatgaacactggctatggtgcccgtactccggaggtgaaatgcgcaagttggaggcttgctgtggaagcacacatcatctttggctttgagaccattcctgaagagtgcgttgaagcaacaaaggaatacatccatggcgaacaatatagatcagactccaaaacagttaaccaacaagcttacttttatgccagagacctcgaagtccatcccaaggacacattttggggntgttcagtatagatggcaccgtactctttatattccatactacaaaaacatggatatggggtgga

SEQ ID NO: 274614 - DNA, 326 bp, Glycine max
  unsure (1)..(326): unsure at all n locations
gaggaagaaatgagaactaacaagaatcaagagagagaggtgttactacgttagtctatgaacagtcaccccgagagactgaaatttccagaccctcaaatcaaactcttctattctctcatcaatcaatcaatccagttccctctcggataggaatgggaatatatctcagcactccaaaaactgaaaagttttctgaagatggtgaaaatgactgtcttagatatgggttatcatccatgcaagggtggcgtgcaacaatggaagatgctcatgctgcatatactgatctggatgagtccacttcanttatttgtgtctatgat

SEQ ID NO: 274615 - DNA, 323 bp, Glycine max
gggtagtggggcagcacagcaatacgtatcattgaggaagtttcctgtggatcgtctccgaaaatgaacgacgcagacgtctcaaagcaaatccagcagatggttcggttcatccgccaggaagctgaggaaaaagccaatgagatctctgtctccgccgaagaggaattcaatatcgagaagctgcagttagtcgaagccgacaagaagaagaccaggcaagagtacgaacgcaaagaacgccaagtcgaaattcgcaagatgattgactactcaatgcaactgaatgcttctcggatccaagttcttcaagctcaagatga

SEQ ID NO: 274616 - DNA, 410 bp, Glycine max
ggaggcaatagtagcagcaattcacactggtctttgcttctcgttactcatttctcacctaactttctattcttctcagtctcagatcagaaccttagccatggcagcgttccagaagatcaaggtcgccaaccccatcgtcgagatggacggagatgaaatgactagggttatctggaagtcaatcaaggacaagctcattttgcccttcttggagttggacatcaagtattatgacttaggccttccttaccgtgatgagaccgatgataaagttacaattgaaagtgcggaagcaactctcaagtataatgtggcaattaagtgcgcaactattactccagatgaagctcgggtttggtgaaggagtttggtctgaagtcaatgtggaagagtccaaatgggacaat

SEQ ID NO: 274617 - DNA, 341 bp, Glycine max
gacggctaaaaactaaaaagcatccggggactcaaatcatcatggctggcacggatgcattcttgaatctgatcatcatgtatttcagtgaatcaatacaagcaagtcactgatcttaaactactattcacaaacatgccctggtgtggaatgcattgctgccaaggcagtgaaggatgccactgctagggacaaaacttgtccaactgcacttctgcgaatgcactttcatgacttgttcgttcgggggtgtgatgcctctgggctgctaaattcaaaaggaagcaccctagcagaaaaagatgggccaccaaatgattctttgcatgcattctatgtca

SEQ ID NO: 274618 - DNA, 387 bp, Glycine max
gaatatggagcgtgtgactcatgctgtaatggtggggtgatgggaacgcatttgagtacatactgtagtctgggggagtacagaaagaaaaggactatccatacaccgggagagatggcacctgcaaatttgacaaaaccaaagttgcggctactgtatctaattacagtgtggtttcccttgatgaagaacaaattgctgcaaacctagtaaagaatggccctcttgcagttgctatcaatgcagtttttatgcagacatatgttggtggcgtctcatgcccatacatctgtgggaagcatttggatcatggggttcttctagttggttatggtgaaggtgcatatgcttccatgcgttttaagaacacaccttactggatcatta

SEQ ID NO: 274619 - DNA, 411 bp, Glycine max
ggaaaagaggagaatgtgaagaaggctcacgaagcccttttggtaagagccaaggccaactcagaggcaactctgggaacctacaagggtaactcaaagcttgctgatggtgcctcagagagcctccatgttgaggactacaagtactgatcaatctaagtgcgggtaggaatcggtattttatgggtacaaccgaattttcttgataatgagtattgtgcttcgactcttcccagaataataatcgtttggaattttgctttttgttattcctagtgttccttcatatcaattttagtaattcggtgtattggtcaaacctgtgcaaacaggggaagggaatttgggtaactttggtttcttgatagacaccaccaccttgctgttaacgaggctttgtgcttattttac

SEQ ID NO: 274620 - DNA, 424 bp, Glycine max
gaaggtaggaaacccataaatttattctagtaatacatgggtgggttttgtttgccttgtgtgtatctttctattgacgagaataatggaatgttcccaattctctgtttttttgcttttgtccatttttgtgggaatttgtttagcttctactgaggaacaggaaagggacaggattgccaagctgccaggacaaccagaaaatgtgctatttgcacactactcaggctatgtgactgtgaatgaagaagctgggagagcattgttctattggctggttgagacaccagctagtattgaaccaagttcaagaccactagtgttgtggctcaatggtggacctggatgctcctctattggttatggagcagctgaagaaattggcccttttagaattaattctgatgggaattcactttactcc

SEQ ID NO: 274621 - DNA, 409 bp, Glycine max
gaggggcatgatatgattatcttggctggtgctgagtatgggagtggaagctctcgtgattgggctgcaaaggggccaatgctactgggcgtgaaagctgtcataacaaaaagttttgaaaggattcaccgaagtaatttggtgggaatgggtatcattccattgtgttttaagcccggggatgatgctgattctcttggattaactggccatgaacgttacaccattgatctaccaagcaatgtgaatgaaatacgacccggccaagatgtcacagtggtgacagatgccgggaaatcatttgtatctacactgagatttgatacagaggttgaactagcttacttcaaccatggaggcatcttacaatatgtcatcagaaacatggtcaatgctaaacattgaatca

SEQ ID NO: 274622 - DNA, 383 bp, Glycine max
caggtgtgagcttgagttatagagcgaagagaatggctcccaagggttgaatccttttggcttagatattcttcttatcaccttcactgagtcgttgtcttgctgtagatattgttctataaatcatcttttacaaggaatcttgctctttcatactcgtcttcagcttccttcaagatcagttttacttcattcttcatatgttcactgcttattaatgctttaacagcttttcctgatcttgaacttccacaaacaacaatcttgactacacggtggactccagttacatattttgagaagaaaatgtgcttgatgtttgtgttcggtgaagatgagaaggtggtgtctaggcagccagcaatttccccgtttgccttttc

SEQ ID NO: 274623 - DNA, 406 bp, Glycine max
gactacaacattgtttaatgtactatgggggcgcttaggctatgctgcatggggaaatgatgcaccatctaatttcctcaaaggattcggcttctatgagccctttcggctaatagactttgccaatgtctgcatagcagtgcacttagttggggcataccaggtctttgtccaacctatatttgggttggtggaaaagtggaccaaagaaaattggacagaaagccaatttataaatggcgagcatactttgaaccatcctctatgtggaagctacaatgtgaacttctttagggtaatgtggaggactgcatatgtgattatcacttgccgtgtaactatggtaacttcccatttttttcccttaaatgacctttttggccctttattggtagcactctttttt

SEQ ID NO: 274624 - DNA, 326 bp, Glycine max
ggagtgaggagactgagaaaacagaggataacaggatggatgacacagtttctgcgttgaggtctttgatggtttctcactctccgccgctggatgccttagtggtgccctctgaagattatcacctgagcgaatatgtgtctgcacgagacaagcgccgcgaattcgtttccggcttcactggaagtgccggcttggcacttataacaaagaatgaagcactgctgtggacggatggacggtattttttgcaggctgagaaagaacttagtgctgggtagaagctaatgcgaattggtgaagatcctgctgtagatatctggatg

SEQ ID NO: 274625 - DNA, 396 bp, Glycine max
ggttctgagaattcgaatctaggatttgtttgagcgttcgcgaaggatcatggtggggttcagaaacagatacatggttatggaggtttttctgaaccctaatagggacaaaggtggggatgattctgttatagttacacagtttaatgtctccaaagctgtaagagacagcatattggtgaattttggggagtgtggtttggcttcgtcattgggatcgtttcaggttaagtatgtgaatccaatcactaatgtgtgtataattagggcttcaagggaacagtatcagaaagtatggtccgccattacaatggtcacaaatattggaaactgcccggtcatgtttaacttgctgggaaatttttatcttgaagtataagggcttgtaaaaatgct

SEQ ID NO: 274626 - DNA, 433 bp, Glycine max
gggggatgggatatcagtaacttgaacctggcagatgccatggccagggccaaggtgtttgatatcgacctgcagaaacagttgaggccttacatggaatctatggttccactccccggaatctatgaccccgatttcattgctgccaaccaaggagaccgtgccaacaacgtgatcaagggcacaaagaaagaacaagttcaacaaatcatcaaagacattaaggagtttaaggaaagcactaaggttgacaaggtggttgtcctgtggacagccaacacatagaggtacagcaacctagttgtgggactaaacgacaccatggaaaacctctttgcttccttggacaggaacgaggctttttgtagatttccccttccaccttgtatgccattgcttgtgtaatggaaaatgttcctttcatcaatggaag

SEQ ID NO: 274627 - DNA, 423 bp, Glycine max
gagagagttgtgggcaactggttggttgcatgatcggatacgcgttgtggtttcaagtttcttcgtgaaggtgctgcagcttccttggagatggggaatgaagtatttctgggacacccttttggatgcagatcttgagagtgatgctcttggttggcagtacatatctggcactctccctgatggtcgtgaacttgaccgaatagataatccacagtttgaggggtacaaatgtgacccaaatggagaatatgtgcgacgatggcttcctgaacttgctagattaccaactgaatggatacaccatccatggaatgcaccggagtctgtactccaagctgctggaattgaacttggtttttccaaaattatcctcttcccattgggggaatagattcgcagaagttagacttcaagaagcac

SEQ ID NO: 274628 - DNA, 327 bp, Glycine max
tgtggtattcgattgaactgagatgtccaagcgactgctaggcatagcggaagaggaaggtcaaagcaacgtcactttgttaggttcttcctcagccaccatggaacgtgtgtgcctgaatagctcaaatctgaacgagcgcaactacatggggatatctgatagatcatctgtggacagcttctcgccgaccttctcagatgagactaatagcaatctgaacctgaaggctactgagctcagactagtgcttccggagtcgcaatctctcgaacgagattcagatctttgcttgagacgttcgattcagtgtgatgaaaagccact

SEQ ID NO: 274629 - DNA, 386 bp, Glycine max
  unsure (1)..(386): unsure at all n locations
caccaaaaatatgagcattcccaactaaagggcaatgaaaataagaacatggatgccgtaatggaaaacatacaaccacaggagtctgaataccaggatggcaaggatgaaccaaggaatgtggttgtagcaggggaattcgacaccagtactgtgcagttcataaagaatgaagatctagaagagttgcgagagctgggttctggtacgtttgggactgtgtaccatggaaaatggagaggatcggatgttgcaattaaaagaataaagaaaagcttgttcgctggtcgatcttcagaacaagaaaagctgaccatagagttctggcgggaagctgacatactttccaagctttttttnaacatccaaatgtggtggcattttat

SEQ ID NO: 274630 - DNA, 420 bp, Glycine max
  unsure (1)..(420): unsure at all n locations
cattgctgcagatgctgcagcaacctttaaggagcgcttgacaagacgtaaatctactgtggctgaattcctttccaagaattatgaatggtttttcgcagaatataacactaagctgttggaatcttccaattatattacaaggcgtcaagctgtcaagttgttgggagatatgttacttgatcgttcaaattcagccgtaatgacaagatatgtgagctcaagagacaacttgaggattttaatgaatcttctaagagagtcaagcaagagcatacagattgaagcatttcatgttttcaagctatttgctgctaaccaacataagccagctgatatcgtcggtatatttgttgcggnaaaaacaaaagtaagatgctgagactgttggaagactttcaaattggcaaagaggatgaa

SEQ ID NO: 274631 - DNA, 358 bp, Glycine max
  unsure (1)..(358): unsure at all n locations
gggcgttggggtgattcctgtaatccatcatatggtgcattatctgattatcagttcatgcggccacgtgcacgggacaagaagcttgttgaagaatgggcagttcccttgaaaagcgttgaagatatatatgagaggtttagactgtattgccttggaaagttgagaagcaatccttggtcagaacttgatggtcttcagcctgagacaaagatcataaatgagcagctggagaagattaacacaaagggcttcctcaccatcaatagccagccagctgtcaatggggaaaagtcagattctcctactgtaggctgnggtggacctggtgggtatgtttatcagaaggcatatgtag

SEQ ID NO: 274632 - DNA, 428 bp, Glycine max
gttcaaaatgaggaacaggtggagctttcatttgcaagaatgtgggatcattcactagagggaaagtttgtccccttaaatattgacaaaagattcataatgctccgtggttcatcaggcttctactcttatggaatttatgagcacctaaatggatggccagattttgatattagtgaaacaaggatcactttcaagcttaggaaagacaagtttcaatacatggctatggcagacaataggcaaagggttatgccttttcctgaagatcggttagcaggaagatgccaaaccttgggctacccagaagctgtcctgctagtcaatcccaaagatccacgattgaaaggagtaaaagagtggatgacaagtatcagtattcatgtgtaaacatgaataatcgagtccatgggtggatatctttcagt

SEQ ID NO: 274633 - DNA, 436 bp, Glycine max
  unsure (1)..(436): unsure at all n locations
ggatcagaactaagaagaagacatggcatcgtccaaggtagcgacgacgacgacgacgacgaattcggatatttcgagccagcaggtatgggacggcgccaccatggagatggagtctcaagacaacatgaacatgagcatgagcctccaggatttgttgaccgaaaacgacgccgtgccaccctctcatagtcatggaaggggaaagagaaaaaccctagtggaggaacccctcgtcgtcgataaggtcactcttcagaaacagagaaggatgataaaaaacagagaatctgccgctaggtccagggaacgcaagcaggcttacacagttgagctagaatctttggttacacatnctttcgggaggaagagaatgccatcttgttaaaacaagaggccgataggaaaaggcagaggttcaatcagctcatggagt

SEQ ID NO: 274634 - DNA, 440 bp, Glycine max
gattgcagtgagtatgatgttgatggggctgaagaagagccgaacttcgatgttgaggaccggaagcccgaccatcttcatccatcaaaccttgggatggagagaatgatgggaaggatgccaattcagcaaccttctcatcccatgaagggagatgttgtcacaaacctagatttcatccggaagaggaagatttctagtgacttcaacatgatgatggatcagaaaatctacacatgcgagcatccccaatgcccttacagcgaagttcgccttggtttccatgataggtctgctagggacaatcatcaattgaattgtgcatatagaaacagttctgcagattatggtggtggtttccccccaatttccatgctactgatgttaatccagtcatattcccccagtcctttgttcaacccaacactacagctcagtct

SEQ ID NO: 274635 - DNA, 406 bp, Glycine max
gaaggcaagagtggttagggttttgggctggtgtttttgtgaagcttgagatcaggaattaatttcagtggttcagagaatggcaacggattcttcaaatggtaatggacatcaccagacaacaacaaagcagcctcctttgccatctcccctgcgcttttccaaattttttcagtccaacatgagaatcttggttactggaggagctggattcattgggtctcacttagttgacagattgatggaaaatgaaaaaaatgaggtcattgttgctgacaactacttcactggatccaaggataacctcaaaaagtggattggtcatccaagatttgagcttatccgtcatgatgtcacggagcctttattgatcgaggttgatcagatctaccatcttgcatgccct

SEQ ID NO: 274636 - DNA, 325 bp, Glycine max
gggcaaggtcaagatcggaatcaacggatttggaagaattggccgtttggttgccagagtcgctctgcaaagagacgatgttgaactcgttgccgttaacgaccctttcattaccaccgattacatgacatacatgtttaaatacgacagtgttcacggacactggaagcatcacgatgtcaccgttaaggacgagaagacccttctcttcggtgacaaggcagtcactgtttttggacacagaaaccctgaagagatcccatgggggtcaactggagctgacatcattgttgagtccaccggagttttcaccgattaggacaag

SEQ ID NO: 274637 - DNA, 267 bp, Glycine max
tgttgccctgaaaaatgatctgaaacttcatccgtattttgaacatggagaagaaaaagaaaaacctgtaggtgatttgtccccaaggttgggggatcctagccaatatcttgatggcacacgaatttacatacaaggatcattatgggatgggtttgcagatgggaagggggacttcactgatggaccttatgaaattcaaaatcccgaagatttctttacagataagttttataattatggattcaatcccgaaggtggttctgt

SEQ ID NO: 274638 - DNA, 262 bp, Glycine max
gaaggagcttaggcatgaaaagcattatagatatgttagtactcatgatgtcgggtactgggctcgaagcttcttgcaagatttggaaaggacctgtagtgatcatgtgcgacgaaggtggtgggggattggttttggattaagctttagagttgttgcgcttgatccaaacttcaagaagctctcaatggagcacataatttcagcttacaaaagcgacggcactagggcaatcctttctgactacgatggtacgctaatg

SEQ ID NO: 274639 - DNA, 204 bp, Glycine max
ggttgagtgaagagaatggctcccaagggtttaagctttctggctgtgctaatatgcgttccagcactgtcactgagtccttctgacgctgcagaagggcagaataatggccttgttatgaacttctacaatgaactatgcccttacgctgatgacattatcacatatcatgtcaagcttacatacatgcgccacaagaacact

SEQ ID NO: 274640 - DNA, 335 bp, Glycine max
  unsure (1)..(335): unsure at all n locations
atagaacaaaagaagaagattttggttgaaggaggacaagctaccatgttggacattgattttggaacttatccctttgttacttcttctagcccatcagctggtgggatatgcactggtcttggtattgctccaagggtacttggtgatttaataggagtggtgaaggcatacactacaagagttggttctggtccttttccaactgaaattttgggttcaggaggtgacctnctcagatttgctgggcaggagtttggcacaactactgggccgcctcgacggtgtggctggctcgattaagtgcactgaaatactctngtcagatcaacggg

SEQ ID NO: 274641 - DNA, 191 bp, Glycine max
gtttttcaaaagaagaagactttggttgaaggagtgcatgctaccatggaggacagtgatttcagaacttatccctttgctactgcttctatcccatcaactggtgccatatgcactcggcttgatgttgctccaaggatacttggtgatttactaggcgtggtgacggcatacactacttgagttgcatc

SEQ ID NO: 274642 - DNA, 324 bp, Glycine max
  unsure (1)..(324): unsure at all n locations
gacactaaacaagttaaaagaggagcatcactgaactaacaaagcaaccctatgtcgaaggtggtttgtgtcaccggagccagcggcgccatcggatcatgggtggtcctactcctcctccagcgtggttacaccgtccatgccaccgtccaagatatcaaggatgaaaatgagacgaaacatttggaggaaatggaaggagcaaagagtcatctncatttttttgaaatggatcttcttgacatcgactccattgccgctgccataaagggttgttcctgcgtaatccaccttgcatgtcctaacatcattggtcaagtcgaa

SEQ ID NO: 274643 - DNA, 284 bp, Glycine max
  unsure (1)..(284): unsure at all n locations
gggttcaagagtgaagagcgaagagaatggctccgagagggtttaatctttttggctgcgttatgcttctcagcactgtcactgagtcgttgtcttgcggaggataatggacttgttatgaacttctacaaggaatcatgccctcaggctgaagacatcatcaaagaacaagtcaagcttctctacaagcgccacatgaacactgctttctcctggctcagaaacatcttccatgactgtgctgntcagagttgtgatgcttcactgttgctggactccacaag

SEQ ID NO: 274644 - DNA, 299 bp, Glycine max
  unsure (1)..(299): unsure at all n locations
ggttctagtgtgtgattgtttgttgttgtaactggttcttcttcttttgttgttctgtgtttgtgtttgttttttctctcacctgaaaatgtcttgctgcggtggtaactgtggttgcggaagctcctgcaagtgcggcaacggctgcggaggctgcaagatgtacccagacttgagctacactgagtcaaccaccaccgagaccttggtcatgggagtggcacctgttaaggctcaatttgagggtgctgaaatgggtgtgcccgctgagaacgatggctgcanatgtggaccaaact

SEQ ID NO: 274645 - DNA, 284 bp, Glycine max
ggatgagagatggcagggaaggaggagaaggaggggaaacttcagaagggaatcgcggagttctacgacgagtcttctggcttatgggagaacatttggggcgaccacatgcaccatggcttttatgacccggattccactgtttcgctttcggatcatcgtcttgctcagatccgaatgatccaagagtctcttcgctttgcctctgtttctgaggagcgtaataaatggcccaagagtatagttgatgttgggtgtggcataagtggcagctccagatacct

SEQ ID NO: 274646 - DNA, 310 bp, Glycine max
  unsure (1)..(310): unsure at all n locations
ggagttgagaggatcgtgagaggggcagtagccgagattccgtgagttgcaaaaatgaagacgattctttccaccgagaccatgaacatcccggacggcgtgagcatcaaagttcatgccaaggtcatcgaagttgagggcccccgcggaaaattggtgcgagacttcaagcatttgaatctcgattttcagctcattactgacgaaaacggtaaaagaaagctgaaaatcgacgcgtggtttggttctcggaaaacatccgncgncattcgcaccgncttgagccacgtggagaatcttatcaccggcg

SEQ ID NO: 274647 - DNA, 284 bp, Glycine max
caatcaaggagctggtgcaaatggaatgtagtagatgggcgagcaaaggggtgaacataaagtacgaggtgagggacaacagagacgggtacaaagcaggggctctgaaagaaggcatgaaacgcagctacgtgaagcaatgtgactatgttgccatctttgacgccgattttcaaccggagcctgatttcctctggcgaactgtcccattcctttgcaacaaccctgaacttggtctcgttcaggcacgcttgaaagttgtgaatgccaatgaatggttgatg

SEQ ID NO: 274648 - DNA, 316 bp, Glycine max
aatcatgggtaaggaaaaggttgacatcaacattgtcgtcattggacatgccgactctgggaagtcaactaccactggtcacttgatctacaagcttggaggtattgacaagcgtgtgattgagaggttcgagaaggaggctgccgagatgaacaagaggtcattcaagtatgcctgggtgctcgacaagctcaaagctgaacgtgaaagaggaattaccattgatattgctttgtggaagtttgaaaccaccaagtactactgcacggtcattgatgctcctggacatcgggactttatcaagaacatgattact

SEQ ID NO: 274649 - DNA, 339 bp, Glycine max
  unsure (1)..(339): unsure at all n locations
gacggctaaaagctaaaaatcatcgaagtactcagattagcatggctgtcacggttgcattcttgaatttgatcatcatggtttcagtagtctctacaagcaagtcactgagcttaaactactattcaaaaacatgccctgatgtggaatgcattgttgccaaggcagtgaaggatgccactgctagggacaaaactgttccagctgcacttctgcgaatgcacttccatgactgttccgttcgggggtgtgatgcctctgtgctgctaaattcaaaaggaagcaacatagcagaaaaaagatgggcccaccaaatgnnttcttgcatgcattctatgt

SEQ ID NO: 274650 - DNA, 225 bp, Glycine max
gactacctaacactaacaatcattctaatcctcagatcttctctcttgacccaaaggctaacttctcaccctgcaccactctaatatgcgtcatgaaaagcagaaagcccaacaccgactactatacagccgaacccaaacttgctgagaacaataatggctacgccaccaaagctaccaaacccacctacaaagacaatgcaactaaacatcctaacaagccca

SEQ ID NO: 274651 - DNA, 349 bp, Glycine max
gggaccaaattatgtccctggggagaagaaggatttgtatgttaaaagtgttcaaagaactgtcatttggatgggaaaaagacaggaaactgtggaagatgtcccctgtggtaacactgttgctatggttggtttggatcagttcataacaaagaatgctactttgactaatgaaaaggaagttgatgcccatcccattcgagctatgaagttttctgtctcacctgttgttcgtgttgctgttcaatgtaaggttgcatcagatcttcccaagctttgtgaaagtcttaagcggttggccaagtcagatcctatggtttgttgtaccattgaggagtctggtgaacac

SEQ ID NO: 274652 - DNA, 446 bp, Glycine max
aaaacaaacgacggaggccgtgacatctttaagccaattgcaatcaaacaaaggttcagtttttggtgttccatttttcttcctccatctttatcttaaacataacttgaactctccattccttaaattttagctacgagctagttccgacacagacaaagcaatggtaaagaccgagttagaggtgactgttgagagcaagaacaaagacctcaagcacctggggtttgtgaggattgctgctattcaaacatttgtgattgtgtcaaatctgtatgagtacgcaaagcagaattctgggcctttgagatccgtcgtaggaacggttgagaacactgtaaccaccattctcggtcctgtctgcaacaaattcaaagacgtccctgatgatgtccttcgttttgttgacaaaaaggtggatgaagcttcccacaagttcgatgagc

SEQ ID NO: 274653 - DNA, 421 bp, Glycine max
  unsure (1)..(421): unsure at all n locations
gggcaagaacagttgttacaggaagggcaaagcttggaggaatccctgtgggagtagttgctgtagaaacacagacggtaatgcaaataatacctgctgatcctggccagcttgattctcacgagagggttgttcctcaagccgggcaagtgtggttccctgattccgcaaccaagacagcccaagcaatattggatttcaacagagaagagctcccgcttttcattcttgcaaactggagaggcttttcaggagggcaaagggaccttttcgaaggaattcttcaggctggttccactattgtggagaaccttagaacatacaagcagcccatatttgtatatatcccaatgatgggcgaactccgtggtggggcatggngtgtttgtgacagtagaatcaattcagaccacatcgaaat

SEQ ID NO: 274654 - DNA, 439 bp, Glycine max
ggacccttaaaaagagatagtaactccaactccaagtgacattggtgacaaagttagaaacaaggagaaagaaagaagatggcaggaaagaaaatcccagatgtgttgctgaattcaggacacaaaatgccagttataggcatgggaacttcagtggagaatcggtccatcaaatgagacccttgcttctatctatgttgaagccattgaggtgggttaccgtcattttgacactgctgcagtgtatggaacagaggaagccataggcctagccgtggccaaagccatagacaaaggccttataaagagtagagatgaagttttcatcacttcaaagccttggaacacagatgcacaccgtgaccttattgtcccagctcttaagaccacattaaagaagctggggacggagtatgtggatctttatctgattcattgg

SEQ ID NO: 274655 - DNA, 288 bp, Glycine max
agccccactcaaccaccgcaccactctctctgctcttcttctacctttcaagtttttaaagtattaagatggcagagacattcctatttacctcagagtcagtgaacgagggacaccctgacaagctctgcgaccaaatctgcgatgctgtcctcgacgcttgccttgaacaggacccagacagcaaggttgcctgcgaaacatgcaccaagaccaacttggtcatggtcttcggagagatcaccaccaaggccaacgttgactacgagaagatcgtgcgtgacacct

SEQ ID NO: 274656 - DNA, 410 bp, Glycine max
ggagagaaattttagtgattgatcttaaacgacaagtatggaggttacgttcaatttcaagaaaaattgcttgagaagctgtgtttgaagagcaacttcaatataaagtaaatgatttgtttttttttgttagatcagcatcaataaaaagtaaatgattgatcgattgattctagaggcatccgatacctgctcagtggtgtcaacagttgagtgttgaaatgggtgtgcccgctgagaacgatggctgcaaatgtggaccaaactgctcctgcaacccctgcacttgcaagtgaggtgttgggagagcaagcttcaagcagagatagcccttaattaggaataatgataaactattaatgtgtagctaaaaacttatgtattatgtctgtgatggttttcgtgcactc

SEQ ID NO: 274657 - DNA, 426 bp, Glycine max
  unsure (1)..(426): unsure at all n locations
ggggcgaggtagccagagagtgatacaatacagagtgcgttgttgctccttcgccacaactccctgccaacatgggtatctccagagattctatgcacaagaggcgtgccactggtggcaagaagaaggcatggaggaagaagagaaagtatgagcttggtcgccagcctgctaacactaagctgtcaagcaacaagacagtcaggaggatccgggttagaggtggaaatgtgaagtggagggcactgagattggatactggaaattactcctggggaagtgaagctgtaactcgcaagactcgtatactagatgtggtttacaatgcctcaaacaacgagcttgtgcgtactcagactcttgtaaaaagtgctattgttcangttgatgctgctccattcaaacagtggtaccttcagcactatg

SEQ ID NO: 274658 - DNA, 334 bp, Glycine max
gctgtgacagactggctgctactacatgcaccacgtccaagggcaggagtgcttgatttggctacgacgacgcttcctacttggggaaacttggatacagccctggccagaatcgtgtcgttcgtagcgctggatttgagggagacaacatgctctggacgtgcactgaccttggccggtacaagggtccaagtctggttgacgcacttgaccacattagtgagctcataaggctctttgacccggcattaacgctctcacttcatggagcgtactggattgtacgcttagaaactgtgccagtgggacatgatcagaccggagccttgtaccc

SEQ ID NO: 274659 - DNA, 428 bp, Glycine max
  unsure (1)..(428): unsure at all n locations
gccactgatttctccttcatgtttgcacggttacaccgttataatacaagccttaatccccacttttgtctctcacaatcgctctcaatctttccagattttctcccaaaccgttcaaacccgtatcgcgtgtcaaattgttcttctgattttctcattgatcgcgattatcgcatctcaaatcgaacttgaatcagtcatctttatatggaggggaatccaagaggtacaataatatacccagaggacaccatcatttgacaacacagaagaaacaggagattagggaagcctttgaattattcaatactgatggctcangtactattgatgccaaggatctgaatgttgccatgagggcccttggatttgaaatgacagaagagctcattaatcaaatgaaagcagatttggacaacgatggaagt

SEQ ID NO: 274660 - DNA, 392 bp, Glycine max
  unsure (1)..(392): unsure at all n locations
ggaaacgaccgggccgtgctggtctncgatggcttccgcataccgtgaccgcacgtcggagttccggttattattggagactctgaagaagatcggaagtccggtgcaacccgagaatgctgcttcgacctctcatggcgagtcgtattcgagatccgaattcaaccgaaaggcctcgcgtatcgggttggggatccacgagacctcgcagaagatcgcgaggctcacgcagctggcgaggaaatcgtccatgttcaacgatcccgcagtggagattcaggagctgactgttctgatcaagaacgagatcacggcgctcaactcggctctcttcgatttgcaaaccgttcagaacacggatatggctgacggcggttactcgcaggatacga

SEQ ID NO: 274661 - DNA, 423 bp, Glycine max
gattgctaggggagtgatgttgggtcctgaccagcccgggatcctgcacatgcttggcattcctccggcagcaaagtcattgaatggggttaaaatggaattggtggatgctgcattccctcttcttaaaggtgttgttgccacaactgatgtggttgaggcatgcactgtggtcaatattgccgcgatggttggtggattcccaagaaaagaacgtatggagaggaaggatgtgatgactaaaaacgtatgcatttacaagtaccatgcttcttgccttgaaaagcatgctgttgccaactgcaaagttcttgttgttgctaacccagcgaacaccaatgcattgatcttgaacgaatttgctccatctattcccgagaagaacatttcttgattgactagatcggatcacaacagggcatt

SEQ ID NO: 274662 - DNA, 400 bp, Glycine max
gggccaagcgaagggaaagggttaggcatcattcatacactgaacgaacgctcagctcagtcaggtgccggcgttcctctttcacgttctcatggaaaacgacgacgtcgacatgcacgctgccgacaccagcgaagaattggatgacatgaagaagcgcttgaaggagatggaagatgaagctgctgctttgcgagagatgcaggccaaggtcgagaaggaaatgggatctgcgcaagatcctgcaaatgcttctgcaagtcaggccaataaagaggaaatagattctcgatcagtctttgtaggcaatgtggactattcatgcactcctgaagaagtgcaacagcattttcagtcttgtggaacagtaaacagagtcaccattcgaactgataagttt

SEQ ID NO: 274663 - DNA, 374 bp, Glycine max
gttcgatggaataatttattaagtatattgcctcaccccgaaggattaggtccatttttcacaggtcagtggaatctttatgctcaaaaccccgattccaatagtcatatatttggtacccctcaaggagcaggaactgctattctaacacttctcgggggatttcatccgcaaactcaaagtttatggctgaccgatattgcacaccatcatttagctattgcatttctttttctagttgctggccatatgtatagaaccaacttcgggattggtcacagtataaaagatcttttagaagcacatactcctccggggggtagattggggcgtggacataagggtctttatgacacaatcaataattcaattca

SEQ ID NO: 274664 - DNA, 431 bp, Glycine max
ggcacaagtgagtttgttgatcgagataactagaaacagtgtgatgaaaatgaaggtccttgttttcttcgttgctacaattttggtagcatggcaatgccatgcgtacgatatgttccctctccgaatgaacactggctatggtgcccgtactccggaggtgaaatgcgcaagttggaggcttgctgtggaagcacacaacatctttggctttgagaccattcctgaagagtgcgttgaagcaacaaaggaatacatccatggcgaacaatatagatcagactccaaaacagttaaccaacaagcttacttttatgccagagacctcgaagtccatcccaaggacacatttgtgttcagtatagatggcaccgtactctctaatattccatactacaaaaaacatggatatggggtggagaaatttaact

SEQ ID NO: 274665 - DNA, 456 bp, Glycine max
acgacagaagggggaggagatgaggccttgagtgttggtgtaggtccttcgaagagcagcatgccgcatgtcatcgatgggatattgaatgcggttgaggttatgaagttgaacaattctcgcagtagtcttgatggagaggtttgtgctgatttagttatgaagagctggtcgacgaggaataatacaggtatgctgtttactttggtggctgctgtttgcattgtgttgagcttgtccatagtgattcgtaggaggttgattgggtcgagggaatctgtgtcttggtcaaggttgcctgtgaatttgtcggatgatagtgttaagaattaagattggtgatatatagttatatcaaaatataagaaaaaaagattggcaatgtttagtcagcaagtgaataagttgtgtgtaaaaatatcagcaaatctagccatctaatgttgtggccctcat

SEQ ID NO: 274666 - DNA, 421 bp, Glycine max
gagactgaagatgaggactcttctgctcccaccttcactatcacagtggatgtgaaatctggaacttctacgggtgtatcagctgctgatagagcgaaaactgttcttgctctgtcatctcctgagtccaaatcagaggatttcagaagaccgggtcatgtgtttcctcttaagtacagaaatggtggggttcttagaagagcaggtcacactgaggcctcactggacttagttgcactggctggcttgcccccaatttctgttctttcggctcttgttgatgaaaatgatggctctatgcaatctttgctcaatttaagaaagttagcatcggaatacaccttaccaattgtctcaataactgatttgataaggtatcggagaaagagagaaaaattggttgaaagaacctcagtttctc

SEQ ID NO: 274667 - DNA, 399 bp, Glycine max
ggaaacagagagtgatttcagtgagtgaccggtgttcacttgatctcatcataatcgtcagcgtcaattgaagaagatgccgatcagaaacatcgccgtcggaaggcctgaagaggcgactcaccccgacacgttgaaggcggctttggctgagttcatctcaaccttcatcttcgtgttcaccggctcaggctccggcatcgcctacaacaagctcaccgacaacggcgctgccacccctgccggcctcatctccgcctccatcgcccatgcattcgccctcttcgtcgccgtctccgtcggcgccaacatctccggcggccacgtcaaccccgccgtcaccttcggcgccttcgtcggcggcaacatcaccttcctccgcggcatcgtctacgtcat

SEQ ID NO: 274668 - DNA, 434 bp, Glycine max
ggatcctttgtattctattcttcaagattcagacacagatggctcgtacgaagcaaaccgctcgtaagtccacaggaggaaaggctcctaggaagcagcttgcaaccaaggctgtacgtaagtctgcaccaactactggtggtgtgaagaagccccaccgttatcgtcctggtaccgttgctcttcgtgagattaggaaataccagaagagtaccgagcttttgatccggaagctccccttccagaggctggttcgtgaaattgctcaggacttcaagactgatctgcgtttccagagccacgccgtgcttgcattgcaagaagctgctgaggcataccttgttgggctctttgaggacactaacctgtgtgccattcacgccaagcgtgtaaccattatgcccaaggatattcagctggcaagaaggattcgt

SEQ ID NO: 274669 - DNA, 425 bp, Glycine max
gttgagaggaatttgaggcatgcccttcagccggtttatgaagttctctttgagcgtctaaacactcatcctggagggttgaggaccttatccattcttcgagaagatatcctctctattctcacagaggaaaatattgcatcgctgagagcattggattcatatttaatggaaaaatttattacgtggcttagtcctgctgccttagagcttcaccagattacatgggatgaccctgcttctttgctggagaaaattgttgcctatgaagctgtgcaccctattagcaaccttctagatcttaagagaagactgggaattggccgtcgttgttttggatatttacatccagctattcctggtgaacccctaattttcattgaagttgcactactgaaggatgttgctcagactatacaggaagt

SEQ ID NO: 274670 - DNA, 382 bp, Glycine max
ggacttgagaaattagacagagacgaaaggagtgtgaagaacgatggaaggtgtgaaattggaggacagatggggataccaggttgcaacttcttctcaggcctgcgtttcagccatcaactcctactaccatcaggttctcatctatggtagagagaggtctgtgattctggaagcagtggcacatgacaaacactgtgtcttggccaacatcttggcagcacatttcctttactcctctggttcttctcgtgctctcacttgtcttcatgccgctaagtcccaccttgaacatgccaccttgtacgagaaactagttttcgatgccatcagttatatgctatctgaagatagagacgatgatgtagctgttgaattgcat

SEQ ID NO: 274671 - DNA, 380 bp, Glycine max
  unsure (1)..(380): unsure at all n locations
taagaaggaggagaagcaccacaagcatcttgagcaccttggggaacttggtgctgcggctgccggtgcttatgccttgcatgagaagcatgaggccaagaaagacccagagcatgctcacaggcacaaggtagaagaggagattgcggcagcagctactgttggtgctggtggttttgtcttgcatgaacaccatgagaaaaaggaagttaagaaagaagatgaggaagctcatggaaagaagcaccaccatctgtttggctgaacatgataaatattcatatataattaatattcaagctccaaagtatcaccatgcctgtgtatctctatcatatcttccatttctagtgtgcctttgagtaanatctgtgcgagct

SEQ ID NO: 274672 - DNA, 411 bp, Glycine max
ttccgaccggttgcaaaagaccaccgaagggggaaccgaaaaaaatttaagggttttgaagggcgggccggcaatccaagaatttttttttgaactttccgccaccggctcatttaacaaggcttgaccaaaccaaaaagctttttttgaacaacccaaaagtgttctcagctcgaaaaaactgggaaaggaaagaaacccggaaagggtgggaaccgcttttggaaatccattgggctttggatttaagactcccagggaagccatcgaaggaacctacattgacaagaagtgccccttcactggcaatgttttcatccgtggccgtatcttggctggaacatgtcacagtgctaagatgaacaggactattattgttaggaggaattatctccattttatcaagaagta

SEQ ID NO: 274673 - DNA, 429 bp, Glycine max
gaccgcaaatggcagcattgaacctttgccgcatggcacttcgatcctcgaagcttctctctcgcccttatcatcgtctttctgttcagttgcagatgcagatgcagccctcttctccttcactcactcgaaagatgagcatggatgcacagagtgttgcttctcagcttaatagttctggattgttgaggactcagggccttgttggagggaaatggagtgatgcttatgatggcaaaaccataaaggtttataatccagcaactggtgaatctattgtagatgttgcatgcatgggtggaagagagacaaatgatgcaatttctgcagcctatgatgcatatggatcatggagcaaaaccactgccgctgaacgaagcaaatttctgaggaaatggtatgatttgctaatggtacataaagaagaac

SEQ ID NO: 274674 - DNA, 433 bp, Glycine max
caatatgggaacactgtcagatctggaatgggttatggtacacatgggtatgattctcgggctaatgggcgggcttggttggctgttgacagcaaatacaaaactaggggaagaagtggtggctattttggctatggaaatgagaatgtagatggcttgaatgaactgaacagaggccctagggccaagggtggcaaaaaccaaaaaggttttgcaccaactattttggcagtcaaagggcagaacttgcctgcaagtttaggcaccgatgaagagaaagacaagactagtaccgttccggaccgtgatcagtataacaaagctgattttccagaagaatatactgatgctaaattttttgtcatcaagtcttacagtgaggatgatatccataagagtattaagtataacgtgtgggccagtacccaaaatg

SEQ ID NO: 274675 - DNA, 434 bp, Glycine max
ggttctagtgtgtgattgtttgttgttgtaactcgttcttcttcttttgttgttctgtgtttgtgtttgttttttctctcacctgaaaatgtcttgctgcggtggtaactgtggttgcggaagctcctgcaagtgcggcaacggctgcggaggctgcaagatgtacccagacttgagctacactgagtcaaccaccaccgagaccttggtcatgggagtggcacctgttaaggctcaatttgagggtgctgaaatgggtgtgcccgctgagaacgatggctgcaaatgtggaccaaactgctcctgcaacccctgcacttgcaagtgaggtgttgggagagcaagcttcaagcagagatagcccttaattaggaataatgataaactattaatgtgtagctaaaaacttatgtattatgtctgtgatggttttc

SEQ ID NO: 274676 - DNA, 428 bp, Glycine max
ggttctagtgtgtgattgtttgttgttgtaactcgttcttcttcttttgttgttctgtgtttgtgtttgttttttctctcacctgaaaatgtcttgctgcggtggtaactgtggttgcggaagctcctgcaagtgcggcaacggctgcggaggctgcaagatgtacccagacttgagctacactgagtcaaccaccaccgagaccttggtcatgggagtggcacctgttaaggctcaatttgagggtgctgaaatgggtgtgcccgctgagaacgatggctgcaaatgtggaccaaactgctcctgcaacccctgcacttgcaagtgaggtgttgggagagcaagcttcaagcagagatagcccttaattaagaataatgataaactattaatgtgtagctaaaaacttatgtattatgtctgtgatg

SEQ ID NO: 274677 - DNA, 433 bp, Glycine max
  unsure (1)..(433): unsure at all n locations
gacaatactaggtagcatagatattattatgggagaagttgatcgttgaaatgataatttatttaacagagatacaagatatccattttttttcagattggaatcttttaaagagatatatggaattatatgggtatttgcccctattttgattcttatattgggaattacgataagtgtactagcaattgtatggttagaaagggaaatatccgcagggatacaacaacgtattggacctgaatacacaggtccttttggagttcttcaagctctagcagacggaacaaaattacttttcaaagagaatcttattccatctagaggagatattcgtttattcagtataggaccatctatatcagtcatatcgattataataagctatttagtaattccttttggctataactntgttttatctgatctgaat

SEQ ID NO: 274678 - DNA, 433 bp, Glycine max
gaagtccaagtggtgtcctgctccaggttgtgaatatgcagttacttttgatgctggtagtactggaaattatgatgtctcttgcctctgttcatatggcttttgttggaattgcactgaggaggctcatcgcccagtggactgtggcactgtggcaaagtggattttgaagaacagtgcagagtctgaaaacatgaactggatacttgctaactcaaagccatgtcccaagtgtaagcgaccaattgaaaaaaatcatgggtgcatgcacatgacatgcactccaccctgtaaatttgaattttgctggctatgcgttggtgcatggtcagaccatggtgaaagaactggtggtttttatgcttgcaatcgttatgaagcagctaaacaagaaggagtgtatgatgatactgaaagaagaagggaaatggca

SEQ ID NO: 274679 - DNA, 427 bp, Glycine max
ggggagagaatagagaagagagatggatccagacgcgttggcaaaggcattcgtggagcactactacagcaccttcgacaccaacaggaacggcttagcgaatctctaccaggagggttccatgctcactttcgaagggcagaagatccaaggcgcttccaacatcgttgccaagctcacctccctcccttttcagcagtgccaccactcaatctccaccgtcgactgccagccctccggcgtcaacgccggcatgctcgtcttcgtcagcggaaaccttcagctcgccggcgaacagcacactctcaagttcagccagatgttccatttgataccaacacctcagggaagctattatgtgttgaatgacatattccgtttaaactatgcatgaagatgtcatatgaccggaaaggccatagaagaa

SEQ ID NO: 274680 - DNA, 398 bp, Glycine max
gaagagaaaagcgagcaatgggtgtgaactcttactgcaacagcatgaagatccaagccgagatacaaatgccacccttagaaatccacaaggttcgtttgccaccagaacgcaccaccttgcagaaactcagacacagactctctgagatcttcttcccagatgatccactccacagggaatcagctatgctaagcttgcaaacttgccacctattcttggattatattccagttttgtgcccccgttgatatattccctgcttggaagttctagacatcttggtgttggtccagtttcaattgcatctttggtcatgggatcaatgttaagcgagaccgtttcttatagtcaagatccaattctctatcttaaaatggccttcactgccactttct

SEQ ID NO: 274681 - DNA, 429 bp, Glycine max
gaaggggaccaagtaatggaggatgatcctggatgcaacagagagtgtttgctgtccaagtgtttgagttgcatagactgataaaggtccaacagctaattgctggatcaccagatattttgcttgaagatggcgcttttctgggaaagtctcctccaaagggatctactcccaaaaaacttgcacttgaatatgttgtaaaacctcggcaacaaaaccttaagcgcaaagatgattctgaaaagctaaatcataaaatggaatgttctgcagagaatgcggttggcaaaacatctctttcatctgtgaaagacggtagccacctttcaaaatgcacccctttccctggaaatcagcaccagacaaatgcggctgctgacagtgggatgggtccctggtgtttcaatcagtcaccacctgggcacccgt

SEQ ID NO: 274682 - DNA, 431 bp, Glycine max
gacactaaacaagttaaaagaagagcatcactgaactaacaaagcaaccctatgtcgaaggtggtttgtgtcaccggagccagcggcgccatcggatcatgggtggtcctactcctcctccagcgtggttacaccgtccatgccaccgtccaagatatcaaggatgaaaatgagacgaaacatttggaggaaatggaaggagcaaagagtcatctccatttttttgaaatggatcttcttgacatcgactccattgccgctgccataaagggttgttccggcgtaatccaccttgcatgtcctaacatcattggtcaagtcgaagatcccgagaaacagatattggaaccggcgataaaaggaacggttaatgtgttgaaggcggcgaaggaagcaagggtggagcgcgtggtggcgacttcatcgatttc

SEQ ID NO: 274683 - DNA, 429 bp, Glycine max
  unsure (1)..(429): unsure at all n locations
gaacaaaggagttgtaaattaagagcatggctgcgcaagctcttgtatcatcatcatctcttaccttctcagccgaggctacaagacaaagtcttggaccaagatcactccaatctccatttggcttctcaagaaaagcctcctttcttgttaaggcagctgctactccccctgtcaagcaaggatcagacagacctttgtggtttgcatcaaagcaaagtctttcctacttggatggcagccttccgggtgactatggatttgaccctctgggactttcggaccctgaaggaacaggagggttcattgagccgaaatggctagcatatggtgagataatcaatggtcgttatgcaatgttgggtgcagttggtgcaatagcacctgaaattctaggcaaggctggtctgatccctcangagacagcac

SEQ ID NO: 274684 - DNA, 406 bp, Glycine max
  unsure (1)..(406): unsure at all n locations
agttgtaaattaaaagcatgggtgcgcaagctcttgtatcatcatcatctcttaccttctcagccgaggctacaagacaaagtcttggaccaagatcactccaatctccatttggcttctcaagaaaagcctcctttcttgttaaggcaactgctactccccctgtcaagcaaggatcagacagacctttgtggtttgcatcaaagcaaagtctttcctacttggatggcagacttccgggtgactatggatttgaccctctgggactttcggaccctgaacgaacaggagggttcattgagccgaaatggctagcatatggtgagataatcaatggtcgttatgcaatgttgggtgcagttggtgcaatagcaccttgaattctangcaaggctggtctgatccc

SEQ ID NO: 274685 - DNA, 397 bp, Glycine max
  unsure (1)..(397): unsure at all n locations
gatcaaggaaatttttcgaactgatggcgaacagttcctcaagtatccaccacctaaagtgatgcaggtggataagtctgcatggatgactgatgaagaatttgcaagagaaacgattgctggtttaaatccaaatgtcattaagattatagaggagttcccactaagtagcaagctagatactcaagcctatggtgatcatacctgtataatagcaaaagaacatttggagcctaacttaggtgggctcactgttgagcaggctatccaaaacaagaagttgttcatcttagatcaccatgactatctcattccttatttgaggaaaataaatgcaaataccacaaagacttatgctacangaaccatatttttctttgaagatgatggaactttg

SEQ ID NO: 274686 - DNA, 423 bp, Glycine max
aatgatgaagtagatggaaaaccaggtgcagctgcaatctttgtgaaggtcagcatggatggggctccctatctgaggaaggtagatctaacaaattatacaacgtaccgggaactgtcttctgcacttgagaaaatgttcagctgtttcactctaggtcaatgtggttcccatggagctccaggaagagaaatgttgagtgagagcaagctgaaggacctcctgcacggttcggaatatgtactcacttatgaagataaagatggtgactggatgcttgttggagatgtaccatgggatatgttcatcgacacatgcaaacgactgaaaatcatgaagggttctgatgctattggcttagctcccagggccatggaaaaatccaggagcaggtgctagttggtattggaactgatgacttcg

SEQ ID NO: 274687 - DNA, 433 bp, Glycine max
  unsure (1)..(433): unsure at all n locations
ggaagagaagaggctatttgcgttttccactttgttttgtcgtcgttttcattcagagacggatcaaaacggcatgtggtggccgtgtgggagaagtgggggttcttccttttcatcttcttccactgccgaacaagttactgaaggaatcgatggcactggcctcaccgctattgttacaggggcatccagtggtattggtgctgagactacccgtgttcttgccatgcgtggtgttcatgtaattatgggtgtgagaaatgtggtagctgcaaaagttgttatggaagcaatacttaaagagattcccaacgctaaagttgatgctatggagttagaccttagttcaatgatatctgttagaaaatttgcattagagttcatttcatctggtcttccattaaacattctcatgntagagtataataactat

SEQ ID NO: 274688 - DNA, 422 bp, Glycine max
ggttctagtgtgtgattgtttgttgttgtaactcgttcttcttcttttgttgttctgtgtttgtgtttgttttttctctcacctgaaaatgtcttgctgcggtggtaactgtggttgcggaagctcctgcaagtgtggcaacggctgcggaggctgcaagatgtacccagacttgagctacactgagtcaaccaccaccgagaccttggtcatgggagtggcacctgttaaggctcaatttgagggtgctgaaatgggtgtgcccgctgagaacgatggctgcaaatgtggaccaaactgctcctgcaacccctgcacttgcaagtgaggtgttgggagagcaagcttcaagcagagatagcccttaattaggaataatgataaactattaatgtgtagctaaaaacttatgtattatgtct

SEQ ID NO: 274689 - DNA, 421 bp, Glycine max
ggttctagtgtgtgattgtttgttgttgtaactcgttcttcttcttttgttgttctgtgtttgcgtttgttttttctctcacctgaaaatgtcttgctgcggtggtaactgtggttgcggaagctcctgcaagtgcggcaaccgctgcggaggctgcaagatgtacccagacttgagctacactgagtcaaccaccaccgagaccttggtcatgggagtggcacctgttaaggctcaatttgagggcgctgaaatgggtgtgcccgctgagaacgatggctgcaaatgtggaccaaactgctcctgtaacccctgcacttgcaagtgaagtgttgggagagcaagcttcaagcatagatagcccttaattaggaataatgataaactattaatgtgtagctcagaacttatgtattatgtc

SEQ ID NO: 274690 - DNA, 435 bp, Glycine max
gtggtgaaatggagcaaaagtacaatatggtagagcatgacttgaaagatgaagaagatgtagaggatggagaaaaccttgcccctggttcatatgagattctacaattagaaaaagaagaaatccttgctcctcatacccatttctgtacaatttgtgggaaggggttcaagagagatgcaaatcttcgaatgcacatgcgaggccatggtgacgagtacaaaaccccagcagcgcttgccaaaccgcacaaagaatctgcatcaccaaagcctatcaagaggtattcctgcccctatcctggctgcaagcgcaacaaggatcacaagaagttccagcctctgaagacgatcttatgtgtcaaaaaccattacaaaaggacgcattgtgacaagagttacacttgcagtaggtgcaacaccaagaagttctcag

SEQ ID NO: 274691 - DNA, 421 bp, Glycine max
ttaaggggcctcacgatctgaggaagacaccgggcttctctccacgcccttcttgggtaaccgtctgaagtgcagcaatggcagatggattgcattcgcagcatccatcggtagttcagaagttatctggacagtcttatcttgtgtccaggcttgctcctaatcactccagaaactgttctaccactggtagttacttcaatggaggtttgcagtcttcaggtttggttccagtcacggcacacgcgccggctgagaaaggggtgtctggatttttgttggatttcctgatgggcggagtgtcggcggctgtgtccaagacagctgcggctccaatcgaacgagttaagttgctcatccaaaaccaggatgaaatgatcaagagtggtcggttgtctgaaccatacaaaggaattggcga

SEQ ID NO: 274692 - DNA, 434 bp, Glycine max
ggtgaatgtgaggagagaagagcctgaatattagaatcggatacccttaaagaagcggagataggagtgtgcgcctccaaacccaaggggcttcggaggggctcttcatcggaggcggtgctatattcccctccggattcccccaccatgaagagcctcttcaagcccaagccccgcactccttccgatatcgtcaaacaaacgcgagatcttcttctccgtctcacctcccgagatgacgataacatgcccgacttgaccaaaaacctcagggacttaaagtcaatcctctatggtaacagtgaatccgaacccgtccccgaagcttgtgcacagctcactcaggaattcttcgccgacaacaccttacgcctccttatccaatatcttcccaaactcaacttggaggctagaaaagatgccactcagattgt

SEQ ID NO: 274693 - DNA, 391 bp, Glycine max
ggagcagagccgatgtggtagagcagttcctcccagaccacaatgaatccatttctgcagttcttgacaagtttggtgccatgggaattgacacccccggcgtagttgcattgcttggagcacacagtgttggtcgaacccattgtgtgaagttggtgcaccgtttgtacccagagattgatccagctctgaaccctgaccacgtccctcacattctgaagaagtgccctgatgccattccagaccctaaggccgtgcagtacgtgagaaacgaccgtggcacccccatgattctagacaacaattactacagaaatatattggacaacaagggcttgttgatagtggatcaccaactagccaatgacaagaggaccaagccttatgtgaa

SEQ ID NO: 274694 - DNA, 387 bp, Glycine max
gacgtctaacagctaaatatcatcaaagtactcagattagcatggctgtcatggttgcattcttgaatttgatcatcatcttttcagtagtctctacaacaggcaagtcactgagcttaaactactatgcaaaaacatgccctaatgtggagttcattgctgccaaggcagtaaaggatgccactgctagggacataactgttccagcagcaattctgcgaatgcacttccatgattgtttcgctcgggggtgtgacgcctctgtgctgctaaattcaaaaggaaacatcatagcagaaaaagacgctccaccaaatgtttctttgcatgcattctatgtcattgatgcagcacagaaagcactagaagcttcatgccctggtgtgg

SEQ ID NO: 274695 - DNA, 294 bp, Glycine max
agctccgaaatccctcaagaaactaccttcacaaatgttgaacagacccagaagcctcttgaatcatgctaaagaacgactcctacacaaggtgaccaaccaaaaaccaattcaaaccatagacattgctgcccccaactccccacatatattcagtcaaaacagaaacgggctaatccacaaaaagtacatgcgccaaatgaatttaggtactactaatacaaacaactgacaacatgcatcttacaaacaatgacaacaagaacccaagcaagaatcgctgctaaccaaaca

SEQ ID NO: 274696 - DNA, 435 bp, Glycine max
gaatcaatgactattcatgattccataattgaatcaattacatactggatccaagctaaaggaatgttatggtaaaacttcgtttgaaacgatgtggtaaaaagcaacgagccggttatcgaatcgttgcaatcgatgttcgatctcgaagagagggaagagatcttcggaaagtgggtttttatgatccaataaagaatcaaacctatttaaatattcctgttattctatatttccttgaacgaggcgctcaacctacaggaactgttcaggacattttaaaaagggctggtgtttttatggaacttagctcgaatcaacaaacgaaattccattaatgaaataaaaaaaagggggtgtggatgacttgtatatagatttctaaaactcttttctcttttatcccccgctctcttggtctattcatacctaatt

SEQ ID NO: 274697 - DNA, 421 bp, Glycine max
ggaagagacagggtggtggtaaattaattgaagttgataaatctgacataatgggggtgacatggatgaaggtgcccaggagtaaccaacttggtgttcaaatcaaagatgggttgtactataagttcacgggatttcgtgaccaggatgttgtaagtttgaccaattttttccaaaacacctgtggaatatcagtagaagagaagcagctttctgttagcggacgtaattggggagaagttgatctaaatggaaatatgctggctttcacggttggttcaaagcaagcttttgaagtgtctttagcagatgtctctcaaacgcagcttcaagggaagaatgatgtgatcttggagtttcatgtggatgacacaactggagcaaatgagaaagattcactaatggagattagtttccatat

SEQ ID NO: 274698 - DNA, 397 bp, Glycine max
ggaagcataaaatgaaaacccaaagtgcttctctcctgtggctttttctctctcttgctatccttttggctagtggcactgctgcaagtgcaactccaagaagcgcagtgccaagccaccatgtttcaacattcaacagaagcctttttccttccacttttctctttggaattggttcttctgcttaccaggcagaaggagcagcaagtgtagatgggagaggaccaagcatatgggacacctacactagacagcatactgaaaagatttgggatcatagcaccggtgacatgggagctgatttttatcatcgatacaagggtgacataaaaatagcgaaagaaattgggctggactctttcagattctctatctcatggtcaagaatattcccaaa

SEQ ID NO: 274699 - DNA, 430 bp, Glycine max
ggaaagggaaaaaaaaaaaaatagcaacaaaaacaagaaaaaaggttacctctttcaattttatcccttgttgtgagcttaattcaatttctgctcacacataatggcttgcacgctcgctgattcattactcctattcaagggttcttatcagaaaccagttctgaggagagacattgctgcccggtactccccgggtatatttagtctaaacagtaatgggcttatccagaaaaggttcaggcgtcaaaggaattttgttactaggaataaggttactgtcatacatgccgtggcaattccagtacaaccagctccggtggaaagtgcggagtatagaaaacagctagctgaagactacggtttcaggcaagttggagagccgcttccagatgatgttactttaaaggatgtcatcaattcccttcct

SEQ ID NO: 274700 - DNA, 324 bp, Glycine max
ggaagcagagcgaggagaagcagaaggagcaaaagcaatggcgccgaagaagccgagaaccacgacaaggaatcctgatttggttagggggattggcaagtattcgaggtcgcagatgtaccacaagaggggcatctgggccatcaaggccaaaaacggtggcgttttgccccgccacgatcccaagcccaagcccgaggccccggcccagaagccgcccagttctaccccgcggacgatgttaagaagcccctcgtcaacaagcacaagcccaaacccgcgaaactcatggctagcattactccagggactgtgttgatcctg

SEQ ID NO: 274701 - DNA, 408 bp, Glycine max
aattcgagcggccgctttttttttttttttttttttttttttttaagatgacattagggataattttcaatagatttttgcaaaggaaattgcttgccacaataactaataagtgaacctttttcatccagaacgcactacttgcaattgttacttaaaaggatattgagaagggatgagatactactagttattattacatactagaaaggcaaaagtaactattttatgcttgcattgttttgtaaatgcctccttgtagtctccgtgatgtcctgctgttttcttctcaataaatcttctatttcatcctggtattgttgttcaatcatctctaactctattctcaactcatccccaggttcaaagaaggaggaagtactaacgggatgacaagagaaattcatc

SEQ ID NO: 274702 - DNA, 413 bp, Glycine max
gacactaaacaagttaaaagaagagcatcactgaactaacaaagcaaccctatgtcgaaggtggtttgtgtcaccggagccagcggcgccatcggatcatgggtggtcctactcctcctccagcgtggttacaccgtccatgccaccgtccaagatatcaaggatgaaaatgagacgaaacatttggaggaaatggaaggagcaaagagtcatctccatttttttgaaatggatcttcttgacatcgactccattgccgctgccataaagggttgttccggcgtaatccaccttgcatgtcctaacatcattggtcaagtcgaagatcccgagaaacagatattggaaccggcgataaaaggaacggttaatgtgttgaaggcggcgaatgaagcaggggtggagcgcgtggt

SEQ ID NO: 274703 - DNA, 432 bp, Glycine max
  unsure (1)..(432): unsure at all n locations
ggagggaagtggaagctagtagtccgtttcagcgtgtgtgatactttcctctcatcttcttcttctctctgcgataaaagcaaaacctaaaatttggtttaggcataggaatctgttgtagagttgatctacctggaatggagggagcatcgtggaatagtagtgtttgtgtggcaccgtttctgagcaagacctacgacatggttgatgatccttccaccgacttagtggtgtcgtggggcgaaaacaacaactcctttgttgtttggaacgtcccccaattcgccacagacatcttgcccaatcattttaagcacaacaacttctccagcttcgtcagacagttgaatgcttatggttttagaaaggttgacccagatcgatgggaatttgcaaatgaaggattttaagaggtgaanannacactttaaa

SEQ ID NO: 274704 - DNA, 294 bp, Glycine max
  unsure (1)..(294): unsure at all n locations
tgctttaatttgtcgtgaactataancaccggtaggggaaggagaatatgctgggtttgttctcatcgcgctgcagtagttttgggagcatgcccatgccaaggctcacgctaccaaaggttccctatgaaaatgaaaactggctatggtgagcgtattctgcacaatatcagtcacatagttgatgcataatggaatattatttatgacacgttgcatatatgtctaatcagtgaggccgaggttgactcttctaacgactgactttagggatctaaatacacatcatactct

SEQ ID NO: 274705 - DNA, 434 bp, Glycine max
  unsure (1)..(434): unsure at all n locations
ggtgtagatgtggtgcattctttaaaggtttcctgggaggacgtctataacggcacaacaaagaaactatctctttctagaaacgtattctgctcaaaatgtaaagggaaaggttcaaaaagtggaacagctggtaggtgttttggatgccaaggcactggtatgaaaattacaagaaggcagattggactaggcatgattcaacaaatgcaacatgtctgtcctgactgcagaggatctggtgaggtcattaacgagagagataaatgtcctcagtgcaaaggaaacaaaatttcccaggaaaagaaggtgctggaagtgcatgttgagaagggtatgcagcagggtcagaagattgtttttgaaggacaagctgatgaagctcctgacacaatcacaggagatatntgttttgtattgcaagtaaaggatca

SEQ ID NO: 274706 - DNA, 366 bp, Glycine max
cgacccacgcgtacggacaggtgcaaaaacactttagaacgtttgatatatttcaagcaaacattaatactggccgccgagcatttttataaccgcgcgccaaaaaaaatatctttttctaaaaacacattctcctaaaaataaaatacggaaatgctccaaaccacagaccagcatggtacaatatttcctattccaacgaactcgtatcaaaatcacaataatgctactcgtactatatctgattcaacaaaatcatcatatcagaactaactgcctataatatccaaatgtcattaactatcgaaatcaattatctcacatcatacaaaacaaaattaatcttgaaaacaaataactaaaaat

SEQ ID NO: 274707 - DNA, 351 bp, Glycine max
  unsure (1)..(351): unsure at all n locations
gggtctataaacagtagtggagagagggagagaagccaaataanaanattgaccatggcttcatcaatgaggatctcaaggctgctctctcgttcttttctttctgcttccactactcctttgttctctagaggtggaagtggtgctcttggtgcagggctcagtaaattcagcactgctgctgcaattgaagaaccaatcaaaccaccagttaaagtagaacacacccagctcttaatcgatggaaaattcgttgatgctgctactggcaaaacttttccaacgttggaccccaggacaggagatgtgatttctcatgttgctgagggtgaccatgaagatgttgatcga

SEQ ID NO: 274708 - DNA, 389 bp, Glycine max
ggcgagagagagagagaaacaaagcagcacccattgggatcctctcttctcttctttgatctccgttaccctttttgttttctcaacagagagagagagagagaatctttcgaagttcgtttgcgtgtgttgtgtggtcagtcaccgatggcagcaccacctgcgagggcacgtgccgattacgattacctcatcaagcttcttcttattggcgatagcggtgtgggaaagagttgtctgcttttgcgattttctgatggttccttcacaaccagttttatcaccaccattggcattgattttaagataagaaccattgaacttgatggcaaacgcattaagttacaaatctgggatacagctggtcaggagcgatttcgaactattac

SEQ ID NO: 274709 - DNA, 368 bp, Glycine max
gggactcatttctagtaaatggtgttgccttcaaaaagacattttcatatgctgggtttgagcaacaacccaagaagtttctcaatccaaaaatactattactaaatgttgagttggagctaaaatctgagaaagaaaatgctgaaataaggttatcagatcctgcgcaatatcagtcaatagttgatgcagaatggaatattatttatgacaagttggataaatgtgtcagcagtggtgccaaagttgttctttcacgactggctattggtgatctagctacacagtattttgcagatcgagatattttctgtgctggtcgtgtagctgaagaagatctgaaaagggttgctgctgcgactggtgga

SEQ ID NO: 274710 - DNA, 399 bp, Glycine max
gtatggcactgcgaaatatgtaatcgcaagcctggccgtggatttgaagcaactgttgaggttcttccacggcttttcaagataaagtatgaaagtggtactttggaagaactactttatgttgacatgcctcgtgaatatcataattcctctggtcagattgttctagattatgcaaaagcaatacaagaaagtgtttttgagcaacttcgtgttgttcgtgatggccaacttcgaatagttttctctccggacctgaagatatgttcttgcgaatcttgtgctcagcgccatgaagaactcattcccaggagattgttgataccacaagttagtcagcttggaacgggtgctcaaaaataccaatcttttactcaaaatgcaacacccaatgtatct

SEQ ID NO: 274711 - DNA, 385 bp, Glycine max
  unsure (1)..(385): unsure at all n locations
cgggtgaccaaagtgtgatccatccacaagtggaaaaccgatccctttcctcacagtaatgctactctaattaacactgtctatctagagtgtttgtccgatccatgacccatggcgccagcaactccaagatttgttgtgccaatagacttgaagaagaatccatgggaacaaaacgctcctctccataaccgatggcaccctcacataccgcacgtggcggctgttaataccggtgaagtcttcagggtagagatggtagattggacaggaggtgctattaaagacaacgattcagcactagacataaaatttctagacctctcaactgtccatnatcttagtgggccaatcagaattctggataatgatggggtcccagccc

SEQ ID NO: 274712 - DNA, 436 bp, Glycine max
  unsure (1)..(436): unsure at all n locations
gatattcaagaactagctgataaattggagattggtcataagttttatataattggtatgtcaatgggaggttaccctgtttggagctgcctaaaatacattccacacagattatcaggagcagccttggtggctccatttataagctattggtggccttcttatcctgaaaatctactaagagaagcatttctgatgctaccttactcagaccaatggacttttcgagtttcacattatgccccttggttgttctattggtggatgactcanaaatggttcccttcattgactttgacaaatttgttgtctcctgatgatatagagatcgtgaagagcttgtcagaactccaaaacactggccaggagaggataactcagcaaggtgaatatgaatcattacaccgagacataatgagtgcttttggaaagtggg

SEQ ID NO: 274713 - DNA, 378 bp, Glycine max
tcgacgcgtcagctgatgccagaagcgacagtaggcgtgtgaccaaagtgtgatccatccacgggtgggaaactcgacctttggcatacagcaattctactttaattaacacttcctatctagagtgtttgtccgatccatgacccattgcccccagccacctcaaaatttgcagtgccaatagacttgaataagaatccatgggaacaaaacgctactctccataaccgatggcaccctcacataccggacgtagctgcttgtaataccggagaagtcttcacggtagagatggtagattggacaagaagtgctattaaagacaacgattcatcactagacataaaatttctagacctctcaactgtccattatctt

SEQ ID NO: 274714 - DNA, 388 bp, Glycine max
ggagaggaaaagtgtgagaacgaaaatggagcattgtaactgctacatgttcacgctgagccttcttcttcttcttcttactccgccttctctctccgacgatctcggattcgattttccggcgaagaagctgataagagaccttaacctttttccttctgaagatgtcaacatcgttcctcgccactccaattctcacgccaacaaaatcgtcgagaaaccgcttaggttcccaaacttagtgccttcagactccggcatttccctcgacgacttggctcaccgcgctggctattatcttattcctcattctcatgctgccaagatgttctactttttctttgaatcaaggaacagcaagaaggatccttgtgtgatttggttgact

SEQ ID NO: 274715 - DNA, 247 bp, Glycine max
gaaggagcttaggcatgaaaggcgattatagatatgttagtactgatgatgtcgggtactgggctcgaagcttcttgcaagatttggaagggacctgtagtgatcatgtgcgacgaaggtggtgggggattggttttggattaagctttagagttgttgcgctggatccaaacttcaagaagctctcaatggagcacataatttcagcttacaagcggacggcaactagggcaatccttcttgacta

SEQ ID NO: 274716 - DNA, 282 bp, Glycine max
  unsure (1)..(282): unsure at all n locations
ttggggatggttttggagttaacacatatacgctgatcaacaaggctgggaaagcagtgtatgtgaaatttcactggaagaccactagtggtataaagtgtctattggaggaagaggccattaaggtgggaggagccaaccacagccatgccactcaagacctncatgattcaattgctgctggtaactatcctgagtggaaactgtttgttcagacaatagatcctgagcacgaagacaaatttgactttgaccctcttgatgttactaagacttggcctg

SEQ ID NO: 274717 - DNA, 356 bp, Glycine max
gggaaaaacaaagggagaatgtgcttcctgttgcagatcaagactccccctcaaattctcatctatcttatgatgaccagcgccgcacccaactcttccttaaagatcaaattcccacatggtttgcaatttctggttatgttgctattgctgccatctctactgccactctgccacacatcttccccgaactaaaatggtattacataattgtcatctacctaattgctcccaccttagcattttgcaatgcttatggttgtggactaacagattggtcccttgcttccacctatggaaagctagccatctttacaattggagcatgggcccgttcaataaacggtggaagtctc

SEQ ID NO: 274718 - DNA, 428 bp, Glycine max
ggcacaagtgagtttgttgatcgagataactagaaacagtgtgatgaaaatgaaggtccttgttttcttcgttgctacaattttggtagcatggcaatgccatgcgtacgatatgttccctctccgaatgaacactggctatggtgcccgtactccggaggtgaaatgcgcaagttggaggcttgctgtggaagcacacatcatctttggctttgagaccattcctgaagagtgcgttgaatcaacaaatgaatacatgcatggcgaacaatatagatcagactccaaaacagttaaccaacaagcttacttttatgccagagacctcgaagtccatcccaaggacacatttgtgttcagtatagatggcaccgtactctctaatattccatactacataaaacatggatatggggtggagaaattta

SEQ ID NO: 274719 - DNA, 330 bp, Glycine max
ggaagaagaagatggcattgggtgttcctgctctggccctgacatacgtggctcacgttctggcacttgttgccagcatcttggtcgtgctctgggtcctcaattttaggggtggcttggcttgggattctgataacaaggccctcatcttcaatcttcatccagttcttattgtcattggcttactagtccttgggggtgaagctattataagctacaaagcattacccctgaagaaggaagtgaagaaattgatacaccttgttttccatgccatcgcattaatccttggaatagttggaattatactgccttcaagtatcacaatga

SEQ ID NO: 274720 - DNA, 432 bp, Glycine max
gcatcttctggggaatagtgatcttcgggttcatcgtgttactgacagttcttataatctgggcaatcctaaagccttcaaaaccaaccttcatcctccaagacgtcaccgtttacggcttcaatgccaccatccccaacttcctcacctcaagttttcaggtcacgctttcctcgcgcaaccccaacgacaaaatcggaatctactacgaccgtctcaacacctacgtaacttaccggaaccagcaggtcacgtaccgaacctcaatcccaccctcgtaccaaggtcacaaggaagaggatgtgtggtccccgtttgtctacggcactaatgtccccgtcgcaccctacaacttcgttggcctcagtcaagaccagaccaacggcaacgtcctcgtcctcgtaagattgacggtaaggtacgatggaaagt

SEQ ID NO: 274721 - DNA, 411 bp, Glycine max
ggttctagtgtgtgattgtttgttgttggaactcgttcttcttcttttgttgttctgtgtttgtgtttgttttttctctcacctgaaaatgtcttgctgcggtggtaactgtggttgcggaagctcctgcaagtgctgcaacggctgcggaggctgcaagatgtacccagacttgagctacactgagtcaaccaccaccgagaccttggtcatgggagtggcacctgttaaggctcaatttgagggtgctgaaatgggtgtgcccgctgagaacgatggctgcaaatgtggaccaaactgctcctgcaacccctgcacttgcaagtgaggtgttgggagagcaagcttcaagcagagatagcccttaattaggaataatgataaactattaatgtgtaactaaaaacttat

SEQ ID NO: 274722 - DNA, 263 bp, Glycine max
gggacagtgacttcggaattcccggtgcattttacgttaagaacttcatgcaagttgagttctatctcaagtctctaactctcgaagacattccaaaccacggaaccattcacttagtatgcaactcctggggttacaactcgaaatcctaccattctgatcggattatatttgccaacaatacatatcttacaagcgcgacaccggctccacttgtcaagttccgagaagcagaattgaacaatgtaatacgggatgggact

SEQ ID NO: 274723 - DNA, 272 bp, Glycine max
gaagagagagaggaagagaacgtgggtggtggttcacatgccagtttgaaaagcattctttggcatggtgggtctgcttatgatgcatggttcagctgtgcctcaaatcaggttgcgcaggttctgctaacactgccatactctctctctcagctgggaatgctctctggcatcatattccaagtcctctatggaataatgggaagttggacagcttatctgattagcattctgtacatcgagtacaggaccatgaaagagaaagagagtgt

SEQ ID NO: 274724 - DNA, 245 bp, Glycine max
ggagactgtggtgatcagtatcagggcgatgttagggcgcttgatatggatacaatgacttggtcaaggttgaaaattcaaggctcttccccaggagtcagggcaggtcatgcggctgtgagtattggaaccaaggtctacatcattggaggggttggagataaacgttattatcacgacatatgggtcttcgatatctgcactagctcgtggactcagcttgatattcgaggtcaacaaccaca

SEQ ID NO: 274725 - DNA, 434 bp, Glycine max
gtgtttgaaaaggctgcatatgctaagaagcttgagcattttactcctgatgagatagaggacctcatgcttaatgttgggcctttgtgtgttgtcaaaatcatttatgaccattggcagcagaggaggcagaagaagggaatggctttaattcggcactttcagccccctctgtgggaaagatatcagaaacaagtgagagagtgggaactagccatgaccaagaacaatgccccttctaatggatgcctggacaaggttacaactttggagaagccggccatgtttgctttctgtttgaaacctaggggtctggaatcactgaacaagggattgaaacatcgatcccaaaagaagatttcagtctctgggaatgcaaacagtaatctagatcaggatggcttccacactttcagaagaagacagaatgcttt

SEQ ID NO: 274726 - DNA, 414 bp, Glycine max
gattggaacaacagcaacaacccaccaatgttggtggtgagaataagcagaaaaacatgggcggtgaaggaagaaacagaagggtgctgcaagatattgggaatctcgtgggtaaacaaggccatggaaatggaattaacgtgtctaaacctgtcacaaggaactttcgtgctcaactattggccaatgcacaagccgcaacagaaaagaataagaaatcaagcactgaagtgaacaacggagcagtggtggcaactgatggggttggtgttgggaattttgttcctgctagaaaggtgggagcagctaagaagcctaaagaagaacctgaagtgattgtgattagctctgatgatgaatcagacgaaaagcaagctgtgaagggaaaaaaggcaagggaaaaatctgtcatga

SEQ ID NO: 274727 - DNA, 411 bp, Glycine max
  unsure (1)..(411): unsure at all n locations
gccgctgacttgggtcaactctatgatctcttcgtgcaactcaaggtcaatcttagagttaatctcatgggatatgactactctggatatggagcatctactggcaagcctagtgaatccagcacatatgctgacatagaggcaatatatgaatgccttgaaactgagtatggagttagccaagaagatgtaatcttgtatgggcaatcagttggaagtggaccaacactgcacttggctgctaaattgccaaggttgagaggtgtggttcttcacagtggcattctttctggtcttcgagtgctctgccatgtgaagttcacatnttgctttgacatttataagaacatcaacaaaataacgaaggtcaagtgccctgtctttgtaatacatggtacagaagatgatgtt

SEQ ID NO: 274728 - DNA, 277 bp, Glycine max
ggcactcagagaggaggaagctttgagagagagagagagggaggagggagagtgttgacgctccatcaagatgggtatttctagggattccatgcacaagaggcgtgccactggtggcaagaagaaggcatggagaaagaagagaaagtatgagcttgggcgtcgggccgcaaacaccaagttatcaagcaacaaaactatccggaggattcgtgttcgaggtggcaatgttaaatggagggcattgaggttggatacccgcaattactcatggggt

SEQ ID NO: 274729 - DNA, 303 bp, Glycine max
ggaatataggattttctggttttgttgttggtgggtgtcagcgttccgcttcaacttcaaattctcagtgaaaccaattcagttcagtccaaatcccaaatccgaagtgagatttgcgatggagaggcttcagcgaatgttcgcaggtgcaggtggagctctagggcacccttccccagattccccaactctcgattcctccgagcaggtctacatctcctcactcgctctcctcaagatgctgaagcacggaaaggctggggtttccattgaagtgatgggtttgatgcttggaagattcgt

SEQ ID NO: 274730 - DNA, 308 bp, Glycine max
ggaacctgaaaatctagtttcttacaagcctctagtatactgcttcaccttctgctctagaaaattcagtgctgaaacatggcttcggctactctctctgtagccaaaccagcccttcaggcaaatgggaaaggcttctctgaattctctggcctccgaagctcatcaggcttccttcccttttctagaaaatcttcagaggatttccattctgtcattgccttccagacctatgcagttggaagcagtggaggatacaagaagggtgtgacagaagcaaaactgaaggctgccataaacgggtttgg

SEQ ID NO: 274731 - DNA, 324 bp, Glycine max
ggacgcaagctgacaagactaaaggaagattgcagggtggaaatggaatcgacagctgaaaaccctaattacccggcggtggactacaagcgaccttccatcttgtcatttactctgaggcccgtattcagagttacatccgagttcgattgtcaaagcgcactcttctatcataagagttcctgcatgttgttggacagacttgccaagttcaagttatcgatcatccacagcggttagggcgacgacatctccgaacctcaattcagctatgtctccaatcaccttagcctctactacgacctcgaagaccataatgctatc

SEQ ID NO: 274732 - DNA, 391 bp, Glycine max
gatattcaaatggttgaagcaggaaatatggtcaggtccatacaagttctgaagaatgtcactgacaatttcagtgagaagaatgttctgggacaaggaggttttggaacggtttatagaggtgaactccatgatggtacaagaattgcggtgaaaagaatggagtgtggggcaatagctgggaagggtgcggcagaattcaagtccgaaattgctgttttgactaaggttcgccaccggcatcttgtttcccttcttggttactgcttggatgggaatgagaagcttcttgtgtacgagtacatgcctcagggaacgttgagtagggcatcttttgactggccagaggaaggactagaaccactggagtggaatagaagattgacaattg

SEQ ID NO: 274733 - DNA, 303 bp, Glycine max
gaccctaatgaggtcaatgaaatctccatggctaattctcgacaaaacataaggaaattggttaaggatggtttcattatcaggaagccaactaagattcattcccgttcccgtgctcgcagaatgaaggaggccaagaggaagggacgtcactctggttatggtaagcgtaagggtacaagagaggctaggctccccaccaaaatcctttggatgaggaggatgcgtgtcctcagacgattgctccgcaagtacagggaagcaaagaagattgacaagcatatgtaccatgatatgtacatg

SEQ ID NO: 274734 - DNA, 310 bp, Glycine max
gagagagagagagaaacacagcggaagccatttggatcctctcttctcttctttgatctccgttacccttttcgctttctcaacacagagagagagagagagtctttcggagttcgtttgcgtgtgttgtgcgatcagtcaccgatggcagcaccacctgcgagggcacgtgccgattacgattacctcatcaagcttcttcttattggcgatagcggtgtcggaaagagttgtctgcttttgcgattctctgatggttccttcacaaccagttttatcaccaccattggcattgattttaagataagac

SEQ ID NO: 274735 - DNA, 361 bp, Glycine max
ggaagtgggaaagagacagaaccgaaaatggttgcgactttgagtcttccgatcatagacctctcttctccccatcgtctttccacagccaattccattcgtcaggcatgcgtggaatatggtttcttttaccttgtgaaccatggggtggacaccgattttgtgagcaaagtcttcgaccaaagttgcaagttcttctcgcttccggtccaacgcaaaatggacctggcccgcaaggaatatagaggctacactcctctctatgctgagacacttgatcctacttcactctccaaaggtgatccaaaagagacctattacattggtcctatagaagatacctctattgctcatctgaatc

SEQ ID NO: 274736 - DNA, 335 bp, Glycine max
gcacaagagcgagtgcaacatgtattgcttagattgtatgaacggtgctctctgctctctctgcctcgcttaccacaaagatcaccgtgctattcagataagaaggtcttcataccatgatgtgattagggttaatgagattcagaaggtgttggacatcacaggggtccaaacctacattatcaacagcgcaagggttgttttcttgaatgagaggcctcagccaaggcctggtaaaggtgtcaccaacacttgtgaagtctgcgagcgcagccttcttgattccttccgattctgttctcttggttgcaagattgttgggacttcaaggaact

SEQ ID NO: 274737 - DNA, 345 bp, Glycine max
  unsure (1)..(345): unsure at all n locations
ggaacctttgcattctattcattcaagattcagcaagtgcgttttggaagcagagaccgaaatacttcgagatggcccgtacaaagcaaactgctcgtaagtcaactggaggaaaagctcccaggaagcagcttgcaaccaaggctgcacgtaagtctgcaccaacaactggtggtgtgaagaagcctcatcgttatcgccctggaactgttgctcttcgtgagattaggaaataccagaagagcactgagctcctaatcaggaagcttnctttccagaggttggttcgtgaaattgcccaggatttcaagactgatctgcgtttccagagccatgctgtgcttg

SEQ ID NO: 274738 - DNA, 429 bp, Glycine max
ggaacctttgcattctattcattcaagggtcagcaagtgcgttctggaagcagagaccgaaatacttcaagatggcccgtacaaagcaaactgatcgtaagtcaactggaggaaaagctcccaggaagcaacttgcaatcaaggctgcacgtaagtgtgcaccaacaactggtggtgtgaagaagcctcatagttatagacctggaactgttgctcttcgtgagattaggaaataccagaagagcactgagatcctaatcaagaagctttctttctagaaatcgcttcgagaaattggccaggatttcaagaatgatctgcgtttacagagccatgctgtgcttgcattgtaagaggctgctgaggcataccatgtagggctctatgaggacactaacttgtgtgccattcacgccaagcgtgtgacta

SEQ ID NO: 274739 - DNA, 285 bp, Glycine max
ggagaaaaagagttctaagctttgtctgtgactggtgagagccaaaagccgaagaaagggaagatggcgctatggatggaaaagggttcagagccattaaccgaaaccgagaaggcagaccttgaagccattgctgcactcaaagagtctgcagcctttgaattcaaggaaaagggtaatcaatatgtgaagatgggcaagaagcattactctgatgccattgattactacacgagggcaattgatcagaaagccttgagtgactctgagacctctattctcttt

SEQ ID NO: 274740 - DNA, 417 bp, Glycine max
  unsure (1)..(417): unsure at all n locations
actcggtctcggaanttcccgtggtcgactccactgcgtctcgtaccgggctgctgtagaagatctatcagaagggggagtgtcaaagggctggtagttgtctccaagtccaaagaggagaagtataagtataagcgaaaggaatgggcgaatcatagagcatcgaagtggatctctggaagcagcagctctgatgaatgggcgccgttccgtagaccgaaaatagtggtgtaactttggtgccccgctttctcgatccagtggaaatgactagagaatgcttcttagggctagggatgatacgttgcgtcgtttcaatttctctcatggcacccacgactatcatcaggaaaccctcaacaatctcaagactgctatgcacaacactggtatactctgtgccgtcatgcttgacac

SEQ ID NO: 274741 - DNA, 290 bp, Glycine max
gaatgtcagaaattgtagtgaaagcgataattcgggggctagtataataactagtacgaatgatacaaatgatagtgattccactataggagaaagttctaataatctcgacgaaagtcaaaaatataagcatttgtggcttgaatgcgaaaattgttatggattaaattataaaaaattttttaaatcaaaaatgaatatttgtgaatactgtggatatcatttgaaaatgggcagttcagatagaatcgaacttttgattgattcgggtacttggaatcctatggatg

SEQ ID NO: 274742 - DNA, 303 bp, Glycine max
gggtgaagtgagtagtgagtgctgaatcgaatcgaatcgattctccgaacatggcggcgagcgatcgcacagtgttgcaattctcttcatcatcttcttcttcttcgcagatcttgtccgcgaaggtccaccctctggtcatcttcaacatctgcgattgctatgttcgacgccctgaccaagccgaccgcgtcatcggaaccctactcggctccgtccttcccgacggaaccgtcgatatccgaaattcctatgctgttcctcacaacgagtctatcgaacagggtgcattggatatagagt

SEQ ID NO: 274743 - DNA, 299 bp, Glycine max
gggagagaaagtgaacaccacactctcattcattcccacaaagacatggacttgcattgcttcttcttacgtttccacttcgcatgttttcttctcttcgctaccgccgcatgttgcttttcacacccttctctcctcggcatacaccctctagatgagaaatattacagctctgagatgatcaagtgcaaggatgaatcgaaatccttctccagagaccgtctgaatgacaatttctgtgactgccctgatggcactgatgaacctgggacttcggcttgccccaacggaaaatttta

SEQ ID NO: 274744 - DNA, 305 bp, Glycine max
gggaaaaggaaattcaagctagaaggaaccattaatgatgttaataacatgaaaaatctacttcttgataactttaaattcccaattgggtgcatacgtgtccttacagaagaacagaaggatcccaatttaattccaacaaagaagaacatactggattccttaaattggctcgtgaaggactgccagtcagaggactcattagtcttctacttctcaggacatggtttgcaacaaccagaagatcgcaaaggagatgaaattgacgggcttgatgaaactatttgtcctgttgattttttgag

SEQ ID NO: 274745 - DNA, 360 bp, Glycine max
  unsure (1)..(360): unsure at all n locations
gggaaaaaagagttggctgtctgcctatttcagactgttgttctgatgttattcaatgatgctgagaaactaagctttcaagatatcaaggactctactggtatagaggacaaggaactgagaaggactctgcaatcacttgcatgtggaaaagttcgtgtcctacaaaagttgccaaagggtagagatgtggaggatgatgactcatttgtttttaatgaagggtttacagctcctctttatcgtataaaggtgaatgcaattcagttgaaggagacagtagaggagaacacaagcaccactganagagttttccaagaccgtcaatatcaggttgatgctgctattgtgagggatatg

SEQ ID NO: 274746 - DNA, 435 bp, Glycine max
cattgcgagatcttctaaagcctggccctgcaagtgttgaaatcgatgatcaccctatgcaaattgaagaaacacagtacccgaaaaccttcttctataaagaagaccttcatccaggcagaacaatgaaagtacaattcagcaagcctccctttcaacaaccatggggtgttggtacatggttaaaggaaattaaagacactactaaagaaggatatagttctgaagagctatgcatcaagaaagaagccattgagggagaagagaagttctgtgcaaaatccttgggaacagtaattggttttgccatttcaaagctgggaaagaacattcaagtactttcaagttcctttgtcaataagcaagaccaatacactgtggaaagagtgcagaatcttggagacaaagcagtgatgtgtcataggctaaatttca

SEQ ID NO: 274747 - DNA, 252 bp, Glycine max
gagagggaaccgtggaaacttcaaccgggcaacaaggacttcttcaccagaaaccactccaccatcgtcgccttcgccatcggcaaacagtatgtttctggaaatggattccacataatcggggctcacacggatagtccttgtctcaaactcaagcctgtcaccaaggttgctaaggctgggattttggaagctgatgtccaaacctatggaggaagcttgtggcacacatggctcgatcgagacttgacc

SEQ ID NO: 274748 - DNA, 344 bp, Glycine max
gacggctaaaagctaaaaatcggcgaagtactcaaattagcatggctgtcacggttgcattcttgaatttgatcatcatgttttcagtagtctctacaagcaagtcactgagcttaaactactattcaaaaacatgccctgatgtggaatgcattgttgccaaggcagtgaaggatgccactgctagggacaaaactgttccagctgcacttctgcgaatgcacttccatgacttgttcgttcgggggtgtgatgcctctgtgctactaaattcaaaaggaagcaacaaagcagaaaaagatgggccaccaaatgtttctttgcatgcaatctatgtcattgat

SEQ ID NO: 274749 - DNA, 278 bp, Glycine max
gatgcaaagggtgagtgagagagacattttggtgcttgaacataatttggaccaagaccaacagatgatggaatccggggctcacttctgtaactcttgtggtgaacaaattggacttgatgctaatggggaggtgtttgtggcttgtcatgagtgttattttccaatttgcaaggcttggtttgaatatgaaatcaatgaggggcgtaaagtctgcttgagatgtgccactccctatgctggtaaccctgcaatgtttctattccttcaattatctt

SEQ ID NO: 274750 - DNA, 369 bp, Glycine max
gaaggaaggaaggaagagtgagcgtgaaagatgccttgggcgaggctttcagggtctccaaggctcgacgttgctattgacgtgggcaatccatttctcaatctcactgttgatggtttccttaagatcggagctgtcgcagccacgcgatcagctgctgaagatacttatcatattatccaaaaggggaatatctcaagtcatgatttcgagaaaacgttgaagaagatgtgcatagaaggtgtatattggggaactatagctggcgtttatgttggaatggaatatggtgtatagaggatccgtggcaccagagattggaagaatgccatgaatgggggtgcaagtactggggccctggtatctgca

SEQ ID NO: 274751 - DNA, 371 bp, Glycine max
gatactgcagatgttcagataaagcgctgggctgcagggaaagaaggcaatatgcgggcattgctatcaacattacaatatgttctttggccagaatgtggttggcagccagtttctctgacagatatgattacctcttcggcagttaaaaaagtttatagaaaagcaaatttatgtattcacccagataaagtccagcagaaaggggctactcttgaacagaaatacacagcggagaaggtttttgacattcttaaggaagcttacaccaagttcaatgcggaagagctttcttagatccctctgctaatgtctttgcaaaattgatagatctattagcacttgcacgattttggaatcggcctgttcgc

SEQ ID NO: 274752 - DNA, 331 bp, Glycine max
gatgttggcaagggttgtgctgctgcattgaagcaggctggtgctcgtgtcatcgtgactgagattgaccccatttgtgcccttcaggctctcatggaaggccttcaggttctgaccttggaggatgttgtttctgaggctgatatctttgtcaccaccacgggtaacaaggacatcatcatggttgaccacatgaagaaaatgaagaacaatgccattgtttgcaacattggtcactttgacaatgagatcgacatgctggggctggagaactaccccggcgtgaaacgcattaaccttaaaccccaaaccgacagatgggtctttcccg

SEQ ID NO: 274753 - DNA, 416 bp, Glycine max
ggaagagaagagaaggttacagaaaaacagacacttatctctgtttctccgtcttacggcaattgaaggaagcactatctctgcaacttccgtcacattcacatggcagcttctgcatctgctactgctgtgccatatctagacaagacagattttctaaagcttcaaaatggcagtgacattcgtggtgtggctgttgatggtgttgagggagagccagttaacctcactgaacctgttgccgaagcaataagagctgcttttgctgcatggttagtggagaaaaagaaagctgatgcttctcagcatttgagagtttctattggtcatgattcccgaatatcagccaaattattacagaatgcaatatctcgaggtcttgctggtggtggcctagaagttggccactacggatt

SEQ ID NO: 274754 - DNA, 372 bp, Glycine max
agagcaagcatctttggacacacagataacatcatctaatattggctttaagctcctccaaaagatgggatggaaaggaaagggtcttgggaaggatgaacaaggaatcattgagccaataaaatctggaattagagatccaaggctggggattggtaagcaagaagaagatgatttctttactgcagaagaaaatatccagcgaaaaaaacttgatgttgagttggaggagacagaggaacatgtgaagaaacgggaggtgttagctgaacgtgagcaaaaaattcaaactgaagtgcaagaaatccgaaaggtgttctattgtgatctctgcaacaagcaatacaaattggcaatggaaattgaagcaca

SEQ ID NO: 274755 - DNA, 338 bp, Glycine max
gactgctaaaagctaaaaatcatcgaagtactcagattagcatggctgtcacggttgcattcttgaatttgatcatcatggtttcagtagtctctacaagcaagtcactgagcttaaactactattcaaaaacatgccctgatgtggaatgcattgttgccaaggcagtgaaggatgccactgctagggacaaaactgttccagctgcacttctgcgaatgcacttccatgactggtccgttcgcgggtgtgatgcctctgtgctgctaaaattaaaagggaactacaaagcataaaaagatgggccaccaaatgtttctttgcatgcattttatgtc

SEQ ID NO: 274756 - DNA, 424 bp, Glycine max
gcacaagtgagtttgttgatcgagataactagaaacagtgtgatgaaaatgaaggtccttgttttcttcgttgctacaattttggtagcatggcaatgccatgcgtacgatatgttccctctccgaatgaacactggctatggtgcccgtactccggaggtgaaatgcgcaagttggaggctagctgtggaagcacacaacatctttggctttgagaccattcctgaagagtgcgttgaagcaacaagggaatacattcatggcgaacaatatagaatagactccaaaacagttaacccaacagcttacttttatggcaaagacctcgaagttcaatccaaagacacatttttggtcaatatagattggaccgtactctctatattccattcttcaaaaacatggatattgggtggagaaattt

SEQ ID NO: 274757 - DNA, 367 bp, Glycine max
gtgatagaatggaagtaattgagcttcctggatgtacacctgaggaaaagctccaaattgccatgcggcatttgattccaagagttttagaccagcatggattgagttctgagtttcttcagattcctgaggcaatggtgaagcttgttattcagagatgtactacggaagctggtgtgcgaaacttggagaggaatctagctgccttggctcgagctgctgcagtaagagttttagagcacgaacaagtagttccattagacagatgcatgcacggaccttgctacaccacttgtggaaaacagacttgctgatggaactcgaagtgaaatggaagtgataccaatgggtgtcaatagtcgggaca

SEQ ID NO: 274758 - DNA, 430 bp, Glycine max
gacacgcagttgtattgtagaactgaacaagggttgctctttctctttctctgtctgcttcttcactttctctcgtttcaatcgaaaaaaatcatgggcagaaaattcttcgtcggtggcaactggaaatgcaatgggaccactgaggaggtgaagaagattgttactactttaaatgaagctaaagtccctggagaagatgttgtagaagttgttgtgagccctccttttgtgttccttccttttgtaaaaagtttgctgcgccctgatttccatgtctcggcccaaaattgttgggttcgcaaaagtggtgcttatactggagaggttagtgctgaaatgctttgtaatttgggaattccttgggttattattggtcactctgaacggatgcagcttttgaatgaatcaaatgagtttgtgggagata

SEQ ID NO: 274759 - DNA, 163 bp, Glycine max
gtcattgaattgaagttattgcgcttcctggatatgcacgtgtcgaaaagctccaaggtgccatgcggcattttattccaagagttttagaccctcatggattgagacttgagtgtcttcagatttctgacgctatggtgaatcttgctattcagagatgttc

SEQ ID NO: 274760 - DNA, 281 bp, Glycine max
ggggcgaggtagccagagagtgatacaatacagagggcgttgttgctccttcgccacaactccctgccaacatgggtatctccagagattctatgcacaagaggcgtgccactggtggcaagaagaaggcatggaggaagaagagaaagtatgagcttggtcgccagcctgctaacactaagctgtcaagcaacaagacagtcaggaggatccgggttagaggtggaaatgtgaagtggaaggcactgagattggatactggaaattactcctggggaagt

SEQ ID NO: 274761 - DNA, 383 bp, Glycine max
ggtgttgaaggggttagggtttaggaagggatggaagcggcagtggtggacgtcggctctaagctcctcaaagcgggctttgcaattcctgaccagactcctgccatgataattcccactcagatgaagcaattactcgatgatggatccgtcgcagataattcactggctgacaatgtcaccgttgatcccgttgtgcgaggatttattagagattgggatgcaattgaggatttgttgcaccatgttttgtataccggcctcggatgggaaattggcaatgaaggacaaatactatttacagatccactttgtaccccaaaggcgaacaaaggacaatttgtgcaactaatggttgaaacattcaatatatcaggatttta

SEQ ID NO: 274762 - DNA, 315 bp, Glycine max
gaccaacaaagtaacgtgaaagagaaagagatggaggaaattgttccagtggtggatttccagaggctttcagaggaagaggagcgcaagaagctgagaaaaacatgtgagaaaccagggtgtttcagaatcatcaaccactcaattccactaacactcatggctgacatgaagtcagtggttaaatacttgcatgaccttcccgcggaaatcaaaatgcgcaacaaacccttcttcgtccctgagagtggctatagggcggcatcgccaacaagtcctctatacgagggcatgggaatatatgacatgcatgca

SEQ ID NO: 274763 - DNA, 327 bp, Glycine max
gattgcaagaagaacatgaaagatgtttgatctacttggatgcaagtactaggaagccattgatagcaacagcagaaaaacaacttcttgaacgtcatatacctgccattcttgataagggctttgcaatgcttatggatgggaatcgtattgaagaccttcagagaatgtactcactcttttcaagggtcaatgccctcgagtcattgaggcaggccattagttcatatatcaggagaactggtcagggcatttgtttggacgaggagaaaagataggatatggtttcatcccttttggaatttaaggcttctcttgacacaacat

SEQ ID NO: 274764 - DNA, 201 bp, Glycine max
ttgcccattggtaacattgagcattttcgcactgagaagttgggttacgctgatcttgtggaagaggtttctcttggggatgggaagattgtgaagattactgggattaaggagatggggaagaccaccactgtgcttgtacgtgggtctaatcagcttgttctcgatgaggccgagaggagtttgcacgatgctttgtgt

SEQ ID NO: 274765 - DNA, 424 bp, Glycine max
gatatgaaacaatttttgcaataagaggtaacttcatcctagtgtctcatcttgaagacgagctgtgatgaaaaaaaaatataaagaattaatacggaaggatatctgagtagtgagtattagccaaatgaattggcacatggatccccaccctatctgtgccttttcctatgtgtgtgaatttaaatgataactgaagaaaactaaggaaggaaggaagagtgagcgtgaaagatgccttgggtgaggctttcagagtctccaaggctcgacgttgctattgacatgggtaatccatttctcaatctcactgttgatggtttccttaagatcggagctgtcgcagccacgcgatcagctgctgaagatacttatcatattatccaaaagggtaactaagcatttcaaaaattctctaccccat

SEQ ID NO: 274766 - DNA, 415 bp, Glycine max
ggtgatttcattgcataatccattgactagaaatgccatattttccccccacattaactcacccaacccctctttctaaaaggcctcaaggatacactccggacttaattacgttattttagttagggtcaccgtttcgagatattctaaacttgtactgaaaaatatggagggaaaagaagaggacgtaagagttggagccaacaggtacggagagaggcagccaatagggaccgctgctcaggctaaagactacagagagccaccgtcggcgcctctcttcgaaccgggagagttgtcatcgtggtctttctatagggctggcatagcagagtttgtggccactttcttgttcctctacatcacagtgctgactgtgatgggtgtgttcaaatctaagagcaagtgttccact

SEQ ID NO: 274767 - DNA, 448 bp, Glycine max
  unsure (1)..(448): unsure at all n locations
gcccagcggccgcccacgcgcccgccacgcgnccgcgcggctggagcgcgacagaaggggagaaaagaaccaagcgacatgcttccttactaatacatcatggcagacgagacccatacaagttgatagctctgaggtgatgtccaggatcgtggtgtttttgactttctcggtaagaaaaaggatgaagaagacgagcctgatgctcaggaggaggtcatcgtcaccgagtttgaaaaagtcactgtctcagaccaaggagagaacaaggacagcctattagaaaagcttcaccgatctgacagcagctgtagctagttaagtgaggaggaaggagaagatggagagaaaaggaagaagaagaagaaggaagagaaagggctgaaagagaagatcgaggagaaaatagagggtgatcatcatcatcacaaggatgaggacacaagtg

SEQ ID NO: 274768 - DNA, 417 bp, Glycine max
ggttgaagattggcaagagacaggaacctttacatttgctttggaaagagtagaatcgtggatcttttctcggatagtggagtcagtgtggtggcaggctttgacaccctacatgcattcttccagttggggactcttcaaataaacccattgggaagctgatgggacctgctcttggtgatcacaatcaagggaacttttccatcaatctgcggagaaatgctttccaagatgcttttcaacgactctgtcctgttcgagcaggagggcacgaatgtggttgtttgcctgtattggccagaatggtcatggaacaatgcatagctagactagatgttgccatgttcaatgctcttcttcgggagtcggcccttgagatcccgactgatcctatatcagaccctattgtgaattcga

SEQ ID NO: 274769 - DNA, 423 bp, Glycine max
ggagagattggaacaccccccacgaagcaccaattatggctctgaatctttgtatctcacctaagtttaaatgggttccttccttagatagtgcttcctattctttgagaccttcacttgggtcttgttttggtaacataaacattgctagtgtgagtctaagtactactagaagtttgagtttgaggaggagtgggagtgttagtgtaagatctagtttagaaactgcggggcccacagtcacagtgggacaggtcactgaggttaacaaggacaccttctggccgatcgttaaggctgccggggataaaaccgttgtccttgacatgtacacacaatggtgtggcccttgcaaagtgatggctccaaagtttcaagaattatctgaaaagtatctggatgttgtctttctaaagcttgatt

SEQ ID NO: 274770 - DNA, 242 bp, Glycine max
ggagtgaagagtgaagagcgagagagagagagagagagaggcacttggaatccaaaaatgagagatatcatcagcattcacataggtcaggccgttatccaggttggcaactcctgctgggaactctactgcctggaacatggcatccatcccgatggcatgatgccaagtgactcctccttcggtgtaacccacgacgccttcaacacctgcttcagcgtaaccgcatccggcaagcacgt

SEQ ID NO: 274771 - DNA, 429 bp, Glycine max
ggagcatttaatgtatataatttggaaggagttgaggctgttgtatctgctgcagaggaagaacaaagtcctgctatattacagatccatccaggtgccttgaagcaaggaggaattcccttggttgcttgttgcatttctgctgcagagcaagccagtgttcccattactgttcactttgatcatggaacttcaaagcaggatcttgtggaagctcttgacctgggattcagttctgtgatggttgatggctcacatctttctttcaatgaaaatgctgcatacacaaaattcataacattactggctcacccaaaaaatatgttggttgaagctgagctaggaagattgtcagggacagaagatgatttgactgtagaagaatatgaagccagactaacagatgttactatggcatcaaaattcatt

SEQ ID NO: 274772 - DNA, 381 bp, Glycine max
gttttcggggttggttgttctctcgttgcgttgggctttgggtttcgtgtctccgtcccttctcctccttggcctccgttgtcgttttttgggcttttgccctcgctcttctcctccttgccttcctttctcctccaagttgctaggtgtcagtcagactccgaagatgtagtggaggctgctgaagaatcaagtgatatcggcattgttggtgatgatgtccaagactttggtgatgggaccttgccttctgccccaggaattgaaacaataagtgtttttccaaaaaatagtgcgagattgataacagctggagaagagacagagctgcttgttggtgttaaaaatgatggggattcaagcttgaatgttattgcgatc

SEQ ID NO: 274773 - DNA, 425 bp, Glycine max
gagagtgatcgaaaatggagataagaaaaatgttgggggttgttgtggtgacactaattatgtttaacaatggtgagagtgagagccaacacagtctcgttgccaatggccttggtgccactcctccaatgggatgatagctggggtgaaatgatccgggatgtcgatggaaatttggtagctcataaaacaaaattaatttccttctggcatcaaagctgttgcagattatgttcatgggaagggtcttaagcttggcatttattcagctgcagggtattttacttgtgcaaatgtgatgcctggttcacttggttatggagagcaagatgccaagactttcgcatcatggtatgctttcaaaagcagatatgaatgaagtttatgctgattatgcaagacctggtggttggaatggtatgaat

SEQ ID NO: 274774 - DNA, 400 bp, Glycine max
gatgtacagacagtatgtatgggattagccgcttcaatgggatcctttcttttggcaggaggagaaattaccaaacgtttagcattccctcacgcttggcgccaatgaagtcttttatttgagaatatatataaagactataccttcgccataaaaacagttaataaaaacattttataagtagtaatagcatggtattgtgaattccatatgcaaatttttgatgtttaaatcattcgattatatatagaaagagtagtatgaaaaagagggtatttacaattttatctgatctatcaggaacctagtttaattttagtgtcacagactttttgtttttttttcataccagataacttttaacaatttttattgtaattagaagaaaacatagcatatg

SEQ ID NO: 274775 - DNA, 408 bp, Glycine max
  unsure (1)..(408): unsure at all n locations
ggttctagtgtgtgattgtttgttgttgtaactcgttcttcttcttttgttgttctgtgtttgtgtttgttttttctctcacctgaaaatgtcttgctgcggtggtaactgtggttgcggaagctcctgcaagtgcggcaacggctgcggaggctgcaagatgtacccagacttgagctacactgagtcaaccaccaccgagaccttggtcatgggagtggcacctgttaaggctcaatttgagggtgctgaaatgggtgtgcccgctgagaacgatggctgcaaatgtggaccatactgctcctgcaacccctgcacttgcaagtgaggtgttgngagagcaagcttcaagcagagatagcccttaattaggaataatgattaactattaatgtgtagctaaaaact

SEQ ID NO: 274776 - DNA, 414 bp, Glycine max
gacacaccatccgttctagtctcaacttctgctcttccaactcctacaacgcttttctctgcactcatgggcaaggtcaagatcggaatcaacggatttggaagaattggccgtttggttgccagagtcgctctgcaaagagacgatgttgaactcgttgccgttaacgaccctttcattaccaccgattacatgacatacatgtttaaatacgacagtgttcacggacactggaagcatcacgatgtcaccgttaaggacgagaagacccttctcttcggtgacaaggcagtcactgtttttggacacagaaaccctgaagagatcccatgggggtcaactggagctgacatcattgttgagtccaccggagttttcaccgataaggacaaggctgccgcacatttgaagggt

SEQ ID NO: 274777 - DNA, 419 bp, Glycine max
gacacacaaaaaaaacactaactaaccaaccaactgattaacgttgcgttggtaactgtgttcactcaccttgcttcaatggcactctcaatttgcagcatgaacattatccccatagcatttagcagcgccatgtttctcattcaagtgtctgaaattcccttccttctggccaacacaaaaggtgaagatgggtcctctgagtgtgtctgccatgggatttggaacatgggcatgggggaatcagcttctgtgggggtaccaggaatccatggataatgagctccaacaaatcttcaacttggctatggacaacggcatcaatctctttgacactgctgattcttatggcacgggaaggttaaatggtcagagcgagaagcttctggggaggttcattcgagaatttcaagagcaaa

SEQ ID NO: 274778 - DNA, 396 bp, Glycine max
aggcgtgcgaacacgcgtgagggatctaacactggtactcctagctagggtgacagactgctaaatggagaaagcttagattgatgactctggatcaaaaaccaatgacactcaggtgaaactatggtgatattatgcctctgcggctaggaagagcagataagaagatattcatagctcgtgctaaatcgtatcatgggacaacattgatagcattcaggcgttatggccttacggctctgcatcaaaaagtcgatttgactgcttcgtttgtattgcgcactgactgtgcacattactggaggcatgattttccaggtgagacagtggaagaagttgcgactagattaggctataatgtggagcaggtgattctgaaagagggaccagagacta

SEQ ID NO: 274779 - DNA, 431 bp, Glycine max
cgaaaacggccacacgatgcagtctcaggctgacctcttgctggaccaagtgctacaacgcactcgtctgcactcataggcaaggtcacgatcggaatcaacggattcggaagaattgcccgtttggctgaccacaggtcggtctgcgaagagacgatgttgaactcgtagacgttgacgaccctttcattaccaccgattacatgacatacatgtttaaatacgacagtggacagggacactggaagcgtcacgatggcacggttagcgacgagaagacccttcacttcggtgacaaggcagtcactgctcttggacacagagaccctgagagagatgccatggaggtcaactggagctgacatcattgttgagtccaccggagctttcaccggtaaggacaaggctgacgcacatttgaagggtggggc

SEQ ID NO: 274780 - DNA, 429 bp, Glycine max
gggcgcaaaggggaacaagaagaagaagatggtgtccttgaagcttcagaagcggctcgccgctagcgtcctaaagtgtggcagaggcaaggtctggctcgatccaaatgaagtcaatgaaatctccatggccaattctcgacaaaacataagaaagttggttaaggatgggtttattatcaggaagccaactaagattcactctcgctctcgtgctcgtcgaatgaaggaggccaagaggaagggacgtcactctggctatggtaagcgtaagggtacaagggaggcaaggctttccaccaaaatcctttggatgaggaggatgcgtgtcctcaggcgcttgcttcgcaagtacagggaatcaaagaagattgacaagcacatgtaccacgatatgtacatgaaggtgaaaggtaatgttttcaagaa

SEQ ID NO: 274781 - DNA, 392 bp, Glycine max
gcatatgattttgatgatgagtttccggttaagaatcatcgtgaagatctagatcggaaccatgatgttgatcatgtggaaaatggggactacaatccaaagaagttgcataccattggttcaagcattctattcagctgggagcgttgctggcatggattttgaaggggacaaagaattctacagcaatgcagaatggcaagaaagagtcgagaaatggagagtcaggctagaatagagaggtcttctagacaaagaatacggaaaagaagatcagggtgaagaagatgattaccttttgggtgaagctagactaccattgtggcgcatggttccgagatctagaagcttaatcaatgcatatcgcatagtgatggtgatgaggctggtca

SEQ ID NO: 274782 - DNA, 198 bp, Glycine max
cctaaagtgtggcagaagcaatgtctggcatctatccaaataaagtcatcaaatcttcatcggagaattcttgacaaaacataataaagttggttaaagatggttttattatcaagaagccaactaagattcactctcgctctagtgctcgtcgaatgaatgatgacactaagaatgaacgtctctatggctatgctt

SEQ ID NO: 274783 - DNA, 378 bp, Glycine max
gagtgagtagtgagaatggagtttcaagggttaccggaaggttgcattgctagtatactctctcgcactacgccggcggacgtgtgtaggttttccgtcgtatcaaagattttccgttcggccgctgaatcggacgctgtgtggaaacgttttctcccttccgattaccattccatcatttcccagtctccttcgcctctcaactatccttccaagaaggagctctatctcgctctctcggatcgccctatcatcatcgatcagggtaaaaaggtaggtagcgtgctgagtgcttcgcataccttaaaaccttttctgctgatttaatttgacggttaattctatgatgtctggaacgcatagctttcaattggagaa

SEQ ID NO: 274784 - DNA, 392 bp, Glycine max
gggaaaaagaagaagagaaaaaagatgagcgacggaggaaaacgacaaggtggaagagcgttgccgccgacgccaagaggccctacgcctcctccctcctctcgccctcgcctcgaacccgtcgatcgcgaaaagacatgtccgttactgctgcgagtgttcactaagattgggagtcaccattccatggaagactttgccgtcagaggcaaagagcccaaagacgaggttcagatttacacctggaaggacgctactcttcgagaactcaccgatcttgtcaaagaagttgctccggctgcaaggagaataatcgccaaactctccttcgcctttggattccccgacaaaaactgccgtttcaaagttcaagaggtgggcaagacattatc

SEQ ID NO: 274785 - DNA, 446 bp, Glycine max
gctcacaaaagggagaggacaatggctaagcgtgcaatgcgaatggggatgttcactgagaggtatacaagcttggcatctctacctcttcatggttcacctttcaggtctcttggccttgaagctcattctgcaatgcaccgaagacacgtgccgtcctccgcggcagcactgagggctcctgatatgagagctgctgcaaaatttgagagaaaccaatttggatcactggttttcgtggaagatgatgatgttggattcttttggcctggcagtttcagacaggtagaccaacaaggagctggtgttaatgtaggacatgctcaaagttcaaatgctagtttaattccaatggtgcctacttcaccacaagcttctacatctgctgatctcacattgaagctttaagtttaaagcttaagaatgacgatacatacacaagcaaa

SEQ ID NO: 274786 - DNA, 400 bp, Glycine max
cgagtcagagagagcgagagaaaggcgcgcatgatgtcggacgaatagcatcacttcgattctgaggcggatgcaggagcgtccaagacgtattctcagctggctggtaccatgcgcaagaatggcttgacttgcgatcagatccatgccttgcagggcagtagagtgttgtacgtgaaatacaggcgagcatggacctgcaaagtggcactctgttgcaattgacattattaatgggaaagagatcgaagatgttgagcgatcatccgacaaatgtgatgttacacatgtgaatcgcactgactatgagcttattgatatctatgaagacggctacgtgagtgtgatgactgataatggacataccaaggacgatctgaagctatctactgatgaggca

SEQ ID NO: 274787 - DNA, 412 bp, Glycine max
gggaattggaattagaattgcaaaaaggaaaggggaaggaagcacggcaaggaaggagagtggatcgattcctcagcagcaccagacatttataaaagctctttcccttccctcaaatcgctcatactcttccaatcttttttttttatgtcattttttacctttctgcctcgctcaataatacaaaacaaaaaagaagaagaagaaggttttcgcgatggcatcgaaacggatcttgaaggaactcaaggatctccagaaggatcctactacctcttgcagcgccggtcctgttgctgaagacatgtttcactggcaagcaacaattatgggtcctccagacagtccttatgctggacgtgtattcctagtcactattcatttccctccagattatcccttcaagccaccc

SEQ ID NO: 274788 - DNA, 416 bp, Glycine max
ggttggcgttgatgttacaatggcacgaagcatgcagctcctacgctggctccgcaggcgatctcgacccttccaaggtcaaacaagtttcgggaaaccgagagctttcgtacgagggttttctgacggaattggaatgcgatcacttgatttccatcgccaaatcggagctcaagagatccgcggtggccgataatttgtccggcgagagcaagttgagcgaagtcagaacgagctccggcatgttcattcccaagaacaaggatctgattgttgctggtattgaagacaagatttcatcatggacctttcttccaaaagaaaatggagaaggcatacaagtattaagatatgagcacgggcagaaatatgatcctcattatgattactttgctgataaagttaatatagctcgg

SEQ ID NO: 274789 - DNA, 436 bp, Glycine max
ggttctagtgtgtgattgtttgttgttgtaactcgttcttcttcttttgttgttctgtgtttgtgtttgttttttctctcacctgaaaatgtcttgctgcggtggtaactgtggttgcggaagctcctgcaagtgcggcaacggctgcggaggctgcaagatgtacccagacttgagctacactgagtcaaccaccaccgagaccttggtcatgggagtggcacctgttaaggctcaatttgagggtgctgaaatgggtgtgcccgctgagaacgatggctgcaaatgtggaccaaactgctcctgcaacccctgcacttgcaagtgaggtgttgggagagcaagcttcaagcagagatagcccttaattaggaataatgataaactattaatgtgtagcttaaaacttatgtattatgtctgtgatggttttcgt

SEQ ID NO: 274790 - DNA, 422 bp, Glycine max
  unsure (1)..(422): unsure at all n locations
ggagtctgaaaaggttttgaaccaaacaaagaatggggataatagtagtcaatcaggttcatctaatcatttagagaaagataccaatggctctcaatcaggtgaagacagcggtgttaagagtgtttctgcttacagatcttcttcgcatcctataaccgcaccatcccctttgtctggtctgcctgaattctctcaccttggttggggccactggtttacattaggggacctggaacttgctacaaacaggtttgcagaagataacgttattggtgaaggtgggtatggaattgtttatcacggtcaattaatcaatgggaatcctgtggccattaagaagctcctcaataatttaggacaagctgaaaaggaattcanggtagaagttgaagctattggtcatgtgcggcataagaact

SEQ ID NO: 274791 - DNA, 390 bp, Glycine max
gtgtgttgtgggtggtcatgcagtggatggagtggcagagatacatagtgaaattgtaaaagatgatgattacaatgcatagttataagattgtggcccgagaagtttcaaaacacaacaaatggtgtgacaccaatgaaatggatcaggttctgcaatccagatctgagtaaaataataaccgagtggataggtactgaggatagggtcctaaatactggaaaattggccgagctacagaagtctgtagactatgaggatctacaagtgcagcggagggaagcaaagaggattaacatagataaagtagcagcattcatcatagaaaaaacagggtattctgacagccctgatgcactgattgacattcaagtcaagagaattcatgaa

SEQ ID NO: 274792 - DNA, 424 bp, Glycine max
ggagcgaagaagatattagggtttttgagtgcggtgcggcgatcctagcactctcttctgcagctttcgccgacagcttcattcaccatggctgagcaaaccgagaaggctttttttgaaacaatcaaaagtgtttctcagctcgaagaaaactgggaagggaaagagacccggaaagggtgggaaccgcttttggaaatccattgggcttggatttaagactcccagggaagccatcgaaggaacctacattggcaagaagtgccccttcactggcaatgtttccatccgtggccgtatcttggctggaacatgtcacagtgctaagatgaacaggactattattgttaggaggaattatctccattttatcaagaagtaccagaggtacgagaaaaggcactccaacattcctgctcatata

SEQ ID NO: 274793 - DNA, 402 bp, Glycine max
cggcctcaagatatggttccaaatttcgagaactttgggtcggagtgcccctgggaagaggatttgaagtatgctaaagatgtttgtaatcaggttgatgtgccgttagaagttggtcatttaaccgatgaaatactggaacaatgtggtttcttacctcattgaagagtatagtactggccgaacccctaacgctgatgttgtttgcaatacacgaataaagttaggagcattcttggatgcaattggaggcatgggttttgactatgttgcctctgggcattatgcgaatgtgatgcacgcatgtgctgatgggatggatgagccttatgttctggaactatcacaggacatggtaaaggatcaaacatactttgtttcaacctgtcacaattcgagctg

SEQ ID NO: 274794 - DNA, 369 bp, Glycine max
agtcaaaagcagagaagagtcactcagggcagcagtcactgagtgaaaactactggcaattgtctgctgatgagaagcttacctttgaaccaccgcctatagattgcacaactagcggagattgcatgtaacgcagtggtatgtattataccaggggcgctggtgacacaccacattattaacgcctatgttgctataatgatgctcgtacagagaacatcattgttggatgcactcgcattgacgagtcaagactgtgaaagatgaagactgattacgaaactgatgaatggtgggctaatgggataagtgagacgcatggtatggtactatttgtgcctaaggtaatggatcaagcattgatggtgg

SEQ ID NO: 274795 - DNA, 419 bp, Glycine max
ggcgcacccagagaggaagcttagagagagagagagagagagagagagaggagagagtattggcgcttcatcaagatgggtatttctagggattccatgcacaagaggcgtgccactggtggcaagaaaaaggcttggagaaagaagagaaagcatgagcttgggcgtcaggcagcaaacaccaagttatcaagcaacaagacaatcaggaggattcgtgttagaggtggcaatgttaaatggagggcattgaggctggatactggcaattactcatggggtagtgaagcagttactcgcaagactcgtattctagatgttgtttacaatgcctcaaacaacgagcttgtgcgaactcagaccctggtcaagagtgctattgtccaggttgatgctgctcctttcaggcagtggtacct

SEQ ID NO: 274796 - DNA, 302 bp, Glycine max
aggcattgtgagatcttctaaagcctgacgctgcaggggtttaaatcgactgatcaccctatactaaatgtacatacacagttcacttaaacctatttctataaactctatcttcatcaacattcatcagatgaatgatcagtatagcaagcctgcctatttacaacaatggcgagatacaacgtgattgaaggtaatgcaacactctactgaacacggatatacttgtgacaagctttgcatcatgacagaacccatagactgagaaaataaaggttcaacagcatacttgggaccattgc

SEQ ID NO: 274797 - DNA, 425 bp, Glycine max
gacataaatgaagctgtgccttttgttgagtggggaccaaagggaggaaagaaaacacgatctcatgctggaacattgacatttaaccgaaacagcatgtgtggtgaacctgcacgaactgttggttggcgtgaccctggttttatacacacaagtttcttaaaagaactgtggccaaattttaggtacacttacaagttggggcatatgctgtctaacggttcttatgtatggagtaagaagtattcattcaaggcatccccatatcctggacagaactctttgcaacgtgttatcatatttggtgacatgggaaaggctgagcgtgatggttcaaatgaatatgctgattatcaaccgggttctctaaacaccacagaccaacttggtaaggatttagaaaattatgacattggtttccacat

SEQ ID NO: 274798 - DNA, 425 bp, Glycine max
gggataatgattttggaattccaggagcattttacatcaaaaattttatgcaatctgaatttttcctcgtgagtgtcactcttgaagacattccaaatcatggaaccattcactttgtttgcaactcatgggtttacaatgcaaaaagttacaaaagggatcgcattttctttgctaataagacatatcttccaaatgaaactccaactccactagtgaagtacagaaaagaagaattggaaaatctaagaggggatggaaaaggagagcgcaaggaatatgataggatctatgattatgatgtctataatgatttgggtaacccagacaagagcaatgatctagctcgtcctgttcttggaaggtctagtgcctatccatatcctcgcaggggaagaactggtagaaaaccaacaacaaaagac

SEQ ID NO: 274799 - DNA, 439 bp, Glycine max
  unsure (1)..(439): unsure at all n locations
ataggaatggaggttgctgctgctgctgttggttggaaacttgatacaacaatcatattcccagaagatcaccttttacaaagactgtttactccttctcttgcccggagatatgaagaactctatcaaaagaatggagtcaaaatcttgaagggtgcttccataaaaaatttggaagctggttctaatggacatgtagctgctgtgaaacttggagatggatctcttgtggaggcagatacggtaattataggcattggagcaaaacctgctgtgactccctttgagagggtgggcctgaatacagaggttggtggtatacaagttgatggtcagtttcggacaagcactcccggaatctttgctgntggtgatgtagcagctttccctttgaagatttataatcgtatctctcgagtggagcatgtggatcatgccc

SEQ ID NO: 274800 - DNA, 403 bp, Glycine max
ggcacaagtgagtttgttgatcgagataactagaaacagtgtgatgaaaatgaaggtccttgttttcttcgttgctacaattttggtagcatggcaatgccatggcgtacgatatgttccctctgcgaatgaacactggctatggtgcccgtactccggaggtgaaatgcgcaagttggaggcttgctgaggaagcacacaacatgtttggctttgagaccattcctgaagagtgcgttgaagcaacaaaggaatacattcatggcgaacaatatagatcagactccaaaacagttaaccaacaagcttacttttatgccagagacctcgaagtccatcccaaggacacatttgtgttcagtatagatggcaccgtactctctaatattccatactacaaaaa

SEQ ID NO: 274801 - DNA, 379 bp, Glycine max
ggagacagagagaatgagtacgggagcagaagggctagtgagtagttatggtcattgatgttgcaaatcatgtccaggctatgcttccccacttgaagccatttctggggccagagagtctctcatttatgtaacgctcagtctacacagggaccggaattgagaagccggactatttggcgacagtggatgtggatccagactatgcaacttattgcaaagtcatccataggcttgctggtccttatttaggtgacgaattgcatcacacaggctggaattcatgcagctcttgccctggagaccccttagcagaccgacgatttctcatcgtacctgcactcgtatcaggtcgagtatatgcggttgatgtgaaaac

SEQ ID NO: 274802 - DNA, 422 bp, Glycine max
ggggtgaagagaaaggtgtgctatttttatgatccggaggttgggaattactattatggtcaaggtcacccaatgaagccacatcgtatacggatgacacatgctcttctagcccattatggattgctacagcacatgcaggtccacaagccatttactgctagagacagggacctttgtcgttttcatgctgatgattatgttgcattccttcgaagcataactcctgaaacacagcaggatcatctaaggcaactgaaacgctttaatgttggtgaagattgtcctgtttttgatggcctctactctttctgtcaaacttatgcagggggttcagttgggggtgctgtcaagttaaatcatgaccaatgtgatattgctgtcaactgggctggagggttgcatcatgccaagaagtgtga

SEQ ID NO: 274803 - DNA, 409 bp, Glycine max
ggggcaagctgagaagtgtgccgagagaaagaggaagaaccagtatcgtggaatccgtcagcgtccatggggaaagtgggctgctgagatccgtgacccaagaaagggggttcgtgtttggcttggaactttcagcactgctgaagaagctgcaagagcttatgatgctgaagcaaggaggatccggggcaagaaagccaaggtgaatttcccggatgagccttcaggcgctgctgcttcctcaaaacgcctcaaggtgaatccagaggctcagccaatgaaggaaaatctgaacaccgtgaagccgaaaatgaaccagatgttcaattttggtcacaatctggagggctactacagcccaatagatcaggtggaacagaaaccactggttaaccagtatgttaaccct

SEQ ID NO: 274804 - DNA, 388 bp, Glycine max
ggcagcaacagcagcattcactgaaggcactcaggggggtttgcggtttcagagattgtgacacacacatccatggccaccaataccaacgccgactcagatatgtcgcaccagctatactagaatgatgccgacatccatatgatgctagccgccgacgtacacatagtcaccaaagactgcgactttcaaaaggaacgttacatcttcaagcgcctgatcgacgggatttacattaacaatccttgggaagacatgggacatgcttcagttagctattagggatactagagcaactgaaaaccctgatgagatcatcgtacaatccttaaggccctatgatcgaagagcagatgtgaaatatgctaaggacactgaagctcatgct

SEQ ID NO: 274805 - DNA, 428 bp, Glycine max
gacagccgaagctataaggagggactaccctgaggaagatgggttgcacctaactggccttatccatgatcttggcaaggtgctgaatttgcctagttttggaggacttcctcaatgggctgtagtagggggacatattccctgttggttgcagatttgatgagtccattgttcaccacaagtattttaaggaaaatccagactacaacaatccagcatacaacactaaatatgggatttactcagagagatgtggacttaacaatgtgatgatgtcatggggacacgatgactacatgtatctagtggcaaaggagaatgatactacactgccctctgcggctttgttcattataagataccattcattctatgcattacataaagaaggagcctataagcacttgatgaatgatgaagattttgag

SEQ ID NO: 274806 - DNA, 346 bp, Glycine max
ggctttatatttgagttcaaacttatcatagccgtggccacctccaacttctctagcgctctctccggctacctagccttctttacggtgctacttaccaaggcacactctaccgataccgattctttcaaccttcaacaagttcaacccagtccaaccaaacattatgctccaaaacgatgctagcataacatacagcggggtgttacaactcaccaaagttggcagcaacggcgtgcccacctcgggatctctcggtcgtgctctttacgctgtcccaatccacatttgggacagcgaaaccgacaaggtagccagctgggctacatgctttaaattcaacatt

SEQ ID NO: 274807 - DNA, 360 bp, Glycine max
  unsure (1)..(360): unsure at all n locations
agggaaagaaagggaggaaagagtgcttctgcttcaggaaagatgactctgaggtcctatctgataataatgttgagcaatatgatcttgtcccatttagattcccatgtgaactgtgatttggatgagcttctcaaggcttcagctnttgtgttgggtaagagtggaatatggattatgtacaaagtggtgcttgaagatggacttgctttggctgtgagaagatnnggagaggagggtctcaagggttaaagagtttcaacagatgtagaagcaatatggaagttatgacattcaaatattgcaactctgagagcctattactggtctagtgatgagaagcttcacatatatgattat

SEQ ID NO: 274808 - DNA, 376 bp, Glycine max
  unsure (1)..(376): unsure at all n locations
acgacaagacgaggagtgagggtgaatatcaggcaaggttatctctcctttgacgacaagatgagcatcccaattccccatcggcagttattcatagacggagactggaaagtccccgtcctcaagaatcggattcccatcatcaacccttccacccaacacatcatcggggatatcccagcagctactaaggaagacgttgatctcgctgtcgctgccgccaaagctgccctctcccgcaacaagggcgccgattgggcctccgctttcggctccgttcgggctcgctacctccgcgccatcgctgncaagatcaccgagaaaaagcctgaactagcaaaactcgaagctattgactgtggaaaaccgctcgatg

SEQ ID NO: 274809 - DNA, 314 bp, Glycine max
gataagaaagaagatcaaaagaaaaaagagaaacaaatggcagcactgggtggctttaccgacatcaccggagcacagaacagcatcgatatcgaaaatctcgctcgctttgctgttgatgaacacaacaaaaaagagaatgcagttctggagtttgtgagggtgattagtgcaaagaaacaagtggtttctggcaccttgtactatatcactttggaggcaaatgatggtgtgacgaaaaaggtttatgaaactaaggtgttggagaaaccatggttgaacatcaaggaggttcaggaattcaagcccatcac

SEQ ID NO: 274810 - DNA, 287 bp, Glycine max
catattatacacaataaaaaaatgaagtaaatagtagaatattcaagaggccttaaaagatcaagataaagacgaaggagccgacttgatattttagcattataaccaaaaagaatagctttcggatctctattttttattatcgtcaaagaaaattagaatcataggattaaataaagaaatttcaaactttctattacacatatctgttttcgttacaagcagtatttgggtatttttgtttgagccgtacgagatgaaattctcatatacggttcttaaggggg

SEQ ID NO: 274811 - DNA, 377 bp, Glycine max
  unsure (1)..(377): unsure at all n locations
gaataagaaaatggttaatggggggacagttaacaactggttctgcataaacttttcaaggaatgttcaagatagtgttgcccgtggtttttgctatgaacttgctcagatgtgttatatatctggaatggcatttacacctgagccagtagtccccccagtcagtgctcgccctgatcaagtggaaaaggttcttaaaactcggtatcatgatgccaagaacaaactgcaaggaagagagcttgatttgctcatcgttatcttgcccgataataatggatctctttatggtgatctcaaacggatatgtgagactgacctangacttgtttcacaatgttgcttaactaagcatgtcttcaaaatgagcaagcagt

SEQ ID NO: 274812 - DNA, 419 bp, Glycine max
  unsure (1)..(419): unsure at all n locations
gaccacgcgtccgccacgcgtccgtacagtttagacacgacctctgattttcattgaccaacaccatacactggccaagtgcgcataatctaaggaagagttcttttttgatagatattgtcatcgcttcnactaagaacatcacactgaagagttccgacggcgaggccttttaggtggacgaggcggttgccgtgtagtcccacacgatcaagcacatgatcgatgacaactgcgcctacagcgaaattcctctccccaatgttaccaacatgattctcgccaaggttatctagtattgcaagaaccacgttgacgccaattgcgcttatgagaagcccactgaggatgaactcaaggcttgggactcttatttcgtcaaagtgatcaggccacactctttgatcttattctggctt

SEQ ID NO: 274813 - DNA, 387 bp, Glycine max
gaaatgtggggatgtcaatactgctaggttggtgttcgacaaaatgcctaatagagataggatttcgtggaatgccatgatttctgggtattttgaaaacggggtgtgtttggagggactgagattgtttggcatgatgatcaaatatccggttgatccagatttgatgaccatgaccagtgtgattactgcatgtgaacttctgggtgatgatagattggggaggcagattcatggttatgttctgagaacggagttcgggagagacccttcaattcataattcgttaattccaatgtactcatctgttggacttattgaggaagctgaaacagttttctctcgaacagaatgtagagatgtggtatcgtggactgcgatgatatc

SEQ ID NO: 274814 - DNA, 416 bp, Glycine max
gaatagcaattgcattcacaaagtagtggatgaagactgctttgacttcagggatttatggtctattgtattcccatctgaatcagaaaagattattgcaacagtaacaagaaaatcaaatgaggtagttcatactcaagcaaaagttatgactgatcacgatgtcatgtataagtatgtatcgaagaatgtactttttgtcgcaaatgcagcaccaaaagccagaggggaaattggaacagccaccccagaggaggcattgttggtcatctatatcattgatactgtgactggtcgcgtattgcatcgcatggcacatcatggttgccagggtcctgttcatgctgtatttagtgaaaactgggttgtctaccactattttaatctcagagcacacagatatgagatgtcagttg

SEQ ID NO: 274815 - DNA, 374 bp, Glycine max
  unsure (1)..(374): unsure at all n locations
ggagttgggtgctggaatattggggaatatttttgatggaattcagaggcctttgaaaactattgctaaaagatctggtgatgtctatattcctcgtggtgtctctgttccagcactcgacaaagatacactttgggaatttcaacctaagaaaattggtgaaggtgaccttttaactggtggagatttatatgctactggtttttgagaacagtctaatgcaacaccatattgcacttcctcctgataacatgngaaaagatacctacattgcaccacctggccaatattccttacaggatactgtattggaactngagtntcaaggtgtcaaaaagaaattcactatgctttagacttggcctgtacgtaca

SEQ ID NO: 274816 - DNA, 362 bp, Glycine max
aacagtaagattgctaaaatgattattttacatgactatccacttcatattgtggaacaccaaggtttcattgattttgttcgagcactacaaccccagttcaatccactgagctttaatgctattcaaggggattgtgtctctatgtacctcagagagaagcaaaacctattgaatcttattgatgggattcctggacgagtcaacctcaccttggacttatggacttcaaaccaaacatcggcctatgtttttgttcgagggcacttcgttgatggtgattggaacttacatcatcctatacttaatgtattcatggtaccatttcctgattctgatggttccttaaatcaaactatagt

SEQ ID NO: 274817 - DNA, 396 bp, Glycine max
gaccccaaaaaacaaaaatcaataccttagagaaaacaaaagcacagaatcgaaagaagagttcttttttgagagagattgggatggcttcgacgaagaagatcacactgaagagttcggacggcgaggccttctaggtggaggaggcggtggcggtggagtcccagacgatcaagcacatgatcgaggacaactgcgccgacagcggaattcctctccccaatgttaccagcaagattctggccaaggttatcgagtattgcaagaagcacgttgaggccaattgcgctgatgagaagcccagtgaggatgaactcaaggcttgggacgctgatttcgtcaaggttgatcaggccacactctttgatctcattctgggctgcaattacttgaata

SEQ ID NO: 274818 - DNA, 392 bp, Glycine max
  unsure (1)..(392): unsure at all n locations
ggtgatagaaaaaggaggaacgcagaccgaggcgtttccagttcgaaagggaaatgaaagtgtctttgttggtgaagggtaggtgagagaaacgaaaggggtgtgtgttgggttgaataggtatagataggatcaatgagcaacaacaacgcangaaaggtggtgtgtgtgacgggtgcttctggtttcatagcttcatggatcgtcaaattccttctccaacgtggttacactgtcagggccaccgttcgctacccaagtaatctgaaaaaggtagatcacttggttaaacttgagggcgcaaaagagaggttgcagctgtttaaggcagatctgttggaagaaggttcctttgactcttgtgtggaaggctgtcatggtgttttcatact

SEQ ID NO: 274819 - DNA, 407 bp, Glycine max
ggtgttgaatgggtggaattggaaatcgaagtgaaaagaacggttgaaagtgaaagagtaagatgctattgcaattgcgctgctctcattctcaccacaaactgacacttgcctgcagttgaagaaagaatagaggatcgtggtcgatggcgtctgctagccttggaagtggtggggtcggcagttcgaggtctgttaatggtggcttcaggggttcttccagttccgtcgattggcttggcagagagattccttgagatgaggttgagagaccacgaagacgatagagatagtgagcctgacatcattgatggtgtgggtgctgagacaggtcacgtcataagaaccagcattggtggccgaaatggtcagtctaagcagaaatgtagttatattgcagagcatgt

SEQ ID NO: 274820 - DNA, 421 bp, Glycine max
ggtggcagactcatccaaagtaccccttgattcgcttacacaacagggacgagtgttattctcggcctacggaaccattggcgtggtgggaaggggaaacgatcttgggtggtaaggatgcactgggcggtggaacatggttgggttcgacaagagacggtaggatagcgtttcttacaaattttagggaagttgagatgctttcgaatcccaagaccagaggggacttgccccttcgttttcttcagggcaataagagtcccgaggagtttgcggagcaagttgtgaaagaggcagatgagtataatggctttaaccttgtattagctgatatttgcacctccagcatggtttatgtctttaatagaccaaaccaagatcatctttctcttgcacaagttgtgttacccctggaattcac

SEQ ID NO: 274821 - DNA, 395 bp, Glycine max
ggagctagatagatatagattaggcagaacgcaaacgaatgacctttctaactaatctacagtccatcctgtaataatctccgtttcaacaccaaacaccaagcgaaacctgaattaagcctcttcttcttcatcgaatcgaaacaacctcgtccgtgctaaggaaactcaacgacagagactgcaacaatgtacgtagatcacgcgttctcgatttcggacgaggattatcatgatgggaacctcgtacaccgtcaacaacaaaccccccatcaaggagattgccctcgccgtttccctcctcgtttgcggcgtcctcggcatcgtcatcggttctctcatggcctacaaccacgtcggcggcgacactgctcacgggatcttctttgcagtac

SEQ ID NO: 274822 - DNA, 409 bp, Glycine max
  unsure (1)..(409): unsure at all n locations
ggaggttaagagaaggagtgaccgaagcgaagatgttacccacagcttccaaaggacgttcttcttcctcctcctcttcctctcgacctaacaatcccatgctgcttccctacctccgcagaatcatcaagtggcaacaaatggatattgaatatactttttggcaaatgcttcatctatgtacgtccccgaaagttgtctatcagcatactaaatatcacaaacaaaccaagaatcaatgggcacgtgatgatcctgcatttgttgtgatctgcagtcttcttttggcagttgcaactttggcttattgtgcggcgtatgaccatagtactgcacatacacttcttgttatcttctcagngttgtttttccactttatattgactggtgtatttctggcaacattttg

SEQ ID NO: 274823 - DNA, 422 bp, Glycine max
gagttaagaatgtgggtatgtgtttcagaatattttagtttgaagagagtgacaaaagctatcatcgaagcagctggccatacctgtcaggatttggatctagagtcacagcaaagaagacttcatgatctgcttcaaagaaaaagatatttgcttgttttggatgacgtgtgggatgataatcaagagaattggcagaggctgaaatctgcactagcttgtggggcaaaaggcgcttcccttttagttactactcgccttttgaaggttgtggcaatcatggggacattgcctcctcatgaattatcggtcctgtccgacaattgattgttgggaattggttaaacaccaaagccttggaccaaatgaggaagaacatgtggagctcgaggacataaggaaagagatggtaaagagtgtcg

SEQ ID NO: 274824 - DNA, 301 bp, Glycine max
gacaaatctttcgctaacactcattaattgcaagaatggcacttcgttgcttggtgatgtccctttctgttctcttcactcttggtcttgcgagagaaagccatgccagagacgaagatttttggcatgctgtttggccaaacactcccattccaagttcattgcgagatcttctaaagcctggccctgcaagtgttgaaatcgatgatcaccctatgcaaattgaagaaacacagtacccgaaaaccttcttctataaagaagaccttcatccaggcaaaacaatgaaagtacaattcag

SEQ ID NO: 274825 - DNA, 390 bp, Glycine max
ggtttgattgtgggtgcaatgcttccttactggttttctgccatgaccatgaagagtgtgggaagtgctgctctgaagatggttgaggaagtacgcaggcaattcaacaccattccaggattgatggagggaactgctaagcctgactacgccacttgtgttaagatctccactgatgcttccattaaagaaatgattccacctggtgctcttgtcatgcttacaccccttgttgttggaaatcctttttggtgtcgaaacactttctggtgtcctagctggatctttggtgtctggtgtacagattgctatctctgcatccaacaccggtggtgcttgggataatgccaagaagtacattgagggctgtgcttttgagcatgcaaggag

SEQ ID NO: 274826 - DNA, 362 bp, Glycine max
gacggctaaaagctaaaaatcatcgaagtactcaaattagcatggctgtcacggttgcattcttgaatttgatcatcatgttttcagtagtctctacaagcaagtcactgagcttaaactactattcaaaaacatgccctgatgtggaatgcattgttgccaaggcagtgaaggatgccactgctagggacaaaactgttccagctgcacttctgcgaatgcacttccatgactgtttcgttcgggggtgtgatgcctctgtgctgctaaattccaaaaggaagcaacaaagcagaaaaagatgggccaccaaatgtttctttgcatgcattctatgtcattgatgcagcgaagaaagcact

SEQ ID NO: 274827 - DNA, 315 bp, Glycine max
gaattcaaagaatgattccaaattgaaagtaggataagaacaaaggttctacatattcacaaaaaaaaactatgtatgtaggtagagacgaaaaaataaatctcgaagtaattcgtagagttcaataactattattattttcaattcggaattcttattaattactttaaaccgaataaatcttgataattgaaaaattaagtcataatttattggttgattatatcattaactatttctttattttatatttagggtacgaggaaattatcatgaatccaattatttctgctgcttctgttattgctgctgggt

SEQ ID NO: 274828 - DNA, 302 bp, Glycine max
cctgagtgcggctgaaataagactactgatcgagataactaggagcatggtgatgataaatatggtgattgttttattggttgctacaatgcatggaacatggctatggcatgcgtactatatactgacattgacaatgaacactccctatagggtctgatctaaggacgtgaaatgctcaccttggaggatggctgttgtaacacacatcatttttggatcaccaaccattactaagaaatgcttatgagcgaccacatgatacatacgtggcacactgtctttatctgactccttaacaa

SEQ ID NO: 274829 - DNA, 371 bp, Glycine max
gggaaagtgaaagagtaagacaccacaaagtgtaacttgagtgattagatctgatgagtgcagaaagaaggaaggattgttggtgatcgatcatcgatcatcgatcatcgatggcgtctgctagccttggaagcggtggggtgggcagttccaggtctgttaatggtggcttcaggggttcttccagttccgtcgattggcttggcagagagatgcttgagatgtctttgagagaccacgaggacgatagagatagtgagcctgacatcattgatggtttgggtgctgagactggtcacgtgataagaaccagcgttggtgggccgaaatggtcaatctaagcaaaatgttagttatatttttgagcatgt

SEQ ID NO: 274830 - DNA, 330 bp, Glycine max
  unsure (1)..(330): unsure at all n locations
cagcggtaatgagctctctggggggaggggaaacaagattactgccatgcggattttgaattatctcaacctttcaagaaaccatcttgatgggtccattccaggcaacattgcctctatgcagagtctaacttctgttgatttttcatacaacaatttctctggtttggttcccggcactgggcaattcggctactttaactacacttctttcttaaggaaccctgaactctgtggcccttatntgggtccttgtaaggatggtgttgccaatggccctcgacaacctcatgttaaaggtccattcttttttttttcttaaaacttttg

SEQ ID NO: 274831 - DNA, 338 bp, Glycine max
ggaccgcaacaaaccaataatcttcaccatggcaaggcttgaccgtgtgaagaacatcacggggcttgtcgagtggtacgggaagaacgcacgcctccgcgagttggtgaacctggtggtggtggctggagacaggaggaaggagtcgaaggacttggaagagaaggccgagatgaagaagatgtatggcctcatcgagacctacaagttgaacggccaattcagatggatatcctctcagatgaaccgtgtgaggaacggagagctctaccgtgtcatctgtgacacaagggggtgcctttgtgcagcctgcagtttatgaggcctttgggttgact

SEQ ID NO: 274832 - DNA, 338 bp, Glycine max
gggttgttaaaggagcagttgatgtagacattggtgcaaacccttctgctgagggtggaggagaagatgagggagttgatgatgcagctgttaaggttgttgacattgttgacacattcagacttcaggagcaacccgcattcgataagaagcagtttgttaccttcatgaagaggtttatcaagaatttgactcccaagctcgatgcagagcaacaggagttgtttaagaagcacatcgagggagcaactaaatacctgctctctaagattaaagatttccaattttttgttggtgagagcatgggtgatgatgcttgcttggtctttgcctactac

SEQ ID NO: 274833 - DNA, 399 bp, Glycine max
ggcacaaaaaatggagttctacacaaggccaaataggagtgacatccacctctcagcagaggaagaagccaccatagaggcaaagaccagagactactttgatggggttgcaccacaacgccacacaaagcctcaacgaagtgagtattcagctcaatatgtggatgctttctccaatgcccatcactcttcttcttcttcttctataccagaattcatgcaattccaacgcctcgagaatgatccccaagagaagaaattggagtacaatggaagtcaagtaccggaagaatttgtggaaacagagtattaccaagatctcaacagcgtggacaaacaccaccatacgacgggaacaggatttatcaaagtagagaaaaatggaaatgactttcacat

SEQ ID NO: 274834 - DNA, 361 bp, Glycine max
gatgcatttgttggttcaaaaacagtgatccagatacgaagtcatgcacaaaagtattttcttaaagttcagaagaatggaacaagtgaacatgtacctcctcctcggccaaagagaaaagctgctcacccataccctcaaaaagctcctaaaactcctactgtatcccaagttatgggcccattgcaatcttcatctgctttcattgaacctgcatacatttatagcccagattcttcatctgtgcttggaactccagttactaacatgcctttatcatcttggaattataatactacaccacaaccaggcaatgtgccacaagtgaccagagatgacatgggattgactggagctggac

SEQ ID NO: 274835 - DNA, 335 bp, Glycine max
ggaagagaaaagaaaagaatcgagtgattttcgtttgcgttgctgttgcgactgagtgagtgaagatggcgtgcttgcacgaccacagttgcgaagaccatgactgttcctctaactggtctctctacaaacacatcgacctctccaaggtaactgctttgaatgaggcaaatccaggaagtgttaagtcagttttcaaagcttgggaagagcgtctggattcttctggggttcacttggaaagcaatgagggtgatcctgagttacttgtcttcattccatttacttcagatgtcaagattaagagcctatccatagttggtggagctgatgga

SEQ ID NO: 274836 - DNA, 388 bp, Glycine max
catggaatcaaactttacttaactaaggaatggtacaagaaaacgacctggatgtatctggctattcccatcaccatttatgcattggaaagactggttagagcattcagatcgagcattaagtccgtcagaatattgaaggtgactctttatcctggaaacgtgttatcacttaaaatgtcaaagccgcatgggtttagctacaaaagtggacaatacatgtttgtgaactgtgctgctgtgtctccatttgaatggcatccattttccataacttccgcccctgatgatgattaccttagcgttcacataaaaatacttggtgattggactcgaagtctgaaagccaaattcacacaggcgtgccagcaacccctcaatggacaga

SEQ ID NO: 274837 - DNA, 255 bp, Glycine max
gggtgttcaatttgaagataggatcagcatgctggtttcatctgcagtcccagaagggaaaggtgtatcatcttctgcatctgtggaggttgctagtatgtatgctattgcagctgctcatggattaaatatcagcccaaggcatctggccatactctgccagaaggtggaaaaccacattgtaggagcaccatgcggtgtcatggaccagatggcttctgcatgtggtgaagccaacaaacttcttgctatgat

SEQ ID NO: 274838 - DNA, 364 bp, Glycine max
ggcggtgagttagaactgataatcaagagagtgactactggtcggcgacagcgaactacttccgtgtaatggcgacctccgtcgcagtcgccggcgctttgacggcgcatgatcgccggattctgacagcggtgaacgtcggagcgtcgagcctgtcgttggccggttccagcttcattgtagtgtgctacctcctcttcaaggagctccgcaagttctccttcaagctcgtcttctacctcgctctctctgatatgctttgcagtttcttcggcataataagggacccgtccaaaggtttcttttgttatgctcagggctataacacacatttcttttgtgtggcatcttttctatggactac

SEQ ID NO: 274839 - DNA, 361 bp, Glycine max
ggagagaggcagaagaagaagaagaaaagatggtgggaccagtgagacctcagtttgtgctctttggttcttccattgttcagctcagttactctctccaaggttggggcgctattcttgctcatttgtatgctcgcaaggcggatataattctgcgaggatactctggttggaattcaaggcgtgctgtgcaagttctggatgaaattttccctaagaacgccactgagcaaccagattttggtaattgtgtactttggtggtaatgattctcttcttccacatccaagtggtcttggtcaacatgtacctctccaagaatacattgaaaatatgagaaagatggtacccatctaaagag

SEQ ID NO: 274840 - DNA, 288 bp, Glycine max
gggcagcagaagaacaagtagttgagaactaagggggagaagcaaatggcttcctcaatgatctcttccccagctgttaccactgtcaaccgtgccggtgccggcatggttgctccattcactggcctcaagtccatggctggcttccccaccaggaagaccaacaatgacattacctccattgctagcaacggtggaagagtgcaatgcatgcaggtgtggccaccagttggcaagaagaagtttgagactctttcctacctgccagaccttgatgatgcacaattg

SEQ ID NO: 274841 - DNA, 317 bp, Glycine max
ctgcgagaagacaacacaacgggaggcgcggcgggatcagcacatgattgcaaagtgaaggggaacattgcaaatcccaccactgggtgccagaaaaagctggaaatcgatgacgacctgaagctgttagcattttgggacaagaggatctcccaggaggttcttgatgatgctctgggtgaggagtttaaaggatatgttttcaaaatcaccggtgggtgtgacaaacaaggattccctatgaagcaaggagtgctgacccctggtcgtgttcgacttttgctccatagaggaactccttgtttccgtggatatgg

SEQ ID NO: 274842 - DNA, 373 bp, Glycine max
ggagccagggagattgcggtgcgtgcttgggacgaggccctcaacacccaacctgaaaagctcatttggaatgttatgggcatgatgaacaactgctggttcagagtgaaaaccaatgtgtgcaggccccacaagggtgagataggtatagtgtttgaacaccccacccaaccaggcaaccaatccggcggatggatggcaaaagaaaaacacctagagaaatcatctgagtccaacccaaccctcaagaagaatgtctcctccccattcatgaacaccacctcaaaaacctataccatgtctgaagtcagaaggcacaacaacgccgattcggcttggatcatagtccacggtcatgtctatgattgcaccc

SEQ ID NO: 274843 - DNA, 364 bp, Glycine max
  unsure (1)..(364): unsure at all n locations
aattcgagcggccgctttttttttttttttttttttttttttttaattaagagcatagcaaatatcgaaatccttcaaataaagcttaacctatatgaactttgatgtagacctatttgtttgaaacacgtctttggaatgaccgtttcacggaagcataatcctgcgtatggatgatgtttgtaaattgtaaacattgttcaaaacaatatgcaagactagccttattctacatggtatcacgattccagtgtaggcatttacaagatgaaacaggctataaaaaccaactgccatagatgaagcatctagtttgagcagcacccaattttcttcaaaacggaggaatcgnctttcacattta

SEQ ID NO: 274844 - DNA, 296 bp, Glycine max
ggagcaggagtgaaaagcgaagagaatggctcccaagggtttaatctttttggctgtgttatccttctcagcactgtcactgagtcgttgtcttgcggaggataatggacttgttatgaacttctacaaggaatcatgccctcaggctgaagacatcatcaaagaacaagtcaagcttctctacaagcgccacaagaacactgctttctcctggctcagaaacatcttccatgactgtgctgttcagagttgtgatgcttcactgttgctggactccacaagaaggagcttgtctg

SEQ ID NO: 274845 - DNA, 417 bp, Glycine max
ggtgcgaagagtgaagagaatggctccgaagggtttaacctttctggctgtgttaatatgcgtttcagcactgtcactgagtccttctgttgcgggggaagggcaaaataatggccttgttatgaacttctacaaggaatcatgccctcaggctgaagacatcatcacagaacaagtcaagcttctctacaagcgccacaagaacactgctttctcctggctcaggaacatttttccatgactgtgctgttcagagttgtgatgcttcactgttgctggactccacaagaaggagcttgtctgagaaggaaacagatagaagctttgggttgagaaatttcagtacattgagaccatcaaagagctttggaaagagaatgccctgaagttggtttatgtgctgatattctcgttctt

SEQ ID NO: 274846 - DNA, 418 bp, Glycine max
tttacttcagaaggggatcctagacatttgggaatgaatggaaagagagtctactttcattaagtgatttattagataatcgaaaacagaaaatcttgagaactattcgaaactcagaagaattacgggaaggggccattgaacagctgggaaaagcccaagcccgcttaaggaaagtcgaaacggaagcagatcgttttcgggtgaatggctattctgagatcgaacgagaaaaattgaatttaattaattcaatttatacgactttggaacaattagaaaattacaaaaacgaagccattcattttgaacaacaaagagtgattaatcaagtccgacaacgggttttacaacaagccttacagggagctctaggaactctaaagagttgctttgacaacgagttacatttacgtac

SEQ ID NO: 274847 - DNA, 292 bp, Glycine max
tttatactttagaagggggagatggattcaaactatccgtttccttaaagtggagcccaagcaaagaattttagtacactggtcaggttgttagatatgaggataacttttactcaaccacctacttggttttcatcatcatttttactttttagatcctcactttaacatttattttttctttctttatttttaaatataatattttttttttttttatattaaagcaattttttttatttattttctatcccaatttttatttttttttttttatatatttttttttttt

SEQ ID NO: 274848 - DNA, 292 bp, Glycine max
ggcatcagcgggcacagtctcggtggtggcaagcttctgagcagggtaatggacatgctgctttactcattggagatgcgtattactatggtcggggtactgccagggattatgagcgagctgctgaagcttatatgcatgctaaatcacaatcgaatgcacaagccatgttcaatcttggatacatgcatgagcatggccaaggacttccatttgaccttcatctagccaagcgttactatgatgaagctctagaccatgatcctgcagcaaagttgccggtcacactggc

SEQ ID NO: 274849 - DNA, 373 bp, Glycine max
ggccattgttgttgctattatcatccgcagctgcgtttattcgcaccgcaaacagtgagccatggccgtcggaaagaacaagcgcatctccaaggggaagaagggtggcaagaagaaggcagctgatccctttgccaagaaggattggtatgacattaaggctccttctgtttttcaagtgaaaaatgttggcaaaaccctcgtctctcgtactcagggtaccaagaatgcttctgaaggactcaagcatagagtgtttgaggtctccttggctgatcttcaaggggatgaggatcatgcattcaagaagattaggttgagagctgaagatgtgcaaggggaagaatgttctgacaaatttctggggaatgga

SEQ ID NO: 274850 - DNA, 377 bp, Glycine max
ggtggtcaacggaagcgagataaataaacagagagagagagagagagagagagaggtgtgtttgttctctgagtagaagaagatcaagatcaaggaagaggatgtcgaaagaggatgtgtttgttggcgcgatcgaccaaggaacgagcagcagcaggttcataatatacgacgcgaagactggagtagtaggatgccaccacgtggagttcacccagttctacccgcaagccggggtgggtggagcatgaccccatggagatcttggagagtgtgaaagtgtgcgtggccaaggccgtcgataaggccaccgctgatggcttcaacgtcgataaaggcttgaaagccattggtctcaccaatcagagagagaccac

SEQ ID NO: 274851 - DNA, 421 bp, Glycine max
gatggtatttgatttgtcaaatacatcattattgtgtactcttttatatgtatggcgcaacccaatttttgtttttttttttcaatttttaatctcctatccctttttttaattttggaatcgaaatatctaatctaaataatccaaaaattcactcttaatcttgacagtgatatatgttgtatatgtaaatcctagatgtaaaaataggcagacttctcccgggaaaaaaagtaggtaaaaaaatatgctaagtataaattgtctactgatgaaatacgaaagctgatgatattgaaaaaaaaagaattgtaaataaggttcaagttcgacttccatagagaatatagatgatattgtctataatggtagaaaaaaataaaaaactttcgaaagattttatcccaatgaaattttaaaa

SEQ ID NO: 274852 - DNA, 318 bp, Glycine max
gatggtatttgatttgtcaaatacatcattattggggactcttttatatgtatggcgcaacccaatttttgtttttttttttcaatttttaatctcctatccctttttttaattttggaatcgaaatatctaatctaaataatccaaaaattcactcttaatcttgacagtgatatatgttgtatatgtaaatcctagatgtaaaaataggcagacttctcccgggaaaaaaagtaggtaaaaaaatatgctaaatataaattgtctactggtgaaataccaaagctgatgatatttaaaaaaaaaaaatttgtaaat

SEQ ID NO: 274853 - DNA, 440 bp, Glycine max
ggcagttcaattgatcaactcagatttcagggacctaagtctagctgctaatagactcgcccatcatgccatcaaacttggtggcattggctttggagcctcttttttcggattgtttgctgccattgctgctatttatctgttgattttggatcgtacaaactggaaaacaaatattctcacagcactactcattccatacattttcttcagcttgccttcattaattttcgacgtcttcaggggagagcttggaaaatggattgctgcagttgctgttgtattacgccttttccttccaagacacttccctgattggctggaattgcctggtgctctgattcttcttatcgttgtagctccttctctaattgcaagcacctttagagacaacattggtggggtggtagagtgccttatcatttcatgttatttgctgc

SEQ ID NO: 274854 - DNA, 430 bp, Glycine max
gacaatcaatcttctttatccactctctcttaattaaattaaaacaaaaaatgtgcgctgccatatccgaagtggaacaagaagagttgctcgaaaaattggaggtgttcaagatcaaaggcagggacaagcatggccgcaagatccttcgcattatcgccaaattcttcccaggtagattgattaattaattaattaaatccctaattcctttttttttatgtgcatgaattttttaaatcttcggtaattgtttgaattgaggacagcacggttggtgagtgttgaggttctgaaaaagtacctggaggagagggttttcccgaagctgatggggaagaggaaattcgcggtgctgtacgtgcacaccggcgtccagaggagcgagaattttcccggaatctccgggtctccgtggatctacgatgcg

SEQ ID NO: 274855 - DNA, 401 bp, Glycine max
gagagaaagagagagaaagatgtcgaagcgtggtcgtggtggttcggcggggaacaagttccgcatgtcgctgggtcttccagtggcggcgacggtgaactgcgccgacaacacgggggcgaagaacctctacatcatttcggtgaaagggatcaaaggccgtttgaaccgtcttccctcggcctgcgttggcgacatggtgatggccaccgtgaagaagggaaaacccgatctgaggaagaaggtcttgccagctgtcatcgttcgccagcgcaagccatggcgccgaaaggacggcgtctacatgtacttcgaagataatgctggtgttattgtcaatcccaagggagaaatgaaaggttctgctatcactggtcccattggaaaagagtgtgctgatt

SEQ ID NO: 274856 - DNA, 456 bp, Glycine max
agacgacagaaggggagagaaagacaaataaaagaagctgcatttgcagagacgcattcgcgtttgtctgagagagagaattggaaggttgcgacgagtgatgatatacatattgtggcggtagtgaaatcgaggaaaaagaggtagcaatcgtgagttgcaatgagtagcgaaaagtctccttcatcagcttctgcttcagcttcttcttcgagtagctacgagttgagcaaaggcatcaatggcctcgacaaggttattcttcgcgacccacgtggtagctccgctgaggtgtacttgtacggtgctcacgtgacttcatggaagaatgaacaggccgaggaattgctttttctcagtagtaaggctatatttaagcctccaaagccaattcgtggagggatcccaatatgttttcctcaattttcaaacctcggtcctctcgactcgcatgga

SEQ ID NO: 274857 - DNA, 439 bp, Glycine max
ggcatcgaacagagagagagagaatggcagcacttggtgggaatcgtgatgtgacaggaagccagaacagcgttgagatcgatgctctagctcgctttgctgttgaagaacacaacaaaaaacagaatgcccttttggagtttgaaaaggtggtaactgcgaaacagcaagtggtttctggtaccttgtacaccatcactttggaggcaaaagatggtgggcaaaagaaggtttatgaagccaaagtttgggagaagtcatggttgaacttcaaggaggtgcaagagttcaagcttgttggagatgcacctgcatagtctagtgcttaattaggttgctgaagagtgaagaatgagacagcctggttcgaaggggaaaagcctaaggatatatcaaaggatcctatatgtataaaataaatgttgcttttttaccttcg

SEQ ID NO: 274858 - DNA, 432 bp, Glycine max
gatgggagaatcttattgtcaaggagttttgatggttcattgaaggtttgggatctgcgcaaaacaaaagaaccgttaaaagtatttgaggatctgccaaatcactatgcacaaacaaatattgccttcagtcctgatgagcgactctttttgactggaacatctgtggaaagggagagcatgacaggaggtttattgtgcttctttgatagagtaaatcttgagcttgtttcaaaagttggcatatcacccacttgtagtgttgttcagtgttcttggcatcccaaactgaatcagatctttgcaactactggtgataaaagccaaggtgggactcacatactatatgatccaaccgtaagtgaaagaggagctcttgtatgtgttgcacgtgcaccaaggaaaaaatcaattgatgactttgaggcaaaa

SEQ ID NO: 274859 - DNA, 440 bp, Glycine max
caaggacacgaggtggatatatatgagtcaaggccttttattggtggcaaagttggttcttttgttgacaaaggtgggaatcacattgaaatgggattgcatgttttctttggttgctacaacaatcttttccgattgatgaagaaggtgggtgcggataacaatctacttgtaaaggatcacactcacacttttgttaacaaagggggtcaaattggagaactagattttcgcttcccaattggggcaccaatacacgggataagggcgtttttgtccacaaatcagcttaatacttatgataaggctagaaatgctgtggctcttgcactcagtccagttgtcaaagctcttgttgatccagatggtgcactgagggacataaggaatttggatagtattagcttttcagactggtttttatccaaaggtggcacacg

SEQ ID NO: 274860 - DNA, 428 bp, Glycine max
gacagtattcaagatcggggaatcaatcaggtttatataattggaggagatggaactcagaagggtgcatctgcaatttttgaggaagtcagaaggcgtggtctcaaagtttcagttgtaggtatccccaaaaccatagataatgatatcccggttattgataagtcctttggctttgacactgctgttgaggaggctcaacgagctataaatgcagcacatgttgaagctgaaagtgttgaaaatggcataggtgttgtcaagttgatgggtagaaacagcggatttattgcaatgtatgctacacttgcaagtcgagacgtggactgttgcttaattccagagtcacccttttaccttgaaggtcctggtggactctatgaatatatagagaaaagactcaaagaaaatgggcacatggttatcgt

SEQ ID NO: 274861 - DNA, 426 bp, Glycine max
cgggtctgaaagggaaaaaaaacaaaatcgcatcaaagacaagataaaagggtacctctttcaattttatcccttgttgtgagcttaattcaatttctgctcacacataatggcttgcacgctcgctgattcattactcctattcaagggttcttatcataaaccagttctgaggagagacattgctgcccggtactccccgggtatatttagtctaaacagtaatgggcttatccagaaaaggttcaagcgtcaaaggaattttgttactacgaatacggttactgtcatacatgccgtggcaattccagtacaaccagcttcggtggaaagtgcggagtatagaaaacagctagctgaagactactgtttcaggcaagttggatagccgcttccagatgatgttactttaaaggatgtcatcaa

SEQ ID NO: 274862 - DNA, 439 bp, Glycine max
ggagtgagtgagagaaagaagagaaggagttgaagtggttgttgtattgtagtagtgtgtaaagtcttggtgatggatagacacaaatgcaagctttgttcaaggtctttcagcaatggcagagcccttggtgggcacatgaaggctcaccttgcttctctccctctccctctccctccaaagcttcactcttgcttctcttcctctgactcagaacaagaacaatctttaagggagaatcctaagaaaaccttgaggattctggatcctgaagacagagagagcgagacagagtctaataagaacccgactcgtcaacgatccaagcgcaactggaaatctaccatgcccaagctcagcctcggacaccccgaagccgaacctctcagctccgtcttcgacaccttccccgaagaagacctcgccatgtgcctcatga

SEQ ID NO: 274863 - DNA, 409 bp, Glycine max
gacactaaacaagttaaaagaagagcatcactgaactaacaaagcaaccctatgtcgaaggtggtttgtgtcaccggagccagcggcgccatcggatcatgggtggtcctactcctcctccagcgtggttacaccgtccatgccaccgtccaagatatcaaggatgaaaatgagacgaaacatttggaggaaatggaaggagcaaagagtcatctccatttttttgaaatggatcttcttgacatcgactccattgccgctgccataaagggttgttccggcgtaatccaccttgcatgtcctaacatcattggtcaagtcgaagatcccgagaaacagatattggaaccggcgataaaaggaacggttaatgtgttgaaggcggcgaaggaagcaggggtggagcgcg

SEQ ID NO: 274864 - DNA, 429 bp, Glycine max
gaacacactcatccaaacaaccttctttctttttctgtgagcctttctttcaggttcttaacttgatcagtgtgcagtgtccaaatcataagggtagctgcaaattgcaatggctaagcatgatgttgagggtggttccttctctgcaaaggactaccatgatcctcctccagcaccgttgattgatgctgaggaactcacacagtggtccttctacagggctttgattgctgagttcattgccacaatgctcttcctttacatcacagtgctcactgtgattggttacaagagccagagtgatgtaaaggctgggggtgatgtgtgtggtggagttggcattcttggcgttgcttgggcctttggtggcatgatcttcattctggtgtactgcactgctggaatctcagggggtcacataaacccagc

SEQ ID NO: 274865 - DNA, 427 bp, Glycine max
gggatttccaaagtttttaatagagggtaagtctcaaaaaatcgaagaattacagacgaatatgcaaaaaaaactgaattgtgtgaatcgaaaactaaacattgctattgtaaaagttgcaaatgcttataaacaccctaatattattgcagaatttatagctggacaattaaagaatagagtttcgtttcgtaaagcaatgaaaaaagctattgaattaactgaacaggcgggtacaaaaggagttcaagtacaaattgcaggacgtatcgacggaaaagaaattgcacgtgttgaatggatcagagaaggtagagttcctctacaaaccattcgagcgaaaatcgattattgttgctatacagttcgaactatttatggggttttagggatcaaagtgtggatattttctaaataaagaaaaata

SEQ ID NO: 274866 - DNA, 427 bp, Glycine max
gaagatggagatgtatcagatctggagcaggagaatagcgttgggagcgttcgcgtttgttctgcttttcctatcggcctcagcagacgacgtcgttgtgctctctgaagataacttcgagaaggaagttggtcaggacagaggagctctcgttgagttctatgctccttggtgtggacactgcaaaaagcttgctccagaatatgaaaagcttggtagcagcttcaagaaagccaaatctgttttaatcggcaaggttgactgtgatgagcacaagagtttgtgcagcaaatatggagtctctgggtacccaacaattcagtggtttccaaaaggatctcttgaacccaaaaagtatgaagggccacgcactgctgattcacttgctgagtttgtaaatacggaaggaggaacaaatgtgaagatt

SEQ ID NO: 274867 - DNA, 407 bp, Glycine max
gatattattggacatattgttgaatttagctctgatcagcatggaagtcgatttatacagcagaagttggaaagttgtagtggcgaagagaaggcattggtgtttaaagaggttcttccacatgcttctaaattaatgactgatgtatttggtaactacgtaatacagaagttttttgagtatggaagctcggagcagaggagggaacttgcagatcgacttgttggccagatactgcctttgagtttgcagatgtatggctgtcgtgtaatccaaaaggcacttgaggttattgagcttgaacagaaagctcagcttgttcatgagctagatggaaatgttatgagatgtgttcgtgatcaaaatggtaaccatgttattcaaaagtgcattgaatctattcaaac

SEQ ID NO: 274868 - DNA, 415 bp, Glycine max
gttggtgatgacattcagcaacatcaagacataggtttagatgcttatactggatcagtatatggaaaattggatctgaattctgtacaaaagatgtttcttaagggaatgtgtagttttggcagtactgattctgacatagttgagatttaccactgctcatgtgcgtcaatgcaagcacgatgggagctgttccagaagcaagctgaaattaccaaaaaaaatcatggggaagctaacattcggtatgcttggcttgcttcctctaaaggagaactatctacaatgatgaactatggacttagtcattatggactatctggatcaaagtgcacatatggcattggtgttcatcttgctgctgttacttgccctgatgccagtgtgcgttattgtgatgttgactaaaaagggg

SEQ ID NO: 274869 - DNA, 427 bp, Glycine max
ggctttttaggttattttcttaagtaaaaagaaggaaataaataattctcgtagctttgttgctcttataaattctattctggttgacgcttctctcaccatccccatttcgcgttggtgcaaagcatccttcgtttcaatttctctctctcagcgctttctgcaatcgaacctttcatctccaaagggatccacaggccgaaggagaaatggggctgacattcacaaagcttttcagtcggcttttcgcgaagaaggaaatgcgaattctgatggttggtcttgatgctgctggtaagaccactatcctgtacaagctcaagctcggagagatcgttaccacaattcctaccatcgggttcaatgttgagactgtggaatacaagaacattagcttcactgtttgggatgttggtggccaggacaa

SEQ ID NO: 274870 - DNA, 398 bp, Glycine max
gatgcggaatggggagttccagttcatgatgacaagatgctgtttgaacttttagttttgagcggtgctcaagttggatctgattggacctcaaccttgaagaaacgcctagatttcagggctgcattttcagaatttgatgcagaaaccgtggctaacttgactgataagcaaatgatgtctattagttctgaatatggcattgacataagcagagtccgaggagttgttgataatgctaaccaaattttagagattaagaaagactttggttcatttgacaagtacatttgggggtttgtgaatcataaaccaatctccactcaatacaagtttggccacaagattccagtgaagacatcaaaatcagagagcataagcaaagacatggttagaag

SEQ ID NO: 274871 - DNA, 437 bp, Glycine max
ggacaaagaactcacgagtgattttgagaggctggttcatctttggacacttgattctgctgaacgtgatgcatttttggcaaacgaggcgactaaaaaatggacttcaagcaatcaggttctggtggaaatagtctgcactaggtcctctgaacaattgtttgctgcgaggaaggcttaccatgttctttataagaagtctctggaggaggatgttgctcatcacacaacaggagacttccgtaagctcatactacctctggttagttcttatcgatatgaaggagatgaggtcaacttgaccctggcaaaaactgaggcaaaattgctgcatgagaagatttcaaacaaggcttataatgatgacgacttcatcaggattttggccacaaggagcagagcacagattaatgctactttgaatcactacaaagatg

SEQ ID NO: 274872 - DNA, 428 bp, Glycine max
gataggcatgatatcttgtttgcaacaccctaatcttgtgaaacttcatggattttgcattgaaggggatcaattgatattggtgtatgagtacatggaaaataatagcctggctcatgctttattcagctcaaaagatcaacttaaacttgattgggcaacaaggcttaggatctgtattggcatagcaaaaggtcttgcatttctacacgaagaatcaagactcaagatttttcatcgagacatcaaagctactaatgtgttactggatgggaatttaaaccctaaaatatctgactttgggctggctaggcttgatgaagagaaaacccatgtcaccacccgaatcgctgggacaataggatatatggcaccagaatatgcattatggggttacttgtcttacaaggctgatgtttacagttatg

SEQ ID NO: 274873 - DNA, 392 bp, Glycine max
gacggcagatcagatccattcttcaacaaatccccttttcagtttcagtttttctcgaggatcccgtgaaacgacatggcgatggtggaccagcctctgtatccgattgccgttttgatcgacgagttgaagaatgaggacattcagctgcgcctcaactcgatccgaaggctctccacgatcgcgcgcgcgctcggcgaggaccgtacgcggaaggagctgattccgttcctcagcgagaacaacgacgatgactacgaagtgctcctcgcaatggccgaggaattaggtgtcttcattccctacgtctgaggcgttgagcacgccaacgtgcttcttcctcccttggagacgctctgtaccgtttaggaaaccagcgtctgagacatgtc

SEQ ID NO: 274874 - DNA, 420 bp, Glycine max
tgccttttcaagtatcagtaagaatagaagggaggaggagtctttcatatttaaaaatgtaagcataaaatgtactgaaaggctgattgtttctcagtatgttctttatgacaggtcaaatgctatatgaagcaattgctatctggccttgagcattgccacagcagaggtgttttgcaccgtgatattaagggttcaaatctgcttattgacaatgaaggaatacttaaaattgcagattttggactggcaactttctttgatcctaagcaaaagcatcccatgactagtagagtcgtgaccctttggtaccgtccacctgagcttcttctggggtctacgtcttatggtgttggtgttgacctttggagtgttggctgcattttggccgagctacttactggaaagccaatcatgcct

SEQ ID NO: 274875 - DNA, 157 bp, Glycine max
gaagaagaggcagagaagagcacgaagaatgctttcgtgaaggtgagcatggatggtgcaccgtatctacgaaaggtggacattaagttgtacaagagctaccatgagctgtcagatgcgctggcttagattatcagctccttaacgattgaaaagt

SEQ ID NO: 274876 - DNA, 411 bp, Glycine max
tgaagaaggttggttacaacccagacaagattccatttgtgcccatctctggtttcgagggtgacaacatgattgagaggtccaccaaccttgactggtacaagggaccaactctccttgaggctcttgaccaaatcaatgagcccaagaggccctcagacaagccactcaggcttccattgcaggatgtctacaaaattggtggtattggtaccgtgccagtgggacgtgttgagactggtgtcgtgaagcccggtatggtggtgacttttggtcccactgggctgacaactgaggttaagtctgttgagatgcaccatgaggctctcacagaggctcttccaggtgacaatgttggctttaatgtgaagaatgttgcagtcaaggatctcaagcgtggttttgttgcat

SEQ ID NO: 274877 - DNA, 426 bp, Glycine max
gatatgtatcttgttgcgaggtgtgaggtgcatagtgttgttgatgtgaacaagcagaggtcgttccttactttgaatgcgttgaacgagtttgatcctaagtattccggtgtggattggaggcagaagttggagactcagaggggtgctgtgttggctactgaacttaagaacaatgcgaataagttggctaagtggactgctcaggctcttttggcgagtgcggatacaatgaagttagggtatgtgtcgaggattcatccccgcgatcatttcaatcatgtgattttggctgtggttggctataaacccagggactttgcagcacagattaatttgaacacgacgaatatgtgggggattgtgaagtctattgtggacttgtgcatgaaattgaatgaggggaagtatgttcttgtgaaggat

SEQ ID NO: 274878 - DNA, 313 bp, Glycine max
ggcacaggtggagaaagtatatatggggggaaatttgcagatgaaaatttcaaactaacacatgatggacctggcattctttctatggctaatagtggtcctaacacaaatggatctcagttctttattacattcaagcgccaacctcatcttgacgggaaacatgttgtttttggaaaagttgtcaacggaatagacattttgaagaaaattgagcaggtgggaacatctgatgggaaacctacccagccagttaaaattattgattgtggtgaagtctctgaaacaaaaattcagcatactgcagagaagg

SEQ ID NO: 274879 - DNA, 432 bp, Glycine max
cacggtcagtcgttggaagaaacctgagattggttgggtgaagctgaacgtggatggttcacgcgacccatacaaaagttcctccgctggttgtggtggtgttctgagggacgcatcagcaaagtggctccgtggctttgctaaaaaactgaaccctacttatgcagtgcaccagacagagttagaagccattctcacgggcttgaaggtggcttcagagatgaatgttaagaaactaattgtggagtcagacagtgactctgtggtgagcatggtggagaatggggttaagcccaatcaccctgactatggtgtcgtggaacttataaggacgaagcggcgtcgttttgactgggaagtgaggtttgtttctgtctccaacaaggcgaatcgtgtggctgataggctcgccaacgatgctcggaaattggc

SEQ ID NO: 274880 - DNA, 425 bp, Glycine max
tacagacagagttggagagttagctaagaagcatggactgaagcttcacattgatggggcccgtatttttaacgcatcagttgcacttggtgttccagtggataggcttgtccaggcggctgattcagtttccgtttgcctatctaaaggtataggtgctccagttggatctgttattgttggttccaagaattttattgccaaggctagacgactccggaaaaccttatgaggtggaatgagacagattggcctcctttgtgccgctgcacttgttgccttgcaggaaaatgttgggaagctggaaagtgatcacaagaaagctagacttttggctgatggattaaaagaagttaaaggactgagagtggatgctggttctgtggagaccaatatggtatttattgacattgaagagggtacaa

SEQ ID NO: 274881 - DNA, 430 bp, Glycine max
ggaggataatcaataaacttaaacttatgttatggcattctaactctgaacgatgaaatgaaatggagttccaagataagcgtttatctctgagatcgagcttgacgttcagcgagacgctgtgcgcagtgttcattccgttcataggaatagtcgaagctttggttttcacattcactagttgcttcgatttccaatctcccaggaataagaagaaacattcttctaccttcgacgacattctcaccctcgccgaggattctccatttagtattaatgaaatcgaggccttgcgtgagttgttcaagaagttgagtagttctatcattgatgatggcctcatccacaaggaagaactcacattggcactgttgaagaccaccaccggggagaatcttttccttgacagggtgtttgatgtctttgatga

SEQ ID NO: 274882 - DNA, 424 bp, Glycine max
ggatggagtaattcagctaacagaaagggatgaatgtgcctaccaagaaatgatcactcatcttcctctttgctctattccaaaccctaaaaaggttttggttatcggtggaggtgatggaggggtcatacgagaagtagcacgccattcttcagttgaaaagatagacatttgtgaaattgacaagatggttgttgatgtctccaaacaatacttccctgatgtagctgttgggtatgatgatcctcgtgtgacacttcatattggtgatggagttgcatttttgaaggaagttccagaaggaacttatgatgctgttatagtggattcatccgaccctattggtcctgctcaggagctttttgaaaagcccttctttgcgtcagttgcaaaggctctttgtccccgtggagttgtgtgtact

SEQ ID NO: 274883 - DNA, 423 bp, Glycine max
ggttctagtgtgtgattgtttgttgttgtaactcgttcttcttcttttgttgttctgtgtttgtgtttgttttttctctcacctgaaaatgtcttgctgcggtggtaactgtggttgcggaagctcctgcaagtgcggcaacggctgcagaggctgcaagatgtacccagacttgagctacactgagtcaaccaccaccgagaccttggtcatgggagtggcacctgttaaggctcaatttgagggtgcttaaatgggtgtgcccgctgagaacgatggctgcaaatgtggaccaaactgctcctgcaacccctgcacttgcaagtgaggtgttgtgagagcaagctttaagcatagattgcccttaattaggaataatgataaactattaatgtgtagctaaaaacttatgtattatgtctg

SEQ ID NO: 274884 - DNA, 440 bp, Glycine max
ggatactagaacctgcagatcgtgatgctgttttggccaatgttgccatcaagaatggcaaaaactacaatgtcattgtggaaatcgccactatcctctccccggaagagcttttggccgtgagacgtgcttatctcaaccgctacaagcactccttggaagaagatgttgcagctcatacctctggccatctacgccagcttttagtggggttggtgacctcatataggtatgttggtgatgagatcaatccaaaattggcacaaactgaggctgaaattcttcatgatgctgtgaaagagaagaagggtagctatgaagagaccattagggtcttgaccacaaggagcaggacccaacttgttgcaactttcaaccgctacagagagatccatggcacttccatctctaagaaactggtggatgaaggatctgatgag

SEQ ID NO: 274885 - DNA, 433 bp, Glycine max
  unsure (1)..(433): unsure at all n locations
gacttcaaagtggagaaaaacacacacggttggttcattctctctcttttctttttcctcaaaaagttgaaaaagaataaagggggaacaatcgagtgaagttgttgctcttcaatagtaaacttacctatggaagagggaagggttgtgagtgagtacacaaaagatggaactgtggatcttaaagggaaacccattctcaaatccaaaagtggtggttggaaagcatgctcctttgttgttggtatctctctctctcactataaattttatatggtcattttcatcttgttttggacattaatttcaaaagcaatttcccaaaacattggaagcttcatgatgttntgttaacaaaaatcttaatttcctctgatcgagagacattgttcaattctttgtgttgtgttgtctcctaaaacatgggaagaga

SEQ ID NO: 274886 - DNA, 442 bp, Glycine max
ggaggaagccacatagagacacaatacagagtgagttgttgctccttcgccacaactctctgccaacatgggtatctccagagattctatgcacaagaggcgtgccactggtggcaagaagaaggcctggaggaaaaagagaaagtatgagcttggtcgccagcctgctaacactaagctgtcaagcaacaagacagtcaggaggatccgtgttagaggtggaaatgtgaaatggagggcattgagattggatactggaaattactcctggggaagtgaagctgtaactcgcaagactcgtgtactagatgtggtttacaatgcctcaaacaatgagcttgtgcgtactcagactcttgtcaaaagtgctatcgttcaggttgatgctgctccattcaaacagtggtatcttcagcactatggtgttgagattggtaggaaa

SEQ ID NO: 274887 - DNA, 428 bp, Glycine max
gggggaattgactagtgcggcgcgctcctattatcaccgtagacggcggaggtggcggtggtggtgtagacacggcgtgacggcgatctcttgagataaatgttggttgaaagaggaagaagaagaagagttgtattgtagaatgagccaaccaacggtgatacttgccactgcgagctatgatcacactattcgtttttgggaggccaagagtggccgttgctaccgcaccatccaatatcctgattcgcaagtaaaccggctggagataaccccggataaacgcttcctggctgcagctggcaatccacacatacgactgtttgatgttaactcaaatagtcctcaaccagtaatgagctatgattcacataccaataatgtaatggctgttgggtttcaatgtgatggtaattggatgtattctg

SEQ ID NO: 274888 - DNA, 445 bp, Glycine max
gaaagaagagaaaataataatatgaataacaacccacaaaacttgggtcttgcaaattaagttcattttcctccctttcactctcgtagacatcacaaaccttccctccattcatcccacgcatggctgccatgaactctagcgtattggcctgtagctatgccatatcaggtgcagcgtgttcggagctcaatgggaaggtcacttccgtggcctatgttgcatgctctggctacaagttgccattgatcaaagctgaggccagagttcctaaagccaaagaatctgaaggaggaaggagaggtgcccttgttctcttggcagctacccttttcacctctgcagcttccaattcttctgccaatgctgggatcattgaagattaccttgagaggagcaaggccaacaaggaaatgaatgacaagaagagggtagctactactgg

SEQ ID NO: 274889 - DNA, 414 bp, Glycine max
gggcaaacaagtagtggaaagacatacacgatggttggaataactgaatacgctgttgcagatatttttgactatatagagaggcatgaagaaagagcatttatattgaagttctcagcaattgaaatttacaatgaagttgttagagacctcctcagcactgacaacaacactccacttagactacgtgatgatcctgagaaagggcccattttagagaaactcacagaggagactctacgggactgggagcatttaaaagagcttctagccttcagtgaagctcagagacaggtgggagagacatacctaaatgaaaagagttctagatctcaccaaatcatcagattgacaatggagagttctgccagggaattcctgggcaaaggcaactcagccaccctaatagctagt

SEQ ID NO: 274890 - DNA, 443 bp, Glycine max
gagttagggaagggaagcatctttagctccaatggcggatacctcaggtcgatccagggacctcgacaagctccttctccgccctggcaatctcgtcggtcccaggttcgaaccaggcgctgagttgcgagatgaccttcaggccttcgccaaagtgttggtggtaggggccggtggcttacgttgtgagttgctgaaggatttagccctctctggtttccgaaaccttgaggtcattgatatggatcgcatagaggttactaatctcaaccgccaattcttgttcagacttgaagatgttggcaaacccaaagccgaggtagctgccaagcgtgtcatggagagaattactggtgtcgaaattgtgccccacttttgcaggattgaggacaaggaaatagaattttacaatgaatttagcattattgcccttgggcttgatt

SEQ ID NO: 274891 - DNA, 433 bp, Glycine max
aggaacagcaatgaagaagaggcagagaagagcacgaagaatgctttcgtgaaggtgagcatggatggtgcaccgtatctacgaaaggtggacataaagttgtacaagagctaccaggagctgtcagatgcgctggctaagatgttcagttccttcacgattgaaaagtgtgggtcccaagggatgaaggattttatgaatgagaccaatggctctgactatgtacccacatatgaagacaaggacggagactggatgctcgtcggtgatgtgccctgggagatgttcgttgaatcatgcaagcgtcttcgcataatgaaaggctccgaggcaatcggtcttgcgccaagagccgtggaaaagtgcaagaacagaagctgaagaagtgatttcatctgcgtcacaaggaagcaaattgactcgagcaagatcg

SEQ ID NO: 274892 - DNA, 315 bp, Glycine max
aattcgagcggccgcttttttttttttttttttttttttttttttgtgttttttgaatccgagggatatgaacgcagcttcttcttggtttgttgaaattttggcattaaatggtcggaattcggcgttgggattagcttagggtttcaaaaaaataattctcttttttttttttctaattttgttttttttaatggaacctcgtattgggaataagtttcggcttggccgtaagatcggtagcggatcgtttggagagatctatttaggtactaataatcaaaccaatgaagaggttgcaattaagcttgaaaa

SEQ ID NO: 274893 - DNA, 406 bp, Glycine max
ggcagttcaattgatcaactcagatttcagggacctaagtcgagctgctaatagactcgcccatcatgccatcaaacttggtggcattggctttggagcctcttttttcggattgtttgctgccattgctgctatttatctgttgattttggatcgtacaaactggaaaacaaatattctcacagcactactcattccatacattttcttcagcttgccttcattaattttcgacgtcttcaggggagagcttggaaaatggattgctgcagttgctgttgtattacgccttttccttccaagacacttccctgattggctggaattgcctggtgctctgattcttcttatcgttgtagctccttctctaattgcaagcacctttagagacaacattggtggggtg

SEQ ID NO: 274894 - DNA, 302 bp, Glycine max
gacaatcaatcttctttatccactctctcttaattgaattaaaacaaaaaatgtgcgctgccatatccgaagtggaacaagaagagttgctcgaaaaattggaggtgttcaagatcaaaggcagggacaagcatggccgcaagatccttcgcattatcgccaaattcttcccaggtagattgattaattaattaattaaatccctaattcctttttttttatgtgcatgaattttttaaatcttcggtaattggttgaattgaagacagcacggttggtgagtgttgaggttctgaaaaagt

SEQ ID NO: 274895 - DNA, 308 bp, Glycine max
gagagaaagagagagaaagatgtcgaagcgtggtcgtggtggttcggcggggaacaagttccgcatgtcgctgggtcttccagtggcggcgacggtgaactgcgccgacaacacgggggcgaagaacctctacatcatttcggtgaaagggatcaaaggccgtttgaaccgtcttccctcggcctgcgttggcgacatggtgatggccaccgtgaagaagggaaaacccgatctgaagaagaaggtcttgccagctgtcatcgttcgccagcgcaagccatggcgccgaaaggacggcgtctacatgt

SEQ ID NO: 274896 - DNA, 331 bp, Glycine max
ggcatcgaacagagagagagagaatggcagcacttggtgggaatcgtgatgtgacaggaagccagaacagcgttgagatcgatgctctagctcgctttgctgttgaagaacacaacaaaaaacagaatgcccttttggagtttgaaaaggtggtaactgcgaaacagcaagtggtttctggtaccttgtacaccatcactttggaggcaaaagatggtgggcaaaagaaggtttatgaagccaaagtttgggagaagtcatggttgaacttcaaggaggtgcaagagttcaagcttgttggagatgcacctgcatagtctagtgcttaatt

SEQ ID NO: 274897 - DNA, 351 bp, Glycine max
gatgggagaatcttattgtcaaggagttgtgatggttcattgaaggtttgggatctgcgcaaaacaaaagaaccgttaaaagtatttgaggatctgccaaatcactatgcacaaacaaatattgccttcagtcctgatgagcgactctttttgactggaacatctgtggaaagggagagcatgacaggaggtttattgtgcttctttgatagagtaaatcttgagcttgtttcaaaagttggcatatcacccacttgtagtgttgttcaatgttcttggcattccaaactgaatcagatctttgcaactactggtgataaaagccaaagtgggactcacatactatatgat

SEQ ID NO: 274898 - DNA, 395 bp, Glycine max
caaggacacgaggtggatatatatgagtcaaggccttttattggtggcaaagttggttcttttgttgacaaaggtgggaatcacattgaaatgggattgcatgttttctttggttgctacaacaatcttttccgattgatgaagaaggtgggtgcggataacaatctacttgtaaaggatcacactcacacttttgttaacaaagggggtcaaattggagaactagattttcgcttcccaattggggcaccaatacacgggataagggcgtttttgtccacaaatcagcttaatacttatgataaggctagaaatgctgtggctcttgcactcagtccagttgtcaaagctcttgttgatccaaatggtgcactgagggacataaggaatttgga

SEQ ID NO: 274899 - DNA, 356 bp, Glycine max
gacagtattcaagatcggggaatcaatcaggtttatgtaattggaggagatggaactcagaagggtgcatctgcaatttttgaggaagtcagaaggcgtggtctcaaagtttcagttgtaggtatccccaaaaccatagataatgatatcccggttattgataagtcctttggctttgacactgctgttgaggaggctcaacgagctataaatgcagcacatgttgaagctgaaagtgttgaaaatggcataggtgttgtcaagttgatgggtagaaacagcggatttattgcaatgtatgctacacttgcaagtcgagacgtggactgttgcttaattccagagtcaccctttta

SEQ ID NO: 274900 - DNA, 326 bp, Glycine max
cgggtctgaaagggaaaaaaaacaaaatcgcatcaaagagaggataaaaggttacctctttcaattttatcccttgttgtgagcttaattcaatttctgctcacacataatggcttgcacgctcgctgattcattactcctattcaagggttcttatcagaaaccagctctgatgagagacattgctgcccggtactccccgggtatatttagtctaaacagttatgggcttatccagaaaaggatcaagcgtcaaacgaattttgttactaagaataaggttactgtcatacatgccgtggcaattgcagtgcaaccagattcgg

SEQ ID NO: 274901 - DNA, 351 bp, Glycine max
ggagtgagtgagagaaagaagagaaggagttgaagtggttgttgtattgtagtagtgtgtaaagtcttggtgatggatagacacaaatgcaagctttgttcaaggtctttcagcaatggcagagcccttggtgggcacatgaaggctcaccttgcttctctccctctccctctccctccaaagcttcactcttgcttctcttcctctgactcagaacaagaacaatctttaagggagaatcctaagaaaaccttgaggattctggatcctgaagacagagagagcgagacagagtctaataagaacccgactcgtcaacgatccaagcgcaactggaaatctaccatgccc

SEQ ID NO: 274902 - DNA, 359 bp, Glycine max
gacactaaacaagttaaaagaagagcatcactgaactaacaaagcaaccctatgtcgaaggtggtttgtgtcaccggagccagcggcgccatcggatcatgggtggtcctactcctcctccagcgtggttacaccgtccatgccaccgtccaagatatcaaggatgaaaatgagacgaaacatttggaggaaatggaaggagcaaagagtcatctccatttttttgaaatggatcttcttgacatcgactccattgccgctgccataaaaggttgttccggcgtaatccaccttgcatgtcctaacatcattggtcaagtcgaagatcccgagaaacagatattggaaccggcgattaa

SEQ ID NO: 274903 - DNA, 267 bp, Glycine max
gaacacactcatccaaacaaccttctttctttttctgtgagcctttctttcaggttcttaacttgatcagtgtgcagtgtccaaatcataagggtagctgcaaattgcaatggctaagcatgatgttgagggtggttccttctctgcaaaggactaccatgatcctcctccagcaccgttgattgatgctgaggaactcacacagtggtccttctacagggctttgattgctgagttcattgccacaatgctcttcctttacatcac

SEQ ID NO: 274904 - DNA, 325 bp, Glycine max
gggatttccaaagtttttaatagagggggggtctcagaaaatcgaagaattacagacgaatatgcaaaaaaaactgaattgtgtgaatcgaaaactaaacattgctattgtaaaagttgcaaatgcttataaacaccctaatattattgcagaatttatagctggacaattaaagaatagagtttcgtttcgtaaagcaatgaaaaaagctattgaattaactgaacaggcgggtacaaaaggagttcacgtacaaattgcaggacgtatcgacgggaaagaattgcacgtgttgatggatcagagaagtagaagtctttacaac

SEQ ID NO: 274905 - DNA, 383 bp, Glycine max
gaagatggagatgtatcagatctggagcaggagaatagcgttgggagcgttcgcgtttgttctgcttttcctatcggcctcagcagacgacgtcgttgtgctctctgaagataacttcgagaaggaagttggtcaggacagaggagctctcgttgagttctatgctccttggtgtggacactgcaaaaagcttgctccagaatatgaaaagcttggtagcagcttcaagaaagccaaatctgttttaatcggcaaggttgactgtgatgagcacaagagtttgtgcagcaaatatggagtctctgggtacccaacaattcagtggtttccaaaaggatctcttgaacccaaaaagtatgaagggccacgcactgctgattcac

SEQ ID NO: 274906 - DNA, 386 bp, Glycine max
  unsure (1)..(386): unsure at all n locations
gatattattggacatattgttgaatttagctctgatcagcatggaagtcgatttatacagcagaagttggaaagttgtagtggcgaagagaaggcattggtgtttaaagaggttcttccacatgcttctaaattaatgactgatgtatttggtaactacgtaatacagaagttttttgagtatggaagctcggagcagaggagggaacttgcagatcgacttgttggccagatactgcctttgagtttgcagatgtatggctgtcgtgtaatccaaaaagcacttgaagttattgagctngaacagaaagctcagcttgttcatgagctagatggaaatgttatgagatgtgttcgtgatccaaatggtaaccattgtattcaaaa

SEQ ID NO: 274907 - DNA, 321 bp, Glycine max
ttgggttggtgattacattcagcaacatcaagacatgggtttagaggcttatactgaatcagtatatggaaaattggatctgaattctgtacaaaagatgtttcttaagggaatgtgtagttttggcagtactgattctgacatagttgagatttaccactgctcaggtgcgtcaatgcaagcacgatgggagctgttccagaagcaagctgaaattaccaaaaaaaatcatggggaagctaacattcggtatgcttggcttgcttcctctaaaggagaactatctacaatgatgaactattgacttaatcattattgact

SEQ ID NO: 274908 - DNA, 335 bp, Glycine max
ggctttttaggttattttcttaagtaaaaagaaggaaataaataattctcgtagctttgttgctcttataaattctattctggttgacgcttctctcaccatccccatttcgcgttggtgcaaagcatccttcgtttcaatttctctctctcagcgctttctgcaatcgaacctttcatctccaaagggatccacaggccgaaggagaaatggggctgacattcacaaagcttttcagtcggcttttcgcgaagaaggaaatgcgaattctgatggttggtcttgatgctgctggtaagaccactatcctgtacaagctcaagctcggagagatc

SEQ ID NO: 274909 - DNA, 291 bp, Glycine max
gatgcggaatggggaggtccaggtgatgatgacaagatgctgcttgaacttttagttttgagcggtgctcaagttggatctgattggacctcaaccttgaagaaacgcctagatttcaggtctgcattttcagaatttgatgcataaaccgtggctaacttgactgataagcaaatgatgtctattagttctgaatatggcattgacataagcagagtccgaagagctgatgataatgctaaccaaatcttagagattaagaaagactatggttcatttgacaagtacatt

SEQ ID NO: 274910 - DNA, 256 bp, Glycine max
ggacaaagaactcacgagtgattttgagaggctggttcatctttgggacacttgattctgctgaacgtgatgcatttttggcaaacgaggcgactaaaaaatggacttcaagcaatcaagttctggtggaaatagtctgcactaagtcctttgaacaattggttgctgccaagaaggcttaccatggtctttataagaagtctctggaagaagatgttgctcattacacaacaggagactttcgtaagctcatact

SEQ ID NO: 274911 - DNA, 335 bp, Glycine max
gataggcatgatatcttgtttgcaacaccctaatctggtgaaacttcatggattttgcattgaaggggatcaattgatattggtgtatgagtacatggaaaataatagcctggctcatgctttattcagctcaaaagatcaacttaaacttgattgggcaacaaggcttaggatctgtattggcatagcaaaaggtcttgcatttctacacgaagaatcaagactcaagatttttcatcgagacatcaaagctactaatgtgttactggatgggaatttaaaccctaaaatatctgactttgggctggctaagcttgatgaagagaaaacccatg

SEQ ID NO: 274912 - DNA, 310 bp, Glycine max
gacggcagatcagatccattcttcaacaaatcccctgttcagtttgagtttttctcgaggatcccgtgaaacgacatggcgatggtggaccagcctctgtatccgattgccgttttgatcgacgagttgaagaatgaggacattcagctgcgcctcaactcgatccgaaggctctccacgatcgcgcgcgcgctcggcgaggaccgcacgcggaaggagctgattccgttcctcagcgagaacaacgacgatgactacgaagtgctcctcgcaatggccgaggaattaggtgtcttcattccctacgtct

SEQ ID NO: 274913 - DNA, 287 bp, Glycine max
tgccttttcaagtatcagtaagaatagaagggaggaggagtctttcatatttaaaaatgtaagcataaaatgtactgaaaggctgattgtttctcagtatgttctttatgacaggtcaaatgctatatgaagcaattgctatctggccttgagcattgccacagcagaggtgttttgcaccgtgatattaagggttcaaatctgcttattgacaatgaaggaatacttaaaattgcagattttggacttgcaactttctttgatcctaagcaaaagcatcccatgac

SEQ ID NO: 274914 - DNA, 438 bp, Glycine max
gaagaagaggcagagaagagcacgaagaatgctttggggaaggtgagcatggatggtgcaccgtatctacgaaaggtggacataaagttgtacaagagctaccaggagctgtcagatgcgctggctaagatgttcagttccttcacgattgaaaagtgtggattccaagttatgatggattttatgaatgatatctatagctctaactatgtaatcacatatgatgacattttcgttgactgatactttgtctgtgttgttttttatggttttgaattttatttatttcaatttgttttttgtttaataatttttttattattttttatttattaaattttattctattttttttatttttgttttttttattatgattttttgtttattatttttattttttatttttattcttatttttatatttttctatttttt

SEQ ID NO: 274915 - DNA, 258 bp, Glycine max
tgaagaaggttggttacaacccagacaagattccatgtgtgcccatctctggtttcgagggtgacaacatgattgagaggtccaccaaccttgactggtacaagggaccaactctccttgaggctcttgaccaaatcaatgagcccaagaggccctcagacaagccactcaggcttccattgcaggatgtctacataattggtggtattggtaccgttccagtgggacgatttgagactggtgtcttgtaacccggta

SEQ ID NO: 274916 - DNA, 343 bp, Glycine max
gatatgtatcttgttgcgaggtgtgaggggcatagtggtgttgatgtgaacaagcagaggtcgttccttactttgaatgcgttgaacgagtttgatcctaagtattccggtgtggattggaggcagaagttggagactcagaggggtgctgtgttggctactgaacttaagaacaatgcgaataagttggctaagtggactgctcatgctcttttggcgagtgcggatacaatgaagttagggtatgtgtcgaggattcatccccgcgatcatttcaatcatgtgattttggctgtggttggctataaacccagggactttgcagcacagattaatttgaaca

SEQ ID NO: 274917 - DNA, 313 bp, Glycine max
ggcacaggtggagaaagtatatatggggggaaatttgcagatgaaaatttcaaactaacacatgatggacctggcattctttctatggctaatagtggtcctaacacaaatggatctcagttctttattacattcaagcgccaacctcatcttgacgggaaacatgttgtttttggaaaagttgtcaacggaatagacattttgaagaaaattgagcaggtgggaacatctgatgggaaacctacccagccagttaaaattattgattgtggtgaagtctcttgaacaaaaattcagcatactgcagagaagg

SEQ ID NO: 274918 - DNA, 362 bp, Glycine max
tacagacagagttggagagttagctgagaagcatggactgaagcttcacattgatggggcccgtatttttaacgcatcagttgcacttggtgttccagtggataggcttgtccaggcggctgattcagtttccgtttgcctatctaaaggtataggtgctccagttggatctgttattgttggttccaagaattttattgccaaggctagacgactccggaaaaccttaggaggtggaatgagacagattggcctcctttgtgccgctgcacttgttgccttgcaagaaaatgttgggaagcttgaaagtgatcacaagaaagctagacttttggctgatggattaaaagaagttaaaggac

SEQ ID NO: 274919 - DNA, 215 bp, Glycine max
tttatggtacttacagagttggatagttagctgggaatcaggaactgtatcttcacattgatggggcccatatttttaacgcatcatttgcacttggtgttccagtggataggcttgtccagtctgctgattcagtttccttttgcctatctaaaggtataggtgctccagttggatctgttattgttggttccaagaattttattgccattgct

SEQ ID NO: 274920 - DNA, 369 bp, Glycine max
ggaggataatcaataaacttaaacttatgttatggcgttctaactctgaacgatgaaatgaaatggagttccaagataagcgtttatctctgagatcgagcttgacgttcagcgagacgctgtgcgcagtgttcattccgttcataggaatagtcgaagctttggttttcacattcactagttgcttcgatttccaatctcccaggaataagaagaaacattcttctaccttcgacgacattctcaccctcgccgaggattctccatttagtattaatgaaatcgaagccttgcgtgagttgttcaagaagttgagtagttctatcattgatgatggcctcatccacaaggaagaactcacattggcac

SEQ ID NO: 274921 - DNA, 284 bp, Glycine max
ggattgagtaattcagctaacagaaagggatgaatgggcctaccaagaaatgatcactcatcttcctctttgctctattccaaaccctaaaaaggttttggttatcggtggaggtgatggaggggtcatacgagaagtagcacgccattcttcagttgaaaagatagacatttgtgaaattgacaagatggttgttgatgtctccaaacaatacttccctgatgtaactgttgggtatgatgatcctcctgtgacacttcatattggtgatggaattgcatttt

SEQ ID NO: 274922 - DNA, 334 bp, Glycine max
ggttctagtgtgtgattgtttgttgttgtaactcgtgcttcttcttttgttgttctgtgtttgtgtttgttttttctctcacctgaaaatgtcttgctgcgttggtaactgtggttgcgtaagctcctgcaagtgcttcaacgtctgccgaggctgcaagatgtacccagacttgagctacactgagtcatccaccaccgagaccttggtcatgggagtggcacctgttaaggctcaatttgagtgtgctgtaatgggtgtacccgctgagaacgatggctgcaaatgcgtaccaaactgctcctgcatcccctgcacttgcaagttatgtgat

SEQ ID NO: 274923 - DNA, 292 bp, Glycine max
ggatactagaacctgcagatcgtgatgctgttttggccaatgttgccatcaagaatggcaaaaactacaatgtcattgtggaaatcgccactatcctctccccggaagagcttttggccgtgagacgtgcttatctcaaccgctacaagcactccttggaagaagatgttgcagctcatacctctggccatctacgccagcttttagtggggttggtgacctcatataggtatgttggtgatgagatcaatccaaaattggcacaaactgaagctgaaattcttcatgatgc

SEQ ID NO: 274924 - DNA, 397 bp, Glycine max
  unsure (1)..(397): unsure at all n locations
gacttcaaagtggagaaaaacacacacggttggttcattctctcgcttttctttttcctcaaaaagttgaaaaagaataaagggggaacaatcgagtgaagttgttgctcttcaatagtaaacttacctatggaagagggaagggttgtgagtgagtacacaaaagatggaactgtggatcttaaagggaaacccattctcaaatccaaaagtggtggttggaaagcatgctcctttgttgttggtatctctctctctcactataaattttatatggtcattttcatcttgttttggacattaatttcaaaagcaatttcccaaaacattggaagcttcatgatgttttgttaacaaaaatcttaatttcctctgatcgagagacattgntcaattc

SEQ ID NO: 274925 - DNA, 237 bp, Glycine max
tggtactttaaattggttacaaactcaaccagattccataggctctcgtttatgttttctatgatgacaacattattgaaaagtccaccaacactttactggtacaaggtactatctaatcttgaacctacctaccaaataaataatcccaataagccattacacaaaccactcaagctttcattttaaaatgtctaccaattttataatcttaataccttgccaataagaattctt

SEQ ID NO: 274926 - DNA, 447 bp, Glycine max
ggaggaagccacatagagacacaatacagagtgaggggttgctcgtgtcgccacaactctctgccaacatgggtatctccagagattctatgcacaagaggcgtgccactggtggcaagaagaaggcctggaggaaaaagagaaagtatgagcttggtcgccagcctgctaacactaagctgtcaagcaacaagacagtcaggaggatccgtgttagaggtggaaatgtgaaatggagggcattgagattggatactggaaattactcctggggaagtgaagctgtaactcgcaagactcgtgtactagatgtggtttacaatgcctcaaacaatgagcttgtgcgtactcagactcttgtcaaaagtgctatcgttcaagttgatgctgctccattcaaacaagtgtatctttaacactatggtgttgagattggtggaaaaagaa

SEQ ID NO: 274927 - DNA, 334 bp, Glycine max
gggggaattgactagtgcggcgcgctcctatgatcaccgtagacggcggaggtggcggtggtggtgtagacacggcgtgacggcgatctcttgagataaatgttggttgaaagaggaagaagaagaagagttgtattgtagaatgagccaaccaacggtgatacttgccactgcgagctatgatcacactattcgtttttgggaggccaagagtggccgttgctaccgcaccatccaatatcctgattcgcaagtaaaccggctggagataaccccggataaacgctttctggctggagctggcaatccacacatacgactggttgatggtaac

SEQ ID NO: 274928 - DNA, 332 bp, Glycine max
gggcaaacaagtggtggaaagacatacacgatggttggaataactgaatacgctgttgcagatatttttgactatatagagaggcatgaagaaagagcatttatattgaagttctcagcaattgaaatttacaatgaagttgttagagacctcctcagcactgacaacaacactccacttagactacgtgatgatcctgagaaagggcccattttagagaaactcacagaggagactctacgggactgggagcatttaaaagagcttctagccttcagtgaagctcagagacaggtgggagagacatacctaaatgaaaagagttctagatc

SEQ ID NO: 274929 - DNA, 415 bp, Glycine max
gagcgagggaagggaagcatctttagctccaatggcggatacctgaggtcgatccagggacctcgacaagctccttctccgccctggcaatctcgtcggtcccaggttcgaaccaggcgctgagttgcgagatgaccttcaggccttcgccaaagtgttggtggtaggggccggtggcttaggttgtgagttgttgaaggatttagccctctctggtttccgaaaccttgaggtcattgatatggatcgcatagaggttactaatctcaaccgccaattcttgttcagacttgaagatgttggcaaacccaaagccgaagtagctgccaagcgtgtcatggagagaattactggtgtcgaaattgtgccccacttttgcaggattgaggacaaggaaatagaattttacaatgat

SEQ ID NO: 274930 - DNA, 297 bp, Glycine max
gggcaaacaagtgggggaaatgcatacactatggttggaataactgaatacgctgttgcagatatttttgactatatagagaggcatgaagaaagagcatttatattgaagttctcaccaattgaaatttacaatgaagttgttagagacctgctcagcactgacaacaacacttcacttagactacgtgatgatcctgaaaaagggcccattttagagaaactcacagaggagactttacgggactgggagcatttaaaagagcttctagccttcagtgaaacttaaaaacaagtt

SEQ ID NO: 274931 - DNA, 284 bp, Glycine max
aggaacagcaatgaagaagaggcagagaagagcacgaagaatgctttcgtgaaggtgagcatggatggtgcaccgtatctacgaaaggtggacataaagttgtacaagagctaccaggagctgtcagatgcgctggctaagatgttcagttccttcacgattgaaaagtgtgggtcccaagggatgaaggattttatgaatgagaccaatggctctgactatgtacccacatatgaagacatggacggagactggatgctcgtcggtgatgtgccctgggagat

SEQ ID NO: 274932 - DNA, 405 bp, Glycine max
ggcagttcaattgatcaactcagatttcagggacctaagtctagctgctaatagactcgcccatcatgccatcaaacttggtggcattggctttggagcctcttttttcggattgtttgctgccattgctgctatttatctgttgattttggatcgtacaaactggaaaacaaatattctcacagcactactcattccatacattttctttagcttgccttcattaattttcgacgtcttcaggggagagcttgggaaatggattgctgcatttgctgttgtattacgcctttttgcttcaagacactttcctgaatggctggaattgcctggtgctctgattcttcttatcgtgggagcctcttctctaattgcaagcacctttagagacaacattgttggggt

SEQ ID NO: 274933 - DNA, 401 bp, Glycine max
gacaatcaatcttctttatccactctctcttaattaaattaaaacaaaaaatgtgcgctgccatatccgaagtggaacaagaagagttgctcgaaaaattggaggtgttcaagatcaaaggcagggacaagcatggccgcaagatccttcgcattatcgccaaattcttcccaggtagattgattaattaattaattaaatccctaattcctttttttttatgtgcatgaattttttaaatcttcggtaattgtttgaattgaggacagcacggttggtgagtgttgaggttctgaaaaagtacctggaggagagggttttcccgaagctgatggggaagaggaaattcgcggtgctgtacgtgcacaccggcgttcagaggagcgagaaatttcccggaa

SEQ ID NO: 274934 - DNA, 393 bp, Glycine max
gagagaaagagagagaaagatgtcgaagcgtggtcgtggtggttcggcggggaacaagttccgcatgtcgctgggtcttccagtggcggcgacggtgaactgcgccgacaacacgggggcgaagaacctctacatcatttctgtgaaagggatcaaaggccgtttgaaccgtcttccctcggcctgcgttggcgacatggtgatggccaccgtgaagaagggaaaacccgatctgaggaagaaagtcttgccagctgtcatcggtcgccagcgcaagccatggcgcctaaaggacggcgtctacatgtacttcgaagataatgctggtgttattgtcaatcccaagggagaaatgaaaggttctggtatcactggtcccattggaaaagagtg

SEQ ID NO: 274935 - DNA, 435 bp, Glycine max
tcgagacgacagaaggggagagaaagacaaataaaagaagctgcatttgcagagacgcattcgcgtttgtctgagagagagaattggaaggttgcgacgagtgatgatatacatattgtggcggtagtgaaatcgaggaaaaagaggtagcaatcgtgagttgcaatgagtagcgaaaagtctccttcatcagcttctgcttcagcttcttcttcgagtagctacgagttgagcaaaggcatcaatggcctcgacaaggttattcttcgcgacccacgtggtagctccgctgaggtgtacttgtacggtgctcacgtgacttcatggaagaatgaacaggccgaggaattgctttttctcagtagtaaggctatatttaagcctccaaagccaattcgtggagggatcccaatatgttttccttaattttcaaac

SEQ ID NO: 274936 - DNA, 408 bp, Glycine max
ggcatcgaacagagagagagagaatggcagcacttggtgggaatcgtgatgtgacaggaagccagaacagcgttgagatcgatgctctagctcgctttgctgttgaagaacacaacaaaaaacagaatgcccttttggagtttgaaaaggtggtaactgcgaaacagcaagtggtttctggtaccttgtacaccatcactttggaggcaaaagatggtgggcaaaagaaggtttatgaagccaaagtttgggagaagtcatggttgaacttcaaggaggtgcaagagttcaagcttgttggagatgcaccttcatagtctagtgcttaattaggttgctgaagagtgaagaatgagacagcctggttcgaaggggaaaagcctaaggatatatcaaaggatcctatat

SEQ ID NO: 274937 - DNA, 411 bp, Glycine max
gatgggagaatcttattgtcaaggagttttgatggttcattgaaggtttgggatctgcgcaaaacaaaagaaccgttaaaagtatttgaggatctgccaaatcactatgcacaaacaaatattgccttcagtcctgatgagcgactctttttgactggaacatctgtggaaagggagagcatgacaggaggtttattgtgcttctttgatagagtaaatcttgagcttgtttcaaaagttggcatatcacccacttgtagtgttgttcaatgttcttggcatcccaaactgaatcacatctttgcaactactggtgataaaagccaaagtgggactcacatactatatgatccaaccgtaagtgaaagatgagctcttgtatgtggtgcacgtgcaccaaggaaaaaatca

SEQ ID NO: 274938 - DNA, 331 bp, Glycine max
caaggacacgaggtggatatatatgagtcaaggccttttattggtggcaaagttggttcttttgttgacaaaggtgggaatcacattgaaatgggattgcatgttttctttggttgctacaacaatcttttccgattgatgaagaaggtgggtgcggataacaatctacttgtaaaggatcacactcacacttttgttaacaaagggggtcaaattggaaaactagattttcgcttcccaattggggcaccaatacacgggataagggcgtttttgtccacaaatcaacttaatacttatgataaggcttgaaatgctgtggcttttgcac

SEQ ID NO: 274939 - DNA, 394 bp, Glycine max
gacagtattcaagatcggggaatcaatcaggtttatataattggaggagatggaactcagaagggtgcatctgcaatttttgaggaagtcagaaggcgtggtctcaaagtttcagttgtaggtatccccaaaaccatagataatgatatcccggttattgataagtcctttggctttgacactgctgttgaggaagctcaacgagctataaatgcagcacatgttgaagctgaaagtgttgaaaatggcataggtgttgtcaaagttgatgggtataaacagcgtatttattgcaatggatgctacacttgcaagtcgagacgtggacttgtgcttaattccagagtcacccttttaccttgaaaggcctgggggactctatgaatatatagag

SEQ ID NO: 274940 - DNA, 348 bp, Glycine max
gtctgaaagggaaaaaaagcaaagtcgcatcaaagacaagaaaaaaggttacctctttcaattttatccctgggtgtgagcttaattcaatttctgctcacacataatggcttgcacgctcgctgattcattactcctattcaagggttcttatcagaaaccagttctgaggagagacattgctgcccggtactccacgggtatatttagtctaaacagtaatgggcttatccagaaaaggttcatgcgtcaaaggaattttgttactacgaataaggttactggcatacatgccgtggcaatttcaagtcaaccagctccggtggaaagtgcagagtatataaaaca

SEQ ID NO: 274941 - DNA, 378 bp, Glycine max
ggagtgagtgagagaaagaagagaaggagttgaagtggttgttgtattgtagtagtgtgtaaagtcttggtgatggatagacacaaatgcaagctttgttcaaggtctttcagcaatggcagagcccttggtgggcacatgaaggctcaccttgcttctctccctctccctctccctccaaagcttcactcttgcttctctttctctgactcagaacaagaacaatctttaagggagaatcctaagaaaaccttgaggattctggatcctgaagacagagagagcgagacagagtctaataagaacccgacttgtcaacgatccaagcgcaactggaaatctaccatgcccaagctcagcctttgacaccccgaagcc

SEQ ID NO: 274942 - DNA, 378 bp, Glycine max
gacactaaacaagttaaaagaagagcatcactgaactaacaaagcaaccctatgtcgaaggtggtttgtgtcaccggagccagcggcgccatcggatcatgggtggtcctactcctcctccagcgtggttacaccgtccatgccaccgtccaagatatcaaggatgaaaatgagacgaaacatttggaggaaatggaaggagcaaagagtcatctccatttttttgaaatggatcttcttgacatcgactccattgccgctgccataaagggttgttccggcgtaatccaccttgcatgtcctaacatcattggtcaagtcgaagatcccgagaaacagatattggaaccggcgataaaaggaacggttaatgtgttg

SEQ ID NO: 274943 - DNA, 397 bp, Glycine max
gaacacactcatccaaacaaccttctttctttttgtgtgagcctttctttcaggttcttaacttgatcagtgtgcagtgtccaaatcataagggtagctgcaaattgcaatggctaagcatgatgttgagggtggttccttctctgcaaaggactaccatgatcctcctccagcaccgttgattgatgctgaggaactcacacagtggtccttctacagggctttgattgctgagttcattgccacaatgctcttcctttacatcacagtgctcactgtgattggttacaagagccagagtgatgtaaaggctgggggtgatgtgtgtggtggagttggcattcttggcgttgcttgggcctttggtggcatgatcttcattctggtgtactgcact

SEQ ID NO: 274944 - DNA, 260 bp, Glycine max
gggatttccaaagtctttaatagagggtaagtctcaaaaaatcgaagaattacagacgaatatgcaaaaaaatctgaattgtgtgaatcgaaaactaaacattgctattgtaaaagtggcaaatgcttataaacaccctaatattattgcataattgatagctggacaattaaagaatagagtttcgtttcgtaaagcaatgaaaaaagctattgaattaactgatcaggcgtgtacaaaaggagttttagttcaaattg

SEQ ID NO: 274945 - DNA, 312 bp, Glycine max
gaagatggagatgtatcagatctggagcaggagaatagcgttgggagcgttcgcgtttgttctgcttttcctatcggcctcagcagacgacgtcgttgtgctctctgaagataacttcgagaaggaagttggtcaggacagaggagctctcgttgagttctatgctccttggtgtggacactgcaaaaagcttgctccagaatatgaaaagcttggtagcagcttcaagaaagccaaatctgttttaatcggcaaggatgactgtgatgagcacattgatttgtgcagcaaatatggatgctctgtgtaccc

SEQ ID NO: 274946 - DNA, 324 bp, Glycine max
gatattattggacatattgttgaatttagctctgatcagcatggaagtcgatttatacagcataagttggaaagttgtagtggcgaagagaaggcattggtgtttaaagaggttcttccacatgcttttaaattaatgactgatgtatttggtaactacgtaatacagaagtattgtgagtattgaagctctgagcataggaaggaacttgcaaatcgacttgttggccagatactggctttgagtttgcagatgtatgggtggcgtgtgattcataaggcacttgaggttattgagcttgaacagaaagctcatcttgttcat

SEQ ID NO: 274947 - DNA, 371 bp, Glycine max
ggacaaagaactcacgagtgattttgagaggctggttcatctttggacacttgattctgctgaacgtgatgcatttttggcaaacgaggcgactaaaaaatggacttcaagcaatcaggttctggtggaaatagtctgcactaggtcctctgaacaattgtttgctgcgaggaaggcttaccatgttctttataagaagtctctggaggaggatgttgctcatcacacaacaggagacttccgtaagctcatactacctctggttagttcttatcgatatgaaggagatgaagtcaacttgaccctggcaaaaactgaagcaaaattgctgcatgagaagatttcaaacaaggcttaatatgatgacgact

SEQ ID NO: 274948 - DNA, 422 bp, Glycine max
gataggcatgatatcttgtttgcaacaccctaatcttgtgaaacttcatggattttgcattgaaggggatcaattgatattggtgtatgagtacatggaaaataatagcctggctcatgctttattcagctcaaaagatcaacttaaacttgattgggcaacaaggcttaggatctgtattggcatagcaaaaggtcttgcatttctacacgaagaatcaagactcaagatttttcatcgagacatcaaagctactaatgtgttactggatgggaatttaaaccctaaaatatctgactttgggctggctaggcttgatgaagagaaaacccatgtcaccacccgaatcgctgggacaataggatatatggcaccagaatatgcattatggggttacttgtcttacaaggctgatgtttaca

SEQ ID NO: 274949 - DNA, 242 bp, Glycine max
gacggcagatcagatccattcttcaacaaatccccttttcagtttcagtttttctcgaggatcccgtgaaacgacatggcgattgtggaccagcctctgtatccgattgccgttttgatcgacgagttgaagaatgaggacattcagctgtgccttaactcgatccgaaggctcttcacgatcgcgcgcgcgctcggctaggacctgacgcggaatgtgctgattccgttcctcagctagaa

SEQ ID NO: 274950 - DNA, 419 bp, Glycine max
tgccttttcaagtatcagtaagaatagaagggaggaggagtctttcatatttaaaaatgtaagcataaaatgtactgaaaggctgattgtttctcagtatgttctttatgacaggtcaaatgctatatgaagcaattgctatctggccttgagcattgccacagcagaggtgttttgcaccgtgatattaagggttcaaatctgcttattgacaatgaaggaatacttaaaattgcagattttggactggcaactttctttgatcctaagcaaaagcatcccatgactagtagagtcgtgaccctttggtaccgtccacctgagcttctctggggtctacgtcttaatgtgttggtgttgacctttggcagtgtggctgcattttggccgagctacttactggaaaagccatcatgcct

SEQ ID NO: 274951 - DNA, 243 bp, Glycine max
tgaagaatgttggttacaacccagacaagagtccatttgtgcccatctctggtttcgagggtgacaacatgattgataggtccaccaaccttgactggtacaagggactcaactctgcttgaggctcttgaccaaatcaatgagcccaataggccctcagacaagccactcaggcttccattgcatgatgtctacaaaattggtggtattggtaccgtgccagtgggacgtgttgagactggt

SEQ ID NO: 274952 - DNA, 345 bp, Glycine max
gatatgtatcttgttgcgaggtgtgaggtgcatagtgttgttgatgtgtacaagcagaggtcgttccttactttgaatgcgttgaacgagtttgatcctaagtattccggtgtggattggaggcagaagttggagactcatatggttgctgtgttggctactgaacttaagaacaatgcgaataagttggctaagtggactgatcatgctcttttggcgagtgcggatacaatgaagttagggtatgtgtcgaggattcatctcttggatcattttaattaatgtgattttgtgttgggtttggctttgaacctaaggactttgcagcacagattaatttgaaca

SEQ ID NO: 274953 - DNA, 331 bp, Glycine max
ggcacaggtggagaaagtatatatggggggaaatttgcagatgaaaatttcaaactaacacatgatggacctggcattctttctatggctaatagtggtcctaacacaaatggatctcagttctttattacattcaagcgccaacctcatcttgacgggaaacatgttgtttttggaaaagttgtcaacggaatagacattttgaagaaaattgagcaggtgggaacatctgatgggaaacctacccagccagttaaaattattgattgtggtgaagtctctgaaacaaaaattcagcatactgcagagaaggaaaaaaaaaattgagaat

SEQ ID NO: 274954 - DNA, 333 bp, Glycine max
tacagacagagttggagagttagctaagaagcatggactgaagcttcacattgatggggcccgtatttttaacgcatcagttgcacttggtgttccagtggataggcttgtccaggctgctgattcagtttccgtttgcctatctaaaggtataggtgctccagttggatctgttattgttggttccaagaattttattgccaaggctagacgactccggaaaaccttaggaggtggaatgagacagattggccttctttgtgccgctgtacttggttgtctgcatgaaaatgtttggaagctggaaagtgatcacaagaaagctagactttt

SEQ ID NO: 274955 - DNA, 439 bp, Glycine max
ggaggataatcaataaacttaaacttatgttatggcattctaactctgaacgatgaaatgaaatggagttccaagataagcgtttatctctgagatcgagcttgacgttcagcgagacgctgtgcgcagtgttcattccgttcataggaatagtcgaagctttggttttcacattcactagttgcttcgatttccaatctcccaggaataagaagaaacattcttctaccttcgacgacattctcaccctcgccgaggattctccatttagtattaatgaaatcgaggccttgcgtgagttgttcaagaagttgagtagttctatcattgatgatggcctcatccacaaggaagaactcacattggcactgttgaagaccaccaccggggagaatcttttccttgacaaggtgtttgatgtctttgatgaaaaaagaaa

SEQ ID NO: 274956 - DNA, 428 bp, Glycine max
  unsure (1)..(428): unsure at all n locations
ggatactagaacctgcagatcgtgatgctgttttggccaatgttgccatcaagaatggcaaaaactacaatgtcattgtggaaatcgccactatcctctccccggaagagcttttggccgtgagacgtgcttatctcaaccgctacaagcactccttggaagaagatgttgcagctcatacctctggccatctacgccagcttttagtggggttggtgacctcatataggtatgttggtgatgagatcaatccaaaattggcacaaactgaggctgaaattcttcatgatgctgtgaaagagaagaagggtagctatgaagagaccattaaggtcttgaccacaaagagcaagacccaacttgttgcaactttcaaccgctacagagagatccatggcacttncatctctaagaaactggtggatgaa

SEQ ID NO: 274957 - DNA, 392 bp, Glycine max
gacttcaaagtggagaaaaacacacacggttgggtcattctctctcttttctttgtcctcaaaaagttgaaaaagaataaagggggaacaatcgagtgaagttgttgctcttcaatagtaaacttacctatggaagagggaagggttgtgagtgagtacacaaaagatggaactgtggatcttaaagggaaacccattctcaaatccaaaagtggtggttggaaagcatgctcctttgttgttggtatctctctctctcactataaattttatatggtcattttcatcttggtttggacattaatttcaaaagcaatttcccaaaacattggaagcttcatgatggtttgttaacaaaaatcttaatttcctctgatcgaaagacattggtc

SEQ ID NO: 274958 - DNA, 354 bp, Glycine max
ggaggaagccacatagagacacaatacagagtgagttgttgctccttcgtcacaactctctgccaacatgggtatcttcagagattctatgcacaagaggcgtgccactggtggcaagaagaatgcctggaggaaaaagagaaagtatgagcttggtcgccagcctgctaacactaagctgtcaagcaacaagacagtcaggaggatccgtgttagaggtggaaatgtgaaatggagggcattgagattggatactggaaattactcctggggaagtgaagctgtgacttcgaagactcgtgtactagatgtggtttacaatgcctcaaacaatgagcttgtgcgtactcagac

SEQ ID NO: 274959 - DNA, 373 bp, Glycine max
gaaagaagagaaaataataatatgaataacaacccacaaaacttgggtcttgcaaattaagttcattttcctccctttcactctcgtagacatcacaaaccttccctccattcatcccacgcatggctgccatgaactctagcgtattggcctgtagctatgccatatcaggtgcagcgtgttcggagctcaatgggaaggtcacttccgtggcctatgttgcatgctctggctacaagttgccattgatcaaagctgaggccagagttcctaaagccaaagaatctgaaggaggaaggagatgtgcccttgttctcttggcagctacccttttcacctctgcagcttgcaattcttctggcaatgctgggat

SEQ ID NO: 274960 - DNA, 375 bp, Glycine max
gggcaaacaagtagtggaaagacatacacgatggttggaataactgaatacgctgttgcagatatttttgactatatagagaggcatgaagaaagagcatttatattgaagttctcagcaattgaaatttacaatgaagttgttagagacctcctcagcactgacaacaacactccacttagactacgtgatgatcctgagaaagggcccattttagagaaactcacagaggagactctacgggactgggagcatttaaaagagcttgtagcgcttcagtgaagcttagagacaggtgggagagacatacctaaatgaaaagagttctagatctcaccaaatcatcagattgacaatggagaggtcttggcagga

SEQ ID NO: 274961 - DNA, 354 bp, Glycine max
gagcgagggaagggaagcatctttagctccaatggcggatacctcaggtcgatccagggacctcgacaagctccttctgcgccctggcaatctcgtcggtcccaggttcgaaccaggcgctgagttgcgagatgaccttcaggccttcagcaaagtgttggtggtaggggccggtggcttaagttgagagttgttgaaggatttagccctatttgggttccgaaaccttgaggtcattgatatggatcgcatagaggtgtactaatctcaaccgtcaattcttgtttagactgtgaaattgtgtgatacccaaatccgatgtagctgacaagcgtgtcatggagagaattactg

SEQ ID NO: 274962 - DNA, 424 bp, Glycine max
  unsure (1)..(424): unsure at all n locations
aggaacagcaatgaataagaggcagagaagagcacgaagaatgctttcgtgaaggtgagcatggatggtgcaccgtatctacgaaaggtggacataaagttgtacaagagctaccaggagctgtcagatgcgctggctaagatgttcagttccttcacgattgaaaagtgtgggtcccaagggatgaaggattttatgaatgagaccaatggctctgactatgtacccacatatgaagacaaggacggatactggatgctcgtcggtgatgtgccctgggagatgttcgttggatcatgcaagcgtcttcgcataatgaaaggctccgaggcaatcgggcttgcgccaagagccgtggaaaagtgcaagaacagaagctgaagaagtgatttcatctgcgtcacaatgaancaaattgactcga

SEQ ID NO: 274963 - DNA, 395 bp, Glycine max
ggcagttcaattgatcaactcagatttcagggacctaagtctagctgctaatagactcgcccatcatgccatcaaacttggtggcattggctttggagcctcttttttcggattgtttgctgccattgctgctatttatctgttgattttggatcgtacaaactggaaaacaaatattctcacagcactactcattccatacattttcttcagcttgccttcattaattttcgacgtcttcaggggagagcttggaaaatggattgctgcagttgctgttgtattacgccttttccttccaagacacttccctgattggctggaattgcctggtgctctgattcttcttatcgttgtagctccttctctaattgcaagcacctttagagacaaca

SEQ ID NO: 274964 - DNA, 403 bp, Glycine max
gacaatcaatcttctttatccactctctcttaattaaattaaaacaaaaaatgtgcgctgccatatccgaagtggaacaagaagagttgctcgaaaaattggaggtgttcaagatcaaaggcagggacaagcatggccgcaagatccttcgcattatcgccaaattcttcccaggtagattgattaattaattaattaaatccctaattcctttttttttatgtgcatgaattttttaaatcttcggtaattgtttgaattgaggacagcacggttggtgagtgttgaggttctgaaaaagtacctggaggagagggttttcccgaagctgatggggaagaggaaattcgcggtgctgtacgtgcacaccggcgtccagaggagcgagaattttcccggaatc

SEQ ID NO: 274965 - DNA, 398 bp, Glycine max
gagagaaagagagagaaagatgtcgaagcgtggtcgtggtggttcggcggggaacacgttccgcatgtcgctgggtcttccagtggcggcgacggtgaactgcgccgacaacacgggggcgaagaacctctacatcatttcggtgaaagggatcaaaggccgtttgaaccgtcttccctcggcctgcgttggcgacatggtgatggccaccgtgaagaatggaaaacccgatctgaggaagaaggtcttgccagctgtcatcgttcgccagcgcatgccatggcgccgaaaggacggcgtctacatgtacttcgaagataatgctggtgttattgtcaatcccaacggagaaatgaaaggttctgctatcactggtcccattggaaaagagtgtgctg

SEQ ID NO: 274966 - DNA, 417 bp, Glycine max
  unsure (1)..(417): unsure at all n locations
agacgacagaaggggagagaaagacaaataaaagaagctgcatttgcagagacgcattcgcgtttgtctgagagagagaattggaaggttgcgacgagtgatgatatacatattgtggcggtagtgaaatcgaggaaaaagaggtagcaatcgtgagttgcaatgagtagcgaaaagtctccttcatcagcttctgcttcagcttcttcttcgagtagctacgagttgagcaaaggcatcaatggcctcgacaaggttattcttcgcgacccacgtggtagctccgctgaggtgtacttgtacggtgctcacgtgacttcatggaagaatgaacaggccgaggaattgctttttctcagtagtaaggctatatttaagcctncanagcccaatcgtggagggatcccaatatgtttt

SEQ ID NO: 274967 - DNA, 429 bp, Glycine max
  unsure (1)..(429): unsure at all n locations
tggggcatcgaacagagagagagagaatggcagccctgggtgggaatcatgatgtgccaggaacccagaccagcgttaaaatcgttcctctacctcgctttgctgttgaagaacacaacaaaaaacagaatgcccttttggagtttgaaaaggtggtaactgcgaaacagcaagtggtttctggtaccttgtacaccatcactttggaggcaaaagatggtgggcaaaagaaggtttatgaagccaaagtttgggagaagtcatggttgaacttcaaggaggtgcaagagttcaagcttgttggagatgcacctgcatagtctagtgcttaattaggttgctgaagagtgaagaatgagacagcctggttcgaaggggaaaagcctaaggatatatcanaggatcctatatgtataaaataaatgttgc

SEQ ID NO: 274968 - DNA, 422 bp, Glycine max
  unsure (1)..(422): unsure at all n locations
gatgggagaatcttattgtcaaggagttttgatggttcattgaaggtttgggatctgcgcaaaacaaaagaaccgttaaaagtatttgaggatctgccaaatcactatgcacaaacaaatattgccttcagtcctgatgagcgactctttttgactggaacatctgtggaaagggagagcatgacaggaggtttattgtgcttctttgatagagtaaatcttgagcttgtttcaaaagttggcatatcacccacttgtagtgttgttcagtgttcttggcatcccaaactgaatcacatctttgcaactactggtgataaaagccaaggtgggactcacatactatatgatccaaccgtaagtgaaagaggagctctcgtatgtgtngcacgtgcaccaaagaaaaaatcaattgatgactt

SEQ ID NO: 274969 - DNA, 400 bp, Glycine max
  unsure (1)..(400): unsure at all n locations
caaggacacgaggtggatatatatgagtcaaggccttttattggtggcaaagttggttcttttgttgacaaaggtgggaatcacattgaaatgggattgcatgttttctttggttgctacaacaatcttttccgattgatgaagaaggtgggtgcggataacaatctacttgtaaaggatcacactcacacttttgttaacaaagggggtcaaattggagaactagattttngcttnccaattggggcaccaatacacgggataagggcgtttttgtccacaaatcagcttaatacttatgataaggctagaaatgcttgggctcttgcactcagtccagttgtcaaagctcttgttgatccagatggtgcactgagggacataaagaaattggatagta

SEQ ID NO: 274970 - DNA, 426 bp, Glycine max
gacagtattcaagatcggggaatcaatcaggtttatataattggaggagatggaactcagaagggtgcatctgcaatttttgaggaagtcagaaggcgtggtctcaaagtttcagttgtaggtatccccaaaaccatagataatgatatcccggttattgataagtcctttggctttgacactgctgttgaggaggctcaactagctataaatgcagcacatgttgaagctgaaagtgttgaaaatggcataggtgttgtcaagttgatgggtagaaacagcggatttattgcaatgtatgctacacttgcaagtcgagacgtggactgttgcttaattccagagtcacccttttaccttgaacgtcctggtggactctatgaatatatagagaaaagcctcacagaaaatgggcacatggttatc

SEQ ID NO: 274971 - DNA, 333 bp, Glycine max
gtctgaaagggaaaaaaaaaaaaatcgcatcagattctggataaaaggttacctctttcaattttatccctggttgtgagcttaattcaatttctgctcacacataatggcttgcacgctcgctgattcattactcctattcaagggttcttatcataaaccagttctgaggagagacattgctgccctgtactccccgggtttatttagactaaacagcaatgggcttatacagaaaaggttcaagcgtgaaacgaattttgttactacgaatacggttactgtcatacatgccgtggcaattccagtacaaccagctccggtggaaagtgc

SEQ ID NO: 274972 - DNA, 429 bp, Glycine max
ggatgcagagaaggtactagtttagtgtcacgaaaataagccgcagacgcaaacgtgaaaacacagacaagacgcatacgtccgtctcaacgtgtttgagattataaagacttagtggaagggtaagctgaagttgaagagttgaggggaaaacaagcagtgaaggaggttgaggtactcaataaagttttgatttgtttgaattggggggcttgttgccaatgttggatacagttgtatgtgctagaaacagtcaacagtcgcttcataaggtgaagttgacattctagtagtggaaagggccagagtcgagatgattatatatgtttgatttgcctctacacactggcaatccttaagtctgacagatgggcttttataatgaagaagagaagactgaagactacctcttcaagattgttttaattg

SEQ ID NO: 274973 - DNA, 378 bp, Glycine max
ggagtgagtgagagaaagaagagaaggagttgaagtggttgttgtattgtagtagtgtgtaaagtcttggtgatggatagacacaaatgcaagctttgttcaaggtctttcagcaatggcagagcccttggtgggcacatgaaggctcaccttgcttctctccctctccctctccctccaaagcttcactcttgcttctcttcctctgactcagaacaagaacaatctttaagggagaatcctaagaaaaccttgaggattctggatcctgaagacagagagagcgagacagagtctaataagaacccgactcgtcaacgatccaagcgcaactggaaatctaccatgcccaagctcagcctcggacaccccgaagcc

SEQ ID NO: 274974 - DNA, 378 bp, Glycine max; identical to SEQ ID NO: 274942

SEQ ID NO: 274975 - DNA, 425 bp, Glycine max
  unsure (1)..(425): unsure at all n locations
gaacacactcatccaaacaaccttctttctttttctgtgagcctttctttcaggttcttaacttgatcagtgtgcagtgtccaaatcataagggtagctgcaaattgcaatggctaagcatgatgttgagggtggttccttctctgcaaaggactaccatgatcctcctccagcaccgttgattgatgctgaggaactcacacagtggtccttctacagggctttgattgctgagttcattgccacaatgctcttcctttacatcacagtgctcactgtgattggttacaagagccagagtgatgtaaaggctgggggtgatgtgtgtgggggagttggcattcttggcgttgcttgggcctttggtggcatgatcttcattctggtgtactgcactgctggaatctcanggggtcacataaacc

SEQ ID NO: 274976 - DNA, 416 bp, Glycine max
gggatttccaaagtttttaatagaggggaagtctcaaaaaatcgaagaattacagacgaatatgcaaaaaaaactgaattgtgtgaatcgaaaactaaacattgctattgtaaaagttgcaaatgcttataaacaccctaatattattgcagaatttatagctggacaattaaagaatagagtttcgtttcgtaaagcaatgaaaaaagctattgaattaactgaacaggcgggtacaaaaggagttcaagtacaaattgcaggacgtatcgacggaaaagaaattgcacgtgttgaatggatcagagaaggtagagttcctctacaaaccattcgagcgaaaatcgattattgttgctatacagttcgaactatttatgggggtttagggatcaaagtttggaaattttctaaat

SEQ ID NO: 274977 - DNA, 378 bp, Glycine max
gacggacgagggtttcgtttcgggtttgacgttgttcacggtcactttctgcgcttcactcactcccttcgtgcggttttctttctttgtcgaactcgtgcgaaaatgcgtgagattcttcacatacagggagggcaatgcggaaaccacatcggagcgaacttctgggaggtggtgtgcgcggagcacggcatcgattccacggggaggtaccagggggacaacgagttgcaactcgagcgagtcaacgtctattacaatgaagcgagttgcggaaggttcgtgccgagggcggtgctcatggatctagagccagggaccatggacagcgtcagatctggtccctacggtcagattttccgacctgataacttcgtc

SEQ ID NO: 274978 - DNA, 319 bp, Glycine max
gaagatggagatgtatcagatctggagcaggagaatagcgttgggagcgttcgcgtttgttctgcttttcctatcggcctcagcagacgacgtcgttgtgctctctgaagataacttcgagaaggaagttggtcaggacagaggagctctcgttgagttctatgctccttggtgtggacactgcataaagcttgctccagaatatgatatgcttggtagcagcttcaagaaagccatatctgttttaatcctcaaggatgactgtgatgagcacatgagtctgtgcagcaaatatggagtctctgggtacccaacaatt

SEQ ID NO: 274979 - DNA, 358 bp, Glycine max
gatattattggacatattgttgaatttagctctgatcagcatggaagtcgatttatacagcagaagttggaaagttgtagtggcgaagagaaggcattggtgtttaaagaggttcttccacatgcttctaaattaatgactgatgtatttggtaactacgtaatacagaagttttttgagtatggaagctcggagcagaggagggaacttgcagatcgacttgttggccagatactgcctttgagtttgcagatgtatggctgtcgtgtaatccaaaaggcacttgtggttattgagctcgaacagaaagctcagcttggtcatgagctagattgaaatgttatgagatgtgttcgtg

SEQ ID NO: 274980 - DNA, 383 bp, Glycine max
ggctttttaggttattttcttaagtaaaaagaaggaaataaataattctcgtagctttgttgctcttataaattctattctggttgacgcttctctcaccatccccatttcgcgttggtgcaaagcatccttcgtttcaatttctctctctcagcgctttctgcaatcgaacctttcatctccaaagggatccacaggccgaaggagaaatggggctgacattcacaaagcttttcagtcggcttttcgcgaagaaggaaatgcgaattctgatggttggtcttgatgctgctggtaagaccactatcctgtacaagctcatgctcggagagatcgttaccacaattcctaccatcgggttcaatgttgagactgtggaatac

SEQ ID NO: 274981 - DNA, 406 bp, Glycine max
gggctttgaggttggagtgtttttccaagaatggaactgcgggtatctacgtgaggcccattagtggcataaacattctcgctgatcttgacacaatgaagattgttgagtaccatgataacgttgttgagcctgttcctaaggcggagaacaccgaataccgggcttcgcatttgaagccaccgttcagtccacggcttcattcttttgcctcgcatcaacccgaaggacccgggttcactatcaaaagacatagtataagctgggccaattggaagttccacatatgttatgatgtgcgagctggtgtgataatttcaactgcatcaatttacgaccctgaagtgcataagtcacgtcaagtattatacagagggtacatttctgaattatttgtgccatatca

SEQ ID NO: 274982 - DNA, 376 bp, Glycine max
  unsure (1)..(376): unsure at all n locations
ggacaaagaactcacgagtgattttgagaggctggttcatctttggacacttgattctgctgaacgtgatgcatttttggcaaacgaggcgactaaaaaatggacttcaagcaatcaggttctggtggaaatagtctgcactaggtcctctgaacaattgtttgctgcgaggaaggcttaccatgttctttataagaagtctctggaggaggatgttgctcatcacacaacaggagacttccgtaagctcatactacctctggttagttcttatcgatatgaaggagatgaggtcaacttgaccctggcaaaaactgaggcaaaattgctgcatgagaagatttcaaacaaggcttantatgatgacgacttcatc

SEQ ID NO: 274983 - DNA, 421 bp, Glycine max
gataggcatgatatcttgtttgcaacaccctaatcttgtgaaacttcatggattttgcattgaaggggatcaattgatattggtgtatgagtacatggaaaataatagcctggctcatgctttattcagctcaaaagatcaacttaaacttgattgggcaacaaggcttaggatctgtattggcatagcaaaaggtcttgcatttctacacgaagaatcaagactcaagatttttcatcgagacatcaaagctactaatgtgttactggatgggaatttaaaccctaaaatatctgactttgggctggctaggcttgatgaagagaaaacccatgtcaccacccgaatcgctgggacaataagatatatggcaccagaatatgcattatggggttacttgtcttacaaagctgatgtttac

SEQ ID NO: 274984 - DNA, 358 bp, Glycine max
gacggcagatcagatccattcttcaacaaatccccttttcagtttcagtttttctcgaggatcccgtgaaacgacatggcgatggtggaccagcctctgtatccgattgccgttttgatcgacgagttgaagaatgaggacattcagctgcgcctcaactcgatccgaaggctctccacgatcgcgcgcgcgctcggcgaggaccgcacgcggaaggagctgattccgttcctcagcgagaacaacgacgatgacgacgaattgctcctcgcaatggccgaggaattaggtgtcttcattccctacgtctgaggcgttgagcacgccaacgtgctttttttcttccttggagacgctc

SEQ ID NO: 274985 - DNA, 421 bp, Glycine max
tgccttttcaagtatcagtaagaatagaagggaggaggagtctttcatatttaaaaatgtaagcataaaatgtactgaaaggctgattgtttctcagtatgttctttatgacaggtcaaatgctatatgaagcaattgctatctggccttgagcattgccacagcagaggtgttttgcaccgtgatattaagggttcaaatctgcttattgacaatgaaggaatacttaaaattgcagattttggactggcaactttctttgatcctaagcaaaagcatcccatgactagtagagtcgtgaccctttggtaccgtccacctgagcttcttctggggtctacgtcttatggtgttggtgttgacctttggagtgttggctgcattttggccgagctacttactggaaagccaatcatgcctg

SEQ ID NO: 274986 - DNA, 382 bp, Glycine max
gaatatgaggctgagaatagcacgaagagcgcttttttgtacgcgtgattgtactgaacaccatacatactttgggtacgcgtaaacttatatatgctccccattcaatcgtggtatgcgggaaataagttgacatttatactgttaacaattgttttatccgacgtatgatcaccatgttctttataacaagtctgtagaggaagatgtttctcatcaaacaacaatagacttacgttagcgtcatactacctgtggttagttcttatacatatgaaagaaatgaagtctacctgacccttgctaaaaatgaagcgacattgctgcataaaaaaatttcaaaccaagctttttatgatgacaactttatcatgatttttgc

SEQ ID NO: 274987 - DNA, 350 bp, Glycine max
tgaagaaggttggttacaacccatacaagattccatttgtgcccatctctggtttcgagggtgacaacatgattgagaggtccaccaaccttgactggtacaagggaccaactctccttgaggctcttgaccaaatcaatgagcccaagatgccctcatacaagccactcatgcttccattgcaggatgtctacaaaattggtggtattggtaccgtgccagtgggacgtgttgagactggtgtcgtgaagcccggtatggtggtgacttttgttcccactgggctgacaactgaggttaagtctgttgagatgcaccatgaggctctcacagaggctcttacaggtgac

SEQ ID NO: 274988 - DNA, 343 bp, Glycine max
gatatgtatcttgttgcgaggtgtgaggtgcatagtgttgttgatgtgaacaagcaaaggtcgttccttactttgaatgcgttgaacgagtttgatcctaagtattccggcgtggattggaggcagaagttggagactcagaggggtgctgtgttggctactgaacttaagaacaatgcgaataagttggctaagtggactgctcaggctcttttggcgagtgcggatacaatgaagttagggtatgtgtcgaggattcatccccgcgatcatttcaatgatgtgattttggctgtggctggctataaacccatggactttgcaacacagattaatttgaaca

SEQ ID NO: 274989 - DNA, 327 bp, Glycine max
ggcacaggtggagaaagtatatatggggggaaatttgcagatgaaaatttcaaactaacacatgatggacctggcattctttctatggctaatagtggtcctaacacaaatggatctcagttctttattacattcaagcgccaacctcatcttgacgggaaacatgttgtttttggaaaagttgtcaacggaatagacattttgaagaaaattgagcaggtgggaacatctgatgggaaacctacccagccagttaaaattattgattgtggtgaagtctctgaaacaaaaattcagcatactgcagagaaggaaataaactacaaa

SEQ ID NO: 274990 - DNA, 396 bp, Glycine max
cacggtcagtcgttggaagaaacctgagattggttgggtgaagctgaacgtggatggttcacgcgacccatacaaaagttcctccgctggttgtggtggtgttctgagggacgcatcagcaaagtggctccgtggctttgctaaaaaactgaaccctacttatgcagtgcaccagacagagttagaagccattctcacgggcttgaaggtggcttcagagatgaatgttaagaaactaattgtggagtcagacagtgactctgtggtgagcatggtggagaatggggttaagcccaatcaccctgactatggtgtcgtggaacttataaggacgaagcggcgtcgttttgactgggaagtgaggtttgtttctgtctccaacaaggcgaatcgtgt

SEQ ID NO: 274991 - DNA, 412 bp, Glycine max
tacagacagagttggagagttagctaagaagcatggactgaagcttcacattgatggggcccgtatttttaacgcatcagttgcacttggtgttccagtggataggcttgtccaggcggctgattcagtttccgtttgcctatctaaaggtataggtgctccagttggatctgttattgttggttccaagaattttattgccaaggctagacgactccggaaaaccttatgaggtggaatgagacagattggcctcctttgtgccgctgcacttgttgccttgcaagaaaatgttgggaagctggaaagtgatcacaagaaagctagacttttggctgatggattaaaagaagttaaaggactgagagtggatgctggttctgtggagaccaatatggtatttattgacatt

SEQ ID NO: 274992 - DNA, 408 bp, Glycine max
ggaggataatcaataaacttaaacttatgttatggcattctaactctgaacgatgaaatgaaatggagttccaagataagcgtttatctctgagatcgagcttgacgttcagcgagacgctgtgcgcagtgttcattccgttcataggaatagtcgaagctttggttttcacattcactagttgcttcgatttccaatctcccaggaataagaagaaacattcttctaccttcgacgacattctcaccctcgccgaggattctccatttagtattaatgaaatcgaggccttgcgtgagttgttcaagaagttgagtagttctatcattgatgatggcctcatccacaaggaagaactcacattggcactgttgaagaccaccaccggggagaatcttttccttgaca

SEQ ID NO: 274993 - DNA, 425 bp, Glycine max
ggatggagtaattcagctaacagaaagggatgaatgtgcctaccaagaaatgatcactcatcttcctctttgctctattccaaaccctaaaaaggttttggttatcggtggaggtgatggaggggtcatacgagaagtagcacgccattcttcagttgaaaagatagacatttgtgaaattgacaagatggttgttgatgtctccaaacaatacttccctgatgtagctgttgggtatgatgatcctcgtgtgacacttcatattggtgatggagttgcatttttgaaggaagttccagaaggaacttatgatgctgttatagtggattcatccgaccctattggtcctgctcaggagctttttgaaaagcccttctttgcgtcagttgcaaaggctctttgtcccggtggagttgtgtgtactc

SEQ ID NO: 274994 - DNA, 228 bp, Glycine max
tgggttctagtgtgacattgtttgatgttggatctcgatcttcttcttttgacggtctgagttcgcgttcgttttttatatcacctgaaaatgtgtttctaccttgtgaactacggttgcggaagctcctgcaagtgcggcaacggctgctgatgctgcaacgatgtacccatacttgagctacactgagtcatcctccaccgaaaccttggtcatggtgagtggcac

SEQ ID NO: 274995 - DNA, 331 bp, Glycine max
caaggtttaactatatggaccctctgtacgaaaccctaggggctgattccgagttggacttggatcgtgccctttaggactctatgcgcgctaaaattgacgacgagctcaccaagctcgacgaaaagattgttgatgcctaggaaaacttatgatagagtgaagatcgagaggctcatttggcaaaatacttgctttttatcctgattatggacaaggagaaagccttggtacatttgaaggtaacagaaaccaaaacagttgcatttgggcagaaaatgcatcttggtgtatatacattgcagcttagtttacttgacatggattttga

SEQ ID NO: 274996 - DNA, 432 bp, Glycine max
aggtccctgaagtttggaaagttcttgacaagatccaggagttctctgagcagattcgcaatggttcttgggttggtgctacaggaaaggctttgaaggacgttgttgcaattggtattgggggaagcttcttaggtccactgtttgtacacactgcacttcaaacagaccccgaagctgttgaatctgcaaggggtcgtcagctgcgctttcttgcaaatgttgatcctattgacgtggctagaaatatcacaggattaaatcctgaaacaacacttgttgtggttgtttcaaagacttttacaactgctgagactatgctgaatgctcgaactcttagagaatggatttcatcagcacttgggccctctgcagttgcaaagcatatggtggctgttagcacaaatctcacgcttgtggaaaagtttggta

SEQ ID NO: 274997 - DNA, 412 bp, Glycine max
ggcagttcaattccaatatattccattgtctctgtgtatttccctacctctcccttcaagatgcagatcttcgtcaagaccctcaccggcaagaccatcacccttgaggtggaaagctctgacaccatcgacaacgtcaaggccaagatccaggacaaggaaggaatccccccggaccagcaacgtctcattttcgccggaaagcaacttgaggacggccgtacccttgctgactacaacattcagaaggagagtactcttcacctcgtcctccgtctccgtggtggcatgcacatcttcgttaagacactcaccggcaagaccataaccctagaagttgaaagctccgacaccatcgataacgtcaaggccaaaatccaagacaaggaaggtattcccccggaccaacaac

SEQ ID NO: 274998 - DNA, 350 bp, Glycine max
ggatactagaacctgcagatcgtgatgctgttgtggccaatgttgccatcaagaatggcaaaaactacaatgtcattgtggaaatcgccactatcctctccccggaagagcttttggccgtgagacgtgcttatctcaaccgctacaagcactccttggaagaagatgttgcagctcatacctctggccatctacgccagcttttagtggggttggtgacctcatataggtatgttggtgatgagatcaatccaaaattggcacaaactgaggctgaaattcttcatgatgctgtgaaagagaagaagggtagctatgaagagaccattagggtcttgaccacaaggagc

SEQ ID NO: 274999 - DNA, 377 bp, Glycine max
gacttcaaagtggagaaaaacacacacgggtggttcattctctctcttttctttttcctcaaaaagttgaaaaagaataaagggggaacaatcgagtgaagttgttgctcttcaatagtaaacttacctatggaagagggaagggttgtgagtgagtacacaaaagatggaactgtggatcttaaagggaaacccattctcaaatccaaaagtggtggttggaaagcatgctcctttgttgatggtatctctctctctcactataaattttatatggtcattttcatcttgttttggacattaatttcaaaagcaatttcccaaaacattggaagcttcatgatgttttgttaacaaaaatcttaatttcctctgat

SEQ ID NO: 275000 - DNA, 388 bp, Glycine max
ggaggaagccacatagagacacaatacagagtgagttgttgctccttcgccacaactctctgccaacatgggtatctccagagattctatgcacaagaggcgtgccactggtggcaagaagaaggcctggaggaaaaagagaaagtatgagcttggtcgccagcctgctaacactaagctgtcaagcaacaagacagtcaggaggatccgtgttagaggtggaaatgtgaaatggagggcattgagattggatactggaaattactcctggggaagtgaagctgtaactcgcaagactcgtgtactagatgtggcttacaatgcctcaaacaatgagcttgtgcgtactcagactctcgtcaaaagtgctatcgttcacgttgatgct

SEQ ID NO: 275001 - DNA, 404 bp, Glycine max
gagagaaagagatagaaagatgtcgaagcgtggtcgtggtcgttcggcggtgaacaagttccgcatgtcacttcgtcttccagtggcggcgacggtgaactgcgccgacaacacgggggcgaagaacctctacatcatttctgtgaaagggatcaaaggccgtttgaaccgtcttccctcggcctgcgttggcgacatggtgatggccaccgtgaagaagggaaaaccccatctgaggaagaaggtcttgccagctgtcatcgttcgccagcgcaagccatggcgccgaaaggactgcgtctacatgtacttcgaaaataatgctggtgttattgtcaatcccaagggagaaatgaaaagttctgctatcactggtcccattggaaaagaatgtgctgatttgt

SEQ ID NO: 275002 - DNA, 402 bp, Glycine max
ggacaacaaatcatgcgtttcgaatagattatcctaagtcgttggaaatagagctgcaatggcttcaagtcaggacgaggtgacccttttgggagctactgcaagcccatttgtgtgcaaggttcatattgccctcacgatgaagggagttcaatacacatatgtcgaacaaaatttgatgaacaagactgaactgcttctcaaatccaacccacttcacaagaaggctccagtgtttattcacaatgacaagcccataacagagtctcttgtgattgttgaatacattgatgagacatcgaagaacaaccccatcttgccttatgatccttaccaaatagccttggctcgcatatggtccaaattcatttatgacaatgttttttgtgcttcatgcaaatc

SEQ ID NO: 275003 - DNA, 387 bp, Glycine max
gggggaattgactagtgcggcgcgctcctattatcaccgtatacggcggaggtggcggtggtggtgtatacacggcgtgacggcgatctcttgagataaatgttggttgaaagaggaagaagaagaagagttgtattgtagaatgagccaaccaacggtgatacttgccactgcgagctatgatcacactattcgtttttgggaggccaagagtggccgttgctaccgcaccatccaatatcctgattcgcaagtaaaccggctggagataaccccggataaacgcttcctggctgcagctggcaatccacacatacgactgtttgatgttaactcatatagtcctcaaccagtaatgagctatgattcacataccaataatgtaat

SEQ ID NO: 275004 - DNA, 377 bp, Glycine max
gggcaaacaagtagtggaaagacatacacgatggttggaataactgaatacgctgttgcagatatttttgactatatagagaggcatgaagaaagagcatttatattgaagttctcagcaattgaaatttacaatgaagttgttagagacctcctcagcactgacaacaacactccacttagactacgtgatgatcctgagaaagggcccattttagagaaactcacagaggagactctacgggactgggagcatttaaaagagcttctagccttcagtgaagctcagagacaggtgggagagacatacctaaatgaaaagagttctagatctcaccaaatcatcagattgacaatggagagttctgccagggaatt

SEQ ID NO: 275005 - DNA, 414 bp, Glycine max
gagcgagggaagggaagcatctttagctccaatggcggatacctcaggtcgatccagggacctcgacaagctccttctccgccctggcaatctcgtcggtcccaggttcgaaccaggcgctgagttgcgagatgaccttcaggccttcgccaaagtgttggtggtaggggccggtggcttatgttgtgagttgttgaaggatttagccctctctggtttccgaaaccttgaggtcattgatatggatcgcatagaggttactaatctcaaccgccaattcttgttcagacttgaagatgttggcaaacccaaagccgaggtagctgccaagcgtgtcatggagagaattactggtgtcgaaattgtgccccacttttgcaggattgaggacaaggaaatagaattttacaatga

SEQ ID NO: 275006 - DNA, 404 bp, Glycine max
aggaacagcaatgaagaagaggcagagaagagcacgaagaatgctttcgtgaaggtgagcatggatggtgcaccgtatctacgaaaggtggacataaagttgtacaagagctaccaggagctgtcagatgcgctggctaagatgttcagttccttcacgattgaaaagtgtgggtcccaagggatgaaggattttatgaatgagaccaatggctctgactatgtacccacatatgaagacaaggacggagactggatgctcgtcggtgatgtgccctgggagatgttcgttgaatcatgcaagcgtcttcgcataatgaaaggctccgatgcaatcggtcttgcgccaagagccgtggaaaagtgcaagaacagaagctgaagaagtgatttcatctgcgtaac

SEQ ID NO: 275007 - DNA, 433 bp, Glycine max
  unsure (1)..(433): unsure at all n locations
gtgaagggaaggtgggagaaaccgggtcacagcccactatttgggtatgacttttggtaccaaccacgtcacaataccatgattagcacatcatggggtgctcctagtgcttttacaaaaggttttaacttacagcatctctctgatggattatacgggaggcatctccatgtatatagctggcctgggggcgaactgagacaaacaatggaccttggtgattcanggcttatacccttagagataaggtttttgcatgatcctgctaaagatacaggttttgtcggcagtgcattgacaagtaacatgatacgattttttaagacccaagatgaatcatggagccatgaggttgccatatcagtgaaaccattgaaagtgcaaaactggattcttcctgaaatgcctgggcttataactgattttctgattt

SEQ ID NO: 275008 - DNA, 367 bp, Glycine max
gaagaagaagaaggttggttgattggtcccattgattccgaagagaaaagaaaagatgtttgagccacaacagctatacactcgcgcgaagaccgaggaattcgacctcgaatcaggagaaaccctctacccagggctgagcgtcggcgagaaccagctccgatggggtttcatccgcaaggtctacggcatcctctccgcgcagatcgtcctcaccaccctcgtctccgtcaccaccgttttctatactccaatcaatgacctcctcaagggcaattccaccctcctcctcatcctcctcttacttcccttcatctttttgattcccctgttgaagtaccagcagaagcatcctcataattacatc

SEQ ID NO: 275009 - DNA, 317 bp, Glycine max
atttgaatcacttgagctctgatgtctgtcgaggaatccttgaatttgcggaaggacgaccactaggaaagtcaggattgcgttggctgaaaatacatttagcaagtctttatgcagggggggtagagaagctctgctacgatgcacgccttgcatttgtagaaaaccacattcatgacatattagattcagcaaacaatcctctaaatggaaatcgatggtggttaaatgctgaggatccttttcagtgcttagcagcttgcatcaacctatcagaagctttaaaaaagctcgtcaccacatactggtcatctcca

SEQ ID NO: 275010 - DNA, 274 bp, Glycine max
  unsure (1)..(274): unsure at all n locations
gccgaggcggtggcggttgaagaggaagtggtggaggaaaagggaggagagggttctgaagagagtagtagtgaaggtgaaggtgtaaatactaagctttattttgggaatttgccgtatctttgtgatagtgcacaacttgctggaattgttcaagattatgctactcctgagcttgttgaggttctttatgatagggaaacaggtaaaagcagaggatttgcatttgtgacgatgagttctcttgaagattgcanaacagtgatcgaaaatc

SEQ ID NO: 275011 - DNA, 330 bp, Glycine max
agatgtctcacaggaagttcgagcaccctttgcatggttccctcggattcctccccagtgagcgtgcatcacgccaccgcggcaaggtgaaagcatttccgaaggatgacccatcaaaagcccctcatcttactgccttccttggttacaaggctggaatgactcacattgttcgtgaggttgagaagccaggatcaaaactccacatgaaggagacttgtgaagctgtgacaatcattgaaactccacccatggttatagttggagtggttggttatcttaatacaccacgtgtccttcgctctcttgccacagtatgggctgagcatt

SEQ ID NO: 275012 - DNA, 384 bp, Glycine max
acaatggtggggatcaggggtatgtgaacgagatcttcacatggtggcataggatcccgaaacacatgaactttttgaaacattattgggaaggtgatgaggaggagaagaaggaaatgaaaacacgtctttttggtgctgatcctccagttctctatgtcctgcactacttgggtctgaaaccttggttatgcttcagggactatgattgtaactggaatgtggagaaattgcaagagtttgcaagtgatgtggcgcacaggacatggtggaaggtccacgatgcaatgccagagaacttgcataaatactgtttacttaggtctaaacagaaggctgcactggagtgggatcgaagggaagctgagaaagccaactattcag

SEQ ID NO: 275013 - DNA, 386 bp, Glycine max
cagattaacaaaaagcttagggaaagaaaaatggaaggaacttgtaacaaccgtagccatttccaaactatttttcttattttagttgtcttcacatcttcttcattcacagagtcagtttcagcggcaaggccagtagccggagatacaaatacggagtttataagaacatcatgcaaatcaactacatatccaaacctctgtttcagttcattatcaagccgtgcaactgctattggggtttcccctcaacttctagcccatgaatccctcaccgtcagcctcgaaacagcgcagtctacatctgtcacgatggtggagttggcacacggccaaagcatgacgccgagagagatcggtgccatgcatgactgtgtggaggaact

SEQ ID NO: 275014 - DNA, 394 bp, Glycine max
tagctttagttattgagagacagacagattaacaaaaagcttagggaaagaaaaatggaaggaacttgtaacaaccgtagccatttccaaactatttttcttattttagttgtcttcacatcttcttcattcacagagtcagtttcagcggcaaggccagtagccggagatacaaatacggagtttataagaacatcatgcaaatcaactacatatccaaacctctgtttcagttcattatcaagccgtgcaactgctattggggtttcccctcaacttctagcccatgaatccctcaccgtcagcctcgaaacagcgcagtctacatctgtcacgatggtggagtttgcacacggccaaggcatgacgcccagagagatcggtgccatgcatg

SEQ ID NO: 275015 - DNA, 395 bp, Glycine max
  unsure (1)..(395): unsure at all n locations
gcctggacaagattattcttcctgccaccaaaaccttagctctggttgtcttcctagaaccggcagaagcacgtgcagctttccggggtctagcatacaaacgttacaaggacactcccctttatttggagtgggctcctggaaatattcttgatcaaacaagtgattcaaaaaatactcttatcgtcggtgaagatgacgcanagagagtgctgctagagcaacaagtggaaggaataacagatccagatgttgatcctgatagagttgagtcacgatcactgtatgtcaagaacctaaatttcaagacgtctgatgagagtttaaaagagcatttcactcaacacantaaggatggacgaatattaagtgcgagagtgaagaagcatgtaaag

SEQ ID NO: 275016 - DNA, 479 bp, Glycine max
gcccgacgtcgcatgcttcttccgattgacatgcatactctaagcttattttatgtctctgattatgttaatgtactatgagcattttatcaagcataggagatgcacattcatacttacctcatctataaccattatatcatgcacttattattgattactcttattaatttaatttcttattatacttttatatatttatttctttcatatttactctataaacttttgtgataattttatcatttatttttttatcatttcttttttcttttttatatattttttctttctatttttttttttttttttttatttctctatttttcttttaattttttttctttatttttttatatttttttttttttctctttttttttttttattatttcttattttattatttttttttttttttccatttataattttattatttatatatattatttttattttatatttatatttttttt

SEQ ID NO: 275017 - DNA, 369 bp, Glycine max
acgttcgcacactagcgataaagggtaccgtttcgagtaaagattctccctcgaatccatcgagaaattgcgatactctttttgttcttatatcattcgatccatcaagcacctttgtctgttttcttaaatctgtatcttagggcttgtagtcaatcaaaagaatgttcttggtcgattggttctacggagttctcgcatcgcttggtctgtggcagaaagaggctaagatcttgatcttaggccttgataatgccggcaaaactaccttgcttcacatgttgaaagacgagagattggttcaacatcagcctacacaatacccgacatctgaggagcttagtactcgggaaaataaagttcaaggca

SEQ ID NO: 275018 - DNA, 281 bp, Glycine max
gtcatggccgcaggattttcgtggtcgcggtttatgtgccagctactggtcgattcatcatgaacctgttctaatgaaccagggacagttgacaaagtgtgtgagattgtgaataaacaactggctcttactgatgataatgtaatcaacggagagtcaaaatttacagcacttgatgcttattctctagacacggttgagattgtgatgggacttgatgaatcgtttggaatcactgttgaataatataatgctcagactattgcaacagtttaagatgc

SEQ ID NO: 275019 - DNA, 402 bp, Glycine max
cgaattgtataaaaaattctttttaattgttatgtgtatataagttaaaactcttactataaaagtcagtgtaacttgttccattatttatacaagcaagcaataaagatacccacacccacataggaagagaaattggagatggaggaagatggggataagaaaatgaagcagtcgaaattcaagaagatttgtgtgttctgtgggagtagccctggaaaaaagaatatctataaggaggctgccatagagcttggaagagaactagtatcaagaaatatagacctggtttatggaggaggcagtattgggttgatgggtttgggttctcaagctgtttacaacggtggtcgtcatgttcttggagtgattcccaagacattaatgccgagagagataact

SEQ ID NO: 275020 - DNA, 431 bp, Glycine max
ggcagttcaattgatcaactcagatttcagggacctaagtctagctgctaatagactcgcccatcatgccatcaaacttggtggcattggctttggagcctcttttttcggattgtttgctgccattgctgctatttatctgttgattttggatcgtacaaactggaaaacaaatattctcacagcactactcattccatacattttcttcagcttgccttcattaattttcgacgtcttcaggggagagcttggaaaatggattgctgcagttgctgttgtattacgccttttccttccaagacacttccctgattggctggaattgcctggtgctctgattcttcttatcgttgtagctccttctctaattgcaagcacctttagagacaacattgttggggtggtagtgtgcctcatcattgcatgtt

SEQ ID NO: 275021 - DNA, 423 bp, Glycine max
gacaatcaatcttctttatccactctctcttaattaaattaaaacaaaaaatgtgcgctgccatatccgaagtggaacaagaagagttgctcgaaaaattggaggtgttcaagatcaaaggcagggacaagcatggccgcaagatccttcgcattatcgccaaattcttcccaggtagattgattaattaattaattaaatccctaattcctttttttttatgtgcatgaattttttaaatcttcggtaattgtttgaattgaggacagcacggttggtgagtgttgaggttctgaaaaagtacctggaggagagggttttcccgaagctgatggggaagaggaaattcgcggtgctgtacgtgcacaccggcgtccagaggagcgagaattttcccggaatctccggtctccggtggatcta

SEQ ID NO: 275022 - DNA, 403 bp, Glycine max
gagagaaagagagagaaagatgtcgaagcgtggtcgtggtggttcggcggggaacaagttccgcatgtcgctgggtcttccagtggcggcgacggtgaactgcgccgacaacacgggggcgaagaacctctacatcatttcggtgaaagggatcaaaggccgtttgaaccgtcttccctcggcctgcgttggcgacatggtgatggccaccgtgaagaagggaaaacccgatctgaggaagaaggtcttgccagctgtcatcgttcgccagcgcaagccatggcgccgaaaggacggcgtctacatgtacttcgaagataatgctggtgttattgtcaatcccaagggagaaatgaaaggttctgctatcactggtcccattggaaaagagtgtgctgatttg

SEQ ID NO: 275023 - DNA, 445 bp, Glycine max
agacgacagaaggggagagaaagacaaataaaagaagctgcatttgcagagacgcattcgcgtttgtctgagagagagaattggaaggttgcgacgagtgatgatatacatattgtggcggtagtgaaatcgaggaaaaagaggtagcaatcgtgagttgcaatgagtagcgaaaagtctccttcatcagcttctgcttcagcttcttcttcgagtagctacgagttgagcaaaggcatcaatggcctcgacaaggttattcttcgcgacccacgtggtagctccgctgaggtgtacttgtacggtgctcacgtgacttcatggaagaatgaacaggccgaggaattgctttttctcagtagtaaggctatatttaagcctccaaagccaattcgtggagggatcccaatatgttttcctcaattttcaaacctcggtcctctcg

SEQ ID NO: 275024 - DNA, 357 bp, Glycine max
ggcgttgcacagagagagagagaatggcagcacttggtgggaatcgtgacgcgacaggaagccagaacagcgttgacatcgatgctctagctcgctttgctgttgaagaacacaacaaaaaacagaatgcccttttggagtttgaaaaggtggtaactgcgaaacagcaagtggtttctggtaccttgtacaccatcactttggaggcaaaagatggtgggcaaaagaaggtctatgaagccaaactttgggagaagtcatggttgaacttcaaggaagtgcaagagttcaagcttgttggagatgcacctgcatagtctagtgcttaattaggttgctgaagagtgaagaatgaga

SEQ ID NO: 275025 - DNA, 407 bp, Glycine max
gatgggagaatcttattgtcaaggagttttgatggttcattgaaggtttgggatctgcgcaaaacaaaagaaccgttaaaagtatttgaggatctgccaaatcactatgcacaaacaaatattgccttcagtcctgatgagcgactctttttgactggaacatctgtggaaagggagagcatgacaggaggtttattgtgcttctttgatagagtaaatcttgagcttgtttcaaaagttggcatatcacccacttgtagtgttgttcagtgttcttggcatcccaaactgaatcagatctttgcaactactggtgataaaagccaaagtgggactcacatactatatgatccaacccgtagtgaaagaggagctcttgtatgtgttgcacgtgcaccaaagaaaaa

SEQ ID NO: 275026 - DNA, 401 bp, Glycine max
caaggacacgaggtggatatatatgagtcaaggccttttattggtggcaaagttggttcttttgttgacaaaggtgggaatcacattgaaatgggattgcatgttttctttggttgctacaacaatcttttccgattgatgaagaaggtgggtgcggataacaatctacttgtaaaggatcacactcacacttttgttaacaaagggggtcaaattggagaactagattttcgcttcccaattggggcaccaatacacgggataagggcgtttttgtccacaaatcagcttaatacttatgataaggctagaaatgctgtggctcttgcactcattccagttgtcaaagctcttgttgatccagatggtgcactgagggacataaggaattttggatagta

SEQ ID NO: 275027 - DNA, 411 bp, Glycine max
gacagtattcaagatcggggaatcaatcaggtttatataattggaggagatggaactcagaagggtgcatctgcaatttttgaggaagtcagaaggcgtggtctcaaagtttcagttgtaggtatccccaaaaccatagataatgatatcccggttattgataagtcctttggctttgacactgctgttgaggaggctcaacgagctataaatgcagcacatgttgaagctgaaagtgttgaaaatggcatacgtgttgtcaagttgatgggtagaaacagcggatttattgcaatgtatgctacacttgcaagtcgagacgtggactgttgcttaattccagagtcacccttttaccttgaaagtcctggtggactctatgaatatatagagaaaagactcaaaagaaat

SEQ ID NO: 275028 - DNA, 372 bp, Glycine max
gtctgaaagggaaaatataaaaagtcgcatcctcgtctggatgaaagggtacctctttcaagttgaaccatgtggttgaagcacatatcaaggcctgctcacacttaatggcttgcacgctccctgcttcattactcctaattaagggttcttatcataaaccagctctgatgagagacattgctgcccgttactccccgggtatatttagtctaaacagcaatgggcttatccagaaaaggtccaagcgtcaaacgaattttgttactacgaatacggttactgccatacatgccgtggcaattccagtacaaccagctccggtggaaagtgcggagtatataaaacagctagctgaatactactgtttca

SEQ ID NO: 275029 - DNA, 442 bp, Glycine max
  unsure (1)..(442): unsure at all n locations
gggatgactatgctcatgggaaaggagtttatgtttctgatgatgcattggtcaggtatgaaggtgaatggtttcaaaacgatgtggagggtcatggtgtagttgaagtcgatatacctgttatagaacctgctcctgggtccaagcttgaagcaaagatgcgagctcaaggaaagataatagcaagggattttctgtccccagaagacagagaatggcttgagaaggatattgaagatatgtattatcttgcagatgggaactatgaaatccccttttatgagaatgaggaatgggttaggcaatttggaagaaagccggagaaaggtcgctatcgttatgctggccagtggaagcatgggaggatgcatggatgtggtgtatatgaagttaatgagcgtatcttatatggtagattntattttggagaatatgtagatga

SEQ ID NO: 275030 - DNA, 435 bp, Glycine max
ggatgcagagaaggtactagtttagtgtcacgaaaataacccgcagacgcaaacgtgaaaacacagacaagacgcatacgtccgtctcaacgtgtttgagattataaagacttagtggaagggtaagctgaagttgaagagttgaggggaaaacaagcagtgaaggaggttgaggtactcaataaagttttgatttgtttgaattggggggcttgttgccaatgttggatacagttgtatgtgctagaaacagtcaacagtcgcttcataaggtgaagttgacattctagtagtggaaagggccagagtcgagatgattatatatgtttgatttgcctctacacactggcaatccttaggtctgacagatggctttttataatgaagaagagaagactgaagactacctcttcaagattgttttaattggtgatt

SEQ ID NO: 275031 - DNA, 333 bp, Glycine max
ggagtgagtgagagaaagaagagaaggagttgaagtggttgttgtattgtagtagtgtgtaaagtcttggtgatggatagacacaaatgcaagctttgttcaaggtctttcagcaatggcagagcccttggtgggcacatgaaggctcaccttgcttctctccctctccctctccctccaaagcttcactcttgcttctcttcctctgactcagaacaagaacaatctttaagggagaatcctaagaaaaccttgaggattctggatcctgaagacagagagagcgagacagagtctaataagaacccgactcgtcaacgatccaagcgcaac

SEQ ID NO: 275032 - DNA, 364 bp, Glycine max
gacactaaacaagttaaaagaagagcatcactgaactaacaaagcaaccctatgtcgaaggtggtttgtgtcaccggagccagcggcgccatcggatcatgggtggtcctactcctcctccagcgtggttacaccgtccatgccaccgtccaagatatcaaggatgaaaatgagacgaaacatttggaggaaatggaaggagcaaagagtcatctccatttttttgaaatggatcttcttgacatcgactccattgccgctgccataaagggttgttccggcgtaatccaccttgcatgtcctaacatcattggtcaagtcgaagatcccgagaaacagatattggaaccggcgataaaaggaa

SEQ ID NO: 275033 - DNA, 396 bp, Glycine max
  unsure (1)..(396): unsure at all n locations
gaacacactcatccaaacaaccttctttctttttctgtgagcctttctttcaggttcttaacttgatcagtgtgcagtgtccaaatcataagggtagctgcaaattgcaatggctaagcatgatgttgagggtggttccttctctgcaaaggactaccatgatcctcctccagcaccgttgattgatgctgaggaactcacacagtggtccttctacagggctttgattgctgagttcattgccacaatgctcttcctttacatcacagtgctcactgtgattggttacaagagccagagtgatgtanaggctggnggtgatgtgtgtggtggagttggcattcttggcgttgcttgggcctttgtggcatgatcttcattctggtgtactgcact

SEQ ID NO: 275034 - DNA, 340 bp, Glycine max
gggatttccaaagtttttaatagagggtaggtctcaaaaaatcgaagaattacagacgaatatgcaaaaaaaactgaattgtgtgaatcgaaaactaaacattgctattgtaaaagttgcaaatgcttataaacaccctaatattattgccgaatttatagctggacaattgaagaataaagtttcagatcgtatagcagtgaataaagctattgaatcaaatgaacaggcggttacaaaaggagttcaagttcatattgcaggacgtatctacggaaaagaaattgcacgcgtctgatggatcagagaatgtagagctcctctacaaaccatgcgagcg

SEQ ID NO: 275035 - DNA, 297 bp, Glycine max
ggataactattttcatatgaaaagaacagatgtgttttcggggacataggcattcgataagcgtgaataggttcaaaacggtacatatggtaatgtgtacagatcaagacaaaatgcctcttgtaaaatctgctctttgatcaaaacttgtatccacgatgacaactaaagtgtacatactaccactctacgttatgtttccattctacaaatgctgtcttgagatccatatgtcagaaaggtattggatgtcaaatatggacatatcaatgaacttttatcagaactatacttggt

SEQ ID NO: 275036 - DNA, 428 bp, Glycine max
  unsure (1)..(428): unsure at all n locations
gacgtacgatgttttcgtttcgggtttgacgttgttcacgggcactttctgcgcttcactcgctcccttcgtgcggatttctttctttgtcgaactcgtgcgaaaatgcgtgagattcttcacatacagggagggcaatgcggaaaccacatcggagcgaagttctgggaggtggtgtgcgcggagcacgggatcgattccacggggaggtaccagggggacaacgagttgcaactcgagcgagtcaacgtctattacaatgaagcgagttgcggaaggttcgtgccgagggcggtgctcatggatctnagagccaggaccatggacagcgtcagatctggtccctaccgtcagatttttcgacctgataacttcgtcttcgggccagccggcgcctgaaacaactgggccaaaggcactacaccgaa

SEQ ID NO: 275037 - DNA, 202 bp, Glycine max
gaagatggagatgtatcagatctggagcaggagaatagcgttgggagcgttcgcgtttgttctgcttttcctatcggcctcagcagacgacgtcgttgtgctctctgaagataacttcgagaaggaagttggtcaggacagaggagctctcgttgagttctatgctccttggtgtggacactgctaaatgcttgctccagaa

SEQ ID NO: 275038 - DNA, 259 bp, Glycine max
gatattattggacatattgttgaatttagctctgatcagcatggaagtcgatttatacagcagaagttggaaagttgtagtggcgaagagaaggcattggtgtttaaagaggttcttccacatgcttctaaattaatgactgatgtatttggtaactacgtaatacagaagttttttgagtatggaagctcggagcagaggagggaacttgcagatcgacttgttggccagatactgcctttgagtttgcagatgtatg

SEQ ID NO: 275039 - DNA, 348 bp, Glycine max
ggctttttaggttattttcttaagtaaaaagaaggaaataaataattctcgtagctttgttgctcttataaattctattctggttgacgcttctctcaccatccccatttcgcgttggtgcaaagcatccttcgtttcaatttctctctctcagcgctttctgcaatcgaacctttcatctccaaagggatccacaggccgaaggagaaatggggctgacattcacaaagcttttcagtcggcttttcgcgaaaaaagaaatgcgaattctgaatgttggtcttgatgctgctggtaagaccactatcctgtacaagctcaagctcggagagatcgttaccacaattc

SEQ ID NO: 275040 - DNA, 367 bp, Glycine max
gatgcggaatggggagtgtgcagttcatgatgacaagatgctgtttgaacttttagttttgagcggtgctcaagttggatctgattggacctcaaccttgaagaaacgcctagatttcagggctgcattttcagaatttgatgcagaaaccgtggctaacttgactgataagcaaatgatgtctattagttctgaatatggcattgacataagcagagtccgaggagttgttgataatgctaaccaaattttagagattaagaaagactttggttcatttgacacgtacatttgggggtttgggaatcataaaccaatctccactcaatacaagtttggccacaagattccagtgaagacatctttt

SEQ ID NO: 275041 - DNA, 280 bp, Glycine max
ggacaaagaactcacgagtgattttgagaggctggttcatctttggacacttgattctgctgaacgtgatgcatttttggcaaacgaggcgactaaaaaatggacttcaagcaatcaggttctggtggaaatagtctgcactaggtcctctgaacaattgtttgctgcgaggaaggcttaccatgttctttataagaagtctctggaggaggatgttgctcatcacacaacaggagacttccgtaagctcatactacctctggttagttcttatcgatat

SEQ ID NO: 275042 - DNA, 281 bp, Glycine max
gataggcatgatatcttgtttgcaacaccctaatcttgtgaaacttcatggattttgcattgaaggggatcaattgatattggtgtatgagtacatggaaaataatagcctggctcatgctttattcagctcaaaagatcaacttaaacttgattgggcaacaaggcttatgatctgtattggcatagcaaaaggtcttgcatttctacacgaagaatcaagactcaagatttttcatcgagacatcaaagctactaatgtgttactggatgggaatttaa

SEQ ID NO: 275043 - DNA, 357 bp, Glycine max
gacggcagatcagatccattcttcaacaaatccccttttcagtttcagtttttctcgaggatcccgtgaaacgacatggcgatggtggaccagcctctgtatccgattgccgttttgatcgacgagttgaagaatgaggacattcagctgcgcctcaactcgatccgtaggctcttcactatcgctcgcgcgctctgctaggaccgcacgcggaaggagctgattccgttcctcagcgagaacaacgacgattactactaagtgctcctcgcaatggccgaggaattaggtgtcttcattccctacgtctgaggcgtttagcacgccaacgtgcttcttcctccctttgagtcgctc

SEQ ID NO: 275044 - DNA, 420 bp, Glycine max; identical to SEQ ID NO: 274874

SEQ ID NO: 275045 - DNA, 339 bp, Glycine max
tgaagaaggttggttacaacccagacaagatgtccatttgtgcccatctctggtttcgagggtgacaacatgattgagaggtccaccaaccttgactggtacaagggaccaactctccttgaggctcttgaccaaatcaatgagcccaagaggccctcagacaagccactcaggcttccattgcaggatgtctacaaaattggtggtattggtaccgtgccagtgggacgtgttgagactggtgtcgagaagcccggtatggtggtgacttttggttccactgggctgacaactgacgttaagtctgttgagatgctccatgaggctctcacataggct

SEQ ID NO: 275046 - DNA, 359 bp, Glycine max
gatatgtatcttgttgcgaggtgtgaggtgcatagtgttgttgatgtgaacaagcagaggtcgttccttactttgaatgcgttgaacgagtttgatcctaagtattccggtgtggattggaggcagaagttggagactcagaggggtgctgtgttggctactgaacttaagaacaatgcgaataagttggctaagtggactgctcaggctcttttggcgagtgcggatacaatgaagttagggtatgtgtcgaggattcatccccgcgatcatttcaatcatgtgattttggctgtgggtggctataaacccaaggactttgcagcacagattaaatttgacacgacgaatatgtgggg

SEQ ID NO: 275047 - DNA, 314 bp, Glycine max
ggcacaggtggagaaagtatatatggggggaaatttgcagatgaaaatttcaaactaacacatgatggacctggcattctttctatggctaatagtggtcctaacacaaatggatctcagttctttattacattcaagcgccaacctcatcttgacgggaaacatgttgtttttggaaaagttgtcaacggaatagacattttgaagaaaattgagcaggtgggaacatctgatgggaaacctacccagccagttaaaattattgattgtggtgaagtctctgaaacaaaaattcagcatactgcagagtaggg

SEQ ID NO: 275048 - DNA, 424 bp, Glycine max
cacggtcagtcgttggaagaaacctgagattggttgggtgaagctgaacgtggatggttcacgcgacccatacaaaagttcctccgctggttgtggtggtgttctgagggacgcatcagcaaagtggctccgtggctttgctaaaaaactgaaccctacttatgcagtgcaccagacagagttagaagccattctcacgggcttgaaggtggcttcagagatgaatgttaagaaactaattgtggagtcagacagtgactctgtggtgagcatggtggagaatggggttaagcccaatcaccctgactatggtgtcgtggaacttataaggacgaagcggcgtcgttttgactgggaagtgaggtttgtttctgtctccaacaaggcgaatcgtgtggctgataggctcgccaacgatgctcgg

SEQ ID NO: 275049 - DNA, 349 bp, Glycine max
tacagacagagttggagagttagctaagaagcatggactgaagcttcacattgatggggcccgtatttttaacgcatcagttgcacttggtgttccagtggataggcttgtccaggcggctgattcagtttccgtttgcctatctaaaggtataggtgctccagttggatctgttattgttggttccaagaattttattgccaaggctagacgactccggaaaaacctaggaggtggaatgagacagattggcctctttgtgccgctgcacttgttgccttgcaggaaaatgttgggaagcttggaagtgatcacaagaaagctagacttttggctgatggattaaaag

SEQ ID NO: 275050 - DNA, 419 bp, Glycine max
  unsure (1)..(419): unsure at all n locations
ggaggataatcaataaacttaaacttatgttatggcattctaactctgaacgatgaaatgaaatggagttccaagataagcgtttatctctgagatcgagcttgacgttcagcgagacgctgtgcgcagtgttcattccgttcataggaatagtcgaagctttggttttcacattcactagttgcttcgatttccaatctcccaggaataagaagaaacattcttctaccttcgacgacattctcaccctcgccgaggattctccatttagtattaatgaaatcgaggccttgcgtgagttgttcaagaagttgagtagttctatcattgatgatggcctcatccacaaggaagaactcacattggcactgttgaagaccaccaccgggggagaaatcttttnctgacaggggtgttga

SEQ ID NO: 275051 - DNA, 380 bp, Glycine max
ggatggagtaattcagctaacagaaagggatgaatgtgcctaccaagaaatgatcactcatcttcctctttgctctattccaaaccctaaaaaggttttggttatcggtggaggtgatggaggggtcatactagaagtagcacgccattcttcagttgaaaagatagacattcgtgaaattgacaagatggttgttgatgtctccaaacaatacttccctgatgtagctgttgggtatgatgatcctcgtgtgacacttcatattggtgatggagttgcatttttgaaggaagttccagaaggaacttatgatgctgttatagtggattcatccgaccctattggtcctgctcaggagcttattgaaaagcccttctttg

SEQ ID NO: 275052 - DNA, 335 bp, Glycine max
aggtccctgaagtttggaaagttcttgacaagatccaggagttctctgagcagattcgcaatggttcttgggttggtgctacaggaaaggctttgaaggacgttgttgcaattggtattgggggaagcttcttacgtccactgtttgtacacactgcacttcaaacagaccccgaagctgttgaatctgcaaggggtcgtcagctgcgctttcttgcaaatgttgatcctattgacgtggctagaaatatcacaggattaaatcctgaacaacacttgttgtggttggttcaaagacttttacaactgctgagactatgctgaatgctcgaactc

SEQ ID NO: 275053 - DNA, 387 bp, Glycine max
aggtccctgaagtttggaaagttcttgacaagatccaggagtggtctgagcagattcgcaatgggtcttgggttggtgctacaggaaaggctttgaaggacgttgttgcaattggtattgggggaagcttcttaggtccactgtttgtacacactgcacttcaaacagaccccgaagctgttgaatctgcaaggggtcgtcagctgcgctttcttgcaaatgttgatcctattgacgtggctagaaatatcacaggattaaatcctgaaacaacacttgttgtggttgtttcaaagacttttacaactgctgagactatgctgaatgctcgaactcttaaaaaatggatttcatcagcacttgggccctttggagttgcaaagcata

SEQ ID NO: 275054 - DNA, 363 bp, Glycine max
ggcagttcaattccaatatattccattctctctgtgtatttccctacctctcccttcaagatgcagatcttcgtcaagaccctcaccggcaagaccatcacccttgaggtggaaagctctgacaccatcgacaacgtcaaggccaagatccaggacaaggaaggaatccccccggaccagcaacgtctcattttcgccggaaagcaacttgaggacggccgtacccttgctgactacaacattcagaaggagagtactcttcacctcgtcctccgtctccgtggtggcatgcacatcttcgttaagacactcaccggcaagaccataaccctagaggttgaaagctccgacaccatcgataac

SEQ ID NO: 275055 - DNA, 293 bp, Glycine max
ggatactagaacctgcagatcgtgatgctgttttggccaatgttgccatcaagaatggcaaaaactacaatgtcattgtggaaatcgccactatcctctccccggaagagcttttggccgtgagacgtgcttatctcaaccgttacaagcactccttggaggagaatgtggcagttatatacctgtggccatatacgcaagcttttagtggggttggtgacctcatataggtatgttggtgatgagatcaatccaaaattggcacaaactgaggctgaaattcttcatgatgc

SEQ ID NO: 275056 - DNA, 358 bp, Glycine max
gacttcaaagtggagaaaaacacacacggttggttcattctctctcttttctttttcctcaaaaagttgaaaaagaataaagggggaacaatcgagtgaagttggtgctcttcaatagtaaacttacctatggaagagggaagggttgtgagtgagtacacaaaagatggaactgtggatcttaaagggaaacccattctcaaatccaaaagtggtggttggaaagcatgctcctttgttgttggtatctctctctctcactataaattttatatggtcattttcatcttggtttggacattaatttcaaaagcaatttcccaaaacatttgaagcttcatgatgttttgtaacaaaa

SEQ ID NO: 275057 - DNA, 422 bp, Glycine max
ggaggaagccacatagagacacaatacagagtgagttgttgctccttcgccacaactctctgccaacatgggtatctccagagattctatgcacaagaggcgtgccactggtggcaagaagaaggcctggaggaaaaagagaaagtatgagcttggtcgccagcctgctaacactaagctgtcaagcaacaagacagtcaggaggatccgtgttagaggtggaaatgtgaaatggagggcattgagattggatactggaaattactcctggggaagtgaagctgtaactcgcaagactcgtgtactagatgtggtttacaatgcctcaaacaatgagcttgtgcgtactcagactcttgtcaaaagtgctatcgttcaggttgatgctgctccattcaaacagtggtatcttcagcactatg

SEQ ID NO: 275058 - DNA, 224 bp, Glycine max
ggccaacaatttatgtgtttcgaatatatcctcctactgcgttggaaataaatctggcatggctccaactaaagacgactaaaccctattgagaactactacaaacccatttacgtacaaacatcatattgcccttacgttgaagggagttaaatacacatatgtcgaacaaaattatatgaacaaaactgaacttcttttgaaatccaacccatttcacaaca

SEQ ID NO: 275059 - DNA, 296 bp, Glycine max
gggggaattgactagtgcggcgcgctcctattatcaccgtatacggcggaggtggcggtcgtggtgtagacacggcgtgacggcgatctcttgagataaatgttggttgaaagaggaagaagaagaagagctgtatggtaaaacgagccaaccaacggtgatacttgccagtgtgagctatgatcacactattcgttgttgggaggccaatagtggccgatgctaccgcaccattcgttatcctgatgcgcatgctaaccggctggagataaccccggttaaacgcctcctggctg

SEQ ID NO: 275060 - DNA, 428 bp, Glycine max
gaaagaagagaaaataataatatgaataacaacccacaaaacttgggtcttgcaaattaagttcattttcctccctttcactctcgtagacatcacaaaccttccctccattcatcccacgcatggctgccatgaactctagcgtattggcctgtagctatgccatatcaggtgcagcgtgttcggagctcaatgggaaggtcacttccgtggcctatgttgcatgctctggctacaagttgccattgatcaaagctgaggccagagttcctaaagccaaagaatctgaaggaggaaggagaggtgcccttgttctcttggcagctacccttttcacctctgcagcttccaattcttctgccaatgctgggatcattgaagattaccttgagaggagcaaggccaacaaggaattgaatgacaagaag

SEQ ID NO: 275061 - DNA, 384 bp, Glycine max
gggcaaacaagtagtggaaagacatacacgatggttggaataactgaatacgctgttgcagatatttttgactatatagagaggcatgaagaaagagcatttatattgaagttctcagcaattgaaatttacaatgaagttgttagagacctcctcagcactgacaacaacactccacttagactacgtgatgatcctgagaaagggcccattttagagaaactcacagaggagactctacgggactgggagcatttaaaagagcttctagccttcagtgaagctcagagacaggtgggagagacatacctaaatgaaaagagttctagatctcaccaaatcatcagattgacaatggagagttctgccagggaattcctgggc

SEQ ID NO: 275062 - DNA, 435 bp, Glycine max
gagcgagggaagggaagcatctttagctccaatggcggatacctcaggtcgatccagggacctcgacaagctccttctccgccctggcaatctcgtcggtcccaggttcgaaccaggcgctgagttgcgagatgaccttcaggccttcgccaaagtgttggtggtaggggccggtggcttaagttgtgagttgttgaaggatttagccctctctggtttccgaaaccttgaggtcattgatatggatcgcatagaggttactaatctcaaccgccaattcttgttcagacttgaagatgttggcaaacccaaagccgaggtagctgccaagcgtgtcatggagagaattactggtgtcgaaattgtgccccacttttgcaggattgaggacaaggaaatagaattttacaatgattttagcattattggccttgg

SEQ ID NO: 275063 - DNA, 423 bp, Glycine max
aggaacagcaatgaagaagaggcagagaagagcacgaagaatgctttcgtgaaggtgagcatggatggtgcaccgtatctacgaaaggtggacataaagttgtacaagagctaccaggagctgtcagatgcgctggctaagatgttcagttccttcacgattgaaaagtgtgggtcccaagggatgaaggattttatgaatgagaccaatggctctgactatgtacccacatatgaagacaaggacggagactggatgctcgtcggtgatgtgccctgggagatgttcgttgaatcatgcaagcgtcttcgcataatgaaaggctccgaggcaatcggtcttgcgccaagagccgtggaaaagtgcaagaacagaagctgaagaagtgatttcatctgcgtcacaaggaagcaaattgactcg

SEQ ID NO: 275064 - DNA, 427 bp, Glycine max
tgacatacacacgcatgtacaccttaatggttatatagggtggcttcttcttggtgttattcttgttctggcttgtgctttaatgcattcttcttcttcttcaaacctcttaataactactgtgccttgaatgttgggtttgagtatatctctttctcctccaaaagtagtgccacttacgtagggcatgatgatgaagaagagtggttttgagaagatggtgatgttgcagaagaacaacaagaacaagggaagctatgatgatgagaaaccaaggagtaagacgtttttggtgaacatcaatatcatggggagtgcagggcctattacgtttgtggtgaatgagaaagagcttgtttctggggtcattgatactgctctcaaatcttattcccgtgaagggaggcttcctgttcttggttttgat

SEQ ID NO: 275065 - DNA, 387 bp, Glycine max
cacagaggggttaagaattagttggtgatggtcccattgattccgaggagaaaagaaaagatgtggagcccaacagctatacactcgcgcgaagaccgaggaattcgacctctaatcatgagaaaccctctacccacggctgagcgtcggcgagaaccacctccgatggggtttcatccgcaaggtctacggcattctctccgcgcacatcgtcctcaccaccctcgtgtgcggcaccaccgttttctatactccaatcaatgacctcctcaagggcaattacaccctcctcctcatactcctcttgcttcccttcatctttttgattcccctgttgaagtaccagcagaagcatcctcataattacatcttgcttgcactctttac

SEQ ID NO: 275066 - DNA, 343 bp, Glycine max
gtgaagggaaggtgggagaaaccgggtcacagcccactatttgggtatgacttttggtaccaaccacgtcacaataccatgattagcacatcatggggtgctcctagtgcttttacaaaaggttttaacttacagcatctctctgatggattatacgggaggcatctccatgtatatagctggcctgggggcgaactgagacaaacaatggaccttggtgattcaaggcttatacccttagagataaggtttttgcatgatcctgctaaagatacaagttttgtcggcagtgcattgacaagtaacatgatacgattttttaagacccaagatgaatcatgga

SEQ ID NO: 275067 - DNA, 369 bp, Glycine max
gaagaagaagaaggttggttgattggtcccattgattccgaagagaaaagaaaagatgtttgagccacaacagctatacactcgcgcgaagaccgaggaattcgacctcgaatcaggagaaaccctctacccagggctgagcgtcggcgagaaccagctccgatggggtttcatccgcaaggtctacggcatcctctccgcgcagatcgtcctcaccaccctcgtctccgtcaccaccgttttctatactccaatcaatgacctgctcaagggcaattccaccctcctcctcatcctactcttccttcccttcatctttttgattcccctgttgaagtaccagcagaagcatgctcataattacatctt

SEQ ID NO: 275068 - DNA, 321 bp, Glycine max
  unsure (1)..(321): unsure at all n locations
ggatccaatcaagaatacaataacatagcatagagtgagaagtgagaagagaaaaatggcaatctccatacccagtagacaacttttcatagatggagagtggaaagtccctcttctcaacaatcggtttccgatcatcaaccccgctactgaagacatcatagggcatattccagccgctactaaggaagatgttgaccttgcggtggatgctgctaaaagagccttttcccataacaaagggcaagattggtcttcagcttctggctctgntcgtgctcgctatcttcgagccatcggttcaaagattacagagaaaaa

SEQ ID NO: 275069 - DNA, 402 bp, Glycine max
gacacgcagttgtattgtagaactgaacaagggtttctctttctctttctctgtctgcttcttcactttctctcgtttcaatcgaaaaaaatcatgggcagaaaattcttcgtcggtggcaactggaaatgcaatgggaccactgaggaggtgaagaagattgttactactttaaatgaagctaaagtccctggagaagatgttgtagaagttgttgtgagccctccttttgtgttccttccttttgtaaaaagtttgctgcgccctgatttccatgtctcggcccaaaattgttgggttcgcaaaggtggtgcttatactggagaggttagtgctgaaatgcttgttaatttgggaattccttgggttattattggtcactctgaacggaagcagcttttg

SEQ ID NO: 275070 - DNA, 415 bp, Glycine max
ctacacgaagactctcacaactgcattatacatcgcgacataaaggcaagtaacatcttactcgatgaaaattgggtgcccaagattgcagatttcggcctcgcacgactcttccccgaagaccaaacccatgtcaacacacgtgtggctggaaccaatggctatttggctccggagtatctaatgcatggacatttaaccgtgaaggctgacgtatttagctatggggttttggtgttggaattggtcagtggccagcgaaattcatcctttgatatggacgtgagtgcacagaatctcgtcgactgggcatacaggctatacaagaaagggaaggccttaaaaatcgtggacccaacactggcctcatcagtggtagcagaacaagcagaaatgtgcattcaactgggtctac

SEQ ID NO: 275071 - DNA, 431 bp, Glycine max
  unsure (1)..(431): unsure at all n locations
gatggaagaaaagaaataaaaaaaagtaagataaaaatgcagtagaagagtcctgattccaaacgaaaaaattcaaacttgattgaaaaggatctttctgattattgaagaatgggacaaaaggattgatcgcgaaaaagatttcttgttcttattagaagatcgtgattggatccacatatgtttggtaaaaagaaagaaaaatattcttctttgagaataataaaaaaggaaagtgttcaattggaacatgaaaacgtgacagaattggtcctagttactcttcggaacggaatagaagaaggggagagattctcgaaccgaactaggaaacggatccaatgacttcaaaagaattgaacgaagagccatatgaagtgaaaatctcatgtacggntctgtagagtggcagtaagggtgacttatctgtc

SEQ ID NO: 275072 - DNA, 324 bp, Glycine max
ctatacgagttcttgcgaaaacctaccaaacctatggctcactctattacgctacactttaatgggatggacctgaaacttcctttgtaaaacagattgatacacagcatcactgattagatttcatgtcttgcaattgcagtggcacccttcaatgtgaaactcatgtttaacagtatctccaactttcagaaacagaaccttaggatattgtttgataccgtccataataacgttggcatatcccgttaagtatgtaactagctggctgactacatttttatttatttatctaataaaatgtaccacctggatttcttgatt

SEQ ID NO: 275073 - DNA, 438 bp, Glycine max
ggtccagatcatctaccattatacctacaatgaggggccgtaccattgctatccacaacggaaaagagcatttacctatttatataacagatcgtatggtaggccataaattaggagaattttcacctactctaaatttccgaggacatgcgaaaaatgataatagatctcgtcgttaacgttaattttaacataaatttttaaatcgtaatttataactaaatattacaaaatggaattcttattaaaatgaaattcaaatcatttcttttataaaaaaaaaaaaattctttaattaaatatttaatgaaattaaatatttaaattaataaaattagtcgtgttttattcgattttctgaataggtttttttttacagtagctaatgctagtcaccgaacttagtcaatgagctacaatgggttataaagatatcta

SEQ ID NO: 275074 - DNA, 398 bp, Glycine max
ggaggctcggaattgcatagagattggaatcagagatgctaacaatagcaatagcgttgtttactcttatttaatttcattcgtcgtatcggagtttgatggtttcatcgaagaaacaatacccccattcttcttcaactctctccctccctccgagagaggatcctaaattctaatcattcaaatctaatctcataataatggcggctgtgtcaggaggagggagtgagatatggaaggcccacacggcaatggccatggtgcagttattcaacggaggttatcacgtcatcaccaaagttgctctcaacgttggggtcaaccaaatcgtcttctgcgtcttccgcgacctcattgccctcgccattctcgctccactcgcttacatccgcgtaaag

SEQ ID NO: 275075 - DNA, 410 bp, Glycine max
ggtgattgtttgttgttgtaactcgttcttcttcttttgttgttctgtgtttgtgtttgttttttctctcacctgaaaatgtcttgctgcggtggtaactgtggttgcggaagctcctgcaagtgcggcaacggctgcggaggctgcaagatgtacccagacttgagctacactgagtcaaccaccaccgagaccttggtcatgggagtggcacctgttaaggctcaatttgagggttcctgaaatgggtgtgcccgctgagaacgatggctgcaaatgtggaccaaacttggtctgcaacccctgcacttgcaagtgaggtgttgggagagcaagcttcaagcagagatagcccttaattaggaataatgataaactattaatgtgtagctaaaaacttatgtattatg

SEQ ID NO: 275076 - DNA, 407 bp, Glycine max
ggagagaaaaaatggccaaatcaatcaaattctttgagttgaacacaggggccaagattccttctcttgggttagggacttggcaagctgaacctggtgttgtagctgaagctctcaccacagccattcaggttggatacaggcatattgactgtgctagtgcgtataagaatcaagcagagattggttctgctcttaagaagctttttgatgatggtgtggtgaagcgtgaggacttatggatcacttccaaactctggtgttcagatcatgcaccagaagatgtgccaaaagcattggataaaacattacaggaattgcaactttgactatctgacctctatctgatccactggccagtccgcatgaaaagtggaacatttggtactcataaggatatcttgagc

SEQ ID NO: 275077 - DNA, 439 bp, Glycine max
gatctttatatggaaatgaaagaatctggagtaattaatgaacaaaatattgcagaatcaaaagtagctctagtatatggtcaaatgaatgaaccgcccggagctcgtatgagagttggtttaactgccctgactatggcggaatattttcgagatgtcaatgaacaagatgtacttctatttatcgacaatatctttcgcttcgtccaagcaggatctgaagtatctgccttattgggtcgaatgccttctgctgtgggttatcaacccactcttagtactgaaatgggttctttacaagaaagaatcacttctaccaaagaggggtccataacttctattcaagcagtttatgtacccgcagacgatttaaccgatcctgcgcctgctacgacatttgcacatttagatgctactactgtactatcaagaggattag

SEQ ID NO: 275078 - DNA, 434 bp, Glycine max
gttggtgaaaggagaacctaatgtttcttacatctgttcaagatactaccgtgctccggaacttatatttggggccaccgaatatacaactgccatagatatatggtcaactggttgtgtaatggctgaattacttcttggacagcccttgtttcctggagagagtggagttgatcagctagttgaaatcatcaaggttttgggaactccaaccagggaggagataaagtgcatgaacccaaattatactgaatttaaagttttccacagaataaacctcatccgtggcacaaggtctttcagaaacgtttacccccagaagcagtggaccttgtctgtaagttctttcagtactcccccaatttgagatgcactgcatttggaagcttgcattcatccattttttgatgaattgagggacccaaaacacccgc

SEQ ID NO: 275079 - DNA, 279 bp, Glycine max
ggcgcattgaacgaaaattagggtttgtagtgtagcaggaagaagcagcaatggcgccgaagataacacgtaaggttagcagaaaccctgaattgataaggggaatcggaaagtactcgaggtcgcagatgtaccacatgaggggcatttgggctatcaaggccaaaaacggtggcgttttacctcgccacgaccctaaacccaagcctgaagctcctgctgaaaaaccacccaaattttaccctgctgatgatatcaagaagccccttgtcaacaagc

SEQ ID NO: 275080 - DNA, 414 bp, Glycine max
ggttctagtgtgtgattgtttgttgttgtaactcgttcttcttcttttgttgttctgtgtttgtgtttgttttttctctcacctgaaaatgtcttgctgcggtggtaactgtggttgcggaagctcctgcaagtgcggcaacggctgcggaggctgcaagatgtacccagacttgagctacactgagtcaaccaccaccgagaccttggtcatgggagtggcacctgttaaggctcaatttgagggtgctgaaatgggtgtgcccgctgagaacgatggctgcaaatgtggaccaaactgctcctgcaacccctgcacttgcaagtgaggtgttgggagagcaagcttcaagcagagatagcccttaattaggaataatgataaactattaatgtgtagctaaaaacttatgtt

SEQ ID NO: 275081 - DNA, 414 bp, Glycine max
gccgccaaagccggagaggatcgtctctctaaggtgccggtgcgtaatataaggaacttctgcatcattgcgcatattgaccacgggaaatccacgttggcggataagttgcttcaggttaccggcacggtgcaccagcgagagatgaaggatcagtttctcgataacatggatttggagagagaaagaggcatcactattaagctccaggcagctagaatgcgttatgtgtttgaaaatgaaccttattgcttgaatctaatagatactccggggcatgttgacttctcgtatgaagtttctcggtcactcgctgcatgtgaaggtgctcttctagtagtggacgcttctcacggcgttgaagcacaaaccctaactaatggttatttggctttggagaacaacctggaaatt

SEQ ID NO: 275082 - DNA, 415 bp, Glycine max
gggtgtgagttcatttgatgcaaacagcattacaagtctgtcgcaatatgtgaagccacttaccaacttccttgaaaaacttttggaaggcgaaaaggtgatcttggttggacatgattttggaggggtatgtatatcatatgcaatggagatgtttcctcttaagatttccaaggctgtctttattgctgcagcaatgctgactaatggacaaagcactcttgatattatttctcaacaggcaggttcaaatgatcttatgcgacaagcccagacttttgtatatgctaatgggaatgatcatcctcccacttcttttgatctggacaagtcattgtcgagggatttgttattcaaccaaagtcccaccaaagatattgcactggcatgtgtctcaatgaagtctgtaccattt

SEQ ID NO: 275083 - DNA, 448 bp, Glycine max
gggtgcgtgagggcagacgacagaagggtgcagcggcgcgcagaggatggggccgagtggtggagtttgaaagagaacatattgatcgcagttgagttctaaggagtctcgaatacgattacctgttcaagcttctgctaatcggagactcttccgttggaaaatcctgcttgcttctcatattcgctgatgactcctatgtcgacagctacataagtaccattggagttgattccagaatcagaacggtggagctggaagggaaaaccgtgaagctgcagatacgggatacagctggacaggagcgattcatgactataacatgcagttattatagaggagcacatggaattatgattgtctatgatgatactgagatggcacggtttaaccatgtgaaaccgcggttgaatgagattgacatacatgcgaatgacactgtgtgcaa

SEQ ID NO: 275084 - DNA, 416 bp, Glycine max
ggcactggtggtgcgccaccgcatgattagttcccggaagtggagtcgcgccatggcgatactgaaggagtttgaggacaagtgtgggaccccaattgtgaagcttagacaagtggctgatgccatggatgttgagatgcacgcaggtctcgcatctgaaggtggtagcaagctcaatatgttgatcagttttgtcgataatctcccaactggggatgaggaaggactctattatgcactggatcttggaggcacaaacttccgtgtccttcgtgtacatttaggcgggaaagacaaaggtgttatcggccaggagtttgaagaagtttcaattcctccaaatttgatgactggctcttcagaagcattgtttgattttatagcagcagctcttgcaaagtttggtggttcaaaac

SEQ ID NO: 275085 - DNA, 409 bp, Glycine max
gagagaaagagagagaaagatgtcgaagcgtggtcgtggtggttcggcggggaacaagttccgcatgtcgctgggtcttccagtggcggcgacggtgaactgcgccgacaacacgggggcgaagaacctctacatcatttcggtgaaagggatcaaaggccgtttgaaccgtcttccctcggcctgcgttggcgacatggtgatggccaccgtgaagaagggaaaacccgatctgaggaagaaggtcttgccagctgtcatcgttcgccagcgcaagccatggcgccgaaaggactgcgtctacatgtacttcgaagataatgctggtgttattgtcaatcccaagggagaaatgaaaggttctgctatcactggtcccattggaaaagagtgtgctgatttgtggcct

SEQ ID NO: 275086 - DNA, 427 bp, Glycine max
ggtgtaagagtgaagagtgaagagtgaagagtgaagagtgaagtaacaaagcaaaaagagcggagggaaagtcgtgggaacgaagaagccaacaaagacaaatcaaggtgaaaaggaaaaagcccttatgcttttttgagtttgtttctcaccagcttgagttgtttagaagctcatcttaagcattgtggcagacctgagtgagcattttttgagtggaaaatatgagctacagtggctcctcaatgagttctggtagtggatcttctagaaggacatttgagtttggaaggacccatgtggtcagacctaaagggaaacaccaggcaactatagtttggctacatggccttggtgataatggctcaagctggtcccaactcttggaaactcttcctcttccaaatattaaatggatttgcccaac

SEQ ID NO: 275087 - DNA, 312 bp, Glycine max
ggaagctaagcgaagcaaaatgggtggatcagtgagggacgtgaagtcgaagggcgaggccgacgaggtggtggcgagtggctctccggttatcctccacttctgggcgtcgtggtgcgaagcttccaagcacatggaccaactcttctctcacctttccactgatttccccaacgcccgcttcttaaaggtcgaggccgaagagcaacccgagatttctgaggcttactccgtctccgctgttcctttctttgccttctgcaaggatgggaagacctttgatacattgggagggagctgatccgtcaagct

SEQ ID NO: 275088 - DNA, 367 bp, Glycine max
gaatggaaaggggagtttttccctgacattcccaaaattaaatatgagggtccgtcaagtaagaatgtgctttcatttaaatggtataatgcagaggaggaaattcttgggaagaagatgaaggattggttaagatttagtgttgcattttggcatacattccgtggaacaggtgctgacccatttggtgcacctaccaaatactggctatgggaagatggtaccaattcattaaacatggctaaaagacgaatgagagctaactttgagttcataagcaaactcggtgttgacttttggtgtttccacgacagggatatagcccctgatggaaaaacctttgaagaatctaatgcaaacttggatg

SEQ ID NO: 275089 - DNA, 414 bp, Glycine max
gcttgaagctgatattcaccatgccaataccctggcgtcagattttccaagggaatatgatgggacctgccttcagatgagaatgtcatacagtccagcagcacacctgtttctcttttttgtgcaatggacagactgcaatcttgctggagcccttggactgttaagaatcctaatatacaaagtgtatgtggatgggacaactaccatgtctacccttgaaagaaaagcaagtattagggaattctatgcaatcatatatccctctttagtgcaactgcaagaaagtgtggcagatacagaggattaaaaacagaaggctgtatgcatggagaggtatcgcaaaagagatgatgaggagcacagacagccttcagacatagacattgaaagagaagaagaatgtggaatatg

SEQ ID NO: 275090 - DNA, 422 bp, Glycine max
tgggagagtgagaaagagacagagagaattgggaaggcctaatttcggaaagatcggcgatgactgcctccaaggatcgcgagaacttcgtctacatcgccaaactcgccgagcaggccgagcgttacgaagagatggtggaatcaatgaagaacgttgcgaatctcgacgttgaactgacggtggacgagcggaatttgctttctgttgggtacaagaatgtgattggtgctcgcaaagcgtcctggaggatcctgtctttcattgggcacaaagaagaaacaaaagggaacgagttgaatgcgaagcggattaaggagtacagacacgaggttgaattggagctatcgaacatctgtaatgatgttatgagagtgattgatgagcaccttatcccttcagctgcagctggtgaatccact

SEQ ID NO: 275091 - DNA, 420 bp, Glycine max
  unsure (1)..(420): unsure at all n locations
ggttctagtgtgtgattgtttgttgttgtaactcgttcttcttcttttgttgttctgtgtttgtgtttgttttttctctcacctgaaaatgtcttgctgcggtggtaactgtggttgcggaagctcctgcaagtgcggcaacggctgcggaggctgcaagatgtacccagacttgagctacactgagtcaaccaccaccgagaccttggtcatgggagtggcacctgttaaggctcaatttgagggtgctgaaatgggtgtgcccgctgagaacgatggctgcaaatgtggaccaaactgctcctgcaacccctgcacttgcaagtgaggtgttgggagagcaagcttcaagcagagatagcccttaattaagaataatgantaactattaatgtgtagcttaaaacttatgtattatgt

SEQ ID NO: 275092 - DNA, 405 bp, Glycine max
ggccatttctgtgtgtgatcacattgtttccctgtatcgtcttctccctccttgttcaatggtcttagggtttccggtgtccatgcgtagaagctagcaataatgcgtttttgaaacccgtattcatctgtatccaacgatttactagaaggagatcgcaatttctccatcttctcgtttcggtggctcgtgaaatcgaaagttatcgaaactttcgcgcgacacgaagtattgggaaccaagcaaaatttctatggctgacgaaccactatatccaatagcagtgcttatagatgaagtgaaaaatgatgacatccagctgcggttaaactcaattcgcaggctatcaacaattgcgcgtgctcttggggaggagcgaacccgtcgagaattaattccattttt

SEQ ID NO: 275093 - DNA, 385 bp, Glycine max
ggcattcactctgtgagagaaagagatagggtgggggagagagaggagcggaagtgagaaaatgactacgaggttcaagatgatcatgacgactagaggccacgtctgctcctgtcacggtacgtatcgtgaagcaccgtaagcatccagatagtcgagataacgtcagtggcatgcaccatcaccgggtactcttagacaagtaccatccgggattcttcggaaaggtggctatgcgctacttccacatgctccacatcaaattctactgagccatcgtctacattgatatgctgtggtccctcctactatacgaggctctggacatggccacggccgacaatgcgccattgctcgatgtcacccagttatgttgctttaaggt

SEQ ID NO: 275094 - DNA, 382 bp, Glycine max
ttagattaaggatgagctttgtgctgatctgtagcgtaatcaagttatagatcgtcatgctggtgatctttcgggtggtgagctccaaaggtttgccattgcggttgttgcgatccaaaatgctgatatatacatgtttgatgaaccttctaattatcttgatgttaaacagaggctgaaagctgcccaagctattcgatcattgcttaagcctaatagctatgtaattgttgttgagcatgatcttagtgtcttggactacttatcggactttatttgctgactatatggtaaacctggcgcatatgctgtggtgacacttcctttctcactctagaatgaattcacattttctttgctgcctttgttccaacataaaatc

SEQ ID NO: 275095 - DNA, 403 bp, Glycine max
gacgggggtgaaaagggactatatgtaaagaagtgcttgagagactaatctgcacacagcaatacaaagtgaagaagcagaagcatattcagagagagaaatggaagcagcatgggtcaatattctgatgctgatactgatactgactctgatatgggcatggaagaagctcaactcattatggctcacgccaaagaggcttgaaaagatcttaagagaacaaggccttcgaggcagtccatacaggtttaaggttggggacacgaaggagacattgaagatgcaaatgcaagccatgtccaaacccatgaatctcttctctaatgacataggaccgcgtgtgtctccctatgatcattacattgtcaacaaacatggcaaaaattcttttatttggaatgga

SEQ ID NO: 275096 - DNA, 429 bp, Glycine max
ggatgactgatgaagaatttgctagagaaacgagtgctggtgttaatccaaatgtcattaagattcttgaggagttcccaccacgtagcaagctagattctcaagcctacggtgatcatacctctataataacaaaacaacacttggagcctaacttgggtgggctcaccgttgagcaggctatccagagcaagaagttgttcatcttagatcaccatgactatctcattccatatttgaggaaaataaatgcaactaccacaaagacttacgctacaagaaccatatttttcttgaaaagtgatggaaccttgacgccattggccattgagttaagtaagccgcatcctcagggtgaaggatatggtccttgtagcgaagtctacgtgcctttgatcgaaggaattgaagcttacatttggttactgg

SEQ ID NO: 275097 - DNA, 410 bp, Glycine max
gacaacaataattctcaaagtggagaagctcccagagaaaatttcattcacgtgagagctagaagaggtcaagccactaacagccacagccttgcagaaagagtgagaagagaaaagattagtgagcgaatgaggttgcttcaagaacttgttccaggttgcaacatgataactggcaaagctgtaatgcttgatgagataataaactacgtgcaatcacttcagcaacaggttgagtttctgtccatgaaacttgccacaatgaacccagaactgaactttgatgtagacaggatcctatccaaggatattctccaatcacgcataggacatggaattggtgcatatggtcctggtatcaattcctctcacaccttccccaatggaagtttccatggaacattggctgg

SEQ ID NO: 275098 - DNA, 402 bp, Glycine max
gataccaaaaacaaaacacaagccaagtgaaagtgagaaaaaataaaaatcaaagagcataatgtcagggatcattcacaggattggggagacccttcatgtgggagggcacaagaaggaggaggagcataagggtgagcaccatgctggagaatacaaaggggagcaccatggtgaacacagtagtgagtacaaaggagagcatcatggtgaacacaaagctggagagtaccatggtgagcacaagccagagcacaaagaagggttcctagacaaagtcaaggacaagatccatggtgagggcggcgccgtcgaaggcgaagaagaagaagaaagagaagaagaagaaggagcatggccatgagcatggccatgacagcagcagcagtgacagtgattaaa

SEQ ID NO: 275099 - DNA, 410 bp, Glycine max
  unsure (1)..(410): unsure at all n locations
ggtggtagatctggcggcttggtttgttctacttcctcttacactgggattagaacaaggcgtttgtgcacttctaacaacaccacctttcccttcccccaacaacctcaatcactctctttcgctaaacctctcaaactcatgtctcaacctttgaccaccaactctgttcttgttgaagaggctgctgctgatggtgattcctccgccgccgcacctcccctcttcgattatcatcgtatcgaccaaaaactggctccaaacataatttacgatgctcttgtctggagcaccctcaactgcctccttgttggtgacaaatctgttcagagatcaggaagagttcctggtgtgggcctggtacatctnccactttccttattacctgggccatttcctgaaagtcattg

SEQ ID NO: 275100 - DNA, 395 bp, Glycine max
gtatgatgtggatcttgttcagaggctgttagagcattttattattcaggaacacactgaaagttcaagtccaagcagacagtccttttctgataaacagcatatgggaatgggatgcatcctaaatgccaaggcaagagtggcaaggcttgttgacagttatcttacagaggtgtccagagataggaacctttccctcaccaagtttcaggtacttgcagaggctttgcctgagtcagctaggacctgcgatgatggactatacagagcaattgattcctatcttaaggcacaccctacactttctgagcatgaaaggaagcgactatgccgtgtaatggattgttagaaactgtccattgatgcctgcctgcatgctgctcaaaatgaaagac

SEQ ID NO: 275101 - DNA, 419 bp, Glycine max
gctatctccgaaggtgcaacatcctttcgggtcggtgaatatcaatatgtggggatcttgatggttgcttttgcaatactgatcttcctttctctgggctctgtggaaggcttcagtactaatagccagccctgcacatatgataagagcaagctatgcaagccatcccttgcgactgcattgtatagcactgtatctttcttgcttgatgctataacttcagtcctatctggtttccttgggatgaaaagtgcaacctatgccaatgcaaggacaaccttggaagccagaaagggagttggaaaggctttcattactgcatctaggtctggtgcagtgatgggtttccttcttgcagcaaatggtcttttggagctctacattaccatcaatctctataagctatattatggtgatga

SEQ ID NO: 275102 - DNA, 404 bp, Glycine max
acattgctaatggaagtgttgcttcttgcttaagagagcgtcctccatatcaagaacccctggattggccaacccggaaaagagtagctttgggatctgcaaggggtctttcatatttgcatgatcattgcgacccaaagattattcatcgtgatgtgaaggctgtgaacatattgctggatgaagagtttgaggctgttgttgcggactttggattggccaaacttatggattacaaggacacgcatgtgacaactgctgtacggtgcactatcgggcatatagctactgagtacctttccactggtaaatcttcagagaaaactgacgtttctggttatggtatcatgcttctggagctgatcactggacagagagcttttgaccttgctcgactcgctaat

SEQ ID NO: 275103 - DNA, 406 bp, Glycine max
ggtggcaggtgtgggttcttcaattcattctagttgtggattccgactagccgcgttgactcggttccgtttttcattctcgcggatctaatattaaggaatagcttaagggcacattacaatgaaggcattgattctggttgggggatttggaacaaggctgaggccactgacactcagtttccctaagcctcttgttgattttgctaacaagcctatgattttgcatcagatagaagcccttaaggccattggagtgactgaggtagtgctagccatcaattaccaaccagaggttatgttgaatttcttgaaagattttgaatcaaagctcggcatcaagatcacatgttctcaggaaacttgaccactgggaacagcaggtcccctggctcttgctagggat

SEQ ID NO: 275104 - DNA, 414 bp, Glycine max
gggaaggaagggagggaagaatagaatgggatctggaagtggaaaacacactggagagttcttcaggagaagggatgcatggaggaagcatccgatgctcaccaatcagctccgccacgccacccctggccttggcatcgccgtcgtcgccttcggtatctacctcgtcggcgaacaagtctacaataggctctatgctcccgatcctcattcgatttctcacgtgaaagccggggatcaccactaaacgtttggacggacgcactccattccatcatcacttaataagtttgctagcatgttctcgcagcctttaatgtttaaatttcagaccgtgttcgcttctttggcactcactatgttgtcttgtatgcctacattttatgccttcaatttgcattcacaatgaaactc

SEQ ID NO: 275105 - DNA, 431 bp, Glycine max
tgagagcaagagtgaagagcgaagagaatggctccgaagggtttaatctttttggctgtgttatgcttctcagcactgtcactgagtcgttgtcttgcggaggataatggacttgttatgaacttctacaaggaatcatgccctcaggctgaagacatcatcaaagaacaagtcaagcttctctacaagcgccacaagaacactgctttctcctggctcataaacatcttccatgactgagctgttcagagttgtgatgcttcactgttgctggactccacaagaaagagcttgtctgagaaggaaacagatagaagctttgggttgagaaatttcaggtacattgagaccatcaaagaagctttggaaagggaatgcccaggagttgtttcctgtgctgatatcctcgttctctctgccagagatggcat

SEQ ID NO: 275106 - DNA, 373 bp, Glycine max
gagcaagagtgaagagtcgaagagaatggctcccagggtttaatctttttggctgtgttatgcttctcagcactgcactgagtcgttgtcttgcggaggataatggacttgttatgaacttctacaaggaatcatgccctcaggctgaagacatcatcaaagaacaagtcaagcttctctacaagcgccacaagaacactgctttctcctggctcagaaacatcttccatgactgtgctgttcaaagttgtgatgcttcactgttgctggactccacaagaaggagcttgtctgagaaggaaacagatagaagctttgggttgagaaatttcaggtacattgagaccatcaaagaagctttggaaagggaatg

SEQ ID NO: 275107 - DNA, 397 bp, Glycine max
ggatgagcagcagtgaaaaaaaacttgtttgaaccccaatgattaattattaatcaaattcaattcaatgaccaaccaatcttcttcgccctctttactttgcgcttctttcaaccaggaccatagttactttgccgttggcaccagagatggtgttagaatatttgatgctaatacaggaaggctttgttatgaaagaggtaaattcagttcctttaattaatcaccttttttcttgttaattttttcccccttccttcgtgtagcggttggagcttttgttattgctgagatgctgtttagctccaaccttcttgctatcgttggagctggtcatcagccatctttgtctcctcgccgtctttggttattcaatacaaccactggagctgctctt

SEQ ID NO: 275108 - DNA, 393 bp, Glycine max
  unsure (1)..(393): unsure at all n locations
gactctacaattgtgatcttcacaaatcaacaacgtctctctctgttactctgaaaattgacttcaagttagtataactggctgtcaagttgtaatggcattggtctctggaagaagttctgcactgaacccaaatgcacctctattcatacctgctgctcttcggcaggtggaggatttttcacctcaatggtgggatcttgtgaaatcttcaacatggtttcgtgattattggttgagccaacataaggaggaagaatttgaagttgccaatgactctagtaatgatgatattgagaatatgctctcagaaacttttgatctangcatggaagaagacttcaatgttctagagaacgagtttgagcggttggtgatgtcctctgaagctct

SEQ ID NO: 275109 - DNA, 359 bp, Glycine max
  unsure (1)..(359): unsure at all n locations
taccgaactgcaatttcgacccacgcgtacgcacgggtgcacagcatacgacacgagaagactacagattgttttactaacctacgccctacgggttagcgatacctgaacgaagaggttcaagatacacgaacgatctagctgcacgtcatgaccgatgcatagattnctcatgaacctcgattgtgccctaacgtactctcagtcacaatagacaccgtcttagtcgtcttcacaatcaatggcaccgaagcagaccatggctgagaacaagatcgcttacgatgcgaagctgtgcgacctaatggaggagtacggtcagatccttggtgtgaacttcgatcacgtgggatcgaacc

SEQ ID NO: 275110 - DNA, 410 bp, Glycine max
ggaaaaaagagtgacactcattttaaacggaaattgctttagcataaaagagttcaagaggaggaagaacaacaagtagtaataactatatctacatagttatctttctcttgagctttgtaatttgaaacctatagatggaatggaggaagtgctacttggatgttatattggtgcccttggtgtttctaacaagcattgggtaccatttctggctatggcataaggttcgaactcagccacacacaaccatcattggcatcaatgctagtggccgtagaaattgggttaatgccatgatgaaggtacctagctatcttattttcattcttgtttttagttttggcttgctaagagtatatataattcttatcactattattttttttctttccaagttatcatcacta

SEQ ID NO: 275111 - DNA, 421 bp, Glycine max
ggaaagaaggttaagtgaaaagtgaaaagtgaaaatggacttggaagcagtgaagaggtacttagagaaaggaggagaaacagcatcggcggtggatgggttgcctccgaggtttctggaaccgttaataatgaacgctcttaaggtcgatctcatcgaaactggtcgcgttgtctgctccatgaagatacctccgcgtttactcaatgctgggaattcgttatacggtggcgccatcgctgctctggtcgacgtggtggggtccgctgcgattcccaccgttggatattcggctcccaatactggggtttctgttgagattaatgtttcgtatttggatgctgcctatgccgatgaggagattgagatcgaggccagggctttgcgtgtagggaaggcttgtgccggtataagcgtggag

SEQ ID NO: 275112 - DNA, 410 bp, Glycine max
gatcttgagaaatgcagaaccaagtgcttgaaagattgttcctgcatggcatataccaattctaatataagtggagcaggcagtggctgtgtcatgtggtttggtgatttattagacatcaaattgtatccagatccagaaagtgggcagcgtctatatataaggttacctccttcggaattagattctatcaggccccaggtgtctaaaataatgtatgtaatatccgttgctgcaactataggagttatacttgctatttattttctctacagaaggaaaatttatggtaaaattattcttctcttctctcacatttgacagaaaaaatagctgaatagttctgcacagaatattttaagtagaaattctgctgtttgtcaattcccttgacaagtgctgttattcaa

SEQ ID NO: 275113 - DNA, 412 bp, Glycine max
gatagaaaaaaataaaaaactttcgaaagaggttatccaattgaaattttaaaaatgactgggataaacttaagaattcaattattgaaattgaataagtaaacaatttaattggattggtcgaatggtatcaaaaaaatggagtactaactcccatttcttatttattattgaattaaccgatcaacttgctttgttatcgaacatttctttttgatttcaaaaattttccggaaaaaatttgaatctatttttatatgcgaatcaatcctactacttctggtcctgaggtttctgcgcttgaaaaaaaaaatctgggacgtatcgcccaaataattggtccggtactagatgtagcttttcccccaggtaagatgcctaatatttacaacgctctgatagttaagggtcg

SEQ ID NO: 275114 - DNA, 412 bp, Glycine max
gacggctaaaagctaaaaatcatcgaagtactcaaattagcatggctgtcacggttgcattcttgaatttgatcatcatgttttcagtagtctctacaagcaagtcactgagcttaaactactattcaaaaacatgccctgatgtggaatgcattgttgccaaggcagtgaaggatgccactgctagggacaaaactgttccagctgcacttctgcgaatgcacttccatgactgtttcgttcgggggtgtgatgcctctgtgctgctaaattcaaaaggaagcaacaaagcagaaaaagatgggccaccaaatgtttctttgcatgcattctatgtcattgatgcagcgaagaaagcactagaagcttcatgcccaggtgtggtctcttgtgctgacatccttgctctagc

SEQ ID NO: 275115 - DNA, 353 bp, Glycine max
gacagaagcatggtgaagatgtggtgcattctttaaaggtttccttggaggacgtttataatggcacaacaaagaaactatctctttctagaaacatattatgcccaaaatggtaaaggaaagggtcaaaaaggggaacctcttgtaagggttttggatgccaaagcccttggttgaaaattacaagaaggcagattggacctagcatgattcaacaaattccacatgtctgtcctgactgcaaaagatctggtgaggtcattaacgagagagataaatgtccctctgtgcaaaggaaacaaggtttcccaggaaaagaaggtgctggaagtgcatgttgaaaagggcatgca

SEQ ID NO: 275116 - DNA, 399 bp, Glycine max
ggaaacaagaagtgaggttgtctttcaaagatggaagaggaggcatttgaaaaaccattgttgaagagacagtatcatgagaactgtcctggttgtaaggtggatcaagccaaggagctcaaaaaggatgtttcctttagaaacctttcttatatatggttggcagtgttatgtggcacattgcctgtggcatcactctttccctttgtttatttcatggtgaaggattttaatattgcagaaacagaggaagacataagtacctatgctggatatgtgggatcagcaatgatgcttggaaggtctttgacgtccatattgtggggtatggtttctgaccgctatggtagaaaacctgttataattatagggattatcactgttggcattttaacacat

SEQ ID NO: 275117 - DNA, 407 bp, Glycine max
gatagaggtgcggattcttgtttttgttggagatctttctttctttgattccaccagcctcattgtcttagggtttttgtttccagcatagatgttgttgtcgatgattacttactagttttggtttgcttgattgaagatcaaggaaggaaggaaggaagatgttgggtgttataaggcacaagagtattcgccctgccttctccgcaatcagacacttgtcttctgcagctaaagagattactgtcagggaggctctgaactccgcactcgatgaggaaatgtcagctgatcctaaagtgttcttgatgggtgaagaggttggggaatatcagggtgcatacaagatatccaaggggctgctcgacaagtatggccccgagagggttctcgatactccaatcact

SEQ ID NO: 275118 - DNA, 350 bp, Glycine max
ggagcaagagtgaagagcgaagagaatggctcccaagggtttaatctttttggctgtgttatgcttctcagcactgtcactgagtcgttgtcttgcggaggataatggacttgttatgaacttctacaaggaatcatgccctcaggctgaagacatcatcaaagaacaagtcaagcttctctacaagcgccacaagaacactgctttctcctggctcagaaacatcttccatgactgtgctgttcagagttgtgatgcttcactgttgctggactccacaagaaggagcttgtctgagaaggaaacagatagaagctttgggttgagaaatttcaggtacattgagacca

SEQ ID NO: 275119 - DNA, 407 bp, Glycine max
ggagtcaaagggtgtgagtgagtgtgagcaagatgggttctttggcaaagaagggactcaacaattacgtcaaacagctccagcaacaccctttgagaaccaaggtaatcactgcaggggtactatcagcggtcagcgatgttgtgtctcagaaacttactgggatacagaaacttcaactcaaacgtcttcttttcaaagtgattttcggagctgcttatcttggaccctttggacacttttttcatttaatactggataaaattttcaaaggaaagagagattcaaaaactgtggccaagaaggttctgattgaacagttgacatctaatccttggaacaatttgcttttcatgatttactacggattagttgttgaaggccaaccttgggtgaatgtgaaagct

SEQ ID NO: 275120 - DNA, 406 bp, Glycine max
gaagtcaggatggcagaggtgaagcttcatggattttggtatagtccctacactttgagggtggtatggaccttaaagttaaaggatataccatatcaaaacatagaagaagaccgctacaataagagtcttcaacttcttgaatacaacccagtatacaagaaaactccagtgcttgtccataatggaaaacccttatgtgagtccatgcttattgttgaatacattgatgagatttggtcacataattcattacttcctgctgatccctacgagagagctctggcaaggttttgggttaaatatgctgatgatgacatggtaatttttaaaaacttaatcatgtagtactacttaaagtttctagcctttgatcttgatcaagagcacctgcatttatacaatt

SEQ ID NO: 275121 - DNA, 415 bp, Glycine max
aggacagctatcaggagtagcagtaggttcttctgtttgcatagcaagcattgtagccggaccaatatcagggggatcaatgaatccagcaaggacattaggtcctgcaattgcgacatcatactacaagggactttgggtatattttgttggacctattactggggcggttttagcagcttggtcttacaatgtgattagggacactgaacaccctggttttcccatttcactatcctccatttcatccaaggtgcgccaaagcattggtggaactgaacaaaaaagcgaccaaagatgcttggtgtgaatgaaataataaacaacaatgttttttctgacaccacaccaccgcccaaatcaacatcaccttcaatttcttgtcttggaggatctcaagtttccacatgtatta

SEQ ID NO: 275122 - DNA, 410 bp, Glycine max
ggtacacacgagtaccacaaacctctgtctataaatctttctagaacgtttcttcactccccgaacctgatctcttgctggttgccacactacaccgatatttccaccaaacccgtttgcgttgttgtttgcgaataaatggcaactaagaggagcgtgggaacgttgaaggagggtgatttgaaggggaagagggtattcgtgagggtcgatctgaacgtgcctttggatgacaaccttaacatcaccgatgacactagagtccgtgctgctgttcccaccatcaagtacttgactggttatggtgctaaagtgatcctttctagccatttgggacgtccaaaaggtgtaacacctaaatacagtttgaagcctcttgtgccaaggctgtctcaacttcttggaattga

SEQ ID NO: 275123 - DNA, 336 bp, Glycine max
gatgaggggcaggttcaggagttggaggagcaccgcattgagttgagtctcgggcaagataataatgttgagagggttgaagttgagaaggagcagggtggagaggagcagatgatggatgtgggttttgagcagtctaaggaggaggatatgcctggaatgtggcttttggatcagaagaactgtgtgggggagccatttttgcggccttgtcatggtggtgatgtgaagggtgtggagtttgaacaagtgagagaggacgatggagaagatgtgcaggaacaagaggaggtggaggaggaagaagaagaagaagatggtgaagaggatgggcat

SEQ ID NO: 275124 - DNA, 408 bp, Glycine max
ggccagctgttcgaccatattggtttcactttggtcttcttcaccctgttagggtttgcatcagattcccccaattcttgtttgattttgcgctttcactagtttttcttcgacatgactcaagatctcgagatgagggatcgctcaacgccttccaactctgtttctttgcctgctccatctactttgcagcatttgaaggagatagcgtctcttatcgagaccggttcgtactcgaaggaagttcgtagaattgctcgcgctgttcgccttacaattgcgttgaggcggaaattgacagcatccgctatctcttcttttctcgaccttgttctcactccaggctctgaagttcacgccaaattgtctgcgtatcttcccaaggaggatgatcatgagatggaagtg

SEQ ID NO: 275125 - DNA, 375 bp, Glycine max
ggcacaagtgagtttgttgatcgagataactagaaacagtgtgatgaaaatgaaggtccttgttttcttcgttgctacaattttggtagcatggcaatgccatgcgtacgatatgttccctctccgaatgaacactggctatggtgcccgtactccggaagtgaaatgcgcaagttggaagcttgctgtggaagcacacaacatctttggctttgagaccattcctgaagagtgcgttgaagcaacaaaggaatacatccatggcgaacaatatagatcagactccaaaacagttaaccaacaagcttacttttatgccagagacctcgaagtccatcccaaggacacatttgtgttcagtatagatggcaccgt

SEQ ID NO: 275126 - DNA, 377 bp, Glycine max
ggcacaagtgagtttgttgatcgacataactagaaacagtgtgatgaaaatgaaggtccttgttttcttcgttgctacaattttggtagcatggcaatgccatgcgtacgatatgttccctctccgaatgaacactggctatggtgcccgtactccggaggtgaaatgcgcaagttggaggcttgctgtggaagcacacaacatctttggctttgagaccattcctgaagagtgcgttgaagcaacaaaggaatacatccatggcgaacaatatagatcagactccaaaacagttaaccaacaagcttacttttatgccagagacctcgaagtccatcccaaggacacatttgtgttcagtatagatggcaccgtac

SEQ ID NO: 275127 - DNA, 412 bp, Glycine max
gaggtgcaagttgagattttgattgttgttgggctcccaaattcccaaaacagtgatgatcttaagtaaaagaaatgtttttggcaccaagggaaaaatgggtatagatttcatgattttggtgttaacattgtcatggttttgtctgactactatatgcgtctcagctacaaaacaagcatacccaccaacaccacaaccgaaccagaacctaaggtttgaccaaaatggagaattcaagatattgcaggtggcagatatgcactatgcaaatggcaagaccacgcattgcttgaatgtgctcccttcccagaatttttcttgctctgacctcaacaccactatctttcttaacagaatgatcaaagcggagaaacccaatcttattgtcttcactggagataatatcttt

SEQ ID NO: 275128 - DNA, 142 bp, Glycine max
gaagaaagctgctagcagagggaagttctacacttttttgtttggattgatcgagtgtactttttcttttcgagattggcttggtgtgcagtggaaagagggtggaaaagagtggtaagggggagggcggcgccccttgaac

SEQ ID NO: 275129 - DNA, 400 bp, Glycine max
ggacaagagtgtgaactgcagagggcttctccagcctagtttgttctcagatcttcttcttccatggaccagtacgagaaggtggagaagataggcgagggaacatacggcgtcgtttacaaggctcgcgaccgcgccaccaatgagacaatcgctctgaagaagattcgcctcgagcaggaggacgaaggcgttcccagcaccgccattcgcgagatttctcttctcaaagagatgcagcataggaacattgttaggttgcaggatgtagtgcacagtgagaagcgattgtatctggtttttgagtatctggacttggatctaaaaaaacacatggattcatctccagagtttgtgaaagatccgcggcaagtaaagatgttcctttatcaaattctct

SEQ ID NO: 275130 - DNA, 437 bp, Glycine max
cccacgcgtccgcggacgcgtgcagacgactgaaagaggacaacagtgtgaactgcaaagggctgctccagcctagtttgttctcagatcttcttcttacatggaccacttccagacggtggcgaacataggcgaaggaacatactgcgtcacttacaaggctcgcgaccgcgccaccaatgagacaatcgctctgaagaagattcgcctcgagcaggatgactaaggcgttcccagcaccgccattcgcgagatttctcttctcaaagagatgcagcatacgaacattgttaggttgcaggatgtagtgcacagtgagaagcgattgtatctggtttttgagtatctggacttggatctaaaaaaacacatggattcatctccagagtttgtgaaagatccgcggcaagtaaagatgttcctttatcaaattctct

SEQ ID NO: 275131 - DNA, 415 bp, Glycine max
gggagcaagagagagcaagagagagagagaaggtttggaagaatcgcgatggagggtgaggaaggaggaggcataaggctgagcaagcgaatcgcaaacggagaggttgactacaagacgaaatccggcaccgcctggagccactcctatctcaaccagaagccatggcaccctctttcttaccccaaccaacgccgcaagtggatcgccgaacagacccacgccaatcgccaacgccgcaccgaagaggtttctcgcgagttcgctcaggagcaagagttctttcgccaaaccggtcttatcttccaaaaaaaaaaagaaaaggtggagctcatgcaagctgttagtttcatgtacgttcgtcctccgggctacaacgccgagagtgccaaagctgctgaaatgaacgacgaga

SEQ ID NO: 275132 - DNA, 373 bp, Glycine max
gggtggtgaggtgagaagataaagaaagaatggcatttgcaggaacaacacagaagtgtatggcctgtgacaaaaccgtttatctggttgataagttgaccgcggataaccgagttttccacaaagcttgcttcagatgccatcactgcaaaggaaccctcaagctgagcaactacaactcttttgagggagttctttattgtaagccacactttgaccaactgttcaaaagaacagggagccttgacaaaagctttgaaggaacaccaaatattgccaagccagagaaaaatttggaagagaaacctgcagcagccaaagtctcaagtatgtttggaggaacaagggacaaatgtgctggttgtcagaaaac

SEQ ID NO: 275133 - DNA, 300 bp, Glycine max
tccgaaagggcaacaaaaaggttgggtgatggggcccattgattccgagaaggaaagaaacgatgtctgcgccacaacagctatactctcgcgcgaacaccgatgaattcgacctcgaatcaggagaaaccctctacccacagctgagcggctgcaaaaaccatctccgatggggttccatccggctggtctactgcatccttttcgagcaaatcgttcttagcacgctagtcttcgacaccaccgttttatatactccaatcaatgacctactcattggcagttccaccctacttctca

SEQ ID NO: 275134 - DNA, 401 bp, Glycine max
  unsure (1)..(401): unsure at all n locations
gggacgacatggagaagatctggcatcacactttctacaacgagcttcgtgcggctcctgaggaacaccctgtgcttctcaccgaggcacctcttaatcctaaggctaatcgtgagaaaatgactcagatcatgtttgagaccttcaacacccctgctatgtatgtcgctatccaggccgtgctttccctttatgctagtggccgtacaactggtattgttctagactctggagatggtgtcagtcacacggttcctatctacgaaggttatgccctcccacatgcaatcctgcgtttggaccttgcagggcgtgatctcactgatgccctcatgaaaatcttgactgagcgtggttacactntcaccacatctgcggaacgggaaattgtgagggacatg

SEQ ID NO: 275135 - DNA, 408 bp, Glycine max
ggtgtgagttcattaacatatacaaattctctgtgttgtgttgtgtacttgtgttaattgtgttgttgttgtaggaaatttaagtgaagagagaatgatgatgaagtctgctatgtgtgcattggtgcttgtggcactggttgtggttgaagtggggcccatggctgaggctgcggtgacttgcaacccaacacagttgactccttgtcttccggcaattaattcaggttctgcaccttcgagtgcttgttgccagaagctgaaggagcaaaagccatgcttctgtggctacctcaaaaaccctagcttgaagcagtatgttaactctcctaatgccaaaaaaaccgttagttcttgtggtattgcctatccaacttgttaagcacctcttatatatatatataaaat

SEQ ID NO: 275136 - DNA, 416 bp, Glycine max
gggtacgagaggaggattttctcgcacccaaaaccagcatgtgaaatcgaaaagggctcttcgttgaatttgctgttcataaaacccttctccgacaacttgtagctgctgctgctgtttctctttcattttttttttgctaaggactcaaggaatacaacatcctgatatttggaggacagattaaagagaaacatcgtggaggaaacaatggtagcaaggtattggtgtcacatgtgctctcaaatggtcaatcccatcatggatatggaaatcagatgcccgttttgccaaagtggatttgttgaagaaatgggtaacacccccagtagcagcagcattcccaatacatcagaatctgattttgaatctgatcgggctctctcccttgggcgcccatcttgctaggcatgatg

SEQ ID NO: 275137 - DNA, 400 bp, Glycine max
aacgatggtcaagatgagtctcaaggtgctcaggataagaaaggtgttgagactgatggagatggagaaaagaaagaaaatgtccctgcagaatccaaaacttccaagaagaagaagaagaaggataaagcttccaaggaggtgaaagaatctcaagatcaacccaacagttcagacacaaacaatgggcctgatttggccacaggcgctgaaaatgtggaggatacatctactgttgatgtgaaagagcgtctcaagaaagttgcttctacaaagaagaagaagtccagtaaagaaatggatgctgctgcaagagctgctgctcaagaggctgctgcaaggagtgcaaggcttgctgctgcaaaaaaaaaagagaagaaccattataaccagcaacccg

SEQ ID NO: 275138 - DNA, 395 bp, Glycine max
gtatttcctgagcacaagtatgagatcgtgaagcgcttgcaagctaggaaacatatttgtggaatgactggtgatggagtgaacgatgcacctgccctcaagaaagcagacattggtatagctgttgctgatgctactgatgcagctcgcagtgcatctgatattgttctaacagaacctggacttagtgttattattagtgctgttttgacaagccgagcaatcttccagagaatgaaaaattatacaatttatgcagtatcaattacaatacgtattgtgcttggtttcatgttgctggctctcatttggaagtttgactttccaccctttatggtgcttattatcgctatcctaaatgatggtactattatgacaatttcaaaagatcgtgt

SEQ ID NO: 275139 - DNA, 383 bp, Glycine max
gggtacgagaggaggattttctcgcacccaagaccagcatgtgaaatcgaaaagggctcttcgttgaatttgctgttcataaaacccttctccgacaacttgtatctgctgctgtacttcttctataacgtggttacaccgtacatgccaccgtccaagatatcaaggatgaacatgagacgaaacatttggaggaaatggaaggagcaaagagtcatctccattttttagaaatggatcttcttgacatcgactccattgccgctgccatatagggttgctccggcgtaatccaccttgcatgtcctaacatcattggtcaagtcgaagatcccgacaaacagatattggaaccggcgattaaaggaactgctaatgtgttg

SEQ ID NO: 275140 - DNA, 410 bp, Glycine max
ggttctagtgtgtgattgtttgttgttgtaactggttcttcttcttttgttgttctgtgtttgtgtttgttttttctctcacctgaaaatgtcttgctgcggtggtaactgtggttgcggaagctcctgcaagtgcggcaacggctgcggaggctgcaagatgtacccagacttgagctacactgagtcaaccaccaccgagaccttggtcatgggagtggcacctgttaaggctcaatttgagggtgctgaaatgggtgtgcccgctgagaacgatggctgcaaatgtggaccaaactgctcctgcaacccctgcacttgcaagtgaggtgttgggagagcaagcttcaagcagagatagcccttaattaggaataatgataaactattaatgtgtagctaaaaactta

SEQ ID NO: 275141 - DNA, 339 bp, Glycine max
gacactaaacacgtttaaagaagagcatcaggggactaacaaagcaaccctatgtcgaacgtggtttgagtcaccggagccagcggcgccatcggatcatgggtggtactactcctcctacaacgtggttacaccgtacatgccaccgtccaagatatcaaggatgaacatgagacgaaacatttggaggaaatggaaggagcaaagagtcatctccattttttagaaatggatcttcttgacatcgactccattgccgctgccataaagggttgctccggcgtaatccaccttgcatgtcctaacatcattggtcaagtcgaagatcccgacaaacag

SEQ ID NO: 275142 - DNA, 406 bp, Glycine max
gggtgaagtgagtagtgaaggtgctgaatcgaatcgaatctccgaagatggccgcgagcgatcgcacagtgttgcaattctcttcatcatcttcttcttcgcagagcttgtccgcgaaggtccaccctctggtcatcttcaacatctgcgattgctacgttcgacgccctgaccaagccgatcgcgtcatcggaaccctactcggctccgtccttcccgatggaaccgtcgatatccgcaattcctatgctgttcctcacaacgaatctatcgaacaggttgcgttggatatagagtaccaccacaatatgttaatatcccaccaaaaagtgaatccaaaggaaatcatagtaggatggtattcaaccggtcttggagtaacaggtggtagtgcattaattcacga

SEQ ID NO: 275143 - DNA, 408 bp, Glycine max
tcgtgcagatgaaattagtaaaattatccgtgaacgcattgagcaatataatacggaagtaaaaattgtaaatacgggtaccgtacttcaagtaggcgacggtattgctcgtatttatggtcttgatgaagtaatggcgggtgaattagtggaatttgaagagggtactataggcattgctttgaatttggaatccaaaaatgttggtgttgtattaatgggtgatggtttgatgatacaagagggaagttcagtaaaagcaacaggaagaattgctcagatacctgtaagtgaggcttatttgggtcgtgttataaatgccctggctaaaccaattgatggtcgaggagaaatttcagcttcggaatctcgattaatcgaatctcctgctcccggtattatttcgag

SEQ ID NO: 275144 - DNA, 399 bp, Glycine max
  unsure (1)..(399): unsure at all n locations
gacattggtgacaaagttagaaacaaggagaaagaaagaagatggcaggaaagaaaatcccagatgtgttgctgaattcaggacacaaaatgccagttataggcatgggaacttcagtggagaatcgtccatcaaatgagacccttgcttctatctatgttgaagccattgaggtgggttaccgtcattttgacactgctgcagtgtatggaacagaggaagccataggcctagccgtggccaaagccatagacaaaggccttataaagagtagagatgaagttttcatcacttcaaagccttggaacacagatgcacaccgtgaccttattgtcccagctcttaagaccacattaaagaagctggngacggagtatgtggatctttatctgattcatt

SEQ ID NO: 275145 - DNA, 402 bp, Glycine max
gggtgcaaaatctgataatggcagaaacagaagacaaaacccttcaagcctcgcccatgaacgaaaccaagaagatgaagaagaataagaataagaagaagagcgacaaaaaaagacctcgggagattgctaccgaggagcgtccagaggaagaggagaatgagaataatacagatagcgatggagaatcctcgaagaagaagaggaagaagaaggtggaaggagaaagtgaagtgaaagagaaaaaggtgaagaacaatggtggctctggaattatgagcactgagtcatttgaatctctcggattgtctgaacctacttataaagccattatggatatgggattccaccacatgactcagattcaagcgagggcaattccaccgcttttgattggaaaag

SEQ ID NO: 275146 - DNA, 409 bp, Glycine max
ggagcatctgataatcttcgtgaatgggggaaggacaaagtccggtttgatcgaaatggtcctgctgccataaccaagtatcaagctgataacgctattccggggaagaatgatggatgcaatccgatcggtccaacaccacacaccttgcaagagctgcaagacacaaccttgggttctctcttgtcagcactcatgcagcactgtgatcctcctcagaggcgttatccattggagaagggcgttcctccaccatggtggcctaatggtaatgaagagtggtggccccaaataggtttgcctaaagatcaaggtcctccaccttacaagaaacctcatgacctgaagaaggcatggaaagttggtgttcttgactgcagttatcaagcacatgtctcctgatatcgca

SEQ ID NO: 275147 - DNA, 194 bp, Glycine max
ggttgctaaggggaatcccttttatgaagtgttctcatatgtcttatctgtttgttcagtgtctcccttgaacttgtgctttgcatctctggtttaagtgctgctgtttattatgttttaaaatgatgtattgaactcgtttcagcgaaagtatgttgtttatgtttttattttaaatatcaatatcgtttcat

SEQ ID NO: 275148 - DNA, 194 bp, Glycine max
ggttgctaaggggaatcccttttatggagtgttgtcatatgtcttatctgtttgttcagtgtctcccttgaacttgtgctttgcatctctggtttaagtgctgctgtttattatgttttaaaatgatgtattgaactcgtttcagcgaaagtatgttgtttatgtttttattttaaatatcaatatcgtttcat

SEQ ID NO: 275149 - DNA, 349 bp, Glycine max
gacagcaaatgccaaaagccaagttaattccctttctcgactctgcacaaacacaaacacacgtattctcttgcaaaactaagaatgaaggaggagttggtggttgaagaagggtaccttttcaaagaagagactcacttcacagtgctcaaaacctctctcttcttcaacggtgatggcttcgctgtctacgattgcaaaggccaactcgttttccgcttcgactcctacggtccccgcgcgcgtgacaaggacgagctcgttctcatggatccccatggccgttctcttctcactctccgccgaaagaaaccgagtcttcatcaacgctgggaaggcttaaagggga

SEQ ID NO: 275150 - DNA, 408 bp, Glycine max
gactcgcagttgtattgttgaacaagggtttgtctgtctgcttcttcactttctctcgtttcaatcgaaaccaaaacaaaaacatgggcagaaaattcttcgtcggtggcaactggaaatgcaatgggaccactgaggaggtaaagaagattgttactactttgaatgaggctaaagtccctggagaagatgtcgtagaagttgttgtgagccctccttttgtgttccttcctgttgtaaaaagtttgctgcgccctgatttccatgtttcggcacaaaactgttgggttcgcaaaggtggtgcttataccggtgaggttagtgctgaaatgcttgttaatttgggaattccttgggttattattggtcactctgaacggaggcagcttttaaatgaatcaaacgagt

SEQ ID NO: 275151 - DNA, 403 bp, Glycine max
gacacacaacatttacatttctctctccaggatgggttctactcacaatgagttttatgcacttatgctagtggtggtggttggctccatggtggcttcctgtggtgctaacttcaaccaagactttgatctaacatggggtgatcaccgtgctaagatattcaatggtggtcagcttctatctctttctctggacaaagtctctggctccggcttccaatccaagaaagagtacctatttgggaggatcgatatgcaactcaagctcgttgctggcaactctgccggcactgtcactgcttactacttgtcgtctcaagggccaactcatgatgagattgattttgaattcttgggaaacgtgagcggtgacccttacattctccacacaaacgtgtttacc

SEQ ID NO: 275152 - DNA, 395 bp, Glycine max
gtacatacagtggggttttatcagatggttcaaaagtcgcagttaagagattaaagaggtcaagctttcagaggaaaaaggagttctattctgaaattagcagggttgctcggcttcgtcatcctaatctggtggctgtgatgggatgctgctatgatcatggtgaccgctacattgtttatgagtttgtagctaatgggcccttagataaatggctacatcatataccaaggggaggtcgcaacttagattgggctatgaggatgaaaattgcaactacgcttgctcaaggaattgcgtttctgcacgacaaggttaagccacatgttgtgcatcgagatatacgtgctagcaatgttctgctggatgaggagtttggagcacagcttatgggt

SEQ ID NO: 275153 - DNA, 417 bp, Glycine max
ggtggtagtgtggcagcgacacgtatcaactgcaataatcgcatcgcagaagcagtttccggtgcatctcatcgtctccgaaaatgaacgacgcagatgtctcgaagcaaatccagcagatggtgcggttcatccgccaggaagctgaggaaaaggcccacgagatctctgtctccgccgaagaggaattcaatatcgagaagctgcagttggtcgaagccgacaagaagaagatcaggcaagaatacgaacgcaaagagcgccaagttgaaattcgcaagaagattgagtactcaatgcagctgaatgcttctcggattaaagttcttcaagctcaagatgacgtgatcagttccatgaaagaagctgcatccaaggaacttttgactgtgagtcatcatcatgatgatcatgtgt

SEQ ID NO: 275154 - DNA, 402 bp, Glycine max
ggaaagtgttgtggagacaaaaccacaatacagttttagaatggagaagacagcagttaaagttcgatgccagaggattgggtgcgacgccatgttctccgaggccgacaaccccgacggttcctgtcgataccatgattcgggacctatatttcatgatggaacaaaagaatggagttgttgcaagaaaagaagtcatgattttagcttgtttttggaaattccaggatgcaagacaggaaaacatacaacagttaagcaagttattacaccagtggaagaagaacaccatgccctctccaactgctgtttcttctaccaatgcatcatcaaaggagtcttgtcccagatgtcggcagggtttcttttgctcaaatcacggctcgcaaagcaaacctgtaa

SEQ ID NO: 275155 - DNA, 383 bp, Glycine max
ggaggtagagagctctgacacaattgacaatgtgaaggcaaagatccaagacaaggagggtattcctccagaccagcaaaggttgatttttgcgggaaagcagcttgaagatggacgtacgctggcagactacaacattcaaaaggagtctacccttcaccttgtccttcgtctgaggggaggtatgcagatctttgtgaagactttgacagggaaaactatcaccttggaggttgaaagttcagacacaattgataatgtcaaggcaaaaatacaggacaaggaaggtatccccccagaccaacagaggttgatctttgctgggaagcaactggaggatggaaggactcttgctgactacaacattcagaaagagtctactc

SEQ ID NO: 275156 - DNA, 454 bp, Glycine max
cgacccactcctgcttacggatgacaacagacgacagattgagttatctgataacaacacatcttcgggagagagatcattacaatggggtacttggctctccattccgtttacaccttcgtttcgtcgtcatcgccatcgacttctatcacaacgcgtaacctttatccctccatatctgaccaaaacgacgtcgtgctacatcggcagcggacccgtcgatatacatcatggccattaaagcggctcacctgggtctgaacaccacttacttcctataacctgacactctataagcgacctgtctcaacgactgatgcattcattacaaggcactttagcatacataccacatgtaatacgaggctaaacatgcattttccaaccatgacctcaagttttcatttgtcaaaattattttcatacattacttcccaaaagataattcatttct

SEQ ID NO: 275157 - DNA, 384 bp, Glycine max
  unsure (1)..(384): unsure at all n locations
tacacaaagttgtccaatgttttgtcaaagcaagctcttttctacaccgtgattcttccattcattgctttctttggggctttcgggtttgtgttgtaccctctcagcaattatattcaccctgaggcatttgcggacaagcttctcaacatcctcggacctaggttccttgggccccttgcgataatgagaatttggagcttctgtttgttttatgtcatggctgagttgtgggggagtgtggttatttccgtactcttttgggggtttgctaatcagataactactattgaagaagcaaaacgattctacccactgttcggactcggngccaatgtagcccttattttctctggccggacagtcaaatacttttctaatctg

SEQ ID NO: 275158 - DNA, 273 bp, Glycine max
atactgaatattgtgacattctcagagttggtttagaacagaaaagggaattgttcgcaaatggatctcaagattcgaagtctggccatacctagagacttacactgaggatgtcgcccttgaacttgccaaggagttgcaagccaagccagatctgattgttggaaactacagtgatggaaacattgctgcctctttgttagcacatagattaggagtaactcagcgtaccattgctcatgctctagaagagaccaagtaccctgagtctga

SEQ ID NO: 275159 - DNA, 411 bp, Glycine max
ggtgtgagttcattaacatatacaaattctctgtgttgtgttgtgtacttgtgttaattgtgttgttgttgtaggaaatttaagtgaagagagaatgatgatgaagtctgctatgtgtgcattggtgcttgtggcactggttgtggttgaagtggggcccatggctgaagctgcggtgacttgcaacccaacacagttgactccttgtcttccggcaattaattcaggttctgcaccttcgagtgcttgttgccagaagctgaaggagcaaaagccatgcttctgtggctacctcaaaaaccctagcttgaagcagtatgttaactctcctaatgccaaaaaaaccgttagttcttgtggtattgcctatccaacttgttaagcacctcttatatatatatataaaatgtg

SEQ ID NO: 275160 - DNA, 381 bp, Glycine max
  unsure (1)..(381): unsure at all n locations
ggtgttaggtggtgagaagaacgaatcgaagaaagaaagatcatggcgatggcaaacttggctcgacggaagggttacgccgtcgttttgtcgtcgaggtcgtcgctttgtctgacaaggtggagggggttcgcgtccggatctgacgaaaacgacgtcgtggtcatcggcggcggtcccggcggctacgtggcggccattaaagcggcgcagctgggtctgaaaaccacttgcatcgaaaaacgtggcactctcggcggtacctgcctcaacgtcggatgcatcccttccaaggcactnttgcattcttcccacatgtatcatgaggctaaacatgcatttgccaaccatggngtcaagttttcatctgtcgaggttgat

SEQ ID NO: 275161 - DNA, 415 bp, Glycine max
ggaccaaagaggagacggatcaactatttgacggaggtgagagatttgatctccgatttattgtaatagctgataggtttccatcctctcggactgtagaggaattaaaggatagatattatagtgtttcccgggctatattgattgctagggctccatcttctggggatgtcgcagcacatcctattgttaaggaaacatataattttgcacaagaaatggaacgaaaacgagcactgtccatggtcctctctcaaacaaggcaacaagaacgaagagatgaagaggttcttgttgaagcaaaaaaaatagcggaaaaacgcctacctcccaaggttgctgaacagtctcagttggttgcttctaatgctggtgcaaaagctacagagagggctgtccctggtgaaaccatatc

SEQ ID NO: 275162 - DNA, 223 bp, Glycine max
ttggggactttatatgagacggatcaactatgtgtcttaggggatatatttgatctccgattcattataatatctgataggtttccatcctctccgactgtatatgaattaaaggattcatattatagtgcttcccgatctatatttattgctatgcctccatcttctggtgatgtctcaccacatcctattgaaaaggaaacatataattttgcacaagaca

SEQ ID NO: 275163 - DNA, 413 bp, Glycine max
  unsure (1)..(413): unsure at all n locations
ggacagagagaatgagtacggtgggagaagggaaggtgagtagtaatggtcatggatgttgcaaatcaaggccaggctatgcttccncactggaagccatttctggtcccagagagtctctcatttatgtaacctctgtctacacagggaccggattaaagaagccagactatttggcgacagtggatgtggatccaaactttccaacttattccaaagtaatccataggcttcctgttccttatttaggtgacgaattgcttcaaacaggctggaattcatgcagttcttgccatgagaacccttaaacaaaccgacatatttctaatcgaacctgcactcgtataggtcgagtatatgtggttgatgtgaaaacaaatccaagggctccatctttgcacaaagttgtcgag

SEQ ID NO: 275164 - DNA, 269 bp, Glycine max
ggcacacgtgagtttgttgatcgagataactagaaacagtgtgatgaaaatgaaagtccttgttgtcttcgctgctacaattttggtagcatgggaatgccatgcgtacgatatgttcactgtacgaatgaacactggctatggtgccctgactccggatgtgaaatgcgcaagttggacgcttgctgtggaagcacgcaacatctttggctatgagaccattcctgaatagtgcgttgaagcatacaaggaatacattcatggcgaac

SEQ ID NO: 275165 - DNA, 343 bp, Glycine max
gggactgtcactgaactcaaaaatgaactgtcttcggaatcttctcgattctctggtttgcccttcgaaacaccttgtacgcgccaccgcaagaaccttcccctttccctgggtttcgtcaacaattctcgtcaatatccaactattgccctcaaggcttgcttaagttctataccaagtgcagacacaagtagtgcccataaggaggaagaaaagtctgagacatatagtcataacatgaccgaagccatgggtgctggtttgacttataggcatgaattaggaatgaactataatttcattcgtccagacttgattgtgggatcatgcctacagactcctg

SEQ ID NO: 275166 - DNA, 259 bp, Glycine max
ggagagagagagagagagaggcacttggaatccaaaaatgagagaaatcatcagcattcacataagtcaagccgggatccaagttggcaacttctgctgggaactctactggctggaacatggcattcagcccgatggcatgatgcccagtgacttcttcttcggtgtagcccacgacgcctttaacaccttttttagcgaaaccggattcggcaagcacgttccttgcgccgtcttcgtcgatcttgagcccaccgtg

SEQ ID NO: 275167 - DNA, 389 bp, Glycine max
ggtgtcggcctctacctatatattccactcactacccagaaactagggtttagcgccacaccccaatcgtagccgtcgcactctgtgttttcagcgccgtctccgatctccgacaatggcgacccaaatgagcaagaagagaaagttcgtagctgatggagtgttcttcgctgaactgaacgaggttctgacaagagagttggccgaggacggttactccggcgtggaagttagggttacgccgatgcgcaccgaaatcataattagagccaccagaacccaagctgttctcggtgagaagggaaggagaataagggaacttacctctgtggttcagaagaggttcaagtttcccgagaacagtgtcgaactttatgctgaaaaggtca

SEQ ID NO: 275168 - DNA, 337 bp, Glycine max
ggtgtgagttcattaacatatacaaattctctgtgttgtgttgtgtacttgtgttaattgtgttgttgttgtaggaaatttaagtgaagagagaatgatgatgaagtctgctatgtgtgcattggtgcttgtggcactggttgtggttgaagtggggcccatggctgaggctgcggtgacttgcaacccaacacagtcgactccttgtcttccggcaattaattcaggttctgcaccttcgagtgcttgttgccagaagctgaaggagcaaaagccatgcttctgtggctacctcaaaaaccctagcttgaagcagtatgttaactctcctaatgcc

SEQ ID NO: 275169 - DNA, 388 bp, Glycine max
ggaccaaattagaaatttacagcggcccacagatgttcctgatacaggtttgctttgtgatctgctttggtctgacccgaccaaagatgttcaaggatggggaatgaatgacagaggagtttaatacacatttggtgctgataaggtctaacaatttcttcagaaccatgatcttgatcttgtttgtcgtgctcatcaggttgtggaagatggatacaagttctttgctaatcgacaacttgtaacaatattttcagcacctaattattgtggggagtttgacaatgctggtgctatgatgagtgttgatgagacgctaatgtgctctttccaaatattaaagccagctgataaaaaagcaaagctcaattttggaagtacaaccact

SEQ ID NO: 275170 - DNA, 406 bp, Glycine max
ggcagcaaaccagactaaactccgacgatgcctcccgtcgctcctcgatccggtgatgccatattcgccaacgtcgaacgcgtcaatgcggagctgtttactttgacgtatggcgcaattgtgcgtcaattgctcacggatctggaagaggctgaggaggttaacaagcagcttgatcaaatgggttacaatattggaatccgtttgattgatgagtttttagccaagtctaatgtctccagatgcaacgatttcagagagacgactgatgttattgcaaaggttggttttaaaatgttcctcggtgttactgcatctgtgaccaattgggatgctgatggaacatgttgtagtattgttttggaggataatcctttggtagattttgttgagcttcctgacaact

SEQ ID NO: 275171 - DNA, 419 bp, Glycine max
ggatgtaaaaaatagaggttgaagaagtaagcaccaacgtgaataccctaattcggagggtttcagttttcgccctcttttctcatctccaacatcttcgtcgtcacggaggctagtcttcctgttatcacaaacaatgtctgacggtcaagaatcagacaagaatattgagatatggaagatcaagaaattgataaaggcattggaagctgctcgaggtaatggtaccagcatgatttctctgataatgcctgcacgtgatcaaatatctcgggtcactaagatgttgggagatgaatttggaactgcttcaaacatgcaaagtacggtgaaccgacagtctgtggtgggagccattacttgtggttcacagaaggtggaactttattaccagggcccttcaaatggtttgggtcttt

SEQ ID NO: 275172 - DNA, 428 bp, Glycine max
ggcacagaatggggaaaacggcttacaagaggctgaagggaagccagagcttcaggcaacgccttcttctctctactctctcctccactcccattctcatcgaggacattcgcgccgacgagacatggcccggcctccgcaaccacgaaatttctctcctccgactcttcgaaaccgtctgcgacgattgccacgtcgaaatcagcgaaaccggtaccaaattaaagtacaaaccgggaactattatgggtggcagacaacacagtccacacgattgcggcgtctcacggtccattggttactttctggagccactcatggtgttgtgtttgtttgccaaacagccccttactatcaggctcaaaggaattacaaatgattctaaagatccatctgttgataccttcaagtcaacgactttacctata

SEQ ID NO: 275173 - DNA, 425 bp, Glycine max
ggcacaagtgagtttgttgatcgagataactagaaacagtgtgatgaaaatgaaggtccttgttttcttcgttgctacaattttggtagcatggcaatgccatgcgtacgatatgttccctctccgaatgaacactggctatggtgcccgtactccggaggtgaaatgcgcaagttggaggcttgctgtggaagcacacaacatctttggctttgagaccattcctgaagagtgcgttgaagcaacaaaggaatacatccatggcgaacaatatagatcagactccaaaacagttaaccaacaagcttacttttatgccagagacctcgaagtccatcccaaggacacatttgtgttcagtatagatggcaccgtactctctaatattccatactacaaaaaacatggatattgggtggagaaat

SEQ ID NO: 275174 - DNA, 346 bp, Glycine max
  unsure (1)..(346): unsure at all n locations
cactatgatgtcaacaacgaaatgctgcacggttcattttaccaagataggctaggcaaggatataagggcaaacatgttcaagactgcaagccaactagacccttctgccacactctttgtgaatgattatcatgttgaagatggatgcgacaccagatcatgtccagataagtacatccatcacattcttgatttgcaagagcaaggtgctccggttgggggaattggaattcaaagccacatagactgtccaatagggcctattgntagttcttccctggacaagttgggtattcttggcctacctatatggttcaccgagcttgacgtgtctttcgtcaacg

SEQ ID NO: 275175 - DNA, 400 bp, Glycine max
ggcattatatttgagttcaaacaaatcaaagccatggccacctccaacttctctattgttctctccgtctccctagccttctttttggtgctacttaccaaggcacactcgaccgataccgtttctttcaccttcaacaagttcaacccagtccaaccaaacattatgctccaaaaagatgctagtatttcatcctctggggtgttacaactcaccaaagttggcagcaacggcgtgcccacctcgggatctctcggtcgtgccctttacgctgccccaatccagatttgggacagcgaaaccggcaaggtagccagctgggctacatcctttaaattcaacattttcgcacccaacaaatcaaactcagctgacgggcttgccttcttcttggcacccg

SEQ ID NO: 275176 - DNA, 391 bp, Glycine max
aactctgcgaaggtgcaacctgacagcctccaaatccaatggcttcagagaagaaactttcgaacccaatgagggagataaaagtgcagaagctcgtcctcaatatctctgttggcgagagtggagatcgtctcaccagagccgccaaggtgttggaacaacttagtggccaaaccccagtgttttccaaagcacggtacactgttcgttcctttgggattagaagaaatgagaagattgcatgctatgtcactgtcagaggtgacaaggcaatgcaacttttggagagtggtttgaaggtgaaagaatatgaacttcttagaaggaacttcagtgatactggttgcttcggctttggtattcaagagcatatcgatttgggaatcaagta

SEQ ID NO: 275177 - DNA, 425 bp, Glycine max
ggggtagagaggatccgtggcaccagagattggaagaatgccatgattgggggtgcagtaactggggccctggtatctgcagccagcaacaacaagaaagacaaaattgcaatagatgccattactggggcagcaattgctactgctgcagagttcataaattaccttacctgaatgaatgaaagtggatgtcttgctggttttcttgcatgttttggaaaaggattgcacactcagtctctctttagtcatactctgtaccggttccgtctttgatattggtgcagttacttctaagatatgctatttatttaactttctataaaacccatgttttgataaattatattggccattcggttttctgcatgttagtagctttgccttgcaatttagtcaagctagacttgtgcaattatgtcaaa

SEQ ID NO: 275178 - DNA, 380 bp, Glycine max
gggggtaggaggtgtcagaaacctggctgccacaaaggagctgagggccgtacagtgtactgcaaggcacatggaggtggcaggcgatgtgaattccttggttgcacaaagagtgcagaaggacgtacagatttctgtattgcccatggtggtggccggagatgcaatcatgaaggttgtacccgggctgccagagggaaatctggattgtgcatccggcatggtgggggcaagagatgccagagagaaaattgcaccaagagtgcagaaggcctatcaggcctttgtatctcacatggtggagggcgtcgacgccaagctcctggatgtacaaaaggggcacaggggagcacaatgttttgcaaagcacatggtggggg

SEQ ID NO: 275179 - DNA, 388 bp, Glycine max
ggctgtgaagtgtgaattaaaatatattcaattttgcgtttctctgcctaaaaggattgaaagatgggtcaagcattcggttgctaccaagtcgatcagtcaaatgtggctatcaaggagcattttggaaaatttgatgatgtcctagagcctggatgtcactgcctgccttggtgtcttgggtaccagattgctggtagtctgtcgctgcgagtgcagcaacttgatgttcgatgtgagacgaaaaccagggacaatgtctttgtcaatgtggttgcatctgtgcaataccgagctgtgtctgagaaagcatctgatgcattctataggcttaccaacacaagggagcagatccaatcatatgtttttgatgtcatcagggccagtg

SEQ ID NO: 275180 - DNA, 227 bp, Glycine max
  unsure (1)..(227): unsure at all n locations
gaagagtttgttgtgagctataagctagtttatcgtgaggagaatatngaagttgttgttttctttgttgctgcagtagttttggtagcatggccatgccatggcgcaagctaccaaaagtttcctcttcgaatgaaaactggctattgtgagcgttcttcggaggtaaaatgcgcaagttttaagcttgctgtggaagcgcacaacattcgagcctttaaaaccat

SEQ ID NO: 275181 - DNA, 409 bp, Glycine max
gatactcaaattgcttaaggtcttcaacttcacccattcatacgtggtgttgttactgctgctcttttctcttttcttttctctttagttctctcttcccctttctttttctttttcttcttcttctgagcttgtttaagcttttcttccattaacatattatcacaatgtgtggtattcttgctgttcttggttgttctgatgactctcgagccaaaagggtccgcgtgcttgagctctctcgcagattgaagcaccgtggccctgactggagtgggctccatcaacatggtgactgctttttggcacatcaacggttagccatagttgatcctgcttctggggatcaacctctctttaacgaggacaaatccgtcattgttacggtaaatggagagatttacaacca

SEQ ID NO: 275182 - DNA, 405 bp, Glycine max
ggatgccttatacagagaaagagaatgtggaccagggcgctcgaggtgacgctagcggtacacgaggaagtggagcggttggagcggctgatagtgaaggagctccagaatgaccctgcctccaacaaacagcgcttgtatcagagtcaccgtgtgctaaacatgatcgacaccattacttccaccactgaaaagcttattggggtatatgaagataacgacaatgcaaggaaggaccagattgctgcactcggaggccaaaccgccactggaattaacgtttttagcgccttttatgatagacttaaagagatacgagagtatcataggaagcacccagttgctcgagctgctgacgccaatgacgatcatgaaacacttctcaatgaggaacctcaaattgag

SEQ ID NO: 275183 - DNA, 411 bp, Glycine max
gctagacaattggctcagaagaaaagaaaagcaaccaagaatggttctcacatccactgccacacacccagatgaacaagaccagagcctaaactatacttttgcttccagatatgtgcgtgaacctattccaaagttcaagatgccggagaaatccataccaaaagatgctgcttatcagataataaacgatgagttgatgttggatggtgcaccaaggctcaacttggcctcgtttgtgaccacttggatggagcctgaatgtgacaagctcataatggcttcacttaacaagaactaccttgacatggatgagaatactgtgaccactgagctccagaaacggggtgtgaatatcatagcgcatatatatcatgcgcctataagagatgatgagactgcactatgtgt

SEQ ID NO: 275184 - DNA, 397 bp, Glycine max
  unsure (1)..(397): unsure at all n locations
gaaggcaatcaatcaatcttctgagagtgtttggttgaaagtagcaaagatgtttcctttcgggcaaaagggtcaaaagataaaggggactatggtggttatgcagaagaatgtgttggatatcaacagcatcaccagtgttggagggatcgttgaccaaggcttaggcttcataggcagtgcagtcgatgcacttacttttgcagccaccaaaatctccatccagttgattagtgctaccaaagctgatggtgggaaaggaaaaattggaaagagtacaaatttaagaggaaagataacattaccaaccttgggagctggcgaacaagcatacgatgttaattttgaatgggacagtgacttcggaatntcccgtgcattttatattaagaacttc

SEQ ID NO: 275185 - DNA, 395 bp, Glycine max
gacgataaagggtttttgttttgtttccttgggtgctgcatgcactttcactcgaagaaccttgaagcgagtctgggccacagcaaccagcgacaacaactcaatcagctagggttgctttgcttgccatcttgttggaggattttctgttcaagagaagatggtaactagaattgtggatcttcgttcagacacagttacaaagccaactgaagcaatgagagctgctatggcaagtgctgaagttgatgacgatgttctaagctatgatccaactgcttttcgcttaaaaacagaaatggcaaagacaatgggcaaagaagctgctctttttggtccatctggcactatggggaaccttggatctgtacttggtcattgtgatgtcaggggaa

SEQ ID NO: 275186 - DNA, 421 bp, Glycine max
ggggtagagaggatccgtggcaccagagattgggggaatgccatgattgggggtgcagtaactggggccctggtatctgcagccagcaacaacaagaaagacaaaattgcaatagatgccattactggggcagcaattgctactgctgcagagttcataaattaccttacctgaatgaatgaaagtggatgtattgctggttttcttgcatgttttggaaaaggattgcacactcagtctctctttagtcatactctgtaccggttccgtctttgatattggtgcagttacttctaagatatgctatttatttaactttctataaaacccatgttttgataaattatattggccattcggttttctgcatgttagtagctttgccttgcaatttagtcaagctagacttgtgcaattatgt

SEQ ID NO: 275187 - DNA, 414 bp, Glycine max
gtttccacaggtgccatatccgtggagggtgttccttcaaaggaatacttcattgatgtgaaagctgttcagattgatggaaatgttgtgaacttaaagccttcccttttagctattgacaacaagggaaatgggggaaccaaactcagcaccatgagtcctttcactgaattacaaacaactgtctacaagactttcattcgagatttcatcaagaaggcttcggacagaagattaaagagggtggcatcagtggcaccatttgaggcatgttatgattcaaccagcattagaaattcctcaactggactagttgtgccaactattgatctagtgctgcgaggtggagtgcagtggactatttatggagccaattcaatggttatggcaaagaaaaatgtagcatgtcttgca

SEQ ID NO: 275188 - DNA, 411 bp, Glycine max
gcagccagttacgtgagggggcttcagggaactgacggtaaccggttaaaggtcgctgcctcttgcaaacactttacggcttatgaccttgataattggaacggtgtggatcgctttcactttaatgcacaggttagcaagcaggacattgaggacacgttcaatgtgccattcagaatgtgcgtgaaggaaggcaaagtggcgagtgtgatgtgttcttacaatcaggttaacggggttcccacctgtgcggaccccatcctcctaaagagaacagttcgtggccaatggggtcttaatgggtacattgtatcagactgtgactctgttggggtgttttacaatagccaacattacacatctaccccagaagaagctgctgccgatgccattaaagctggctagttacta

SEQ ID NO: 275189 - DNA, 406 bp, Glycine max
gaagcagtgaagttgtacaaggagcacaaaaggagaatgagcacaaggaacctagaatgcatctgtgaggcttctatagaatggactgctatgaaccttgcattttgttcattgtgtggcattgtagggggaattgttggaggcctacttggttctggaggtggatttgttttgggacctcttcttctagagattggtgtcattcctcaggttgctagtgctacagcaacatttgtgatgatgttttcatcatctctgtcagtggttgaattctaccttctcaagaggttccccattccttatgcattatacctcacctcagtgtctgttttggctggcttctggggacaattctttgtaagaagattgattgcatgccttgggagggcatcaatcattgtattca

SEQ ID NO: 275190 - DNA, 405 bp, Glycine max
gtacttaaggaggatgagtctccttgtatttttggttcaattgaaaagcagagatggtcctatgcctgtgctaagcagttgattgagaggcttgtttatgctgagggtgctgaaaatggcttggaattcacaattgtgaggccttttaattggattggaccacgaatggatttcattcccggcattgatggcccaagtgagggtgttcctcgggttctggcatgctttagcaataatctcctccgtggagagcccctcaagcttgtggatggtggccaatcccagaggacttttgtgtatattaaggatgctattgaagctgtcttattgatgattgaaaatcccgccagggctaatggacatatttttaatgtgggaaacccaaacaatgaggttacagttagg

SEQ ID NO: 275191 - DNA, 406 bp, Glycine max
gggagcaagagtaataataatgtgtataatgctggagcagcgggtatggtaaaaaaaatcatacgaaaagaaaaagggggatacgaaataactatagtggatgcattggatgggcgtgaagcgattgatattatacctccaggaccagaacttcttgattcagaaggtgaatctatcaaacttgatcagccattaacaagtaatccaaatgtgggtggatttggtcagggggatgcggaaatagtacttcaagatccgttacgtgtccaaagtctcttgatcttcttcgcatctattattttagcacaaatctttttagttcttaagaagaaacaatttgagaaggttcaattgtccgaaatgaatttctagtcccgcatatttatcaacatattaaactcataaa

SEQ ID NO: 275192 - DNA, 303 bp, Glycine max
ggcgaggaagccacatagagacacaatacagagtgagttgttgctccttcgccacaactctctgccaacatgggtatctccagagattctatgcacaagaggcgtgccactggtggcaagaagaaggcctggaggaaaaagagaaagtatgagcttggtcgccagcctgctaacactaagctgtcaagcaacaagacagtcaggaggatccgtgttagaggtggaaatgtgaaatggagggcattgagattggatactggaaattactcctggggaagtgaaactgtaactcgcaagaatcgt

SEQ ID NO: 275193 - DNA, 417 bp, Glycine max
gatgcaaacagtactgaatcatcacctctggttgagaactctcgtgcctcagttgaccttgttacagttcttgatgtgagtggtagcatggctggtactaagctagcgttgctaaaacgagctatgggttttgtcattcagaatcttggtccatcagaccggctgtctgtcattgccttctcctccactgcacgccgcatctttcctctccggcagatgactgacactggacggcagcaggcattacaggctgtcaattccttggtttcaaatggtgggacaaacattgctgaaggcctgaggaaaggtgccaaggtttttttccgaccgacggtggaagaactcggttagcagcatcattttactctctgatgggcaagatacatatacagtcaatagcaagcctaatgttggaac

SEQ ID NO: 275194 - DNA, 249 bp, Glycine max
  unsure (1)..(249): unsure at all n locations
ggagtgagcaagagtgaagagcgaagagaatggctcccaagggtttaatctttttggctgtgttatgcttctcagcactgtcactgagtcgttgtcttgcggaggataatggacttgttatgaacttctacaaggaatcatgccctcangctgaagacatcatcaaagaacaagtcaagcttctctacaagcgccacangaacactgctttctcctggctcagaaacatcttccatgactngtgctgtc

SEQ ID NO: 275195 - DNA, 398 bp, Glycine max
  unsure (1)..(398): unsure at all n locations
gggggcggtctgtatatgcaaatattcagaaatttatccagtttcagcttacagtaaatgtggccgctctagtgataaatgttgttgctgctatttcatctggtgatgttccattaaatgcagtgcagcttctttgggtaaatcttatcatggatactctgggagcactagccctggcaactgaaccaccaactgatcacctcatggatcgatccccagtgggtcgaagagaacctctcataacaaatattatgtggaggaatttgctgatacaggcaatgtaccaagtgtctgtcttgcttgtgctcaatttccgaggcataagcatactgngtctgagccatgacagaaaagctcatgcaatcaaagtgaagaatactttgatattcaatgcattt

SEQ ID NO: 275196 - DNA, 393 bp, Glycine max
gatgcacaattgagttatataatcgtctataatcatatctgtgtatcaattttctttcaccatcctagctagctttgctgtaaacatctgatctgagttcatatatatggcgaataaactgaatataagggtaggagaagcaactctggtgccaccagcagaagaaacaaaaaagggtatatacttcctttcaaaccttgaccagaacatagcacatccagttcgaaccgtttacttttataataagtctccatgtagagggaacgaggaagcagcacaagtcataaaggatgctttgtcaaaagttcttgttcactattaccctatggctggaagattgaccatcagttcagaagggaagctgatcatagagtgcacaggtgagggtgttgt

SEQ ID NO: 275197 - DNA, 404 bp, Glycine max
ggagcagagtatcggcatagcgtagccatggccatgggattgacctcacaactcctcctttctttgttcatcagtacccttcttcttcttcttccctcttccctttcacaatctaaccagttttgtgacgctggaacttcatccaagctgttgatcaagggcggcaccgttgtgaatgctcaccaccaacaggttgccgatgtctatgtcgaagatggtatcattgttgccatcaatcccactattacggttggagatgaggtgacggtcatagatgccactggcaagtttgtcatgccagggggcattgaccctcacacccacctagagtttgagtttatggatacggaaactgtagatgacttcttcagtggtcaggctgcagcattagctggtgggacaac

SEQ ID NO: 275198 - DNA, 155 bp, Glycine max
gggagccagagtaataataatgggtataatgctgcagcaacgggtattggaaaaaaaattattccaaaaggaaaagggggattccaaattactattgtggatgccttggatgggccttaaatgaatgatattatacctctccgaccagaactttt

SEQ ID NO: 275199 - DNA, 400 bp, Glycine max
ggttctagtgtgtgattgtttgttgttgtaactcgttcttcttcttttgttgttctgtgtttgtgtttgttttttctctcacctgaaaatgtcttgctgcggtggtaactgtggttgcggaagctcctgcaagtgcggcaacggctgcggaggctgcaagatgtacccagacttgagctacactgagtcaaccaccaccgagaccttggtcatgggagtggcacctgttaaggctcaatttgagggtgctgaaatgggtgtgcccgctgagaacgatggctgcaaatgtggaccaaactgctcctgcaacccctgcacttgcaagtgaagtgttgggagagcaagcttcaagcagagatagcccttaattaggaataatgataaactattaatgtgtagc

SEQ ID NO: 275200 - DNA, 428 bp, Glycine max
ttccaaaagaccacccaatggggtgtttaagtgagtttgttgatcgagggaacttgaaacattgtgattagaatgaaggtccttgccttcttcgttgctacaattctgagagcatgtcaatgccatgcttactatatgttccctctctgaatgaacactggctatggcgcccgttcttcgaaggtgaactgctcattttggaggcttgctgcataaacacacaacatctttggctttgagaccattcctgaagaatgcgtagaagcaacatatgaatacattcattgccaacagtatatatcatacttcagaacagttaaccaacactctcacttttatgcctgagacctagaactccattccaaggacacatttgtgttcaatatatatgtcaccgtactctttaatattccatactacctcataaa

SEQ ID NO: 275201 - DNA, 300 bp, Glycine max
  unsure (1)..(300): unsure at all n locations
ggaagtgggaagcgtagctctgaattgtcaactacggagagacaagaaattcagatgaagaaagccaagctaatcaacatgcttgatgaggtggagcaaaggtacaggcagtaccacagccagatgcagattgtgatatcctctttcgagcaagctgctgggataggctcagcgaggacgtacactgctctagcattgcatacaatttcaaagcaatttcggtgtctgaaggatgcaataacggngcaaatcagagctgcatacaagagtttgggggaagaggattgctttggtgctaaa

SEQ ID NO: 275202 - DNA, 246 bp, Glycine max
ccgcgtatagtgggcagcgtagctctgaattgggaacgactgttagacaagatagtcacatgaacaaagccaagctaatcaacatgcttgatgaggtggaccaaaggtacatgcagcaccacagccagattcaaattgtgatattctctatcgagcaatctgctgggataggctcaactaggacgtacactgatctagcactgcatacagtttcaaatcaattacagcgcctgaaggatgcaataa

SEQ ID NO: 275203 - DNA, 396 bp, Glycine max
ggttctactgtgagatatgatagatcatgtaactcgttcttcttcttttgttgatctgtgtttgagctctgcaatgctctcacctgacaatgtatagatgctgtggtaactgcggttgcgtaatctactgcaagtgctgtaaccgctgcccacgctacttgatgtacccacacttgagctacactgagtcaaccaccaccgagaccttgtacatggaagactcacctggcaatgctcaatttgatggcactgaaatgggtacacccgctaagaactatggctgttgatgaggaccaaactgctactgctacaccttcactcgcaagtgatgaccctgcagagcaagcttcaagcacagatagcccttacttaggaataatgattaactattaatgt

SEQ ID NO: 275204 - DNA, 209 bp, Glycine max
ggctcaagtgagtttgttgatcgagagggctagaaacagtgtgatgaaaatgaaggtgcttgatttcttcggtgctacaattttggtagcatggcaatgccatgcgtacgatatgttccctctgcgaatgaacactggctattgtgcccgtactccggaggtgaaatgcccaagtttgaagcttgctgtggaagcacacaacatttttg

SEQ ID NO: 275205 - DNA, 397 bp, Glycine max
gacagcagagaaagaagcttcacaattcacattcccaccaacggaaccatggcctccgtgtacagctgtacggagtgcggatccaacctgaatcttaactccgctcatgcctaccctccagacttctacttcgaagtcggcaacaagggctccgtctccttctccgccgtggaccccaccaagttcaagttcgagaaggaggacaagcttcgccccttcttcgaaaccgtcaactactggggaatccagaggaagaggaccaagatcaagtgcaacacctgtgactgtctccttggctacgtctatgacgatggtccacctcttaccaatagtcccggtcaatttcacatgggtcctagccaagttatccccagagcgccaagatataggttcaaga

SEQ ID NO: 275206 - DNA, 290 bp, Glycine max
ggttagtccagatggtacgcaattttccattacatggcctgatcggagaatacgtgcgttccggttcagttcaggttaactaaggcgaggttatgatgaatccctggaggctgctcatgatctgcaaagaagtgatgcttcattataccggttggaatccattgaatgtggttgaagaatggctgtcgagaaagaaattgagacgactgaaagtgctcttcttacaaatgcagtttttgactaaagttccgatgttcttatatatgcaaccttgcttgggattaaaattg

SEQ ID NO: 275207 - DNA, 427 bp, Glycine max
gctccaagacgtcaccgtctacgccttcaacgccaccgtggcgaacttcctcacttcgaattttcaggtcacgctcatctcgcgtaacccgaacgaccgcatcggtgtttactatgatcgcctcgaaaccttcgtgacctaccgaagccagcaggtaaggtccggaacggcattccttccgacatatcaaggccataaagagatcaaggttgggcctccgttggttaatggcaccaacatcccggtggggccgtacaatttcctgggcctaagccagaaccgaagtaccgttacacgcttggtcaccatccgagccgagggtagggttcgttggaaggtcggcacctatatctccggccgttaccacttatacgtccgttgcccggggtacatcagctttggaccccgcagcaatggaatcgtcgtc

SEQ ID NO: 275208 - DNA, 422 bp, Glycine max
ggggggtagattggggcgtggacatgagggtctttatgacacaatcaataattcaattcattttcaattaggtcttgctctagcctctttaggggttattacttccttggtagctcaacacatgtactctttacccgcttatgcatttatagcgcaagactttactactcaagctgcattatatactcatcatcaatatatagcgggcttcattatgacaggggcttttgctcatggagctatattttttattagagattataatccagaacagaatgaagataatgtcttagcaagaatgttagaccataaagaagctatcatatcccacttaagttgggctagcctctttctggggttccatactctgggactttatgtccataatgatgtcatgcttgcttttggtactccggagaaac

SEQ ID NO: 275209 - DNA, 434 bp, Glycine max
  unsure (1)..(434): unsure at all n locations
gacactaaacaagttaaaagaagagcatcactgagctaacaaagcaaccctatgtcgaaggtggtttgtgtcaccggagccagcggcgccatcggatcatgggtggtcctactcctcctccagcgtggttacaccgtccatgccaccgtccaagatatcaaggatgaaaatgagacgaaacatttggaggaaatggaaggagcaaagagtcatctccatttttttgaaatggatcttcttgacatcgactccattgccgctgccataaagggttgttccggcgtaatccaccttgcatgtcctaacatcattggtcaagtcgaagatcccgagaaacagatattggaaccggcgataaaaggaacggttaatgtgttgaaagcggcgaaagaagcangggtggagcgcgtggtggcgacttcatcgatttcgtc

SEQ ID NO: 275210 - DNA, 445 bp, Glycine max
gagagcctgctgctgaaagtgtttgtgaagggaaagtggggagggctgggaagttggcgagtcccggtgacttgaattacccctctttcgcggtgaagttgggtggggaaggtgatttggtcaagaataaacgggttgttactaatgtgggaagcgaggttgatgctgtttacactgttaaggtcaatcctccacctggtgttggtgttggtgtgtctcccagcacgattgtgttcagtgccgaaaacaagacacaggcgtttgaggtcacgtttagtagagttaagttggatggctctgagagttttggctccattgagtggactgatggaagtcatgttgtgaggagttcaattgctgttacttggagctgtgcatactcatcgtccgtttgaatgaattgctgtggagacgacgtctttctcaggttatggattattggatt

SEQ ID NO: 275211 - DNA, 418 bp, Glycine max
ggtgaaacttttcttcagcattgtcgtcgtctgcctctcactcctcttccttctcgcactgctattgccttcttcccttttctctcaaattcacatttatggagaagcctccttaggggaggtggatatatggagtgttcggagactcgtggaatggagaccttgcaattggtggctacaaggccatcaaacagacaattgctttcgtttttttgtttattcttgaaatggtgcagctctaccattacaaactaatggatatatcagagtggattgctatggggggctcaatcagatgcgaagagatttctgtgatggtgtgggcattgctcgtctgttaaatgcaacccttgtcttgccgaagtttgaagtggcatcatattggaatgaaacaagtggttttgcagatgtatatgat

SEQ ID NO: 275212 - DNA, 423 bp, Glycine max
gacatagatgaagtgaaaaatatcttaaaaaactgcggttatcatcccgaaattggaattgacattttgatcgaaagatgtttggtaactctggataggatgaagaagttggggatgcatgatttgctacaagaaatgggaaggaatattgtatttcaagaatctccaaatgatccaggcaaacgtagtagattgtggtctcaaaaagacattgattatgtgttgacaaaaaacaagggaactgatgaaattcaaggcatagttctgaacttagttcaaccgtgtgattatgaaggacgctggagcactgaagccttcttcaagacaagtcaactcaagttactcatgttatgtgatatgcagcttccccgtggcctcaactgccttcctagttcactgaaagttcttcactggagaggatgt

SEQ ID NO: 275213 - DNA, 427 bp, Glycine max
ggtacaaaagggagggttaaattaagccgtttttcagtttcttgccgtaagtaaataggattcaagccattttatcgacatgagtgttctatatcgaaaaaaaaatctaataattttatcgaaaccatttcatttctgtattaacatagtggtagaaagagtactacactgcgtctagacttcaaactattcactttaaccatggtaatagtccaaaattattggttaatagagaatcaaagtggattaccaataaatcgcgaaatgctatagttcttaaatattttttcttaaattattgaaaaaatttcattaattcagaagtaattttcagaagtaattcgcgggattatgcacattttcttagttataactaaaaagtgcagtttgggttggatccaatctattctttgaaataaacaactcg

SEQ ID NO: 275214 - DNA, 432 bp, Glycine max
  unsure (1)..(432): unsure at all n locations
ggagttagggtgagttgcaggcagtgtcatctcgcctttgacgacaagatgagcatcccaattccccatcggcagttattcatagacggagactggaaagtccccgtcctcaagaatcggattcccatcatcaacccttccacccaacacatcatcggggatatcccagcagctactaaggaagacgttgatctcgctgtcgctgccgccaaagctgccctctcccgcaacaagggcgccgattgggcctccgcttccggctccgttcgggctcgctacctncgcgccatcgctgccaagatcaccgagaaaaagcctgaactagcaaaactcgaagctattgactgtggaaaaccgctcgatgaagccgcctgggacatcgacgatgttgctggttgctttgagttctatgctgaccttgctgaaaaattg

SEQ ID NO: 275215 - DNA, 420 bp, Glycine max
  unsure (1)..(420): unsure at all n locations
ggcagccaagaaaagaaaatccggacccattttcttcgtagccaaacactctgaaattctcagttatgtcgtggcaagcgtatgtggatgatcacctactgtgtgaaatcgaaggtaaccacctcactcacgccgctatcatcggccaagacggaagcgtttgggctcagagcaccaacttccctcagttcaaacctgaggaaataactgccatcaataatgactttaatgagcctggatcacttgctccaactggattgtatatcgggggcaccaaatacatggtcatccagggtgagcctggtgctgtcattcgagggaagaagggtcctggtggtgttactgtgaagaagaccggtgcggncttgatcattggcatttatgatgaaccaatgactccaggtcaatgccacatggtag

SEQ ID NO: 275216 - DNA, 433 bp, Glycine max
  unsure (1)..(433): unsure at all n locations
gacactaaacaagttaaaagaagagcatcactgagctaacaaagcaaccctatgtcgaaggtggtttgtgtcaccggagccagcggcgccatcggatcatgggtggtcctactcctcctccagcgtggttacaccgtccatgccaccgtccaagatatcaaggatgaaaatgagacgaaacatttggaggaaatggaaggagcaaagagtcatctccatttttttgaaatggatcttcttgacatcgactccattgccgctgccataaagggttgttccggcgtaatccaccttgcatgtcctaacatcattggtcaagtcgaagatcccgagaaacagatattggaaccggcgataaaaggaacggttaatgtgttgaaggcggcgaatgaagcangggtggagcgcgtggtggcgacttcatcgatttcgt

SEQ ID NO: 275217 - DNA, 440 bp, Glycine max
  unsure (1)..(440): unsure at all n locations
ggacagaaattatggcaagaagagatcttgaaagtggcggtggagtaaccaagaacaacagaagtgcagaggaaaactactctgcgcccgaatcttcccatgtttatgattctgagacccattggacatcatggctcgtgcccatgtttgtggttgctaatattgctgtctttgttattaccacgtacatcaacaattgtcccaggaacaacattcgtttccaaggtcgctgcgtggcaaggtttcttggaaggttctcttttcagcctatgcaggagaatcccttgcttggtccttcttcttcaacattgaccaagatgggagctcttcgatgggataatgttgtgaatagacatcanggatggagacttgtcacttgcatttggttacatgcttgggttattcatttgctggctaatatggtgagtctggtcttcatt

SEQ ID NO: 275218 - DNA, 354 bp, Glycine max
gaaggaaatgacagctagtaaaccacatactacggaaccaatgcataatgtgcagtcattctctacaattcatttgagagagcccccttctgtcttgagaccattggagagcaattcagagaccgaagctgttgaaatcacagtaacaaagttgcttttgaaatcatactatgacattgtcaggaaaaatgttgaggatcttgtccccaaagcaattatgcacttcttggtaaataacacaaagagagagcttcacaatgtcttcattgaaaaactatacagagaggatctgtttgaagagatgttgcaagaacctgaagaggtagccaagaaaagaaaaaactgtcgagaact

SEQ ID NO: 275219 - DNA, 433 bp, Glycine max
  unsure (1)..(433): unsure at all n locations
ggggtgaagagaaaggtgtgctatttttatgatgcggaggttgggaattactattatgggcaaggtcacccaatgaagccacatcgcatacggatgacacatgctcttctagcccattatggattgctacaacacatgcaggtccataagccatttcctgctagagacagggacctttgtcgatttcatgctgatgattatgttgcattccttcgaagcataactcctgaaacacagcaggatcatctgaggcaactcaaacgctttaatgttggtgaagattgtcctgtttttgatggcctctactctttctgtcaaacatatgcanggggttcagttgggggtgctgtaaagttaaatcatgaccaatgtgatattgctgtcaactgngctggtgggttgcatcatgccaagaagtgtgaggcttctggat

SEQ ID NO: 275220 - DNA, 438 bp, Glycine max
gacgtcgaatcggtgtggtacggtgtgttttattcattagacaagattggaatgcaagtttaattgattaatactaataatcaatcatcgtagcgagatggtgtcgccgagccaggtggtgaaagtaaagagaaatacgctacgaccatgcatgacatgccctctctgccacaagttcttcaaagatgccaccaccatctctctctgccttcacaccttttgcaggaagtgcatatatgagaaactctcggatgaggagatggattgctgtcctgtgtgccatattgacttaggctgccttccggtggagaaactcaggccggaccataatttgcatgatataagggcaaaaatattcccttttaaaagaaaaaagatcaaagcccaagaagtttgtcttcaatatcattgcctgcaaaaaggaaggaaagatcactt

SEQ ID NO: 275221 - DNA, 438 bp, Glycine max
ggggagagtagagtaccattgctccactgtcgcgggccaccatgtctttctcggagttccgaccactcgacgacacgtccctcatcgaatacataaagtccgtccccgccctctcctccaaactcgccgacaacctcgacgacttatcagtcaaagaagtcggagatggcaatcttaacttcgtcttcattgtttccaaccccgcaggttcttttgtcatcaaacagactctgccgtacgttcgttgcataggggaatcgtggcctatgacgaatgagagagcgtattttgagtcgctggcactgaaagaagagggtcgtttaatccccgaacatgttcctgaagtgtatcactttgaccgtaccatgtctttgatcggtatgcgttacttggagcccccacatataatcctcagaaaagggttgattgctgggattg

SEQ ID NO: 275222 - DNA, 433 bp, Glycine max
gatgcgaagcaatgaccatacggtctcagccgggcatggagacatggaccaaaacactcgtgacatcatcatgcgggaatttcgctctggctcttctcgagttctaattaccactgacctcttggctcgtggtatagatgtacagcaggtgtctttggttataaactatgatctgccaacccaacctgaaaattatcttcatcgcataggacgaagtgggcgttttggaagaaaaggtgttgccataaactttgtgactttggatgatgcaagaatgctgtctgatattcaaaagttctacaatgtgactgtataggaattgccatcaaatgttgctgatctgctctgatgggttaattttcattccttggtaaagtcatcagaaggctattacttttttggcaattattaattttgcgcttctttgtttttt

SEQ ID NO: 275223 - DNA, 437 bp, Glycine max
  unsure (1)..(437): unsure at all n locations
ggatgcaatagtagcagcaattcacactggtctgtgcttctcgtgactcatttctcacctaactttctattcttctcagtctcaggtcagaaccttagccatggcagcgttccagaagatcaaggtcgccaaccccatcgtcgagatggacggagatgaaatgactagggttatctggaagtcaatcaaggacaagctcattttgcccttcttggagttggacatcaagtattatgacttangccttccttaccgtgatgagaccgatgataaagttacaattgaaagtgcggaagcaactctcaagtataatgtggcaattaagtgcgcaactattactccagatgaagctcgtgtgaaggagtttggtctgaagtcaatgtggaagagtccaaatgggacaattaggaacattttgaatggaactgtcttcagag

SEQ ID NO: 275224 - DNA, 410 bp, Glycine max
ggatttgggatgttttatcaagggaagaagtggtggacattgtagcacctgctccacggtctagtgctgctagagcactggttgagtcagctgttcaggcatggaagacaaaatttcctttttgtaaggttgatgattgtgctgccgtatgcctcttctttgattctgattcagatttcaagtcaacagataccaaagacaagttgataccggaggcatctattgaccaatctgagaagtcatctttacttggtgaaaagggagttggaatggaagctgaaaaacagcagcaatagctcaagttttgtaccatgtctctcccaaaccttgctggttttatcgagaaggttgggtaaatggtgctgcaacaacagtcaacagagaaaggatcattattttgatgatttttc

SEQ ID NO: 275225 - DNA, 419 bp, Glycine max
gatggaccattgaggagtttggacgatcctcaaaatgcctcatttttagagagcataaaaaaatctgagtgtcccaaagagcttgagcctgaagataggaggtcatctgttaatgttaacctcatacggaggaatgagaactatcgtgaacccgaaaagcagcatgttgcatttcagggagtgggaagaactcttggaagcagctctacatcaatggctcctgactctcctgctgcctcaacacctaccaatgcagcgccaactccttctgctggtctggtagttgatcaatcattgccatcaacctcaatacaactcaggttggctgatggaacccgcttgatatcacattttaattaccaccacacaatcagcgacatccgtgccttcattgatgcatctagacctgggggtcggca

SEQ ID NO: 275226 - DNA, 284 bp, Glycine max
ggatgtgagcaagagtgaagagcgaagagaatggctcccaagggggtaatctttttggctgtgttatgcttctcagcactgtcactgagtcgttgtcttgcggaggataatggacttgttatgaacttctacaaggaatcatgccctcaggctgaagacatcatcaaagaacaagtcaagcttctctacaagcgccacaagaacactgctttctcctggctcagaaacatcttccatgactgtgctgttcagagttgtgatgcttcactgttgctggactccac

SEQ ID NO: 275227 - DNA, 264 bp, Glycine max
ggtgaatttaattgaaattgaaaggttgctccgggggttccctttcgcagttgagatttgagaattgactctgagaatcgagaaaatggccggtttaccagcgaggctccgtcttcaacccaccgacgtcaaagccgccgccttgtggggcgttaccgccgccactggcgctctctacctcattcagccatggggatggttgaagaagacattcttggagaagccagaacctgagcaaaaatgagttggcttctgagaagagtg

SEQ ID NO: 275228 - DNA, 355 bp, Glycine max
ggcagaaatggggaataacagacaaaggagattgagaactcatcgcgcacaatcaagtcgacaccaccaccaacaactcttactagaggacgattctcaaagctctcttccagcacaaaatggtgagggcgaggaagaggaggaggaactcacggaacctaaaataaagcttgctatgtgggattttgggcaatgcgatgccaaaaagtgcactggacgcaagctttcaagattgggcatgctaaaatccggctggaaatcaatgtgtctcaagagaagattactctttaatccataagaaaggattggctggtgtggattgatcatgggcacgcttagatgacgtgcctttcgt

SEQ ID NO: 275229 - DNA, 397 bp, Glycine max
ggagcagagccgatgtggtagagcagttcctcccagaccacaatgaatccatttctgcagttcttgacaagtttggtgccatgggaattgacacccccggcgtagttgcattgcttggagcacacagtgttggtcgaacccattgtgtgaagttggtgcaccgtttgtacccagagattgatccagctctgaaccctgaccacgtccctcacattctgaagaagtgccctgatgccattccagaccctaaggccgtgcagtacgtgagaaacgaccgtggcacccccatgattctagacaacaattactacagaaatatattggacaacaagggcttgttgatagtggatcaccaactagccaatgacaagaagaccaaaccttatgtgaagaaaat

SEQ ID NO: 275230 - DNA, 349 bp, Glycine max
ggtgtgagagagcgagcgagcgagcagtttcaaagagaggatttgggattgggaaggcgagggattgcgctgcgtctcttcctcttctctttcgattcatccctcattcataatcttccaatccaacaacctcagcctcacactcacacatacacacatctgaacgcgtatcgtccctcccatggcttcaaagcgcatcctcaaggagctcaaggacttgcagaaagacccaccaacttcttgcagcgctggtccagtagctgaggacatgttccattggcaagcaacgattatgggtcctgctgatagtccttatgcttgaggtgtattcctagtcactattcacttt

SEQ ID NO: 275231 - DNA, 427 bp, Glycine max
  unsure (1)..(427): unsure at all n locations
gacgatggtggtggtaggcatgctgcgaatgggagagcacagcctgactctttctcttctcagcaatggcctcagagttacaaagagactacagattcttacacaatagctgctgctccaaattttgagtcagttctgcgggggccgagttttatatattctagttttgacaatcgttcaaagagtaacttagacatcgatggaaagacaccttttctgtctgctccagaaggcattagacaatcaacttggtgggagaaagcctcagtagaacggcttgtttccggagaattgcctattggatatggatgcagcttcactcaaacaattntcaatggcattaatgtgatagctggagttggcctctatctacaccatttacagtaaatcaagctgngtggatgagcttggcagtgatgcttctttt

SEQ ID NO: 275232 - DNA, 381 bp, Glycine max
ggatcgcagtgggtatagtagatgaagggaaagggacagcagccagcttcgggactcacggaaccttctaggctatatataaaaaaaaaaaaatattgcacgctcctccgggctcctggcatttcaaattcaaggcctctttccaatcttcaaagcagctactgcggcagctccattttccaattgaagttagcagagcagccatctgtgtgtgaaggggacatgatggatggttcccaaaagcgtagaatcctgatggtctcagattttttctatcccaactttggaggtgtggagaatcacatatattatctctcacagtgtttgctcaagttaggccacaaggtggtggttgcaactcatgcttatggaaatcgatct

SEQ ID NO: 275233 - DNA, 344 bp, Glycine max
  unsure (1)..(344): unsure at all n locations
ggagctgaagaaagagagaacttctttggagcaggcagtcaaagaagtggctttgcttcaagaggaattggagaagaaaactgccgagtttagagaaacaagtgccgttcttcaggttaaagagtcagagcttgttgatgctaagctagaaatccagcgtttgaaatctgaaaaggcttctcttcagggtatcttggaggagaaagacttggagctttccagtgctaggaaaatgctgggggatgttaaccaggaaatctatgatcttaagatgcttatgcacagtaaagaaacccagctcattgaagcaaacagtatgctaagggacanagatgagcatgtga

SEQ ID NO: 275234 - DNA, 369 bp, Glycine max
ggaaacgaacgggacgtgtctgtctccgatggcgtcctcataccgtgaccgcacgtcggagttccggttattattggagactctgaagaagatcggaagtccggtgcaacccgagaatgctccttcgacctctcatggcgagtcgtattcgagatccgaattcaaccgaaaggcctcgcgtatcgggttggggatccacgagacctcgcagaagatcgcgaggctcacgcagctggcgaggaaatcgtccatgttcaacgatcccgcagtggagattcaggagctgactgttctgatcaagaacgagatcacggcgctcaactcggctctcttcgattttgcaaccgtcagaacacggatatggctgac

SEQ ID NO: 275235 - DNA, 293 bp, Glycine max
tggcaggggcacaaagaaagaacagggtcaacaaatcatcatagacattaaggtgttcaaagaaagcactaatgttgacaaggtggttgtcctgtggacagccacacacagagaggtacaagcacctaattgtgggactaaacgacaccatgtaaaacctatttgcttccttggacaggaatggggatgagatttccccttccaccttgtatgccattgcttgtgctatggaaaatgttcctttcatgaatggaagcccgtcgaacacctttgtcccaggactcattgatctg

SEQ ID NO: 275236 - DNA, 381 bp, Glycine max
gggacgaacgaagggcaatcagttgctcgctcggtcgatccattcttgaaattctcgttatcgctcttcgaactcaagctctctcgctcgcgatttctgcttctgcaccaatttctgcggtttctcaagatttagaggttcaaagtggttcattcctttgaagcatgccggggttaacgtgcaacgcttgcaacaccaaattcaaagatgacacagagcaaaagctccattacaaatccgagtggcatcgatacaatctcaagcgcaaggtggctggggttcctggggtgaccgaggcgctatttctggctagacaatctgagcttgctcaagagaaaaataaactgggtgaaacccccatgctctacacctgtggtcttt

SEQ ID NO: 275237 - DNA, 365 bp, Glycine max
gatagaaatataattgaaaggaatattcgccttaaaattcagcaaagtcctgattatgcagaagagccagattttgagactggattgcaagacttcaaaaatcgtctagaaaattatgagaaggtttatgagacagttaatgaaggatcttacataaaaatgattgatatggtcagtgggcatggtggacaaatacaagtgaacaatatcagtggttaccttcctggacgaattgtctttttcttggtaaatacacatcttacaccacgcccaattttacttacccgacatggggaaagtcaggataatgtgagaggcagaattggaggggatacctgcaatagtgaggcctgagaactttattc

SEQ ID NO: 275238 - DNA, 435 bp, Glycine max
  unsure (1)..(435): unsure at all n locations
gggttttatgatgaatgtaagcgaaggtttaacgtgaggctttggaaagcctttaccgactgttttaacttccttcctgtggcagcccttatagatgataaaatattgtgcatgcatggtggtctttcccctgaactcacaaacttggatgaaatcaggaatctacctcgtcctactgcgattcccgacaccggcttgctttgtgatttgctttggtctgatcctggtagggatgtgaagggttggggtatgaatgacagaggagtgtcctacacctttggccctgataaggtcgctgagttcttgacaaagcatgacttggacctcatttgtcgtgctcatcangttgtagaggatgggtatgaattctttgctgataggcaacttgttacgatattttcagcttcaaactattgtggtgaatttgacaatgct

SEQ ID NO: 275239 - DNA, 382 bp, Glycine max
gtgcgagttgtttatttcaaagaatagattggaggcaaccaaactgcactttttagttataactaagaaaatgtgcataatcccgcgaattacttctgaaaattacttctgaattaatgaaattttttcaataatttaagaaaaaatatttaagaactatagcatttcgcgatttattggtaatccactttgattctctattaaccaataattttggactattaccatggttaaagtgaatagtttgaagtctagacgcagtgtagtactctttctaccactatgttaatacagaaatgaaatggtttcgataaaattattagatttttttttcgatatagaacactcatgtcgaataaatggcttgaatcctatttactta

SEQ ID NO: 275240 - DNA, 395 bp, Glycine max
gaatggaaagatgctaatgacaaagtgatgcctgtgaaacaatggcttgaagaacgacgattcttgcagggagagatgcagcaacttcgggacaagcttgctataactgagcgaactgcaaagtctgaagcacagttaaaagaaaaatatcaattaaggcttaaagtgctacaggagagtttgagagaaacttctaacagtattaatcgcggcacctcagagggaagatgtgttagcaatgggccttctcgacgtcaatccctaggtggagctgataacatctcaaaactaacatctaatgggtttttgaagagatcaccgtccactcaaattaggtcttctgtgtcttcaagcacagttttgaagcatgctaaaggcacatctaaatcatttga

SEQ ID NO: 275241 - DNA, 372 bp, Glycine max
gtacgatccagagggatattctctggggttctgtgattacaaatacaatgatgagaacacagtttcctttgttacgttaaacaaggttggtggatttcttcagaggatggatctggctcgcaagtatgcatttggaaagatgctggtgattggatcacaggcaccatttaaggtgaaggggttgtggcttttccgtggacaagagattccaaaatttgtgattgatgaatgctatgatatggagctctacgactggaccaaggttgacatctctgatgaaactcagaaagagcgcgtcaatcagatgatcgaggattttgaaccatttgagggagagtctctttttgatgccaagtgctttaagtgagaaac

SEQ ID NO: 275242 - DNA, 352 bp, Glycine max
gatgtaaagatcattaagaaacttcccaaagaattggttaatgcaaccagagtcgtcaagcaattcataagctggtctggcatggattactatgagaatgagattgctggcttgtgggaagattaccaagttattcgagcttccaaatctgattcacgattagcaaacaacaatctgcctccagacattcagaagctccgctgccgggcttgttatgaagcacttcgcttctctcctcgcattgaacaaatgggaaaattattggtggagaggatgaggtcatttggtccttatattgcattgcatttgcgttacgagaaggatatgctcgcatttagtgggtgcactcatg

SEQ ID NO: 275243 - DNA, 409 bp, Glycine max
ctatgaacatgatgatggaaagggtgccttaatctgtgtcacttgtggagtttcctactttggtcttgccttggtcaaccatctcttgctcttaggttactctcttcgagtcaccgttgacaacccagaggacatagagaagctgagggaaatggagaggcgtggtgaagtgagggctacagaaggaaatttggaagtaataatggcaaagctaactgatgttgatgggttggagaaagcatttcagggctgtcgtggcgtctttcacacttctgcatttacagaccccgctggtttatctggctacacaaaatccatggccgagattgaagtaagggctgctgagaatgtgatggaagcatgtgcaagaacaccttccataacaagatgtgtgttcacattatcacta

SEQ ID NO: 275244 - DNA, 380 bp, Glycine max
gaaggcaggtaggtggaagcagtctattgctttggcaaagaaggataacctttacaaagatgccatggagacagcctcccaatccggggagcgtgaacttgctgaggagttgcttgtttatttcattgatcagggaaagaaggaatgctttgcctcatgtctatttgtttgctatgatctcatacgggcagacattgttcttgaactagcttggatgcacaatatgattgactttgccttcccatatctattgcagtttattcgtgagtacactggcaaagtcgatgaactagtgaaggacaaaattgaagcacaaaatgaagtgaaggctaaagagcaagaagaaaaggatgtagttgcacaacagaacatgtatgctc

SEQ ID NO: 275245 - DNA, 334 bp, Glycine max
gaacaaacaggcaaacaatgctctcttcttccattttccttctcaatccaccactctaaccctcgcacgcttcgttcaattacaaaaatggacagatcaactggccgtggtggtggtggaagtgtggacatgtttctccgaaattataagttgggaaaaacactcggcattgggtcctttggcaaggtgaaaattgctgagcatgtacggactggtcataaagttgctataaagatccttaaccgccacaagattaaaaacatggaaatgggagaaaaagttagaagagaaatccaaattttaagattgtttatgcatcatcacattataagac

SEQ ID NO: 275246 - DNA, 354 bp, Glycine max
gacagacaagggtttcttccgggttcacgtttcgcaatcactttttgcgcttctctcactcactcactcttcttcctcttcgtgtggttttctttctcgaactcgaacgaagatgcgtgagattcttcacatccagggagggcaatgcgggaaccagatcggagccaagttctgggaggtggtgtgcgcggagcacgggatcgattcaacggggaggtaccaaggggacaacgagttgcaactcgagcgagtcaacgtctactacaatgaagcgagttgcggaaggttcgtgcctaaggcggtgctcatggatctggagccagggaccatggacagcgtcagatctggtcccta

SEQ ID NO: 275247 - DNA, 421 bp, Glycine max
ggaggcagaagagattagagaagacaactatggaaggagaaaatggaaagaagctgaaaatattgtgcctccatggattcagaacaagtgggagttttcttaaaaagcaaatcagcaaatgggatccttctatattcactcaatttgatatggttttcccagatggtaaataccctgcaggagggaagtctgacatagaaggcatcttccctccaccttactttgagtggtttcaattcgaaaaggacttcacagtgtactttaacttggaagaatgcatctcatacttatgcgaatatattacagccaatggtccctttgatggcttccttggcttctcacagggtgcaactctttcagcacttttgataggttaccaggcacagggaaggttactaaaggagcattcaccaataaaatt

SEQ ID NO: 275248 - DNA, 405 bp, Glycine max
ggaggtagccattgatattctgctaatgactatggtgatcaaaaacacaaaccagttagaggaaagtatggattccacttatgacaggaaggctgaagtgaaagcctttgatgattcaaaagctggtgttaaaggtcttgtagagtctggattgacaaagatccctcgcatgttccattctggcaggttggatatcattgaaacctcagtcagtgactctaagttcggtatccccatcatagacctccaaaatatccactcctatcctgctctgcattcagaagtaattggcaaggttcgaagtgcatgccatgactggcgatttttccaggtgattaatcatggaattcctatcagcgtgtttgatgagatgattgatggaattcgtagatttcatgaacaaga

SEQ ID NO: 275249 - DNA, 290 bp, Glycine max
ggaagagtgaagagaatggcgtgccaaggtttaacctttctggctgtgttaatatgcgtttcagcactgtcactgagtccttctgttgcgggggaagggcaaaataatggccttgttatgaacttctacaaggaatcatgccctcaggctgaagacatcatcacagaacaagtcaagcttctctacaagcgccacaagaacactgctttctcctggctcaggaacatcttccatgactgtgctgttcagagttgtgatgcttcacttgtgctggactccacaagaaggag

SEQ ID NO: 275250 - DNA, 348 bp, Glycine max
  unsure (1)..(348): unsure at all n locations
atctgaagaaagaggcatggccgaacaaaccttgatcatgatcaagccagatggcgttcaaagaggccttattggcgagattattagcagattgagaggaagggtttttacttgaaagggttgaaactcgttactgtggaccgtccttttgctgagaagcactatgctgatttgtctgcaaagcctttctttagtggtttggtggattacattgtctctggccctggtgttgccatgatctgggagggtaagaatgntgttacaactggccgaaagattatcggagccacaaacccagctcaatcttagccttggactattcgtggtgactttgctattgacattgga

SEQ ID NO: 275251 - DNA, 324 bp, Glycine max
gttggagaagagagcgagaagaacagcagccctaatgcaagctttgtcaaagttagcatggatggagcaccttaccttcgcaaagtggacttgaagatgtacaagagttaccgagagctctctgattctttaggcaaaatgttcagctccttcacctttggcaattgtgaatcccaaggaatgaaggatttcatgaatgagagcaagctgaatgatctcttgaacagctctgattatgtcccaacctatgaggacaaggatggtgactggatgcttgtcggtgatgtcccatgggagatgtttgttgaatcatgcaagcgttta

SEQ ID NO: 275252 - DNA, 440 bp, Glycine max
acctaggatggcatcaaatcaattctattggaggtgtttgtagcaggaagtgaaacaaccgcatcagcactagaatgggctatggcagagctcatgaaaaatccaatgaaattgaagaaagcccaggatgaggtgagaaaatttgtagggaataaatcaaaagtagaggaaaatgacatcaatcaaatggactacatgaaatgtgtaatcaaagaaactctaaggttacatccacctgctcctctcttggctcctagagagacagcatctagtgtgaaactgggagggtatgatattccagcaaaaacactggtatatgtcaatgcatgggcaattcaaagggaccctgagttttgggaaagacctgaaaagttcattccaaagagacatgataacagccgggttcattttaatggccaagacttgccatttattacatt

SEQ ID NO: 275253 - DNA, 375 bp, Glycine max
ggtgagttgagaggatcgtgagaggggcagtggccgagattccgtgagttgcaaaaatgaagacgattctttccaccgagaccatgaacatcccggacggcgtgagcatcaaagttcatgccaaggtcatcgaagttgagggcccccgcggaaaattggtgcgagacttcaagcatttgaatctcgattttcagctcattactgacgaaaacggtaaaagaaagctgaaaatcgacgcgtggtttggttctcggaaaacatccgccgccattcgcaccgccttgagccacgtggagaatcttatcaccggcgtcaccaagggctaccgctacaaaatgaggttcgtttatgcccattttcccatcaacgcaagca

SEQ ID NO: 275254 - DNA, 363 bp, Glycine max
ggatgaagaactatactatctatgctgtgtcaggcgaccattcgtattgtgtttggtttcttgtttattgcgttgatctggaagtttgattttgcacccttcatggttttgattattgccatactcaatgatggtaccattatgactatatccaaggatagagtgaaaccatcaccacttcctgatagctggaaactgagggagatatttgctactggcgttgtgctaggaagttacatggcactaatgacagtagtatttttctgggcaatgaaagataccaacttcttctcgaacaagtttggtgtgaggccattgagagatagccccgatgaaatgatggcagccttataccttcaagtc

SEQ ID NO: 275255 - DNA, 333 bp, Glycine max
gatccccaatcagagagaaaagggagggttcacaacttttccttttccttttgcttgcgaatctgaatcaaataatcaatcatccattcattattcatcatgtcgtcggcgaagaaaatcacgctgaagagttcggacggcgaggctttcgaggtggaggaggcggtggcgctggagtcgcagacgataaagcacatgatcgaggacgactgcgccgacagcggcatccctctgccgaacgtgacgagcaagatcctggcgaaggttatcgagtactgcaagaagcacgtcgaggccgcgaatcccgaagacaaaccctccgaggacgatctc

SEQ ID NO: 275256 - DNA, 352 bp, Glycine max
gaaacaaggtcaagggataaatttgggttccaggaagagaacaaatttgattctcttaacttgagcatgttgaacctggactctaaatttactgagaatgtgagcaaaagctcacttcgaaatggtgtttatggtatgaatgcagtgtatcagaaaaacaatgcaaacttggtgagtaatgtgatcagtaacaagtacaatggcagtattcagcataacaaagagatcaacaacaacactggcaacaacatcaacaccaatgaaagcaacaacacaaatgcaactgacaaaaggtttaagaccttgcctgctgcggagacactcccccgcaatgaggtgcttggaggataca

SEQ ID NO: 275257 - DNA, 356 bp, Glycine max
ggaatcaattgttgatagtgcgtttgaaaatgttgagcaggtcatcttagaacactttgatcaagtagtgggagactgtttcatggattgcgtgaattgtctgatcaggtttgccaacaataaaacttcgcatcgtattagcttgaaggctattgcactcctgcggatctgtgaggaccgtcttgcagagggtcttattcctggaggtgctttaatgcctattgatgctactttggatgcaactttcgatgtaactgagcattattggttcccaatgctggctggtttatctgatctaacatcagatcaaaggccagaggtcagaagttgtgcacttgaagtcttgtttgatttac

SEQ ID NO: 275258 - DNA, 247 bp, Glycine max
  unsure (1)..(247): unsure at all n locations
ggggagcggagtatttacagaactgggggggtancaaaaaaggtctgggcagaggttttcttctaccttgctgagaacaatgtcctttttgagggtattcttcttaagcctagcatggttacacctggagctgagtccaaggacaaggccagtcctcagacagttgctgattacaccctcaagctccttcacaggagaattccccctgctgtccctggaattatgtttttgtctggtggacagtctg

SEQ ID NO: 275259 - DNA, 338 bp, Glycine max
ggaaaccgagaagaagaagatggagatgtatgagatctggagcaggagaatagcgttgggagcgttcgcgtttgttctgcttttcctatcggcctcggcagacgacgtcgttgtgctctctgaagataacttcgagaaggaagttggtcaggacagaggagctctcgttgagttctatgctccttggtgtggacactgcaaaaagcttgctccagaatatgaaaagcttggtagcagcttcaagaaagccaaatcttgtttaatcggcaaggttgactgtgatgagcacaagagtttgtgcagcaaatatggagtctctgggtacccaacaattcagt

SEQ ID NO: 275260 - DNA, 372 bp, Glycine max
ggcgaagagaaatgaaattgcctctttcaagaagcatctgagtgtttactattttgtactatatttatatatagtcactcaagcttctaggatttctgcctgctgcatcaaaatgggaagcaacttgaggtttttgagtctttgcctcttggcattgattgcatcaactcatgctcaacttcagcttggtttttatgctaacagttgcccaaaagcagagcaaattgttttgaaatttgttcatgaccatatccacaatgctccatcactagcagctgcattaataagaatgcactttcatgactgttttgtaaggggatgtgatgcatcagtccttctgaactcaacaaccaatcaggctgagaagaatgc

SEQ ID NO: 275261 - DNA, 375 bp, Glycine max
gtccaacaaaacaaaaaaagggtccaatttttggaaaattattaccatcggttcgtattcatcaacgacccctcttctgtgcccacttccaaatcttctcctctcgctatgggttgcggctcctcccttccagataggggctcaaggcagttgggtcgacccaattcagagaatggtggagggcaggacgccaagaatctgagggtcaagcttgttctcttaggtgattctggtgttggtaaaagctgtattgttctacgatttgttcgtggtcagtttgatccaacatctaaggtaacttgtggagcttcttttttgtcgcaaacaataactctgcaagactctacaacagtcaagtttgaaatatgggatact

SEQ ID NO: 275262 - DNA, 337 bp, Glycine max
  unsure (1)..(337): unsure at all n locations
gttgaaagtgagtgagagaaagagatcacatggcanaatggcttctactgaatgtttcttgcaccaccatgctcttaccacccctgccagatccccatcacaacgcatcatggttagcaccaagcctaaccagcttgtttgcaaggcacagaagcaagaggatattgatgtcagcccaatctctcgccggttagctctaaccgtgctcattggtgctgctgctgttggctccaaagtccaacctgctgatgcagcttatggggaagctgccaatgtgtttggaaagccaaaaacagacacaaatttcctgccatacaatggagatggattcaaacta

SEQ ID NO: 275263 - DNA, 385 bp, Glycine max
gggtgagagaaaaaatgttaaccttcctggtgttgtggtggatctacccacacttactgagaaggataaggaagacattcttggatggggtgtacccaacaagattgacatgattgctctttcatttgttcgtaaaggctcggatcttgttaatgtccgcaaggttctggggccacatgcaaagaatattcagttgatgtcaaaggttgagaatcaggagggagtcctgaattttgacgaaatcctgcgggagactgatgcattcatggtggcacgtggtgatcttggaatggagatcccagtagaaaagattttcctggcacagaagatgatgatatacaagtgtaatctttgtgggaagccagtggtgactgctacccaaatg

SEQ ID NO: 275264 - DNA, 244 bp, Glycine max
  unsure (1)..(244): unsure at all n locations
ggagtggtggcatcaaaatcaaagggtgtctntcagaaacgaagaaaatgggaagaatcttcacggtggagcttgagggtaggtcttacagttgcaagtcctgcaaaacccacctagcccttgcagatgatctcatctctcgttcattttattgccagcggggaaaagcatatctcttcaataatgttgtgaacttcacaattggagagctagaggaaaggttgatgctttcgggactgcatac

SEQ ID NO: 275265 - DNA, 375 bp, Glycine max
ggagcaagagtgaagagcgaagagaatggctcccaagggtttaatctttttggctgcgttatgcttctcagcactgtcactgagtcgttgtcttgcggaggataatggacttgttatgaacttctacaaggaatcatgccctcaggctgaagacatcatcaaagaacaagtcaagcttctctacaagcgccacaagaacactgctttctcctggctcagaaacatcttccatgactgtgctgttcagagttgtgatgcttcactgttgctggactccacaagaaggagcttgtctgagaaagaaacagatagaagctttgggttgagaaatttcaagtacattgagaccatcaaagaagctttggaaagggaatg

SEQ ID NO: 275266 - DNA, 393 bp, Glycine max
gacggacgagggtttcgtttcgggtttgacgttgttcacaatcactttctgcgcttcactcactcccttcgtgcggttttctttctttgtcgaactcgtgcgaaaatgcgtgagattcttcacatacagggagggcaatgcggaaaccagatcggagcgaagttctgggaggtggtgtgcgcggagcacgggatcgattccacggggaggtaccagggggacaacgagttgcaactcgagcgagtcaacgtctattacaatgaagcgagttgcggaaggttcgtgccgagggcggtgctcatggatctagagccagggaccatggacagcgtcagatctggtccctacggtcagattttccgacctgataacttcgtcttcggccagtccggc

SEQ ID NO: 275267 - DNA, 354 bp, Glycine max
gacggcgaaaagctaaatatcatcaaagtactcaaattatcatggctgtcatggttgcattcttgaatttgatcatcatcttttcagtagtctctacaacaggcaagtcactgagcttaaactactatgcaaaaacatgccctaatgtggagttcattgttgccaaggcagtaaaagatgccactgctatggacataactgttccaacaaccattctgcgaatgcacttccatgattgtttcgttcggaggtgtgatgcctctgtgctgctaaattcaaaaggaaacaacaaagcataaaaagacgggccaccaaatgtttctttgcatgcattctatgtcattgatgcagcaa

SEQ ID NO: 275268 - DNA, 376 bp, Glycine max
ggagcaagagtgaagagcgaagagaatggctgccaagggtttaatctttttggctgtgttatgcttctcagcactgtcactgagtcgttgtcttgcggaggataatggacttgttatgaacttctacaaggaatcacgccctcaggctgaagacatcatcaaagaacaagtcaagcttctctacaagcgccacaagaacactgctttctcctggctcagaaacatcttccatgactgtgctgttcagagttgtgatgcttcactgttgctggactccacaagaaggagcttgtctgagaaggaaacagatagaagctttgggttgagaaatttcaggtgcattgagaccatcaaagaagctttggaaagggaatgc

SEQ ID NO: 275269 - DNA, 368 bp, Glycine max
gcccagaacagagtgtgataatagtaagacagagcacctactcactcgtaaatggcgaggaagaagatcagagagtaccactccaagaggcttctcaaggagcatctcaaacgtctcgcctctatcgacctccaaatcctctcagctcaggtgacagaatctacggatttcactgagctgacagaccagcatccatggctttcgtcaaccagattggtcgtcaagccagacatgctgttcgggaagcgcggcaagagtggcttagttgctctcaatttagacatagctcaagtcgccgagttcgtcaaagcacgcctcggcgttgaaggtgagatgggaagttgcaaggcgcctataaccacttttat

SEQ ID NO: 275270 - DNA, 394 bp, Glycine max
  unsure (1)..(394): unsure at all n locations
gatcgaagcaaaaaatgaaaacccagagtgcttctctcctctgtctttttctctctcttgctatccttttggctagtggtactgctgcaagtgcaactccaagaagcgcagtgccaagccaccatgtttcaacattcaacagaagcctttttccttccacttttctctttggaattggttcttctgcttaccaggcagaaggagcagcaagtgtagatgggagaggaccaggcatatgggacacctacactagacagcatactgaaaagatttgggatcatagcaccggtgacatgggagctgatttttatcatcgatacaagggtgacataaaaatagcgaaagaaattgggctggactctntcagattctctatctcatggtcaagaatatt

SEQ ID NO: 275271 - DNA, 393 bp, Glycine max
gggacaattccaaatgaaatctgcaatatctcccgattgcaggacttgctgttggatcagaatttcattacaggagagatccctcatgaaattggaaattgtgcaaaacttcttgaattacaattgggcagtaatattttgactggaactattcctcctgagattggtcgcattaggaacttgcagatagctttaaatttgagcttcaatcatcttcatggatcactgccccctgaattaggaaagctggacaaacttgtttctctggatgtttcaaacaatcggctatcgggtaatatcccacctgagcttaatggaatgttgagcttgatagaggtgaacttctcaaataatctggtcggaggttctgtgccaacatttgtaccattttag

SEQ ID NO: 275272 - DNA, 213 bp, Glycine max
ggttctagtgtgtgattgtttgttgttgtaactctttcttcttcttttgctggtctgtgtttgtgtttgtttcttctctcacctgaaaatgtcttgctgtggtggtaactgtggcttcggaagctcctgcatgtgccgcaactggtgtagatgcttgaagatgtacccactcttgttcttcactgttttaaccaccaccgagaccttcgtcat

SEQ ID NO: 275273 - DNA, 407 bp, Glycine max
gtgaaaaggaagtgatgcgtaactatgagggggatactgatgctgaagtgttggacttgcttgacaccgcttctaggcagaaacaggggaatgtggtggcaaagctatactggggggatgcaagagagaaaattgtggaaaccgttggggatatgaagcttgactctctggtcatgggtagcataggcttggatgccatacaaagggtattactggggagtgtgactaattatgtcaccgtatatgccaattgccctataacgattgtgaaagactctgacccttctactatctgataagctactgaatatgggtggcctttgcaatcgggagtggatatcttcatcagtgaccagagtgtgtttgccttcgttcttactatttacacatggctaattgggattatg

SEQ ID NO: 275274 - DNA, 404 bp, Glycine max
gtgaaaaggaggtgatgcgtcactatgagggggatactgatgctgaggtgttggacttgcttgacaccgcttctaggcagaaacaggtgaatgtggtggcaaagctatactgtggggatgcaagagagaaaattgcggaagccgttggggatttgaagcttgactctttggtcatgggtagcataggcttgggtgccatacaaagggtattactggggagtgtgactaattatgtcaccgcatatgcgagttgccctattacgatggtgaaagactctgccccttctactatctgataagctactgaatttggttggcctttgcaatcggctgttttatcttcatcagtgaccagagtgtgttttcctccgttcttacttcttacacatgtctaattgggatta

SEQ ID NO: 275275 - DNA, 394 bp, Glycine max
gcactaataatgatataattctttgtgatggtgtttgtgatcgtggatttcaccagctctgtttggatcctccgttgttaactgaagacattccacctggcgatgagggttggttatgcccaggatgtgattgcaaagatgactgcatggaccttgttaacgactcctttggaacaagtctttctattagtgacacctgggagagagtctttcctgaagcagcatcatttgctggaaataatatggataacaacttgggacttccttctgatgattctgatgatgatgattataatcctaatggttcagatgatgtgaaaattgaaggggatgagtcaagttctgatgaatccgagtatgcttctggttctgagaaattggaaggtggttcaca

SEQ ID NO: 275276 - DNA, 413 bp, Glycine max
gatttatgggtcttttgataagccctctgagaagaggaaggggtacttgcttcccaggcccaagatggttaactctgatcttgccaggattattaattctgacgaggttcagtctgttgtgaggcccattaagaaggatgtgaagaaggccacgctgaagaagaaccctcttaagaacctgaactctatgctgaagctgaatccttatgccaagactgctaagaggatggctcttcttgctgaagctcagcgcgttaaggccaagaaagagaagctcgacaagaagaggaagactgtctctaaagaagaagcttctgccatcaagtctgctgggaaagcatggtatcacactatggtgtcagattctgattatacagaattcgacaacttttctaagtggctgggtgtttcac

SEQ ID NO: 275277 - DNA, 347 bp, Glycine max
tttttcactctttcatacttcttttatattacgactattggggacacattttattccctttaccaaaataactattaacatttaattaaaatcaacatccatcattttcttctattctacaattttattatcatcacaattccattcattaccatattattcctctccaaattaacactatctattctcccctactcataaataaatcccaattaatctttctattaacacaacacattttttctttaaaacattccttaaatttcttttatacaacaaaatattacatacattgctaacattatatatcatactccaaaactattaaccaacaatttttactttta

SEQ ID NO: 275278 - DNA, 401 bp, Glycine max
gagaacaaacctgtcactaacagtagggatacacaagaggtaatgttggagcctggcctgaaattaatcaaaattttcaaggaatataccatcaagacatgcattctggatgattttggcttctatgaggcccgtcagaagactattttggagaagaaagcaaagcaacaattcccaaagcaggtatgggaagggaaacctgctgatgagaagattgagataaatggggaagtcaatactcaaaaatctgaagttagctcggaagtgctcaaggagtcccttgctgataaggatagtgatgaccacaaagttcccgagaatggatgtgctacaaaaactggagatgccccaaagggtgctaaaccagttggtcctgagagcaagattgtagccaatggggt

SEQ ID NO: 275279 - DNA, 277 bp, Glycine max
ggctcaagtgagtttgttgatcgagataactagagacagtgtgatgaaaatgaagggccttgttttcttcgttgctacaattttggtagcatgtcaatgccatgcgtacgatatgttccctctccgaatgaacactggctatggtgcccgtactccgtaggtgaaatgcccaagttggaggcttgctgtggaagcacacaacatcttttgcttttagaccattccttattattgcgttgactcttcccaagtattcattcattgcgaacaattttta

SEQ ID NO: 275280 - DNA, 395 bp, Glycine max
ggatgactttgagaatattacaaactggcatgtacccattttagccatgaccgcagatgtgatacaggctacacacgaggaatgcctaaggtgtggcatggatggatatgtttcaaaaccatttgaagctgaacagctgtatagagaagtctcacggtttttccagtcatcttgaaaagaaaatacggtgccgagttaaaccagaatatttgataatggaagcgtagctgtccgtaatccaggacactcccaagtgggcaaataggttccgaagtctcctgagaggagtgtacataagagccaagtttgattggttgcaattgagttgtaattggttgttaagggtaccaaaacccattaattcttcttccatgtaaagtcagccgaaatgattg

SEQ ID NO: 275281 - DNA, 402 bp, Glycine max
gcaactgcaattatttatagcggagaacacaagcatcaatgtcctcatcctaacaagtgctcaaaagacaccatgacttcaaatgaaaattcaaatatgcaagggaatgtatgattcaacgtatcaagggacgagtacaaactcaatgtctaagatggatcccgagtcaagtcaggcaacagctgatcgtctatcaagaacacgtgacagcgaggaagtagctgatcatgaaactgaagtggatgagacaaatgttgagcctgagcccaagaggagaaaagcacaagtctcgcagtcagatccaccttcttcacataggacttgtaccgagcctcgaatcattgtgcacacaacaagtgaagttgatctcttagatgatgggtatagatggcgaaaatatgg

SEQ ID NO: 275282 - DNA, 378 bp, Glycine max
ggagcaagagtgaagagcgaagagaatggctcccaagggtttaatctttttggctgtgttatgcttctcagcactgtcactgagtcgttgtcttgcggaggataatggacttgttatgaacttctacaaggaatcatgccctcaggctgaagacatcatcaaagaacaagtcaagcttctctacaagcgccacaagaacactgctttctcctggctcagaaacatcttccatgactgtgcttttcagagttgtgatgcttcactgttgctggacttcacaagaaggagcttgtctgagaaggaaacagatagaagctttgggttgagaaatttcaggtacattgagaccatcaaagaagctttggaaagggaatgccc

SEQ ID NO: 275283 - DNA, 403 bp, Glycine max
  unsure (1)..(403): unsure at all n locations
gacggcaacagaagaataatcaaatttctcagatctatccgacgtcgtcgcagatccaccaaccgttatggctgccttcagcggtgatgaaacggttccgtttttcggcttccttggagccgcagctgccctcgtcttctcctgtatgggagctgcctatggtacagcaaagagtggtgtgggcgtggctttcatgggtgtgatgagacctgagctggtgatgaagtctattgtccctgttgtcatggctggagttttgggtatttatggccttattattgctgntattatcagtaccggtattaatccaaaggccaaatcttattacctctttgatggttatgcacatatctcctctggtcttgcctgtggcttggctggcctttctgctggcatggctatt

SEQ ID NO: 275284 - DNA, 259 bp, Glycine max
  unsure (1)..(259): unsure at all n locations
cagggggaagcgaagagtgaagagaatggctcccaaggggttaacctttctggctgtgttaatatgcgtttcagcactgtcactgagtccttctgttgcgggggaagggcaaaataatggccttgttatgaacttctacaaggaatcatgccctcaggctgaagacatcatcacagaacaggtcaagcttctctacaagcgccacaagaacactgctntctnctggctcaggaacatcttccatgactgtgctgttcag

SEQ ID NO: 275285 - DNA, 382 bp, Glycine max
gataattgttgaagagagagagacagagagagagagaggatgggttgttgccaatcatcgatgttgctgatagtgggagagagggagactcaccctgaaaaggagaaggaaagggataaggagaaagagcaagcgtacggaaaccaccagaggcagtctgagggaggagaggtctacggcgagaaagaggcggctgatttctcgttcttagagttctcgctggctgagcttaatgcggacaccaacaattttagctttgagtatatcgtgtcagaaagtggcgagaatgcacccaatctggtgtacaagggtcgcctgcagaaccagagccgcttgattgctgtgaagaagttcatcaagtctgcttggcctgatcccaagc

SEQ ID NO: 275286 - DNA, 393 bp, Glycine max
ggagagagagagagaaacaaagcagcacccatttggatcctctcttctcttctttgatctccgttaccctttttgttttctcaacagagagagagagagagaatctttcgaagttcgtttgcgtgtgttgtgtggtcagtcaccgatggcagcaccacctgcgagggcacgtgccgattacgattacctcatcaagcttcttcttattggcgatagcggtgtgggaaagagttgtctgcttttgcgattttctgatggttccttcacaaccagttttatcaccaccattggcattgattttaaaataagaaccattgaacttgatggccaacgcattaagttacaaatctgggatacagctgggcaagagcgatttccaactattaccacagc

SEQ ID NO: 275287 - DNA, 167 bp, Glycine max
ggttctagtgtgtgattgtttgttgttgtaactcgttcttcttcttttgttgttctgtgtttgtgtttgttttttctctcacctgaaaatgtcttgctgcggtggtaactgtggttgcggaagctcctgcaagtgcggcaacggctgctgatgctgcaagatgtacc

SEQ ID NO: 275288 - DNA, 403 bp, Glycine max
gcaacaagtgaggatgcatcttctgccattcagggcatggatggtcaggatcttcatggtcgcaggatacgggtgaattatgctacagaaaggtcacgtccagggtttggtggtgatggtggatataggggcagtggtggcagcgatggctacaataggggtggaaactatggaggtggatataacagtggcagcgatggctacaataggggtggaaactatggaagtggcaattataatgttacaagcagctatagtgatggcaatgctgaaactagttacactagtggtgctaatgctggtaattaccaattcaatgaaaattctggtggagtttttggctcagctagcggtgaattcagcagcaaccaaaatgacgcaacaggtgcagacaatgatgaat

SEQ ID NO: 275289 - DNA, 371 bp, Glycine max
ggatgaaccgggcggtccaaagagtctctgctccactttggaacgccttttggcgtgggagaagaagctctacgaggaggttaaggctagagaaggtgtgaagattgaacatgaaaagaaattatcagcgctgcagactcaggaatacaaaggagaggatgaagctaagatattcaaaaccaaggcttccataaataggctgcagtcactaatagctgttacatctcaggctgtgtctaccacctcaactgccactattggccttagggactctgatcttgtccctcagcttggtgatctcattcatggattcatgtacatgtggagatcaatgcaccactaccatgaaattcaaagcaatatagtgcaac

SEQ ID NO: 275290 - DNA, 295 bp, Glycine max
ggttgacaaaggaaacgtgtagtacgagggccaatttccaaaaaccttttgtctcgcaacctcacctcttcctccttcaatctctttcggaatttcccaaaatccttagtgggaggaagagatggttctgactcagaagattcacgaagctttcaaaggcaccgtcgagaggatcactggcccccgaaccgtttccgccttcaaagaaaaaggagttctcagtgtctccgagttcgtcaccgccggcgataatctcgttgccaaatgccccacctgggcctgggaatcgggtgat

SEQ ID NO: 275291 - DNA, 397 bp, Glycine max
ggttctagtgtgtgattgtttgtggttggagctcgttcttcttcttttgttgttctgtgtttgtgtttgttttttctctcacctgaaaatgtcttgctgcggtggtaactgtggttgcggaagctcctgcaagtgcggcaacggctgcggaggctgcaagatgtacccagacttgagctacactgagtcaaccaccaccgagaccttggtcatgggagtggcacctgttaaggctcaatttgagggtgctgaaatgggtgtgcccgctgagaacgatggctgcaaatgtggaccaaactgctcctgcaacccctgcacttgcaagtgaggtgttgggagagcaagcttcaagcagagatagcccttaattaggaataatgataaactattaatgtgt

SEQ ID NO: 275292 - DNA, 299 bp, Glycine max
  unsure (1)..(299): unsure at all n locations
tcnaagacgactttgggggtaaaggaaaagttggaaaggctgcaaatttgagaggacaagtgtcgttaccaaccttgtgagctggcgaagatgcatacgatgttcattttgaatgggacagtgacttctgaatttccggtgcattttacattaagaacttcatgcaagttgagttctatcttaagtctctaactctcgaagacattccaaaccacggaaccattcacttcttattcaactcctgtgtttacaactcaaaatcctaccattctgatcgcattttctttgccaacaattca

SEQ ID NO: 275293 - DNA, 422 bp, Glycine max
gacagaaaagaaaaaggaaaccctagctggatagggcaaacggcatcatgtcggacgaagagcaccatttcgagtccaaggcagacgccggtgcctccaaaacctaccctcagcaagccggtaccattcgcaagaacggctacatcgtcatcaaaggacgcccctgcaaggttgtggaagtttcgacttccaaaactggaaagcacggtcacgccaagtgccactttgttggaattgatattttcactgccaagaaacttgaggatattgtgccctcttctcacaactgtgatgttcctcatgtgaatcgtactgattaccagctcattgatattgctgaggatggatttttgagtctgcttactgaaaatgggaacaccaaggatgacctcaagcttcccactgatgagagtctgctcact

SEQ ID NO: 275294 - DNA, 290 bp, Glycine max
gaagggcagaaattgtagtgaaagcgataattctagtactagtataataactagtacgaatgatacaaatgatagtgattccactataggagaaagttctaataatctcgatgaaagtcaaaaatataagcatttgtggcttgaatgcgaaaattgttatggattaaattatcaaaaattttttaaatcaaaaatgaatatttgtgaatactgtggatatcatttgaaaatgggcagttcagatagaatcgaacttttgattgattcgggtactttgaatcctatggatg

SEQ ID NO: 275295 - DNA, 380 bp, Glycine max
ggcgtgataccatttaatttgacagcgattaattatttatagttaagtgtggagtgcagtgcaggtcaaggcctgagattcggctctttacttgttgggttgttctgatcttctgtcatagcagtcagatcacactcccatcttctcatctcgtaaaccctaaaccccgttttcagtgacatcgagatcgatcgatcatggatgaggagtacgatgtgatcgtgttgggcacgggtctcaaggagtgcattctcagcggtcttctctccgtctatggccctaaagttctgcgcatggacaggaatgactattacggaggagaattcacttcgcttaatcttattcagcttttggaagagattcaagggagatgacaagcc

SEQ ID NO: 275296 - DNA, 409 bp, Glycine max
ggtgtaatgtaatgaaacgaatgaaatgataggttggtggaggattgagagagtgcggtgttggttaaacatgtggaagtttggtgcttgaacttgaacgccgaacattgcgattcagagagagagagagaagagaatggccatggcccgaagagtccctcgtaatgttttgggattggtcaaaaggaacatgtccttcaaatctttggatcccccttcctccctcacccacggaatccacgtctttcattgccccgatgccgttggaattgtagccaagctatccgactgtattgcctctagaggtggaaacattctcgccgctgatgtttttgttcctgaaaataaacatgtcttctactccagaagtgattttgttttcgatcctgttaaatggccacgggtgcaa

SEQ ID NO: 275297 - DNA, 428 bp, Glycine max
aagacgacagaagggggatgatgaatatgctaagcttattagaaggatgaacccaccaagggttgtgattgacaacaatgcctgtgaaaacgcaactgttattcaggttgacagtgtcaacaaacatgggattctccttgatgttgtccaagttatatcagatatgaaccttgtgataacaaaggcctacatctcctctgatgcggtgtggttcatggatgtgtttaatgtgattgatcataatggaaacaagatcagagataaggaagtcattgattatattcagaggagacttgaaaacaatcccagctttgcaccctcattgagagagtctgtaggggttgtaccaactgaagagcacaccgtaattgaactcactggcacagaccggccaggtttactatctgaaatctgtgcagttctcacag

SEQ ID NO: 275298 - DNA, 306 bp, Glycine max
acccacgcgtccgaccactcctacggactgcttgataaaaaacgtcttgaggctatactgatgatctcacttctggaacaggtggtcagtatttatggagcttgattacctgcataagtggcattctttcatcccccaatggatgacatttctggtaccagagagtctcttatttatgttacctctttctacacagggtccggattaaacaaaccagactgtttgtcgacagtgtatgtgtatccaaactattcatctttttccaaagaaatacataggcttcccgctgcttatttaggtgactaa

SEQ ID NO: 275299 - DNA, 413 bp, Glycine max
ggtgcacaagtgagtttgttgatcgagataactagaaacagtgtgatgaaaatgaaggtccttgttttcttcgttgctacaattttggtagcatggcaatgccatgcgtacgatatgttccctctccgaatgaacactggctatggtgcccgtactccggaggtgaaatgcgcaagttggaggcttgctgtggaagcacacaacatctttggctttgagaccattcctgaagagtgcgttgaagcaacaaaggaatacatccatggcgaacaatatagatcagactccaaaacagttaaccaacaagcttacttttatgccagagacctcgaagtccatcccaaggacacatttgtgttcagtatagatggcaccgtactctctaatattccatactacaaaaaacatggata

SEQ ID NO: 275300 - DNA, 424 bp, Glycine max
ggaggaagcgcagcagcagcagctataccacgttgcttgaagaaactgataaaaagcgctgccgttgtgtctttcagtcttcgttggatcatcttcacaatcacatcatcagaacacaaagaagagaagagacccttcatcttgttattccactcgggctaggccaattttccctctaacagtcaattttcattcagattcgtaaatttctcgattagatcacgaggtgttggtgtgattgtttgtaccttctggtggtggagcttgttggaaattggagatgagtcagaggggtttaatatatagctttgttgccaaaggaactgttgttttagcagagcacacgcaatatacggggaatttcagtaccattgctgttcagtgcctgcagaaactgccttcaaatagcagcaaatacacatat

SEQ ID NO: 275301 - DNA, 374 bp, Glycine max
ggagaaaagagtgacactaatttcaaatggaaattgctctctcataacagaattcaagaggaggaagaacaagtatataaaaactatatctacatagttatatctctctcttgagatttcaaacgtagagatatggaatggaggaagtgctacttggatgtgatattggtgcccttgggatttctaacaagcattgggtaccatttctggctatggcacaaggttcgaactcagccacacacaaccatcattggcatcaatgctagtggccgtagaaattgggttaatggcatgatgaaggacaatgacaagaaaaacattctggctgttcaatcactaaggaacacaataatgggtgctactctaatggccac

SEQ ID NO: 275302 - DNA, 415 bp, Glycine max
  unsure (1)..(415): unsure at all n locations
ggtgtgaaaagtgaaacaaaaaacagaacaacaatggcgacacttaaggttcctcagcctcttccccccgttgcagatgattgtgagcagctccgaaaagccttctcaggttggggaactaacgaggagctgattgtatcgatcttggctcataggaatgctgctcagaggaagcttatcagagaaacttatgcccagacctatggagaagatctcctcaaggccttggacaaagaactcacgagtgattttgagaggctggttcatctttggacacttgattctgcttgacgtgatgcatttttggcaaacgaggcgactaanaaatggacttcaagcaatcaggttctggtggaaatagcctgcactaggtcctctgaacaatngttngctgcnaggaaggcttaccatgttc

SEQ ID NO: 275303 - DNA, 394 bp, Glycine max
gaggtgacaaggcaatgcaacttttggagagtggtttgaaggttaaggaatatgaacttctcagaaggaatttcagtgatactggttgcttcggctttggtattcaggagcatatcgatttgggaatcaagtaagttgaagaactcttggatttttatgctggtgttttgacttttgcctgaggtaaacattttaggacttaagggaagctgattatttgatatgggttgtggtgtgcacaatgcattttcaaaattttggatatgacataacatatctcttcccctttaatggtgattccagttttgacttgaaccaaatgctaactggtttataaataatgggaagttaagaattttccttttggtggtttggactttggtgcttatatgaa

SEQ ID NO: 275304 - DNA, 385 bp, Glycine max
gaggacaataggtggccaccgtggttgaagccactgctgaaagagagcttctttgttcaatgcaagttgcatgttgattctcacaagagcgaatgcaacatgtattgcttggactgtatgaatgaccctctctgctctctctgcctcgcccaccacaaagatcaccgtgcaatccagattaggaggtcctcataccatgatgtgatcagggtctctgagattcagaaggtgttggacatcactggtgtccaaacctacattatcaacagcgcaagggtggtgtttttgaacgagaggcctcaaccaaagcctggaaaaggtgtcacaaacacttgtgaagtctgcgagcgtagccttcttgattctttccgcttctggtctcttg

SEQ ID NO: 275305 - DNA, 365 bp, Glycine max
ggcgtaggcaaagagagagagagaaaagcgtgaatcatgtcggacgaagagcatcacttcgattctcaggcggatgcgggagcgtccaagacgtatcctcagcaggctggtaccattcgcaagaatggctacatcgtcatcaaatccaggccttgcaaggttgtagaggtctctacgtcaaagacaggcaagcatggacatgcaaagtgtcactttgatgcaattgatatttttaatgggaaaaagcttgaagatattgttccatcatcccacaactgtgatgttccacatgtgaatcgcactgactatcagcttattgatatctctgaagacggctttgtgagtctgctgactgataatggaaa

SEQ ID NO: 275306 - DNA, 399 bp, Glycine max
gggctcggagttggtcttatgttgaacgtccgggtttgttacttgttgcagcttttgttatcgcccagctgatagctaccttaattgcagtttatgcaaattggagtttcgctgctattgaagggattggatggggttgggctggtgttgtttggctttacaacctcatcttttatatcccacttgactttatcaagttcataattcgatatgccttgagtggaagggcttgggatcttgttattgaacaaaggattgcttttacaaggaaaaaagattttggaaaggaagaacgtgaacttaaatgggcacatgcacagaggacgcttcacggccttcacccaccagagactaagatgttcaatgaacgtacaagttacacagaacttaatcagatgg

SEQ ID NO: 275307 - DNA, 396 bp, Glycine max
gagcgaaacagagagtgatttcagtgagtgatcggtgttcacttgatctcatcataatcgtcagcgtcaattgaagaagatgccgatcagaaacatcgccgtcggaaggcctgaagaggcgactcaccccgacacgttgaaggcggctttggctgagttcatctcaaccttcatcttcgtgttcgccggctcaggctccggcatcgcctacaacaagctcaccgacaacggcgctgccacccctgccggcctcatctccgcctccatcgcccatgcattcgccctcttcgtcgccgtctccgtcggcgccaacatctccggcggccacgtcaaccccgccgtcaccttcggcgccttcgtcggcggcaacatcaccttccttcgcggcatcgtcta

SEQ ID NO: 275308 - DNA, 419 bp, Glycine max
ggagcaaaggttcatcttgaacagaagattgatccaagcatacttggtggtcttgtgcttgaatttagccagaaggtctttgacatgtcaattaagaccagggcacaacagatggagaggatcctccgtgagcctgtatcgattgccaacatctagaagacaacagttgctcctgacaatctgtgttatcatggtttaaagaaagaagtattacattcttgttcattacaaattgtgtggatctatatttttatgggatggaatgccatcattttgcaaataaaagctacctcttcccaacttcttgttatgcttcattgccatttcagtgtatctgaatatattttgatttggtattttgagattttaattagtgggcttctctcgtaatctggatgcctaataatgatgcttcttac

SEQ ID NO: 275309 - DNA, 399 bp, Glycine max; identical to SEQ ID NO: 275306

SEQ ID NO: 275310 - DNA, 398 bp, Glycine max
ggcgatcagcagcatcagctatactactactacgactactaattcctctggaagtgggagcagctccataaatagcaagttctcagtgtcaagcggtgatcagccttatccaaatggacagatcttacctacctctaatttgaggattttcacttttgccgagttgaaggctgcaactaggaatttcaaagctgatacagtgcttggggagggaggttttggaaaagtcttcaagggttggcttgaagaaaaggccacttcaaagggtggaagcggaacagtcattgccgtcaaaaaactcaactctgaaagcttacaaggacttgaggagtggcagtccgaagtaaattttctaggacgtctttctcataccaatcttgttaagctgttgggatact

SEQ ID NO: 275311 - DNA, 409 bp, Glycine max
gacggctaaaagctaaatatcatcaaagtactcaaattagcatggctgtcatggttgcattcttgaatttgatcatcatcttttcagtagtctctacaacaggcaagtcactgagcttaaactactatgcaaaaacatgccctaatgtggagttcattgttgccaaggcagtaaaggatgccactgctagggacaaaactgttccagcagcaattctgcgaatgcacttccatgattgtttcgttcgggggtgtgatgcctctgtgctgctaaattcaaaaggaaacaacaaagcagaaaaagacgggccaccaaatgtttctttgcatgcattctatgtcattgatgcagcaaagaaagcactagaagcttcatgccctggtgtggtctcttgtgctgacatccttgc

SEQ ID NO: 275312 - DNA, 396 bp, Glycine max
gactgagcgtggttattccttcaccacctcagccgagcgggaaattgtaagggatgtgaaagaaaagctgtcttacattgcccttgactacgagcaagaactggagacagccaggaccagctcatccgtcgagaagagctacgagttgcctgatgggcaggtcatcactattggcgatgagcgtttcagatgtccagaggttctgttccaaccatccatgatcggaatggaagcttcaggcattcatgagacaacatacaactccataatgaagtgcgatgttgatatcaggaaggacctttatggtgacattgatctttcaggaggaacaaccatgttccctggtattgctgacagaatgagcaaggaaatctctgcattggcacccagcagcat

SEQ ID NO: 275313 - DNA, 431 bp, Glycine max
gataaggatgcagccagtatcttgggcaaactcacttctgaagcaggcaatgaagagtgggatgatagcttactgaccaaagaggaagtagaggcaagattgcagaggaaggtggaagcaatcatcaaaagagaaagagcaatggcatttgcatattcacatcagctatggaaagccactccgaaatcaactcacaccccgatgacagatacacgatccagtggattcccttggtggtggaactggttggaaagacaaacacctgcagcaactccacaagaaagacaaagcttgaagaattttcaaatcacaccttcaagaccatactcagagcaaaagactagtccaagacctggctccagcactcaaaggcagccgcagtcgcagcagcagcagcctcatgtttcctttgataatatggacacttccac

SEQ ID NO: 275314 - DNA, 375 bp, Glycine max
ggcacaaaaatacaatacaaaacaaaacagagcaaagagagagtgtgtgaaaagtgaaacaaaaaacagaacaacaatggcgacacttaaggttcctcagcctcttccccccgttgcagatgattgtgagcagctccgaaaagccttctcaggttggggaactaacgaggagctgattgtatcgatcttggctcataggaatgctgctcagaggaagcttatcagagaaacttatgcccagacctatggagaagatctcctcaaggccttggacaaagaactcacgagtgattttgagaggctggttcatctttggacacttgattctgctgaacgtgatgcatttttggcaaacgaagcgactaaaaaatggac

SEQ ID NO: 275315 - DNA, 402 bp, Glycine max
gaatagaatatgaaaaagaaaaaaaagattctaaagaaatataactaatattctttagaataatcaaaaagaatattaaattcaaataaattttagatagaaaaaagacttaaaaaggaggatttgaaatgcgagatctaaaaacatatctttccgtggcaccagtagtaagtactctatggttcggggctttggcgggtctcttgatagagatcaatcgtttttttccagatgcattgatattcccttttttttcattctagttattgacacggaaaggggtgaagaagattatagatccaattaagtattaaatatatgtaattaatatgtaattaatctcctcttctttatttcgtcttttatttcttcttttttttacaattgtaatagaataagtca

SEQ ID NO: 275316 - DNA, 381 bp, Glycine max
ggaaatcgagaagaagaagaagaagaagatggagaagtatcagatctggagcaggagaatagcgttggcagcgtttgcgtttgctctgctgttccaatcggcctcagcagacgacgtcgttgtgctctctgaagataacttcgagaaggaagttggtcaggacagaggagctctcgttgagttctatgctccttggtgtggacactgcaaaaagcttgctccagaatatgaaaagcttggtagcagcttcaagaaagccaaatctggtttaattggcaaggttgactgtgatgagcataagaagttgggcagcaagtatggagtctctgggtacccaacaattcaatggtttccaaaaggatctcttgaagcccaaaagta

SEQ ID NO: 275317 - DNA, 410 bp, Glycine max
ggtatttggaggaaggaaggtaaaggaagcaaacgcaagagcaagagcaagagcgaaagcggcagagaagatggaaggagaagagggttctcagcagccacagttggtgctcgcggacaagctattccttctccggcaacccgatgtgcaagacattgacaaggttcgctacaaagaggatgtcttcactcatgtcaaggaaaacgatatggtccctctgtacgaaaccctagtcgctgattccgtgttggacttggatcgtgcccttttggactctatgcgcgctaaaattgacgacgagctcaccaagctcgacgaaaagattgctgatgccgaggaaaacttaagagagagtgaaattcgtgaggctcatttggcaaaatccttggttttcattcggattatggaca

SEQ ID NO: 275318 - DNA, 393 bp, Glycine max
ggagtaagggcggtgcagtgcttcaaacccctttttctcttctcatttcctttcatcactctcttgcttcttttcttcttctcgcaattttccattttcacacttttagcaacatcttttaatggcgtcccaaatccgtgagtggtctggaatcaatacattcgcacctgctacccagactaagttgcttgaactcttgggaaatcttaaacaagagaatgtgaactccttgactatacttgtgatgggaaaaggaggtgttggaaaatcttcaactgtgaactccatcattggggaaagagtggtttcgattagtcctttccagtcggaagggccaagacctgtgatggtgtcacgatcaagggctggttttacattgaacattattgacac

SEQ ID NO: 275319 - DNA, 408 bp, Glycine max
  unsure (1)..(408): unsure at all n locations
ggagtatcaaatatatagcaagacatagcaagacaagatatgagggagaaaagaaaagggtggtgaatgtgaaaatagagggagcatgtggaatggttgtggtcactattatatatgttgtctcttacgctttgcatgtgactttctttctttctttatatcctttatatattaagtatatgctgcaatatatttaattaaagagagaagtaacatcaaggtgcagagagaggaattgaagcatgggaagagggaaggtggttctggagagaatacagaacaaaatcaatcgccaagtaaccttctcaaagcgcagaaatggtttgctcaagaaagctttcgagctatctgntctatgcgatgctgaaatcgctctcgtcatcttctccaaccgtggcaagctttttc

SEQ ID NO: 275320 - DNA, 430 bp, Glycine max
ggaagaaaggcagagttattgccattgcctctgcctcttgcaacaccaaactgatacacacttaataatattatagtaaaaattagccaccaaagtacactaaccccttttttcatacaactcaatagctggattggagcaaggtgaaagtaaaatcatttgcaaccaatgccgttgaacatatttcaggacaaagatggattgccacggattatattgactgagccaaagggttcatcagctgaggttcttctttatggagggcagattatttcttggaagaatcatcgaaaggaagaacttctttttatgagcagtgaggctaacaagaaacagcataaagcaatcagaggaggaatatcagcttgcctagcacggtttggtgatctcagttcacttgaacaacatggatttgcaagaaacaggatgt

SEQ ID NO: 275321 - DNA, 406 bp, Glycine max
ggagactcgaagtgtgaagcactgagcagttgaggaaatgggaacccttgggagagcgatctacagcgttggtaactggattcgagaaactggacaggccattgatcgtctcggttcccgtcttcagggcggttactacttccaagagcagctctctaggcatcgaactctgatgaacatatttgataaggctcctgttgttgataaggatgtatttgttgcgccaagcgcctccgtcattggagacgttcaacttggaagaggatcatccatttggtatggagttgtcttgagaggtgatgttaacatcatcagagttggaaatggaactaacattcaggacaactctctggtgcatgttgcaaagtcaaatttaagtgggaaggtgttgcctacaattattggg

SEQ ID NO: 275322 - DNA, 399 bp, Glycine max
gatggagcgacgggacaaggaaagacttctcaagattcgaacccttggaaatatccgtttaattggtgagctgttgaagcaaaaaatggttcctgaaaagattgttcatcacattgttcaggagcttttaggacctccagatatcaaggtctgtccagctgaggaaaatgttgaagccatatgtcagtttttcaacacaattggtaagcagcttgatgaaagcccaaaatcacggcgtataaatgatatgtactttatccggttgaaagaattgagcaccaacccccaacttgcaccacggctgcggtttatggttcgtgatgttctagatttgcgttctaataactggattccaagacgtgaagaagtgaaagccaaaaccatcacttgaattcattc

SEQ ID NO: 275323 - DNA, 405 bp, Glycine max
cagtgaaagccacctggagatggtgaaagctggtgagaaatgggcaaaagacacagctggttctttcactcttgtgggtactctcatcactaccatcatgttcgctgcggctttcactgtccccggtggaaaccatcaagaaactggagcacccatcttcttacacgatcacatattcactttgtttatcatagcagatgcaatatctctctttacttcttccacttcagttctgatcttcattgggatcctcacgtcgcgttatgctgagaaggatttcctcaagacactgccgttgaagttactttgtggccttgtgacccttttcttgtcagtggtggcaatgatggtagcattttgtgcttcgcttgctatgatgctgaagggatatcaacgactcataat

SEQ ID NO: 275324 - DNA, 412 bp, Glycine max
gtctgcggatgatggtaaaagtgttgttatgaagggtgtgactcatggtgcttgtgattacttaattaagcctgttcgcattgaggctttgaagaacatatggcagcacgtggttcggaagaggaagaatgagtggaaagacgcggagtaatcagggagtgctgaggaaggagatcggcaaccaagggcttctgacgaagcagattactcttcctcagcgaatgaaggcagttggagaaactcaaagaagagaagggatgaggaagaggaggcagaggatagagatgacacatccacactaaagaagccacgggttgtttggtccgtggagctccatcaacagtttgtggctgctgtggatcaactgggaattgacaaggctgttcctaaaaaaattctggaattgatgaat

SEQ ID NO: 275325 - DNA, 375 bp, Glycine max
gcgagcaggagaaggaacgagcccgcagagaccgtctctaccacatgaaccgctcaaaccctaaccaacagcgccgcgaagccgccgtcttcaaatcctccgtggatatccaacccgagtggaacatgcacgaccagatccccttcagcaccttctccaagctctccttcaccgttcccgaacccgaagacctcctcctctgcggcgccctcgagtattacgaccgcacctacgatcggatcactcccaaaaacgaacgccgcctcgaacgcttcaagaatcggaacttcttcaaagtcaccaccaccgacgaccccgtcattcgcagactcgccaacgaggacaaagccaccgttttcgccaccgacacgattc

SEQ ID NO: 275326 - DNA, 402 bp, Glycine max
gatgcacttgccattgcagcagatattggatacccagttgttgttcgtccttcttatgttttgggtggtcgagcaatggagattgtatatagcgataataaactggtgacttaccttgaaaatgctgttgaggtggatccagaacgccctgtattaattgacaagtatttatctgatgcctgtgagattgatgttgatgcactggctgactcacaaggtaatgtagtcattggtgggataatggagcacattgaacaggctgggatacattctggtgactctgcctgctctattcccaccagaactgttcctgcttcttgcttggagacaatcaagtcgtggacagtaaacttggctaaacaattgaatgtttgtgggctcatgaattgtcagtatgcaata

SEQ ID NO: 275327 - DNA, 350 bp, Glycine max
ggtgagtgtgtgagagagagagcgagcagtttcagacacagagagaggggtttgggattggagggattgacgctgcgtctcttcctcttctctttcgatccatccctcattcctaatcctccaatccaaccacctcagcctcacactcacatatacacatatctgaacgcgtatcgtccctcctatggcttcaaagcgcatcctcaaggagctcaaggacttgcagaaagacccaccaacttcttgcagcgctggtccagtagctgaggacatgttccattggcaagcaacaataatgggtcctgctgatagtccttatgctggaggtgtattcctagtcactattcact

SEQ ID NO: 275328 - DNA, 399 bp, Glycine max
gacggcaaggactaccaggagccggcgccggcgccgctggttgacccgacggagtttacgtcatggtcgttttacagagcagggatagcagagtttgtggccacttttctgtttctctacatcaccgtcttaaccgttatgggagtcgccggggctaagtctaagtgtagtaccgttgggattcaaggaatcgcttgggccttcggtggcatgatcttcgccctcgtttactgcaccgctggcatctcagggggacacataaacccggcggtgacatttgggctgtttttggcgaggaagttgtcgttgcccagggcgattttctacatcgtgatgcaatgcttgggtgctatttgtggcgctggcgtggtgaagggtttcgaggggaaaacaaaatac

SEQ ID NO: 275329 - DNA, 409 bp, Glycine max
ggtggaagtattcgcagaactttgtttcccaatttccattgcctccgcttccacctcgcaaccatgatcatcccggagaagaaccgcaaggagatctgcaaatacctcttccaagagggagtttgcttcgcgaagaaggacttcaatttggccaagcaccctgagatcgacgtgccgaatctgcaggtgattaagctgatgcagagtttcaagtctcgcgagtacgtgagagaaacttttgcttggatgcactattactggttcctcaccaacgatggcatcgagtttctcagaacttaccttaaccttccttccgaaattgtccctgctactttgaagaagcaagccaagccacctggcaggccctttggaggcccatccggtgatcgccctagaggtccaccacgct

SEQ ID NO: 275330 - DNA, 373 bp, Glycine max
ggcgtcggaaggaagagaagatgagtgtgaatttgatggagaaagtgagcgcactgggagagcgcctgaaaatcggaggcgtggaagtggggagaaagatgagcgaggggatgagctccatgagtttcaagctcaaggagttcttccagcctgggcccaatcaggccgacaagcttgtggaggacgctacttccgaggccctggacgagcccgaatgggccctcaatctcgatctctgcgacctcgtcaacaccgacaagctcaactgcgtcgaactcgtccgcggaatcaagaagcggatcattctcaagagccctagggttcagtacctcgcccttgtcctcctcgaaaccctagtcaagaactgcgagaa

SEQ ID NO: 275331 - DNA, 386 bp, Glycine max
gaaagagcaaggaccagagataacaatttgttgggcaaatttgagctatctggcattcctcctgcacccaggggtgttcctcagattacagtgtgctttgacattgatgccaatggtatcttgaatgtctctgccgaagataaaaccactggccagaaaaataagatcactatcaccaatgacaagggtagattgtcaaaggaagatattgagaagatggttcaagaggctgagaagtacaagtctgaggatgaagagcacaagaagaaggttgaggccaaaaacgctttggaaaactatgcatacaacatgaggaacaccgtgaaagatgacaagattggtgagaaacttgacccggctgacaagaagaagattgaggatgccat

SEQ ID NO: 275332 - DNA, 347 bp, Glycine max
ggaagaaaaaaggaagggtaagtaaattgggaatggtggtggtagtgccaggtgtctgtctgaggagaaaatagaataaaaagctatgaaattttggcacaaggtctgattgtagaattgaagaagatgactggggggggtatcactatgcaatcgacgccgggaagctcaggatacttggatttgtatccagagcggaagatgtcctttttcaaaaatccttacattctcggactggctgctgtcgccggcatcggtggtctcctcttcggctacgacactggtgtgatatcaagggttcttttatacattaaagatgattttgaagaagttagaaacagcaatct

SEQ ID NO: 275333 - DNA, 315 bp, Glycine max
aggcagccaaagaaaagaaaatcctcaattttctgagcagccaaacactctctctctgtctctcgaaaattctcagtttgcagagaaaatctgaatcatgtcgtggcaagcgtatgtcgacgatcaccttctgtgtgacatcgaaggtaaccacctcactcacgctgctatcatcggccaagacggcagcgtttgggctcagagtaccgacttccctcagttcaaacctgaggagataactgccatcatgaatgactttaatgagcctggatcacttgctccaactggattggatctcggtggcaccaaatatat

SEQ ID NO: 275334 - DNA, 403 bp, Glycine max
gacagcgaaacagagagtgatttcagtgagtgatcggtgttcacttgatctcatcataatcgtcagcgtcaattgaagaagatgccgatcagaaacatcgccgtcggaaggcctgaagaggcgactcaccccgacacgttgaaggcggctttggctgagttcatctcaaccttcatcttcgtgttcgccggctcaggctccggcatcgcctacaacaagctcaccgacaacggcgctgccacccctgccggcctcatctgcgcctccatcgtccatgcattcgccctcttcgtcgccgtctccgtcggcgccaacatctccggcggccacgtcaaccccgacgtcaccttcggcgccttcgtcggcggcaacatcaccttacttcgcggcatcgtctacgtca

SEQ ID NO: 275335 - DNA, 432 bp, Glycine max
ggtgttaagaaatttaagtgaggagctagagaatgatgatgaagtctgctatgtgtgcagtggtggttgtagcacttcttcttctggcggaggtggggcccatggctgaggctgtgacatgcaccccaacagagttgagtccgtgtcttccagcaatcacttccggtgctaaaccttccaatgcttgttgcacgaagctgaagcagcaaaaaccatgcttatgtggctacctcaaaaacgctagcttgaagcagtatgttaactctcctaatgcccgaaaaaccgttgcttcttgtgggattccctttccaacttgttaattaattaagccttcttataattaaagtgtgggatatatatatatatataaattaaacttatatttattatttactctatatatgtcactctacggttgtgtgatatattata

SEQ ID NO: 275336 - DNA, 413 bp, Glycine max
gagctgaaatcgagaagaagaagaagaagaggatggagaagtatcagatctggagcaggagaatagcgttggcagcgtttgcgtttgctctgctgttccaatcggcctcagcagacgacgtcgttgtgctctctgaagataacttcgagaaggaagttggtcaggacagaggagctctcgttgagttctatgctccttggtgtggacactgcaaaaagcttgctccagaatatgaaaagcttggtagcagcttcaagaaagccaaatctgttttaattggcaaggttgactgtgatgagcataagagtttgtgcagcaagtatggagtctctgggtacccaacaattcagtggtttccaaaaggatctcttgaagccaaaaagtatgaagggccacgcactgctgaatcactt

SEQ ID NO: 275337 - DNA, 401 bp, Glycine max
ggtagagaaagagagagaaagatgtcgaagcgtggtcgtggtggttcggcggggaacaagttccgcatgtcgctgggtcttccagtggcggcgacggtgaactgcgccgacaacacgggggcgaagaacctctacatcatttcggtgaaagggatcaaaggccgtttgaaccgtcttccctcggcctgcgttggcgacatggtggtggccaccgtgaagaagggaaaacctgatctgaggaagaaggtcttgccagctgtcatcgttcgccagcgcaagccatggcgccgaaaggacggcgtctacatgtacttcgaagataatgctggtgttattgtcaatcccaagggagaaatgaaaggttctgctatcactggtcccattggaaaagagtgtgctga

SEQ ID NO: 275338 - DNA, 351 bp, Glycine max
ggcttcgaaagagagagaaagatgacgaggcgtgggcatggtgactcggcggagagacaagttccgcatgtcgctgggtcttccagtggcggcaactgagaactgcccagaaaacacttgggctaagaacctctacatcatatctgtgaaacggatcataggccatcttaatcgtctaaccttggcctgcgttggtcatatggtgtgtgtcctccgtgaacaaggtacaacctcgatccgatgatgatcgtcttgccagctgtcatactttctccgcgcatgtcatggcacacaatggaccgcgtgttcatgtactttgactataatgctgtagatattgccaatcccata

SEQ ID NO: 275339 - DNA, 418 bp, Glycine max
  unsure (1)..(418): unsure at all n locations
ggttctagtgtgtgattgtttgttgttgtaactcgttcttcttcttttgttgttctgtgtttgtgtttgttttttctctcacctgaaaatgtcttgctgcggtggtaactgtggttgcggaagctcctgcaagtgcggcaacggctgcggaggctgcaagatgtacccagacttgagctacactgagtcaaccaccaccgagaccttggtcatgggagtggcacctgttaaggctcaatttgagggtgctgaaatgggtgtgcccgctgagaacgatggctgcaaatgtggaccaaactgctcctgcaacccctgcacttgcaagtgaagtgttgggagagcaagcttcaagcagagatagcccttaattaagaataatgantaactattaatgtgtagctaaaaacttaatgattat

SEQ ID NO: 275340 - DNA, 375 bp, Glycine max
ggagcaagagtgaacagcgaagagaatggctcccaagggtttaatctttttggctgtgttatgcttctcagcactgtcactgagtcgttgtcttgcggaggataatggacttgttatgaacttctacaaggaatcatgccctcaggctgaagacatcatcacagaacaagtcaagcttctctacaagcgccacaagaacactgctttctcctggctcagaaacatcttccatgactgtgctgttcagagttgtgatgcttcactgttgctggactccacaagaaggagcttgtctgagaaggaaacagatagaagctttgggttgagaaatttcaggtacattgagaccatcaaagaagctttggaaagggaatg

SEQ ID NO: 275341 - DNA, 363 bp, Glycine max
aacatgattgagaggtccacaaaccttgactggtacaagggtcctactctgctagatgcacttgaccagatctctgagcccaagaggccttctgacaagcccctcaggctaccccttcaggatgtgtacaagattggaggaattggaactgtgcctgtgggacgggttgagactggtgtcttgaagcctggaatggtggtgacttttgcaccaactggactgacaaccgaagttaagtctgtggaaatgcaccatgaagctctcacagaggctcttcccggtgataatgttggattcaatgttaagaatgctgctgttaaagatctcaagcgtggttatgttgcctcgaactcaaaggatgat

SEQ ID NO: 275342 - DNA, 400 bp, Glycine max
ggaagctaaagtcaacaacacatagcagaggatagatagtttgttcgttgcgttgccatgtcggcgtcggagattgttcgggaactggattcgctgaaggacgaaaagaccataattgagcagaaaatctctgcgcttgaagctcaactcagagagattaatctccaaaacgacgccgcaccacccaacggattgacgcaggacatgattcacagatacagtcgccaccttgtgcttgcttcctttggtgttcaagggcaggcaaatctgttgaagtcttcaattttagttgtgggagctggagggttgggtgctcctgcattgttatactttgcagcttctggtgttgggcgcttgggagttattgatcatgacgtggatgagctgaataatatgcacc

SEQ ID NO: 275343 - DNA, 274 bp, Glycine max
ggagcaagagtgaagagcgaagagaatggctcccaagggtttaatctttttggctgtgttatgcttctcagcactgtcactgagtcgttgtcttgcggaggataatggacttgttatgaacttctacaaggaatcatgccctcaggctgaagacatcatcaaagaacaagtcaagcttctctacaagcgccacaagaacactgctttctcctggctcagaaacatcttccatgactgtgctgttcagagttgtgatgcttcactgtttgtggac

SEQ ID NO: 275344 - DNA, 345 bp, Glycine max
  unsure (1)..(345): unsure at all n locations
cccactcacagatgccagaagacgacagatggggtnaacaactgggttacaagagcatactgccacaaggctcttcgtctctcagctgctactcaggatttaccaaagtctgtaatttgcaatgttcatggtgtgaatcccatattctcgaaaattggagaaaagattgctgcagagagggagctagggcagaaagcctttacaaaaggggcgtatttcttgagaaagatggtgtgggcaaagggatacaaggagttgatagatttattagcaaagcacaaggctgaccttgatggcttcaagatggatgtatttggaaatggagaggatgctaatgaagtacat

SEQ ID NO: 275345 - DNA, 322 bp, Glycine max
ggaggtagcttagaaaatcgttgtcggtgtccactaatggttgtgaaggctgtatgtgatgacattggagctgacaaagttggtgttaggctatcccctttcgccaattattgtaattgtgtagactctaatcctcaagcgttaggcatttacatggcacaatccttgagccaattgggcattctttattgccatgtcattgagcccaggatgctcacaatgtttgaaaaacatgagacagacgtgtcccttttgcctattcgaaaggccttcaacggaacatttattgttgctggtggctacaacaggagtgagggaaaca

SEQ ID NO: 275346 - DNA, 325 bp, Glycine max
gatagcgaagacagagagtggtttcagtgagtgatcggtgttcacttgatccttcataagtcgtcatcatcatcatcatcatcaccgttgattgaagaagatgccgatcagaaacatcgccatcggaaggcctgaagaggctactcaccccgacacgttgaaggcggggttggctgagttcatctccaccttgatcttcgtgttcgccggttcaggttccggcatcgcctacaacaagctcaccgacaacggcgccgccactcccgacggcctcatcttcgcttccaatcgccatgctttcgccctcttcgtcggcgtctccgtc

SEQ ID NO: 275347 - DNA, 385 bp, Glycine max
ggcacaaaaatacaatacaaaacaaaacagagcaaagagagagtgtgtgaaaagtgaaacaaaaaacagaacaacaatggcgacacttaaggttcctcagcctcttccccccgttgcagatgattgtgagcagctccgaaaagccttctcaggttggggaactaacgaggagctgattgtatcgatcttggctcataggaatgctgctcagaggaagcttatcagagaaacttatgcccagacctatagagaagatctcctcaaggccttggacaaagaactcacgagtgattttgagaggctggttcatctttggacacttgattctgctgaacgtgatgcatttttggcaaacgaggcgactaaaaaatggacttcaagcaat

SEQ ID NO: 275348 - DNA, 423 bp, Glycine max
ggaacacaactgtgttgtagttgttgttgttgatgtttgctttgttctctttctctctctctctagggtttcaagagtgttttgaactactccagaaccctctcttgtttttcacaaatttgggttcagtagagtactgacccagaaaagaagattcaacaggtacctaagagaaggaaagagggggatagaaagaaagaaaaagaaatagaaactgcacgtataaaagaagaaagaaagaatcaaagaaaataggaaaaagggcaaatattttgtttgaataagatataaggcaatagtaatattagtattgttgataataattaggtagaaaaaatattatggggaggggaagagtggaactgaaaaggatagagaacaagataaacaggcaggtaacgtttgcaaagaggagaaatgggc

SEQ ID NO: 275349 - DNA, 251 bp, Glycine max
caagagaatggctcgcgcgggcttaatcttttttgctgtgttattcctttaacacacccacttctgcaatttgcattgttcatagtatgaattgttatgaacttctacaaggaatcatgccctcaggctgaagacatcatcaaagaacaagttaagcttctctacaaacgccacaagaacactgctttctcctgactcaaacacatcttccataaatgtactagccaaacacaaggctcaccactattgct

SEQ ID NO: 275350 - DNA, 322 bp, Glycine max
ttcggatgagacaacacaagggggagcaagagtgaatagcgaagagaatggctccgaagggtttaatctttttggctgtgttatgcttctcagcactgtcactgagtcgttgtcttgcggaggataatggacttgttatgaacttctacaaggaatcatgccctcaggctgaagacatcatcaaagaacaagtcaagcttctctacaagcgccacaagaacactgctttctcctggctcagaaacatcttccatgactgtgctgttcagagttgtgatgcttcacttgtgctggactccacaagaaagagcttgtctgagaa

SEQ ID NO: 275351 - DNA, 423 bp, Glycine max
taccggttgcaaaggacaccagagggggaggccattgttaatatagttatggagttgtccaaaggaggggaattgctagataggattctttccaggggtggaaagtcctcagaagaggatgccagagtagttatgatccacatattgagtgtggtagctttttgtcatctgcagggtgttgttcaccgtgatctcaagccagagaattttcttttcacttctaaggatgacaagtccacgctgaaggccattgattttgggttgtctgactatgtaaagccagatgagaggttgaatgatattgtgggaagtgcttattatgtagctccagaagttttgcatagatcttatgggacagaggcagatatgtggagcattggtgtaattgcttatattcttttatgcggaagccgtcccttttgg

SEQ ID NO: 275352 - DNA, 374 bp, Glycine max
gataacaaaacagaacaaatattatcaaaaggggcagactttgaaaccaaaatcagattttattttttatttttttgctgaatctgaatagatcagaaggtgatgtcgtgttcgtcgtcatctgggtcggaggaagacgatgagggattcgactcttaccggaaaggaggctaccacgccgtcagagtcgccgatcagttcgccgccggcaggtacatagcgcagagaaagttgggttggggtcagttttccaccgtgtggctcgcttacgatactaaaactgagtcatatgttgctctcaagatccaaaaaagttcggcccaaattgctcaggctgcccttcatgagatcaatcttctttcatccattgctga

SEQ ID NO: 275353 - DNA, 369 bp, Glycine max
ggggattggttttggattaagctgtagagttgctgcacttgatccaaacttcaagaagctctcaatggagcacatagtttcagcttacaagcggacggcaactagagcaatccttgttgactatgatggtacactaatgcctcaatcattcaccattgataagagttcaagcagtaaatccattgaaattcttagtagtttgtgtagagataagaacaacatggttttccttgttagtgctagaagccgaaagatgctttccgaatggttctctccttgtgagaatctgggagtcgcaactgagcatgggtactttctaagaatgaaacgagatgaagagtgggaaacacatgttgcagcagcagacac

SEQ ID NO: 275354 - DNA, 419 bp, Glycine max
gaatttaatttgattttgcagcgacgagaccacagtccacaagacccagaagcaccaccgcgaccggcgaatccagccaccgtgtgcggcttcgaattgagtccgagaacgcagttagacaggctttatattgaaacttgagacttgaagggaagctgttataattggtcagtcttcccatggcgtatcccttctcagatttcaagtactcagatggcctcactgtagtgggtatctccttctgcacagctattgtctgtgaggctatctcatgggttcttatctatcggaccaattcttacaaaaaccttaggtcctccattgacaaagcctccaagaaactcgagaccatgaagacagacagcaatgaaatcaacatcaagaagttcaagaccaaaaaaattgaccgtgttgagaca

SEQ ID NO: 275355 - DNA, 305 bp, Glycine max
ggattgtgatggcggatgaagggggaattgagaagcggcgctacgatgtttttctgcgttttagaggggaagacacgcgctacaccttcacaggtaatctctatgctgctttgcggcaggcgagattgaggaccttcttcgatgatgggttcaagagtggcgaccaaatctttgacgttgttcttcaagcaattcaggaatcaaggatttcaatcggtgttctctacgaaaacttcgcttcttactcgtggtgccttgaagaacttgtgaagatccttgagtgcaaggaaacaaagaagcaactc

SEQ ID NO: 275356 - DNA, 415 bp, Glycine max
  unsure (1)..(415): unsure at all n locations
gggcaacaaacaggcttctgaccgtggttcaccctattaacaaacttctgtttcctcactatcgtgacaccatgaacattaattcacttgcccgcanatccttggtcaatgccgacggtattatagagaaaacattcttgtggggtaggtactctttggaaatgtctgctgttatttacaaggattgggttttcaccgatcaagcattgcctaatgatcttgtcaagagaggagttgctgttaaggatccatctgctccccatggagttcgacttttgatcgaggactatccttatgcttctgatgggctagagatatgggatgctatcaagtcttgggtggaagaatatgtctcattctactacaagtcaaatgaggaacttcaaaaagaccccgaactccaagcttggtggaa

SEQ ID NO: 275357 - DNA, 395 bp, Glycine max
ggaagaagaaaggtcatggggaattcagggaagtaaccgagggtgatttcttaggtgaagtcactggaagtgaaaaagtgatttgtcacttctaccatagggagttctatagatgcaagataatggataagcatttaaagtctcttgcaccaatgcatattgatacgaagttcatcaagcttgatgcagagaatgcaccattctttgttacaaaactggctatcaagactttgccttgtgtcttgttgttcagacaaggagtagcagtagatagattggtaggatttcaagatgtgggaggtaaagatgattttaccacaagaacgctggaagctcttctgataaagaaaggtataattgaggagaagaaagctgaggatgatgaagatgatgaa

SEQ ID NO: 275358 - DNA, 256 bp, Glycine max
gaccaacacaaacaatagtgcatagcgtttttcattgtgcattattcaatggccaccacagcagctctatccggaaccatggtgagcacctccttcatgaggaagcaacctatgacgaccaagagcctaaagacattccccaacgctctttttggtctgaaaggtggacgaggtggtcgtgtaacttgcatggcctcgtacaaggtgaagctcataaccccagaaggagaagtggagtttgaatgcccagatgatg

SEQ ID NO: 275359 - DNA, 406 bp, Glycine max
ggcacaagtgagtttgttgatcgagataactagaaacagtgtgatgaaaatgaaggtccttgttttcttcgttgctacaattttggtagcatggcaatgccatgcgtacgatatgttccctctccgaatgaacactggctatggtgcccgtactccggaggtgaaatgcgcaagttggaggcttgctgtggaagcacacaacatctttggctttgagaccattcctgaagagtgcgttgaagcaacaaaggaatacatccatggcgaacaatatagatcagactccaaaacagttaaccaacaagcttacttttatgccatagacctcgaagtccatcctcaggacacatatgtgttcagtatagatggcaccgtactctctaatatttcatactacaaaaacatg

SEQ ID NO: 275360 - DNA, 393 bp, Glycine max
caaacaggctttggaccgtggttaaccctattaacaaacttctgtttcctaactatcgggacaccatgaacattaattcacttgcccgcaaatccttggtcaatgccgacggtattatagagaaaacattcttgtggggtaggtactctttggaaatgtctgctgttatttacaaggattgggttttcaccgatcaagcattgcctaatgatcttgtcaagagaggagttgctgttaaggatccatctgctccccatggagttcgacttttgatcgaggactatccttatgcttctgatgggctagagatatgggatgctatcaagtcttgggtggaagaatatgtctcatcctactacaagtcagatgaggaacttcaaaaagaccccgaac

SEQ ID NO: 275361 - DNA, 406 bp, Glycine max
ggtacaggtgagtttgttgatcgagataactaggaacagggtgatgaaaatgaaggtccttgtattgttcgttgctacaattttggtagcatggcaatgccatgcgtacaatatgttacctctccgaatgaacactgtctatggtgtccgtactacggaggtgaaatgcacaagttggacgcttgctgtggaaacacacaacatctttggctttgagaccattcctgaagagtgcgttgaagcaacaaacgaatacatccatggcgaacaatatagatcagactgcaaaacagttaaccaacaagcttacttttatgccacagacctcgaagtgcattccaaggacacatttgtgttcaaaataagacgcaccgtactctctaatattgcatactacaaaaaacat

SEQ ID NO: 275362 - DNA, 335 bp, Glycine max
gatagaaaggggagggacatatttgacaggtcagcaaccgcgttcttttctacggagcctcgaccaagaagaatcgcagtgagaagaagagggggtcagagtgagaaagagaaagagagaattcgtaaaccctaatttcggaaagatcggcgatgactgcctccaaggatcgcgagaacttcgtctacatcgccaaactcgccgagcaggccgagcgttacgaagagatggtggaatcaatgaagaacgttgcgaatctcgacgttgaactgacggtggaggagcggaatttgctttctgttgggtacaagaatgtgattggtgctcgcagagcg

SEQ ID NO: 275363 - DNA, 417 bp, Glycine max
ggttctagtgtgtgattgtttgttgttggaactcgttcttcttcttttgttggtctgcgtttgtgtttgttttttctctcacctgaaaatgtcttgctgcggcggtaactgtggttgcggaagctcctgcaagtgcggcaacggctgcggaggctgcaagatgtacccagacttgagctacactgagtcaaccaccaccgagaccttggtcatgggagtggcacctgttaaggctcaatttgagggtgctgaaatgggtgtgcccgctgagaacgatggctgcaaatgtggaccaaactgctcctgcaacccctgcacttgcaagtgaggtgttgggagagcaagcttcaagcagagatagcccttaataggaataatgataaactattaatgcgtagctcaaaacttatgtattat

SEQ ID NO: 275364 - DNA, 414 bp, Glycine max
gagggaagcacaaccaagcttctctgttaaaaaaaaattaggcgtctaaagggccaaagcttagaaagttgaagctttttttgttgaggtgaaagtgaaatggttggcaaggataatctgagggctgaggacttgaacttgtgctttaagaagcttatgatggtggccgggagtgggaacagtgagaaaggggtgaacttgaaggttggggtgatcaccgagtggaaggatattcctgtggagcttctgatgcaaattctgtcccttgtggatgatcagacggtgatcatagcttctggagtttgtcgtggatggagagatgctatttactttggccttgctcgtttatcactctcatggtgtagcaagaacatgaataacttggtcctatctcttgttcctaaattcgcaaaa

SEQ ID NO: 275365 - DNA, 411 bp, Glycine max
gggtggagagcaagagctataagtgtgagaagtgattggaagttgttggaacccaccctatcaacaaggagaagctgttttcgttcgtcgccactaacactaatcgtttcttcaatgccttacgagaaggaactcgccgctgcaaagaaagcagtcactctcgctgctcgtctctgccagaaggttcagaaggctcttctgcaatccgatgtgcactcaaagtcagacaaaagtcctgtcacagtggctgattatggttcacaagcattggtcagctttatacttgagagagaacttccttctgaatcattttcattagtagctgaggaggattcaagtgatcttcgtaaggaaagtggccaggatactctgaatcgcattacagaacttgtcaatgatactcttgctagt

SEQ ID NO: 275366 - DNA, 398 bp, Glycine max
ggtggctggctgtagtagtgctttgctgtccgagagtaaagagtaagcctctttctcactctctaatctatttgtgaactaggttttggttgcagagacatgggagaaaggattccgtgtgggagtggcatgtatttccccttccctcctccgccatctcccattcgcccttcttcttcttcttcagatcgcgataggtatttggccgaactactcgctgagaggcaaaagttggtaccctttctccaagttcttccacaatctaccaaactcctaacccaagaaatcagacgcatgtccgttggtggcggcggcggcggcggcggctttaatcatgagcctgcagcagacactcctcctccatattttaggcctatggatctcgagggatgggcaat

SEQ ID NO: 275367 - DNA, 345 bp, Glycine max
gacggctaaaagctaaagatcatcgaagtactcgaatgagcatggctgtcacggttgcattcttgaatttgatcatcatgttttcagtagtctctacaagcaagtcactgagcttaaactactattcaaaaacatgccctgatgtggaatgcattgatgccaaggcagtgaaggatgccactgctagggacaaaactgttccagctgcacttctgcgaatgcacttccatgactggttcgttcgggggtgtgacgcctctaggctgctaaattcaaaaggaagcagcatagcagaaaaagatcggccaccaaatgtttctttgcatgcattctatgtcattgatg

SEQ ID NO: 275368 - DNA, 408 bp, Glycine max
ggttctagtgtgtgattgtttgttgttgtaactcgttcttcttcttttgttgttctgtgtttgtgtttgttttttctctcacctgaaaatgtcttgctgcggtggtaactgtggttgcggaagctcctgcaagtgcggcaacggctgcggaggctgcaagatgtacccagacttgagctacactgagtcaaccaccaccgagaccttggtcatgggagtggcacctgttaaggctcaatttgagggtgctgaaatgggtgtgcccgctgagaacgatggctgcaaatgtggaccaaactgctcctgcaacccctgcacttgcaagtgaggtgttgggagagcaagcttcaagcagagatagcccttaattaggaataatgataaactattaatgtgtagcttaaaact

SEQ ID NO: 275369 - DNA, 359 bp, Glycine max
ggaagaagaaggttggttgattggtcccgttgagtccgaagagaaaagaaaagatgtttgagccacaacagctatacactcgcgcgaagaccgatgaattcgacctcgaatcaggagaaaccctctacccagggctgagcgtcggcgagaaccagctccgatggggtttcatccgcaaggtctacggcatcctctccgcgcagatcgtcctcaccaccctcgtctccgtcaccaccgttttctatactccaatcaatgaccttctcaagggcaattccaccctcctcctcatcctccttttccttcccttcatctttttgattcccctgttgaagtaccagcagaagcattctcataat

SEQ ID NO: 275370 - DNA, 358 bp, Glycine max
  unsure (1)..(358): unsure at all n locations
gtaacatggttaggtggttatagtaaacgcataccttgggcttctcgtccattccccttttttttgttagttgacaaatagatacctttttcccccgttcgtaatgatgcgcatcctgtaactcttgccgtccattgaattcaattgccttcttggcggtgctattttgatacaaggaaaataacactcgctgaaaagaaaaaaaaaaaaaaaaaaaaaaaaaaaaaaaaaaaaaaaaaaaaaaaaaaaaaaaaaaaaaaaaaaaaaaaaaaaaaaaaaaaaaaaaaaaaaaaaaaaattttttnnnaaaaaaaaaaaaaaaaaaaaaaaagggggccctttaaagggccccaatttt

SEQ ID NO: 275371 - DNA, 368 bp, Glycine max
ggggaaagtgggctgctgagattcgcgacccaagaaagggggttcgtgtttggcttggaactttcagcactgctgaagaagctgcaagagcttacgatgctgaagcaaggaggatccgtggcaagaaagccaaggtgaatttccctgatgagccttcaggcgctgcttcctcaaaacgtctcaaggcgaatccagaggctcagccaatgaagaaaaatctgaactctgtgaagccgaaaataaaccagatgttcaattttggtgacaatcttgagggctactacagccctatagatcaggtggaacagaaaccactggttaaccagtatgttaaccgtgccccgtttgctggaaatggagttcaagtc

SEQ ID NO: 275372 - DNA, 416 bp, Glycine max
ggaaacaagagggaaagccttatgacaaacccaacattgtcactggagccaacgttcaggtttgctgggagaaatttgcaaggtactttgaggtggagttaaaggaggtgaagctccgtgatgattattatgtaatggaccctgaaaaggccgtggaattggtggatgagaacactatttgtgttgctgctatccttggttccacactaaatggagagtttgaagatgtcaaacgcttaaatgatctcctaattgaaaagaacaaaataactgggtgggacactcctattcatgttgatgcagccagcggtgggttcatagccccatttatttacccagagcttgagtgggacttccggttacaactagtgaagagcatcaatgttagtgggcacaagtatgggttggtctatgct

SEQ ID NO: 275373 - DNA, 416 bp, Glycine max
accggttgcaagaggccaacagaggggggccggcaaaataaagagtcctaatgagaagttgagtggtcctcttgatgagattgtcaagaggagaatggaagacaagaatagaacttcaaagaatttcttgtcactcattttgaatgcaagagaatcaaagaaagtatctgaaaatgtcttttcacctgattacattagcgctgttacttatgagcacttacttgctgggtcagctaccacagcctttaccttgtcatccattgtctacttggttgctggacaccgagaggttgagaaaaagttgcttcaagagattgatggatttggtccacctgataggattcccacagctcaagatcttcatgacaagtttccttatcttgatcaggtgattaaagaggccatgaggttttaca

SEQ ID NO: 275374 - DNA, 422 bp, Glycine max
ggccggcaccaaagaaaaattcaaatttctcaaatctatccgacgtcgtcgcagatccaccaaccgttatggctgccttcagcggtgatgaaacggctccgtttttcggcttccttggagccgcagctgccctcgtcttctcctgtatgggagctgcctatggcacagcaaagagtggtgtgggcgtggcttccatgggtgtgatgagacctgagctggtgatgaagtctattgtccctgttgtcatggctggagttttgggtatttatggccttattattgctggtattatcagtaccggtattaatccaaaggccaaatcttattacctctttgatggttatgcacatctctcctctggtcttgcctgtggcttggctggcctttctgctggcatggctattggtattgtcggtgatgct

SEQ ID NO: 275375 - DNA, 296 bp, Glycine max
ttggagaagaccacaaaagggggagggggaaagaaaaaccaaccaacccttgttgggggtgaacggaccccccaaggtcgatcctacttgaaggggaataaggcccaatttgcatgaattgaaatcggcggaaatgggagctagtcgaaagcttcagggcgagattgatcgtgttctcaagaaagttcaggaaggcgtcgaagtcttcgatagcatctggaacaaggtttacgacactcgatatgccaaccagaaggagaagttcgaggccgacctgaagaaggagattaagaagc

SEQ ID NO: 275376 - DNA, 394 bp, Glycine max
ggggtaagagattctctttctttgagttgcgtgtgcaaagaaaagtggtctataaaaatctgctctcagtcccacttcccaattcattttcattccacgagatatggcttcaactctgcttcccctggcaaccttcttcttagttctctccgcttcttatctccagattgctggggcgaaagcacaaccgttgactagtctcaagcttaactctccgatccttcaggagtctattgctaaagagatcaatgaaaatcctgaggcaggatgggaggctgctataaatcctcatttctccaattatacagttgaacaatttaagcgccttcttggagtcaaaccaacgcctaagaaggaactgagaagtacacctgctatatctcacccaaagtca

SEQ ID NO: 275377 - DNA, 391 bp, Glycine max
gggagcagaggacaagatgggtagtgtgagttatagcaatctgaagaacgccatgatagcattcttggtccctctaccctccatcctattctacctctcattccaatcggccattagtactccttcttcttggtcttctctgtggacatggtgctatcaccaccctctgctattggccaatgtccttttcttcttcaatgtcaatttcctcttctggctcatcggcctaatccaatccagccactggatgattgacccgtattggacagtgatacctgtgatgcttgttcattactattcaactcaccctttggcacagtatcagtggtggaagtcgaggaatcgaacgttgttgacttgggcgtggagtggtaagctgatccacaactac

SEQ ID NO: 275378 - DNA, 405 bp, Glycine max
gtaaccagagagaaacagccagatatgaatgacaaaaagctaattcaaacattatggttcaagccaaatgcattggatgaaccagtttctgcagttttaggacaaaacagttggctctatcttagcattatcatctcatcctcctttatgttattccttctacttattgccatcctaactagatattacatatatccaattgaccataatactgacatgatatacccttatttctcaaggtccagtctaagcatgttattcatatgcatatctatagcctttgtagcaacatctgctttcctatggaacaagaaacagaacaaggatttggggcagattaaaaacatttacacatccaattcatcaacttctccgggttcaggatactacaatgctgacagagaa

SEQ ID NO: 275379 - DNA, 267 bp, Glycine max
ggcaagtgtgagtgatatttgagcttaaaccctagccgctcttctcttcattcttcactttggaaacaatcataatggcgttctgtaataaggttggaaatgtcttgaggcagggtgctgctcgcagcacacatgcccctgttgcgtccatgcttaattacatccgctgcatgtcttcaagcaagcttttcattggaggcctttcatatggagttgatgaccagtctcttaaggatgcattttctggctttggagatgtggttgatg

SEQ ID NO: 275380 - DNA, 432 bp, Glycine max
aaaagaacaacaaagggggaattaaaacccgtgaagcataccattgccccataccaccaagtcatgaaaaattggcctagggacaacatgagcagattagcacttcatgggaaatcagaattcaagaatcaagtctttggaccagagtcactcgagttcgatcacatgggtcgtggcccctacactggtttagccgatggacgcgttgttcgatggatgggggagcaacttggttgggaaacatttgcagttgtcacatctaattggacggagaagctttgctttaggggcaatgattcgaccactgcgaagcaatggaagcatgagaaaacatgtgggcgtcccctaggcctaagatttgacaaagtgaatggagatctatacatagcagacgcatactatggacttcttgtggttggacctaatggggga

SEQ ID NO: 275381 - DNA, 332 bp, Glycine max
ggcagcatcgtagagaaataagggaaaaatggtgtcgctgaaactgcagaagcgcctctccgcaagcgtgctcaagtgcggcagaggaaaggtttggcttgaccccaatgaagtcaacgaaatctccatggccaattctcggcaaaacatcaggaagttggttaaggatgggtttatcatcaggaagccaaccaagattcactcccgctcacgtgctcgtaggatgaaggaggcaaagaggaagggccgccactccggttatggtaaacgtaagggtacaagggaggcaaggcttcccaccaagatactctggatgaagaagatgcgtgtgc

SEQ ID NO: 275382 - DNA, 367 bp, Glycine max
gcgtacgcccacgcatactacatctgcgagatttcttcttaaggggaaggagcaacatattggcgttgtctataatctaggttatcgcgacgagaatatgaagttgtttgatatctttgatgctgcagtagatttggtagcatggccatgccatggcgcatgctaccaaaggttccctctccgaatgaaaactggctatggtgagcgttcttcggaggtaaaatgcgcaagttttaggcttgctgtggaagcacacaacattcgagcctttaaaaccattcctgaagagtgcgttgtaccaacaaaggacttcattaatggctaacaatttagatcatacattaaaacagcttaaccaacaagcttt

SEQ ID NO: 275383 - DNA, 411 bp, Glycine max
taaaagacctggattgctaaaagctaaaaatcatcgaagtgctggaattatcatggctgtcacggttgcattcttgaatttgatcatcatgttttcagtagtctctacaagcaagtcactgagcttaaactactattcaaaaacatgccctgatgtggaatgcattgttgccaaggcagtgaaggatgccactgctagggacaaaactgttccagctgcacttctgcgaatgcacttccatgactgtttcgttcgggggtgtgatgcctctgtgctgctaaattcaaaaggaagcaacaaagcaaaaaaagatgggccaccaaatgtttctttgcatgcattctatgtcattgatgcagcgaaaaaagcactagaagcttcatgcccaggtgtggtctcttgtgctgacat

SEQ ID NO: 275384 - DNA, 402 bp, Glycine max
gacggctaaaagctaaatatcatcaaagtactcaaattagcatggctgtcatggttgcattcttgaatttgatcatcatcttttcagtagtctctacaacaggcaagtcactgagcttaaactactatgcaaaaacatgccctaatgtggagttcattgttgccaaggcagtaaaggatgccactgctagggacaaaactgttccagcagcaattctgcgaatgcacttccatgattgtttcgttcgggggtgtgatgcctctgtgctgctaaattcaaaaggaaacaacaaagcagaaaaagacgggccaccaaatgtttctttgcatgcattctatgtcattgatgcagcaaagaaagcactagaagcttcatgccctggtgtggtctcttgtgctgaca

SEQ ID NO: 275385 - DNA, 369 bp, Glycine max
ggggaggaagttgaaaagttggttacacaacttccagaaggtggtgttttgcttctagagaatgtgaggttctacaaggaggaagagaagaatgatcctgaatttgcaaagaagttggcttctctagctgatctctatgtgaatgatgcatttggcactgcccacagagctcatgcttctacagaaggagttgccaaatacttgaagccctctgttgcaggattcctaatgcagaaagagcttgattatctagttggggctgtgtcaaaccccaagagaccatttgctgctattgtcggtggatcgaaggtgtcttccaagattggagttattgaatcctttgtggagaaaggtaatgttctcttgctt

SEQ ID NO: 275386 - DNA, 403 bp, Glycine max
gtctacaaaattggtggtattggtaccgtgccagtgggacgtgttgagactggtgtcgtgaagcccggtatggtggtgacttttggtcccactgggctgacaactgaggttaagtctgttgagatgcaccatgaggctctcacagaggctcttccaggtgacaatgttggctttaatgtgaagaatgttgcagtcaaggatctcaagcgtggttttgttgcatccaactccaaggatgaccctgccaaggaagctgccaacttcacatctcaagtcattatcatgaaccaccctggccagattggaaatggatacgcaccggtgcttgattgccacacttctcacattgctgtcaagttttctgaaatcttgaccaagattgacaggcgatctggtaaggagc

SEQ ID NO: 275387 - DNA, 340 bp, Glycine max
ggttgctcagtggatgcttcaagcaccaggtgccacaagtgacagaggttgcataggaaaggacaaatttggagaggagatgaagaagaaatgtacacttgatggtgtaaaggttaactattatgaaatcgacaatacacctactggaacttgtgctgtttgtgtggttggcggtgaaaggtcccttgttgccaacttatcagctgcaaattgctataagtctgagcatttgacgagaccggaaaattgtgcattagttgaaaaggccaagtatttctacatttctgggctttttcctcactgaatctcctgattccatacaattagttgctgaacatgc

SEQ ID NO: 275388 - DNA, 349 bp, Glycine max
ggacgatgaagtagcagtgctgccgttgaaatctatacaaatcacaaaaactgggatgtataacttgtatttcatccattgcgatacgaggcttaaagaattggttgttgaagggaaaactgtatggaaaaatccctctggttatctacctggtagaatggcgcctatgaaagttttctaccaattcatgtcttttgcgtatgtactgcttgggatcttttggttctctcaatatgctagattttggaaggaagtatttcccctgcagaactgcattaccgcagtgataaccctaggcatgtttgagatggctctgtggtactttgactatgctgaattcagtgagact

SEQ ID NO: 275389 - DNA, 286 bp, Glycine max
gactcgcagttgtattgttgagcaagggtttctctgtctgcttcgttcactttctctcgtttcaatcgaaaccaaaacaaacgcatgggcagaaaattcttcgtcggtggcaactggaaatgcaatgggaccactgaggaggtgaagaagattgttactactttgaatgaggctaaagtccctggagaagatgtcgtacaagttgttgcgagccctacttttgtgttccttactgctgtaaaaagcttgctgcgccctgatttacatgtttcggcacataactgtt

SEQ ID NO: 275390 - DNA, 374 bp, Glycine max
ggagtgagtagtgagaatggagtttcaagggttaccggaaggttgcattgctagtatactctctcgcactacgccggcggacgtgtgtaggttttccgtcgtatcaaagattttccgttcggccgctgaatcggacgctgtgtggaaacgttttctcccttccgattaccattccatcatttcccagtctccttcgcctctcaactatccttccaagaaggagctctatctcgctctctcggatcgccctatcatcatcgatcagggtaaaaagagctttcaattggagaaaaagagtgggaagaagtgttacatgcttgctgctagagctctcagcattatttggggtgacactgagcaatactggaactgga

SEQ ID NO: 275391 - DNA, 327 bp, Glycine max; identical to SEQ ID NO: 274047

SEQ ID NO: 275392 - DNA, 333 bp, Glycine max
gactcgcagttgtattgttgaacaagggtttctctgtctgcttcttcactttctctcgtttcaatcgaaaccaaaacaaaaacatgggcagaaaattcttcgtcggtggcaactggaaatgcaatgggaccactgaggaggtaaagaagattgttactactttgaatgaggctaaagtccctggagaagatgtcgtagaagttgttgtgagccctccttttgtgttccttcctgttgtaaaaagtttgctgcgccctgatttccatgtttcggcacaaaactgttgggttcgcaaaggtggtgcttataccggtgaggttagtgctgaaatgc

SEQ ID NO: 275393 - DNA, 309 bp, Glycine max
ttggggcagttgtattgttgaacaggggtgggtctgtctgcttcttcactttctctcgtttcaatcgaaaccaaaacaaaaacatgggcagaaaattcttcgtcggtggcaactggaaatgcaatgggaccactgaggaggtaaagaagattgttactactttgaatgaggctaaagtccctggagaagatgtcttataagatgttgtgagccctgcttttgagttccttcctgttggaaaaagtttgctgcgccctgattgccatgtttcggcacaaaactgttgggttcgcaaaggtggtgcttata

SEQ ID NO: 275394 - DNA, 275 bp, Glycine max
  unsure (1)..(275): unsure at all n locations
gtggggcacccagagaggaggaagctttgagagaagagagagggaggagggagagtgttgacgctcaatcaggatgggtatttctagggattccatgcacaagaggcgtgccactggtggcaagaagaagcatggagaaagaagagaaagtatgagcttgggcgtcaggccgcanacacaaagttatcaagcaacaaactattcggaggattcgtgttcgaggtggcaaatgttaaatggaaggcattgaggttggataccggcaattactcatg

SEQ ID NO: 275395 - DNA, 413 bp, Glycine max
gcgcaccgcattaacgactcctgatcacaatttaaggggagcttacaccatgtcactcacgacaatccgtggtgctgactagagcgctacctctcttaagttctcctacaactgcccaaatagataccactccaacccctgcaccatcacccgccccacacctggcgaacataagctccctactgtccgtcgccggcccattacagacctttctcaactatctctagcaaacaacagtcatcgaaacctttcaaaaccaaccaaacaacaccaaccagcgcatcaccatcttcctaccgaaggactccgacttctcgtccctcataaaaccgtcactagccaacctgacccaagaccaacttaagtccctccttttaatccatgcattcccgtaagtctacactatttaccat

SEQ ID NO: 275396 - DNA, 366 bp, Glycine max
ggagagagtgagtgagatagagagagacgcttcgcaaatttcaatcgaatctcagaaaaatgagagaaatcatcagcattcacatacgtcaggccgggatccaggtcggaaactcctgctgggaactctactgcctcgaacatggcatccagcccgacggcatgatgccttatgactccaccttcggtgtagcccacgacgccttcaacaccttattcagcgaaaccggatctggcaagcacgtcccccgtgctgtcttcgtcgacctcgaacccaccgtcatcgacgaggtccgctgcggcacctaccgtcaactctttcaccccgtacaacttatcttcggcaaggaagactccgtcaacaact

SEQ ID NO: 275397 - DNA, 238 bp, Glycine max
gggcgcgggtgaggtagaacccttacacggtggtgactgcgcgatgggtgcctacaagtatgtctcagagctatggcgcaagaagcagtctgatgtcatgcgcttcttgcaacgggtgaggtgctgagagtataggcagcaaccttgcattgttcgcttgacaaggtcgacccgtgctgacaaggctcgttgcttgagcttcaaggctaagcacggctatgtgatataccgtgttcgt

SEQ ID NO: 275398 - DNA, 373 bp, Glycine max
caagcctacaagaagttgctcgatgctcttggccagcgaacggatacccttaacaggctggaggctgaaattaaagttaacgagaagcgtatgtccacgtttgaattgttgcgcccgaagaaggaactagtagaggaagttccattggaaccttttattcctcttactaaagaggaagaagttgaggttgcacatgccttttctaccaaccggaaaaagatcttggtttcccatgagaaatctggcattgagatctcgggagaaaagtttcaatgccttagaccgggtgcatggttaaacgatgaggtaataaatgtgtaccttgaattgctgaaagagagggagagaagagagccacagaagtttctgaact

SEQ ID NO: 275399 - DNA, 405 bp, Glycine max
  unsure (1)..(405): unsure at all n locations
gggtttattgagtttaatagtcgtgctggagctgagagaattcttcaaacatataatggggcaataatgccaaatggggggcagagtttcaggttgaattgggcaacttttagtgctggtgagaggtcgcgccacgacgattctccagattacaccatatttgttggtgacttggctgcagatgttactgattatcttcttcaggagacatttagggctcgttataactcggtgaagggtgcaaaagttgtcattgataggctaactggccggaccaagggatatggctttgtaaggttttcagatgagagtgagcaagtgagggctatgactgagatgcanggggttctttctcaacaagacccatgaggatggaccccgctctaataaacccccaccattaat

SEQ ID NO: 275400 - DNA, 311 bp, Glycine max
gggcgcgggtgaggtagaacccttccacggtggtgactgcgcgatgggtgcctacaagtatgtttcagagctatggcgcaagaagcagtctgatgtcatgcgcttcttgcagcgggtgaggtgctgggagtataggcagcaaccttccattgttcgcttgacaaggtcgacccgccctgacaaggctcgtcgcttgggcttcaaggctaagcagggctatgtgatataccgtgttcgtgttaggaggggtggccgaaagaggccagttcccaaaggtattggttatgggaagcccacaaaccagggtgtta

SEQ ID NO: 275401 - DNA, 398 bp, Glycine max
gattttggggaggcctaatccctgaaaatgcacttaatacaagtattcttgatggtctcttaagtgctggtgttcttggtgtgaagtcttttatgtgtccttcaggaatagatgacttccccatggctactattgaccatatcaaggcaggattgtctgtgttggcaaaatatagaaggcctatagttgtgcatgctgagattcaacaagattttgaaaatcatttggagcttaatgaggataaccttgatccacgtgcttacttgacctatctcaataccaggccaccttcatgggaggaggcagccattaaacaacttgtaagtgttacgaaggacacaagaaaaggtggccctttagaaggagcacatgttcacatcgtccacttgtctgattca

SEQ ID NO: 275402 - DNA, 405 bp, Glycine max
ggccttggagttaatgatgaacatatggctgaacaagctttgaccttttataaaatagcgcttgagcgaaatttcacccgtggacgtaaatcagaacaagtacatgctgcttgtctctacattgcattccggcacaacaataaaccataccttcttattgatttttcaaattatttaaggacagatgtttatgtgctaggagcagttttcttgcagctttgtcaagtgttaaggcttggagagcacccaattgttcaaaagcctgttgatcctagtctttttattcatagatataccaagaatttgttaaagcgagggagtaaggctgtctctgatactgcactggccattgttgcaagcatgaaacgtgactggatgcagacagggaggaaacctagcggatta

SEQ ID NO: 275403 - DNA, 422 bp, Glycine max
  unsure (1)..(422): unsure at all n locations
cagggaaacaagggaggaagcaaatgcagatgtagaagtaatttctccatttgcccaattggatattcctttaattggccaagtgagaaagaagctttgatttatttcttttattattttctttatttttttctttttatttccttgattaggtagagaattttgatcatgattatggaatgtttgaggcagagttacatgatattcttagcaaagctgaagaagcaccatttttcacctggtccagaatcatcagcatgccaactttttccacttgatgatatacctttcaattctctatccttttcatcaatggtggttaccttaagtttggtatgattcacaatcagatatttaaacatgctggctttagttgtttnttttttgtcgcctactcatactgtaaccatgtatttgtcatg

SEQ ID NO: 275404 - DNA, 299 bp, Glycine max
acgacagaaggggagactttttcattgcagcagttgcaaactgctcatgatgaatatgacgaagaggctacattgtttgttttccgattgaaatctctgaagcaaggacaatcgcgtagtcttctaacacaggcagcacgccaccatgctgctcagttatgtttcttcaagaaagcagtcaagtcccttgagacagtagaaccacatgttaaatcagtaactgaacagcaccacattgattaccacttcagtggtcttgaaaaggaggatggggatgaaggtgattatggaaatgatgt

SEQ ID NO: 275405 - DNA, 419 bp, Glycine max
  unsure (1)..(419): unsure at all n locations
ggcacaagtttgttgagatagctagaagcaataagatgaaaatgaaagtgcttgttttgtttgttgctacagttttggtagcatatgaatgccatggctcagactaccagaagttccctctccaaatgaaaactgggtttggtgggcaatacagcaatgaggtggcatgtgccagttggaggcttggcgtggaagcaaacaacgtagtcaagtggcaaactgttcctgcagcttgcggagagtacatagctgactacgttctaggagaccaatatagatcagattccaaaacagttaaccaacaagcttatttctatgctaaatccctcaaactcaccaacaaagatgtctntgtcttggacgttgacgacactactctctctaatctccagtattttgctaaccatggatttgtgtgg

SEQ ID NO: 275406 - DNA, 418 bp, Glycine max
gggagcagaggacaagatgggtagtgtgagttatagcaatctgaagaacgccatgatagcattcttggtccctctaccctccatcctattctacctctcattccaatcggccattagtactccttcttcttggtcttctctgtggacatggtgctatcaccaccctctgctattggccaatgtccttttcttcttcaatgtcaatttcctcttctggctcatcggcctaatccaatccagccactggatgattgacccgtattggacagtgatacctgtgatgcttgttcattactattcaactcaccctttggcacagtatcagtggtggaggtcgaggatcgtaacgttgttgacttgggcgtggagtgttaggctgatccacaactacttcaggcgagaaaagtggcagtggggt

SEQ ID NO: 275407 - DNA, 368 bp, Glycine max
cagacagcggaagcgtgaaatcgtacggtgaagatttgccggaggatgcggtgagagtgacgcgaagtatcatgatcgtgaaaccacctggtggtaaccagagtccgagcggatccgctccggcttcccccgccggttctactcctccggtgtctcctttttcgggagctagagagtccttccgttttcggagaaggtcgacatcagatgcgtacgagaagacaggccagaacagaccaagctcttcttctcctttcgatgtgtgacaaatgagcccgaccactatctcctccatatatggatgactgaaaatacaaatatatagtttgttttcctctggcctttgctgatgatgctgtgttccattt

SEQ ID NO: 275408 - DNA, 384 bp, Glycine max
cgaggcctgttggtcttcgtacatgtcaaggttctgcaggcagttaacttacagaggaaagatcttcttggagcatctgacccttacgcgaagcttaagcttactgaggataaattgccatcgccaaagactactgtgaagcactacaacttaaatcctcaatggtacgaataattcaatatggttgttaaagactcaaactcccaggctttagagattaatgtttatgactggtacctgcttgagaagcatgacaagctgaccatgaatgtgatccctttaaaagaagtttcccctgaagagactcaacgtctttctcttgacctgctaactgatatggctcctaatgatgtccaaaatgagaagtcactagtgcagattgtt

SEQ ID NO: 275409 - DNA, 401 bp, Glycine max
  unsure (1)..(401): unsure at all n locations
gatgcctggttgaatggtgaattcattactactgttcaacaacgtggtgctgcaattatcaaagctagaaagctttcaagtgcactatcagctgctagtgctgcttgtgaccatattagagattgggttcttggaactcctcagggcacctgggtgtcaatgggagtatattctgatggttcctacaatgttccagctggactgatctattcattccctgtcacttgtgccaatggggaatggacaatagttcaaggacttcccattgatgagttctcaaggaagaagttggacttgaccgcagaagagctttctgaggagaaggcattggcttactcatgcctaaattagagaccatcgctccttcttggctactgtccttgntagtaggttcccatggt

SEQ ID NO: 275410 - DNA, 403 bp, Glycine max
gggcatatgaggttggtgcacaatcaatggtttgtccaatcattgttgaggatctcaatcctcctcgtcagatgctagtagagatgctttgtgaggaatgcggtttctttctggaaatagctgacttaatcagaggattaggtttaaccatcttgaagggagtcatggaagctcgcaatgacaagatctgggcacgctttgctgttgaggcaaacagggatgtaaccagcatggaaatatttatgtcactggttcgtcttttggatcaaacgatgaagggtggtgcatcttcgtcgaatgcaattgataacaacatgatgctgtatcattctttcccacaagctacccagataccagcaactggcaggcctagtagtttgcaatgaactacctacttatagtt

SEQ ID NO: 275411 - DNA, 370 bp, Glycine max
  unsure (1)..(370): unsure at all n locations
gatagcagcatcatacaaagcattgaattcaaaaactaagttcatttcttgtgctttgctttattcctcaaaaccaaacatgtcgaacacatgcggcaactgtgactgcgctgacaagactaactgcaccaagggaaacagctatggtgttatagtagagactgagaagagctacatcgagactgttgacatggatgttccagcagctgagcatgatgggaagtgcaagtgtggcactaactgcacttgcacggactgcacttgtggccattaaggaatatgtatgaaaatgtaattgccatgtgtttggcaatacaaatctccaaataatgtaatcttcgtatgaataaatgtgtgctgntatcctact

SEQ ID NO: 275412 - DNA, 433 bp, Glycine max
gtactttcacgggacattcaacatctgttatgtcactagatgttcatccaaataaagatgacctcatctgctcttgtgatggtgatggtgagatacggtattggagcataaacaatggcagttgtgctagagtgtccaagggtggcaccacacagatgagatttcagcctcgtctcgggaggtaccttgctgcagcggcagagaatattgcgtctatatttgatgtggagacacaagcgtgtcgatattcactaaagggacacacaaaaccagtggattgtgtttgttgtgatccttctggggagttgctggcatctgtgagtgaggactctgtcagggtttggactcttggatcagggaatgaagggaaagtgttcatgaactaagctgtatggcaataagtttcatgcatctgttttccacccaacgtacc

SEQ ID NO: 275413 - DNA, 388 bp, Glycine max
gaagggtgtggtgcgtgtaagtaatttgaaagatgctgcagaccatataggtgaggttttgaaacgtgtgaagaaagagcatttggagagagcatataaaataaaagagtgggatgatgagaatgacttcttactgcagctttgcaaatcaactggcaaacttctgaagggtggtgagcctgacttgatgactgcggcaaagatgatacttcatgactggcagaggggtcgaattcccttttttgatccccctcctatgcaggaggacttgtctgaggaacctaatgttaatggtgttgacctagatgattcagttgatggcaactaggcttctgctgctatgaaggctatcgcagatgttctttcatcgcagcaacaaataaatgta

SEQ ID NO: 275414 - DNA, 285 bp, Glycine max
gtgactgatcgaaagttaaatcagatcagaagactctacgcaggcgtgctcataaccgtgaagttgccagaaaaagccgcttgcgaaagaaagcgtatgttcaacagttggaaagtagtcgattgaatctgacccaactagagcaatgagcttcagcgagctaggcagcaatggattttcatatcaagctccggtgatcaagcacatacattgagtgtaaatggggcaatgcaatttgactcactatatgctatgtggctggtatagcaaaatcgacaaaataat

SEQ ID NO: 275415 - DNA, 425 bp, Glycine max
ggcggtttctgcaattggttttgaaggtttcgagaagaggctggaaatatcctttttccagccgggactttttgctgaccctgagggaatgggtttaagagctcttgcaaagtcccagttggatgagatacttacaccggctgcttgcaccattgtttcatctctcagaaatgatcatgtcgactcctatgttctgtctgagtccagtctctttgtttatgcctacaagatcatcatcaaaacctgtggtactacaaagctactgcttgcaatcccacccatattgaaatttgctgaaatgctttccctcaatgttagatctgtgaattacaccaggggaagtttcatctttcccggagctcagccctatccccatcgcaacttttctgaggaagttgctattcttgatggctactttggcaagc

SEQ ID NO: 275416 - DNA, 352 bp, Glycine max
gagagaatgatgatgaagtctgctatgtgtgcagtggtggttgtagcacttcttcttctggcggaggtggggcccatggctgaggctgtgacatgcaccccaacagagttgagtccgtgtcttccagcaatcacttccggtgctaaaccttccaatgcttgttgcacgaagctgaagcagcaaaaaccatgcttatgtggctacctcaaaaacgctagcttgaagcagtatgttaactctcctaatgcccgaaaaaccgttgcttcttgtgggattccctttccaacttgttaattaattaagccttcttataattaaagtgtgggatatatatatatatatagataaacag

SEQ ID NO: 275417 - DNA, 347 bp, Glycine max
ggagttgaaggaggtgaagctccgtgatgaatactatgttatggaccctgaaaaggccgtggaattggtggatgagaacactatttgtgttgctgctatccttggttcaacactaaatggagaatttgaagatgtcaaacgcttaaatgatctcctaattgaaaagaataaaataactgggtgggacactcctattcatgttgatgcaacaagtggtggcttcattgccccatttctttacccagagcttgagtgggacttccgggtaccacttgtgaagagcatcaatgttagtggccacaagtatggtttggtctatgctggaatcggatgggttatctggagaa

SEQ ID NO: 275418 - DNA, 395 bp, Glycine max
gaaaacaacggtgacaacaacaacaatggctcttcacacacgacaacgttgctcattggctcaaagacgcatcatcattccttttacaaaagtaacaactatccattccctcattcatcatccgcggcatgctagatatatatacatatatatatagttccgagctaatatatatatgtaattaaagataggtgattagtgattattactattagagatcaatcccccatgcaccacatgctttcttatatatatgtatacttcataaatggaaagatcaattcatagagatttttctaatttgttgtaatttattttatatgtaatatatttatggtctatgcgtacattacatatgaataacaatgcaaggttatcacatagttcaatcaaaa

SEQ ID NO: 275419 - DNA, 375 bp, Glycine max
gacatggatcgatttggagatgttgatgctttagatgataatgttgaatcctttctatcaaatgatggcggagatggtgggaatctctatggaacagtgaaacaaagtccagctgagcaacagaaagagtcttctaaaggtttcacctttgctgaagttggttgcagaagaacaaggaacagcaaagttacttgttgtcacttttcctcagatggaaagtggctagccagtgctggagatgacatgaaggttgacatctggaacatggacactttagaaacagagagcactcctgcagaacacaaatcagttattacagatgtccgttttagacctaattcatctcagttggcgactgcttcaactgataaatct

SEQ ID NO: 275420 - DNA, 335 bp, Glycine max
ggcacaccaacaccaaaacaaacccactaagatggcttcctttgtatccttcctagtgctgcttcttgcagcccttatcctcatgcctcaagggcttgctacttactacaaaccaattaagaagccaccagtgtacaagcctccagtgtacaagccaccagtgtacaaaccaccggtttataagccaaaaccaccggtttacaagccgaaaccaccggtttacaagccaccatataagaagccaccatacaagaaaccaccttatggaaagtaccctccagtagaggacaacacccatgcctaaagcaagcaatgaggtctattatctacttaat

SEQ ID NO: 275421 - DNA, 402 bp, Glycine max
ggaggattgaggcagagaagaagccgaagacgaagatcgtgtgcactctgggccccgcatcacggtcggtcccaatgatcgagaagcttctgcgagcaggcatgaacgtggcgcgcttcaacttctcccatgggtcccacgagtaccaccaggaaaccctcgacaacctccgcgccgccatggagaacaccggtattctctgcgccgtcatgctcgacaccaaggggcctgagattcgaactggttttctcaaggacggtaagcctatccaactgatacaaggtaatgaaataaccatttccactgactatgacctaaagggagatgagaagacgatttgtatgagctacaaaaagctgcctgaggatgtgaaacccgggatggtcatactctgtgcggatg

SEQ ID NO: 275422 - DNA, 292 bp, Glycine max
  unsure (1)..(292): unsure at all n locations
ggaggattgaggcagagaagaagccgaagacgaagatcgtgtgcactctgggccccgcatcacggtcggtcccaatgatcgagaagcttctgcgagcaggcatgaacgtggcgcgcttcaacttctcccatgggtcccacgagtaccaccaggaaaccctcgacaacctccgcgccgncatggagaacaccggtattctctgcgccgtcatgctcgacaccaaggggcctgagattcgaactggttttctcaaggacggtaagcctatccaactgatacaaggtaatgaaat

SEQ ID NO: 275423 - DNA, 414 bp, Glycine max
ggtagagtgaagagaatggctcccaagggtttaacctttctggctgtgttaatatgcgtttcagcactgtcactgagtccttctgttgcgggggaagggcaaaataatggccttgttatgaacttctacaaggaatcatgccctcaggctgaagacatcatcacagaacaagtcaagcttctctacaagcgccacaagaacactgctttctcctggctcaggaacatcttccatgactgtgctgttcagagttgtgatgcttcactgttgctggactccacaagaaggagcttgtctgagaaggaaacagatagaagctttgggttgagaaatttcaggtacattgagaccatcaaagaagctttggaaagagaatgccctggagttgtttcatgtgctgatattctcgttctc

SEQ ID NO: 275424 - DNA, 328 bp, Glycine max
  unsure (1)..(328): unsure at all n locations
gtacccagacttgagctacactgagtcaaccaccaccgagaccttggtcatgggagtggcacctgttaaggctcaatttgagggtgctgaaatgggtgtgcccgctgagaacggtggctgcaaatgtggaccaaactgctcctgcaacccctgcacttgcaagtgaggtgttgggagagcaagcttcaagcagagatagcccttaattaggaataatgataaactattaatgtgtagctaaaaacttatgtattatgtctgtgatggttttcgtgcactctggtgttttgtgttaaacanacatccttagaataaagtggtcatgtct

SEQ ID NO: 275425 - DNA, 402 bp, Glycine max
cggggaacatagtccgaggaacaggcaccacatgtatggcagggagttccgatcgatgttggacggactcgacgaggaagggtgtgttgaagaaccggggcatcaatctgagaagaagcgtcgactaagtgtggaacaagtgaaggctttggagaagaactttgaggttgaaaacaagcttgaacctgagaggaaggtcaagcttgcccaagaacttgggttgcaacctagacaagtagccgtttggttccaaaaccaccgagccagatggaaaaccatacaattggagagagattatggtgtcctcaaagccaattatgatgctcttaagcttaactttggcaccctcaatcaggacaacgaagccttacgaaagcagataaaggaattgaaatcgaggct

SEQ ID NO: 275426 - DNA, 366 bp, Glycine max
gaccaaaaacaaaacaagccaagtgaaagagagaagaaaagtcaaagacaatgtcagggatcattcacaagattgaggagacccttcatgtgggaggccacaagaaggaggaggagcacaagggtgagcagcaccatggtggagaatacaaaggggagcatcatggtgaacacagtactgaatacaaaggagagcatcatgttggtgagcacaagccggagcaccatggaggagaagagcacaaagaggggttcctagacaagatcaaggacaagatccacggctaggagggtggcgccaccgccgagggcgagaagatgaagacgacgaaggagaagacgaagcatgaacatggccatgacagca

SEQ ID NO: 275427 - DNA, 389 bp, Glycine max
gagagaaagagagagaaagatgtcgaagcgtggtcgtggtggttcggcggggaacaagttccgcatgtcgctgggtcttccagtggcggcgacggtgaactgcgccgacaacacgggggcgaagaacctctacatcatttcggtgaaagggatcaaaggccgtttgaaccgtcttccctcggcctgcgttggcgacatggtgatggccaccgcgaagaagggaaaacccgatctgaggaagaaggtcttgccagctgtcatcgttcgccagcgcaagccatggcgccgaaaggacggcgtctacatgtacttcgaagataatgctggtgttattgtcaatcccaagggagaaatgaaaggttctgctatcactggtcccattggaaaag

SEQ ID NO: 275428 - DNA, 388 bp, Glycine max
gttagagagagagagaaacaagtcagcacccgggtgtagcctctcttctattcttagatcgccgataccctttttgctttctcaaccgagagagatagacagaatctttcgtagttcggtcgcgtgtgttgagttgacagtcaccaatggcatcaccatctgctaggacacgttcccattacgattacctgatcaagcttctatcttataggcgatagacagtgtgtgaacgagctgactgcttatgcgatgtcctgaggggtccttcacaaccggatgttatcaccaccattggcattgagattacgatgacatccattgaacttgatggcaaacgcataaagctacaaatctgtgatacagcttgccatgaaccgatttctactat

SEQ ID NO: 275429 - DNA, 390 bp, Glycine max
tcattaagtcatggtcagcacatagattgtggtggcagcacaatggatcctggcagtggaggaaatggtcttagcaacaactctaatctcacctcaaaacaacgtttacggtggacacatgaattgcatgagcgctttgttgatgctgtggctcaacttggtgggccagatcgtgccacacccaaaggcgtgctcagagttatgggtgtacaaggcttgaccatttaccatgtcaaaagtcatttacagaaataccgacttgcaaaatatttacctgactcttcatctgatgaagggaaaaaggccgacaagaaagaaacaggggatatgctttccaatcttgatggttcatctgggatgcagattactgaagcactaaagcttcaaatg

SEQ ID NO: 275430 - DNA, 346 bp, Glycine max
ggaggagactgagaaaacagaagaaaacaaagtggaagacacagtttctgcgttgaggtctttgatggtttctcactctccgccgctggatgccttagtggtgccctctgaagattatcacctgagcgaatatgtgtctgcacgagacaagcgccgcgaattcgtttccggcttcactggaagtgccggcttggcacttataacaaagaaagaagcactgctgtggacggatggacggtattttttgcaggctgagaaagaacttagtgctgggtggaagctaatgcgaattggtgaagatcctgctgtagatatctggatggccgataatttgccaaaagaagca

SEQ ID NO: 275431 - DNA, 412 bp, Glycine max
ggagcaagagtgaagagcgaagagaatggctcccaagggtttaatctttttggctgtgttatgcttctcagcactgtcactgagtcgttgtcttgcggaggataatggacttgttatgaacttctacaaggaatcatgccctcaggctgaagacatcatcaaagaacaagtcaagcttctctacaagcgccacaagaacactgctttctcctggctcagaaacatcttccatgactgtgctgttcagagttgtgatgcttcactgttgctggactccacaagaaggagcttgtctgagaaggaaacagatagaagctttgggttgagaaatttcaggtacattgagaccatcaaagaagctttggaaagggaatgcccaggagttgtttcctgtgctgatatcctcggtctc

SEQ ID NO: 275432 - DNA, 351 bp, Glycine max
ggtctctctggtctacaatcaacgtctctgtctcggttcgggctacattcctgggatcagctggctatgcttttcaagggcaaaaaatgacagatgcaaagccagataaacccttgatggcatcttcatcgcgaaaccttcctgatttcaagaagtctgttaagttgaagtatgtcaagcttgggtatcattacctcatcacccatggaatgaacctctgactgtccccccttgtggtgctgattgcatcccagctatctaccttctccctacgagacttgtatgatctttgggagcatctacaatacaacttgatatctgatattctttgcttaactctccttgtttcct

SEQ ID NO: 275433 - DNA, 394 bp, Glycine max
ggcaggaggtggtggagctccagcacctaagattgatgagccacaacctcatcccccgaaggatcagttaccgaatgtttcttactgcattacgagtcctcctccatggcctgaggccatacttcttggttttcaacattatcttgtgatgctcggtacaactgtgctaattcccactgctcttgttccccagatgggaggtggcaatgaggagaaggcaaaagttatccaaactctactttttgtagctggaattaacacattgctgcaaactctgtttggaactcgattgcctgcagtaattggagggtcttatacttacgttgcaacaacaatctctattattctttctggtcgattcagtgatgagccagatcctatagagaaattcaag

SEQ ID NO: 275434 - DNA, 394 bp, Glycine max
ccagatgaactattgataggagagaatgacatcatggagcaaatattagtacaagggcactgcaaagatcaaagaacggcaatggagacagcaaaaacaatcattttcttgggacttcttgaccagactgaaatccctgcttcctgcaaaagtgcttttgatgttgcttgtttccgcatggaggagaggttatcatacaccagcacagaaaaggatatggtgcttttgcatcatgaagtggaaatagaatacccagatagccaaattacagagaagcatagagctactttacttgaatttgggaagactcttgatgaaaaaaaccacaactgccatggcccttactgttggtattccagctgctgttggagctttgcttttattgacaaacaaa

SEQ ID NO: 275435 - DNA, 369 bp, Glycine max
ggccgaggaaaagaaagaaatagaaaaagaagaaaaaaacacagcgtcctagatttcctcttctctgcttcggaagaaagagaaaacaaacaaaacaatggcgttcgcttctttcctcggcagagtcctcttcgcttctgtcttcatactctctgcttaccaacaatttaatgaatatggagttgatgggggacctgctacaaaagcactcagacctaagtttgatgcctttacacatcgggtgcattctcaagtgggctttcaaattccagagattaatctgaaatttttaattgctggggctattgctctgaagggtcttggaggggttcttttcatatttggcagctcttttggagctttgcttct

SEQ ID NO: 275436 - DNA, 318 bp, Glycine max
gggttcaatgaattaattcccagggagttaatatctatattcaatgacaaagagctggaattattgatcagtggacttcctgaaattgatttggatgacttgagagcaaatacagaatattctggatatagtggtgcgtcaccagttatccaatggttttgggaggttgttcaaggtttcagcaaagaagacaaagctagactgctgcagtttgtgactggcacatccaaggttcctctggagggatttagtgctcttcaaggaatttcaggtgcccagaggtttcagatacataaggcatatgggagttctgatcac

SEQ ID NO: 275437 - DNA, 382 bp, Glycine max
  unsure (1)..(382): unsure at all n locations
gataccaaaaacaaaacacaagccaagtgaaagtgagaaagaataaaaatcaaagagcataatgtcagggatcattcacaagattggggagacccttcatgtgggagggcgcaagaaggaggaggagcataagggtgagcaccatgctggagaatacaaaggggagcaccatggtgaacacagtagtgagtacaaaggagagcatcatggtgaacacaaagctggagagtaccatggtgagcacaagccagagcacaaagaggggttcctagacaaagtcaaggacaagatccatggtgagggcggcgccgccgagggcgagaagaagaagaaggagaagaagatgaaagagcatggncatgagcatggncatgacagcagc

SEQ ID NO: 275438 - DNA, 454 bp, Glycine max
  unsure (1)..(454): unsure at all n locations
cccacgcgtccggggagctgaccgtggaggagcgcaacctcctctccgtcggctacaagaacgtaatcggcgctcgccgcgcctcctggcgcatcatctcctccattgagcagaaggaggagagccgcggcaacgaggaccacgtcgccgtcatccgtgactaccgctccaagatcgaggccgagctctccaacatctgcgacggaatcctcaagctcctcgacacgcgcctcgtcccctccgccgcctccggcgactccaaggtcttctacctcaagatgaagggagactaccacaggtacctcgctgagttcaagaccggcgccgaccgcaaggaagccgccgagagcacgctctccgnctacaaagccgctcaggacattgctaacaccgagctgnctncaactgaccctatcaggctgngtcttgctctgaatttctctgtgtttactat

SEQ ID NO: 275439 - DNA, 375 bp, Glycine max
ggagcaagagtgaagagcgaagagaatggctcccaagggtttaatctttttggctgtgttatgcttctcagcactgtcactgagtcgttgtcttgcggaggataatggacttgttatgaacttctacaaggaatcatgccctcaggctgaagacatcatcaaagaacaagtcaagcttctctacaagcgccacaagaacactgctttctcctggctcagaaacatcttccatgactgtgctgttcagagttgtgatgcttcactgttgctggactccacaagaaggagcttgtctgagaaggaaacagataggagctttgggttgagaaatttcaggtacgttgagaccatcaaagaagctttggaaagggaatg

SEQ ID NO: 275440 - DNA, 417 bp, Glycine max
  unsure (1)..(417): unsure at all n locations
ggaagtgcgaaggacaatgagtgttcggtccaaaaacttgaactctgtattctatgcagattcgtaccatcccattcaagctggcagcatcgacggcaccgatgttgttcctcacgataacgccgtttatcgcgctcaactctgttcctccatcggcctctatgacccatttggtgatcccaaggccactggagacccttattgcactctctttgtcgctcgtctctctcgcctcaccaccgaagatgatctccgcaaggtcatgagtaagtatggtcgagtgaagaacttacgcttggttagggacattgtgacgggagcttctcgtggttatgcttttgttgaatacgagactganagggagatgcgacgagcatatatggatgctcatcatttgattggtgatgattctgaaat

SEQ ID NO: 275441 - DNA, 399 bp, Glycine max
ggaagaaggggaagaagggaaaggtccattcaacattattgtcattcagagaagagaagaggttttgcatcgcatcgcacagagatgaattcaattacaagaagcggatcgcttagtatcatcctcgttgttttcttctctttgcacttcattcttggtttttccgacgactcatcacctgcttcaaaagatgctacaaagacagaacctcatgccggaagaagcactagtgctatagttatcattgtattaattgtgcttgtgttcttttctttgttctcctttgtactttttaagctgtggcggaagaagaaaagggaggagcaatatgctcgtcttttgaaattatttgaagaggatgatgagttagagcttgagcttggcctaagggactgagac

SEQ ID NO: 275442 - DNA, 268 bp, Glycine max
cggacgcgtgggtggtcaacttgcgatggcatccatggcttcacttgatttgtttagtggaggggaacaaattgatgcccggaaacttcaagagaaaatgatggttgttcagaaggaaagggaggagaaacttgctgagattctgaaagatagactccaccagtatgttcaaggagacaaggagggttttattagtcaggccgatgctgaagcgacatatctttaatatggcaattacggagttgatatgctgaacacaattggctat

SEQ ID NO: 275443 - DNA, 379 bp, Glycine max
ggagcgaagaagatattagggtttttgagtgcggtgcggcgatcctagcactctcttctgcagctttcgccgacagcttcattcaccatggctgagcaaaccgagaaggcttttttgaaacaaccaaaagtgtttctcagctcgaagaaaactgggaagggaaagagacccggaaagggtgggaaccgcttttggaaatccattgggcttggatttaagactcccagggaagccatcgaaggaacctacattgacaagaagtgccccttcactggcaatgtttccatccgtggccgtatcttggctggaacatgtcacagtgctaagatgaacaggactattattggtaggaggaaatatctccattttatcaagaagt

SEQ ID NO: 275444 - DNA, 321 bp, Glycine max
gtttccaagatcaaaccacaggcccagtgaaggggagaaggactaaaaatcaaagagcataatgtcagggatcattcacaagattggggagacccttcatgtgggagggcgcaagaaggaggaggagcatacgggtgagcaccatgctggagaatacaaaggggagcaccatggtgaacacagtagtgagtacaaaggagagcatcatggtgaacacaaagctggagagtaccatggtgagcacaagccagagcacaaagaggggttcctagacaaagtcaaggacaagatccatggtgagggctgcgccgtcgaaggcga

SEQ ID NO: 275445 - DNA, 318 bp, Glycine max
ggtgcacaagtgagtttgtgggatcgagatatctagaaacagtgtgatgaaaatgaaggtccttgttttcttcgttgctacaattttggtagcatggcaatgccatgcgtacgatatgttccctatccgaatgaacactggctatggtgcccgtactccggaggtgaaatgcgcaagttggaggcttgctgtgaaagcacacaacatctttggctttgagaccattcctgaagagtgcgttgaagcaacaaaggaatacatccatggcgaacaatatagatcagactccatatcagttaaccaacaggcttactttta

SEQ ID NO: 275446 - DNA, 360 bp, Glycine max
tgggtgtagttcagcaattgaagaaaggtatggatccgaatagtgtttatgaagatcttattgagattcatcggttccttgaccgcttctacatgtcaagaattggaatccgtatgcttatcggacagcatgttgagtttcacaatcccaatactactccccacgtcagagggttacatacacacgaaaatgtctactgtggaagaggcaaggaatgcctgtgaaaatgctcgttctatttgtctatcgtaaatatttaagtgccccttatgaacttatttagggagatcctaattttactttaccgtatgttccagctcacttgcatcctatggtatttgaattggctaagaacttact

SEQ ID NO: 275447 - DNA, 349 bp, Glycine max
  unsure (1)..(349): unsure at all n locations
ggcagtatggaagcccgctgaggccatatactcctgttgtggttacactatggtacagagcacctgaacttttgctgggtgctaaagaatactcaactgcaattgacatgtggtcagtgggttgcataatggctgaattaattgccaaggaacctctgttcaggggtaaaagtgaacttgaacaacttgataagatttttcgaaccctgngtacgcctgatgagaaaatttggccaggattatccaaattacctggggctaaagcanattttgtaagcaactgtttaatacactaaggaagaagtttccagctgcgtcgtttattggtttgccagttttatctgagctt

SEQ ID NO: 275448 - DNA, 390 bp, Glycine max
  unsure (1)..(390): unsure at all n locations
ggcgaggaagccacatagagacacaatacagagtgagttgttgctccttcgccacaactctctgccaacatgggtatctccagagattctatgcacaagaggcgtgccactggtggcaagaagaaggcctggaggaaaaagagaaagtatgagcttggtcgccagcctgctaacactaagctgtcaagcaacaagacagtcaggaggatccgtgttagaggtggaaatgtgaaatggagggcattgagattggatactggaaattactcctggggaagtgaagctgtaactcgcaagactcgtgtactagatgtggtttacaatgcctcaaacaatgagcttgtgcgtactcagactcttgtcaaaagtgctatcgntcaagttgatgct

SEQ ID NO: 275449 - DNA, 423 bp, Glycine max
acgacagaaggggggtataattgtgatatgtctagatgagcttcttcaaaaaggatatggggtggggtctggaatttcccttttcatagcaactaatatctgtgaaaacattatatggaaggcatttagtcccaccactattaacagtggacgtggagctgaatttgaaggtgctgttattgctctgttccatttgctgataactagaacagacaaggtccgtgctcttcgtgaggcattttaccggcagaatcttcccaacgtgacaaatttgcttgctactgtcttgatcttcctaattgtcatatacttccaaggtttccgggtggtcttgcctgtaaggtcaaagaatgctcgtgggcagcagggttcatatccaatcaaattgttttataccttcaatatgcccatcattcttcagtc

SEQ ID NO: 275450 - DNA, 420 bp, Glycine max
gggccagaactgacagcactgtaccgtaagtcttgttatctccgaaagctttctaagaagagagagagagagagaggaaatgggtaaggggggaatgtcaattgatgaacatggagaaggcaaagaagagaatatggctgcttggcttgttggaatgaacactctcaagattcagcctttcaagcttcctactttgggactccatgatgtcagagttagaatgaaggctgttggtatctgtgggagtgatgttcactacctcaagacactgaggtgtgctcactttatagttaaagaaccaatggttattggtcatgagtgtgctgggatcatagaagaagttggtagtcaggtaaagagtttggtgcctggtgaccgtgtggcaattgagcctgggatcagttgttggcattgcaacca

SEQ ID NO: 275451 - DNA, 437 bp, Glycine max
acagatacaattgttaacttgcattttcatggggtgccaatcgaagatctttgcttagattttacactccctggttatcctgaatacaccttgaagccaggagatgaaattgttgatatcaacaatttggaggagtatatatccttggtggcagatgcaactgtcaagactggaatcatgcggcaaatagaagcatttagagcagggtttaaccaggtttttgacatctcgtctttacaaatttttactcctcaagaactagataatttgctttgcggctgcaaggagttgtgggagtctgagacacttgctgatcatataaaattcgaccatgggtacaatgcaaagagccctgccattattaatttacttgaaattatgggagggttcacaccagagcagcaacgtgccttctgtcaatttgtactggtgcacct

SEQ ID NO: 275452 - DNA, 433 bp, Glycine max
gttggtgtggtagagataataagagaggatcatagtagtgctagaaattgaagtgtgtaatagaatagtgatagagagagagagatatggggagaggaagggtgcagttgaagaggatcgagaacaagatcaataggcaagtgacgttctcaaagagaaggtctggtttgctcaagaaagcacatgagatctctgtgcattgtgatgctgaagtggccctcatagtcttctccaccaaaggcaaactctttgagtacttcagcgatccctgtatggaaaaaattcttgaacggtatgagaggtattcatatgcagagaggcagcttgttgcaagtgatcaaccactaactgaaaattggactctggaacatgcaaagctgaaagcaaggttggaagtcctacagaaaaatcaaaggaattttatgggacaaga

SEQ ID NO: 275453 - DNA, 401 bp, Glycine max
  unsure (1)..(401): unsure at all n locations
gaggaaagtgagtgagagaaagagatcacatagcagaatggcttctactcaatgtttcttgcaccaccatgctcttaccacccctgccagatccccatcacaacgcatcatggttagcaccaagcctaaccagcttgtttgcaaggcacagaagcaagaggatattgatgtcagcccaatctctcgccggttagctctaaccgtgctcattggtgctgctgctgttggctccaaagtccaacctgctgatgcagcttatggggaagctgccaatgtgtttggaaagccaaaggcagacacagatttcctgccatacaatggagatggattcaaactatcgattccctcaaagtggaacccaagcaaagaggttgagtacacaggtcangttgttagatatg

SEQ ID NO: 275454 - DNA, 425 bp, Glycine max
ggttctagtgtgtgattgtttgttgttgtaactcgttcttcttcttttgttctgtgtttgtgtttgttttttctctcacctgaaaatgtcttgctgcggtggtaactgtggttgcggaagctcctgcaagtgcggcaacggctgcggaggctgcaagatgtacccagacttgagctacactgagtcaaccaccaccgagaccttggtcatgggagtggcacctgttaaggctcaatttgagggtgctgaaatgggtgtgcccgctgagaacgatggctgcaaatgtggaccaaactgctcctgcaacccctgcacttgcaagtgaggtgttgggagagcaagcttcaagcagagatagcccttaactaggaataatgataaactattaatgtgtagctaaaaacttatgtattatgtctgtgatg

SEQ ID NO: 275455 - DNA, 250 bp, Glycine max
ttttgctctgtgtttctatcgcattatctctcacctgaaaatatctcgctgcaatgccaactctgattgcagaaactcctgcaagttcggcaacacctgcagaaactgcaagatgtacccaaacttcaactacactgattcaaccaccacctacaccttgatcatgggagatgcaccatgtaaagctcaatttcatggtacctaaatgggtacacccgctgagaactatggctgcaaatgctgaccaaac

SEQ ID NO: 275456 - DNA, 377 bp, Glycine max
gatcacatagatgggaactggtgcatcgaaggacgcagaggaagggagcaaggaagagcgtgacaggctcgatcatgcaggtggccaactctacgtctctctcaagatggagaatcggaagctcacaggggaccttgttcctcacgtttatggctctgttcctcttgttggctcttgggatccttccaaagctcttttcatggagcgggaatcggtgtcaatgtgggaacttagctttgttgtcccacctaatcacgaaactttggatttcaaattcctgttgaagcctaaggacagcaatacaccttgttttgttgaggagggtcctagccgcctgcttgtggggggagcgttgcaagaggatgccaagcttgcgt

SEQ ID NO: 275457 - DNA, 419 bp, Glycine max
ggaacaagaggaaaagaaaaacaaacaaacactggttgaggttcaacgaacgcacagagtcgatcatactgaaagtgattaagggccgagttgcatgagttgaatcggcggaaatgggagctagtcgaaagcttcagggcgagattgatcgtgttctcaagaaggttcaggaaggcgtcgaagtcttcgatagcatctggaacaaggtttacgacaccgataatgccaaccagaaggagaagttcgaggctgacctgaagaaggagattaagaagctgcagaggtacagggaccagattaagacatggattcagtccagtgagatcaaagacaagaaggttagtgcctcatatgagcaagctctggtggatgcacgcaagattattgagcgtgaaatggaaagattcaagatctgtgag

SEQ ID NO: 275458 - DNA, 382 bp, Glycine max
ggttctagtgtgtgattgtttgttgttgtaactcgttcttcttcttttgttgttctgtgtttgtgtttgttttttctctcacctgaaaatgtcttgctgcggtggtaactgtggttgcggaagctcctgcaagtgcggcaacggctgcggaggctgcaagatgtacccagacttgagctacactgagtcaaccaccaccgagaccttggtcatgggagtggcacctgttaaagctcaatttgagggtgctgaaatgggtgtgcccgctgagaacgatggctgcaaatgtggaccaaactgctcctgcaacccctgcacttgcaagtgaggtgttgggagagcaagcttcaagcagagatagcccttaattaggaataatgat

SEQ ID NO: 275459 - DNA, 426 bp, Glycine max
ggcgctcccagagaggaagcttagagagagagagagagagagagagagagaggagagagtattggcgcttcatcaagatgggtatttctagggattccatgcacaagaggcgtgccactggtggcaagaaaaaggcttggagaaagaagagaaagtatgagcttgggcgtcaggcagcaaacaccaagttatcaagcaacaagacaatcaggaggattcgtgttagaggtggcaatgttaaatggagggcattgtggctggatactggcaattactcatggggtagtgaagcagttactcgcaagactcgtattctagatgttgtttacaatgcctcaaacaacgagcttgtgcgaactcagaccctggtcaagagtgctattgtccaggttgatgctgctcctttcaagcagtggtaccttcagc

SEQ ID NO: 275460 - DNA, 425 bp, Glycine max
gggatagggaaggatggaacagagatcttcttcaaggatatttggccatccagtgaagaaatagcaaatgttgtacaatcaagtgtgctgcctgatatgtttagggacacatataatgcaatcacccaagggaatcccatgtggaataatttatctgttccaacgggcactctttatgcttgggaccctacatcgacttatattcatgagccaccttattttagagatatgagcatgtctcccccaggctctcatggagtgaaggatgcttactgtttgctcaactttggagacagtatcacaactgaccacatctctccagctggcagcatacataaggacagtcctgcggccagataccttatagaacgtggggttgatagacgggacttcaactcctatggaagtcgccgtggtaatgatga

SEQ ID NO: 275461 - DNA, 425 bp, Glycine max
gaagctttgagatggtggacccttcaataggaactcaagagaacgaagatcatgctgctccatccaatgatggatcgaattctaacggaaatggggctggaaccagtacccgggataggtccgttcctatcttcgtttccgaccctgatgtccttgattgctgcatttgctatgaacccttgacttcccctgtgctccagtgtgagaatggacatattgcttgctctatttgctgtgtgagactcagtaacaagtgtcccatgtgttcaatgcccattgggtataaccgttgccgggctattgagaaggtcttggagtgtattaaaatgtcatgcccgaatgcaaattatggctgcaaagagacacttagttacagcaagaaaaacgaacatgagaaggaatgcatctatctgccatgttcatgc

SEQ ID NO: 275462 - DNA, 397 bp, Glycine max
ggcactgcatagatggaaaaagcatggaaagaggcgcattgttagcaacgtgtggtctgctgttgcagcataaaacggagtagagcttcatcctctgctcttgcacactaagacccttctcttccttagcaaccccacttcttagttacacatccacatttgcttgtcttgtttaggtggttggtgagaatgtcagagacattcatattcacactttctctggttatgctatgtgctgcttcagcttttgcagcagttccacacaggttgccagaagtttacctcaagaatggtaactttgaggagaatccaaaccccaaatacctcaagaaaacgacactgattgggaaatatgctcttccaaaatgggagatcagtggtcatgttgagtatgtct

SEQ ID NO: 275463 - DNA, 421 bp, Glycine max
ggaccttggtgattcagggcttatacccttagagataaggtttttgcatgatcctgctaaagatacaggttttgtcggcagtgcattgacaagtaacatgatacgattttttaagacccaagatgaatcatggagccatgaggttgccatatcagtgaaaccattgaaagtgcaaaactggattcttcctgaaatgcctgggcttataactgattttctgatttctcttgatgatcggtttttgtattttgtaaactggcttcatggggatataaggcagtataacatcgaggacgttaaaaatcctaaactgactggacaagtatgggttggtggacttatccagaaaggaagccctgtagtagctataactgatgatggtgaaacatggcaagctgaagttccagagattcagggaaac

SEQ ID NO: 275464 - DNA, 394 bp, Glycine max
ggatgtggtgtggcattcttgtgaagagttctgcacttctgtctatatggatatttgttatcccagtgcttattgggcttctctttgagcttttggtcattgtgccaatgagagttccagtggatgaaagtccagtattcctcctttatcaagactgggcattaggccttatatttctcaagatatggactagattggttatgttggaccacatgatgccgctggtggatgaaagttggcgagtcaaatttgagcgagtgagagaggatggtttctccaggctgcaaggtctttgggtccttcgggaaattgtacttccgatcataatgaagctgttgacagcattgtgtgtaccctacgttttggccaaaggtgtatttccagtgcttgggta

SEQ ID NO: 275465 - DNA, 435 bp, Glycine max
gggggagaagggtggattgttagtgtggacgatttggaagatataattggggggcatgtatggttgggttccatttgtatacttggtggaatctggcatatcttaaccaaaccttttgcatgggctcggcgtgcacttgtatggtctggagaagcttacttatcttatagtttaggtgctttatctgtttttggttttattgcttgttgctttgtctggtttaataataccgcttatcctagtgagttttacgggcccactgggccagaagcttctcaagctcaagcatttacttttctagttagagaccaacgtcttggggctaatgtaggatctgctcaaggacctacaggtttaggtaaatatctaatgcgttccccgacaggagaagttatttttgggggagaaactatgcgtttttgggatttgcgtgct

SEQ ID NO: 275466 - DNA, 400 bp, Glycine max
ggcccaaattttttcatagcattttcagaggaacaatggcgggtagggtttcgacgtgcttcttcttcgtgtttgctctttctctccttcttccttttcagatctccgctgaggaatcatcggagaaagagttcgtactcacattggatcactctaactttcacgacactgtcagcaagcacgatttcatcgtcgtcgagttctacgctccatggtgtggccactgtaagaagcttgctcccgagtatgagaaagctgcttctatcttgagtagtcatgatcctccggttgttttggctaaaattgatgccaatgaggagaagaacaaagaccttgcatctcaatatgatgttaggggatacccaacaattaagattctgagaaatgggggaaagaatgt

SEQ ID NO: 275467 - DNA, 428 bp, Glycine max
  unsure (1)..(428): unsure at all n locations
ggaaccaaattctagctcctttcagctgcacaagagtctccgatcccaactctctctctctctccacttgccaaaggaaaaaggctaaagagaaacccacacacacacacacagaaatatgtcttccccaagcaagcgccgagagatggacttgatgaaactgatgatgagtgattacaaggtcgagatgattaatgatggaatgcaagaattttatgtgcaattccatggacccaatgacagtccttatcatggtggtgtgtggaaagtaagagttgagttgccggatgcttatccttacaaatctccttccattggatttatcaacaagatctatcacccgaatgttgatgagatgtcaggatcagtttgtctggatgttatcaatcaaacctggagccccatgttcgatcttgntaatgtgtttg

SEQ ID NO: 275468 - DNA, 371 bp, Glycine max; identical to SEQ ID NO: 236339

SEQ ID NO: 275469 - DNA, 404 bp, Glycine max
gagtgaaagagtgagacagatgtcgaaccgtgggcgtggtggttcggcggggaacaagttccgcatgtcgctgggtcttccagtggcggcgactgtgaactgctccgacaacacgggggcgaagaacctctacatcatttcggtgaaagggatcaaaggccgtttgaaccgtctttcctcggcctgcgttggcgacatggtgatggccaccgtgaagaatggataacccgatctgaggaagaaggtcttgccagctgtcatcgttcgccagcgcaagccatggcgccgaaaggactgcgtctacatgtacttcgaagataatgctggtgttattgtcaatcccaagggagaaatgaaaggttctgctatcactggtcccattggaaaagagtgtgctgatttgt

SEQ ID NO: 275470 - DNA, 309 bp, Glycine max
ggggctttggcctatgcaaccggtgctgattttgcgaaatacatgacagaattttacaagtatttggagatgggtctccaaaatttcgaggactaccaggtttgtgctatcacagtgggtgtggttggtgatgtatgcagagccttggaggagaaaatactgccttattgtgatgggataatgacccaacttcttaaggatttgtctagcaatcagttgcataggtccgttaagcctcctattttttcatgttttggagacattgccttggcaattggagaaaactttgagaaatacctgttatatgca

SEQ ID NO: 275471 - DNA, 383 bp, Glycine max
ggttgcataatatgatgacactagatgcattgccagtggccaagcggcagaggtttgctaaggagactttggagatttttgcacctttggccaatcgcttgggaatttctacttggaaggaacaattggaaaatttatgttttaagcatctcaacccaagccaccatgaggagctttcatccaagcttgtggaatcgtatgatgatgcaatgattacttctgcaatagagagattagaggaagcacttaaagatgaaggcatttcttataatgtcatttctgggcggcataagagcttatatagcgtttattgcaaaatgttaaagaagaaactaaccatagatgatatccatgacatttatgggctgcgcttgattgttgac

SEQ ID NO: 275472 - DNA, 437 bp, Glycine max
  unsure (1)..(437): unsure at all n locations
gattgaatcaatgactattcatgattccataattgaatcaattacatactggatccaagctaaaggaatgttatggtaaaacttcgtttgaaacgatgtggtaaaaagcaacgagccgtttatcgaatcgttgcaatcgatgttcgatctcgaagagagggaagagatcttcggaaagtgggtttttatgatccaataaagaatcaaacctatttaaatattcctgttattctatatttccttgaacgaggcgctcaacctacaggaactgttcaggacattttaaaaagggctggtgtttttatggaacttagctcgaatcaacaaacgaaattccattaatgaaataaaaaaaagggggtgtggatgacttgtatatagatttctaaaactcttttctcttttatccccccgctctcttgntctattcataccta

SEQ ID NO: 275473 - DNA, 404 bp, Glycine max
  unsure (1)..(404): unsure at all n locations
ggaaagaaaaaggaatgtagtgtgtgtgagtgagtaacagattctaaacgctattgagagtaaaatggcggattcagtgtcggtggacatggaagccatctctcctccacccgaggaacatgttgttagaactcgtcatggttgtgtctcagttgctgtgtatggggaccaggacaagccagcgcttatcacgtatcctgatttggctttaaattgggttattattttgtccagaagcctgttcattgctgctccacaatttctgcatatatcatattagtccacctgggcatgagttgggagctgctgccattgatccagatgatccaattctntctgctgatgacttggttgatcaaatagctgaagttctaactattttgtcatagtacagttatgtgtat

SEQ ID NO: 275474 - DNA, 429 bp, Glycine max
ggaccagaaatagatatgtggagtgcaggagtaattctctgcatcttattgtgtggagttcccccattttgggctgaatccgagcaaggagttgcacaggccattcttcgagggcttatagatttcaaaagggaaccttggcccagtatttctgaaagtgctaaaagccttgttaggcaaatgttagaacctgaccctaagcttcgattaactgccaaacaagtgcttgagcatccctggctccaaaatgctaagaaggctcctaatgttccacttggagatgttgtcaagtcaaggcttaagcaattttcgatgatgaacagattcaaaagaaaagcccttagggtcattgctgatttcttatccaatgaagaagttgaagacatcaaagatatgttcaagaagatggattatgataatgatggcatt

SEQ ID NO: 275475 - DNA, 439 bp, Glycine max
gaagaagaagaaggttggttgattggtcccattgattccgaagagaaaagaaaagatgtttgagccacaacagctatacactcgcgcgaagaccgaggaattcgacctcgaatcaggagaaaccctctacccagggctgagcgtcggcgagaaccagctccgatggggtttcatccgcaaggtctacggcatcctctccgcgcagatcgtcctcaccaccctcgtctccgtcaccaccgttttctatactccaatcaatgacctcctcaagggcaattccaccctcctcctcatcctcctcttccttcccttcatctttttgattcccctgttgaagtaccagcagaagcatcctcataattacatcttgcttgcactcttcaccgtgtcgatcagttccaccatcggagtcacctgtgccaacaccgacgggaaaatt

SEQ ID NO: 275476 - DNA, 436 bp, Glycine max
ggtggcaggtgtgggttcttcaattcattctaggtctggattccgactagccgcgttgactcggttccgtttttcattctcgcggatctaatattaaggaatagcttaagggcacattacaatgaaggcattgattctggttgggggatttggaacaaggctgaggccactgacactcagtttccctaagcctcttgttgattttgctaacaagcctatgattttgcatcagatagaagcccttaaggccattggagtgactgaggtagtgctagccatcaattaccaaccagaggttatgttgaatttcttgaaggattttgaatcaaagctcggcatcaagatcacatgttctcaggaaactgaaccactgggaacagcaggtcccctggctcttgctagggataagctgatagatgattctggagaacccttt

SEQ ID NO: 275477 - DNA, 416 bp, Glycine max
gaaagcaagtgtgctcttgtgtacggtcaaatgagtgagccccctggtgcccgtgcccgtgttggtcttactgggcttactgtggctgaacacttccgtgatgctgaagggcaagatgtgcttcttttcgtagacaacattttccgttttacccaagctaactcagaggtgtctgctttgcttggtcgtatcccatctgctgttggttaccaaccaaccttgtctactgatcttggagctcttcaagagcgtattacaacaaccaagaagggttcaattacctctgtccaagctatctatgtgcctgctgatgacttgacagatcctgctcctgctaccacttttgctcacttggatgccacaacagtgttgtcacgacagatcttcgagcttggtatctatcctgctgttgatcc

SEQ ID NO: 275478 - DNA, 376 bp, Glycine max
ggagcaagagtgaagagcgaagagaagggctcccaagggcttaatctttttggctgtgttatgcttctcagcactgtcactgagtcgttgtcttgcggaggataatggacttgttatgaacttctacaaggaatcatgccctcaggctgaagacatcatcaaagaacaagtcaagcttctctacaagcgccacaagaacactgctttctcctggctcagaaacatcttccatgactgtgctgttcagagttgtgatgcttcactgttgctggactccacaagaaggagcttgtctgagaaggaaacagatagaagctttgggttgagaaatttcaggtacattgagaccatcaaagaagctttggaaagggaatgc

SEQ ID NO: 275479 - DNA, 414 bp, Glycine max
gcacaaaggatggaaactctggggaggacttcagtgaagattctattgagcgcgatgaaaggcgtctcacagaattaggtcgcaggactttggaaatatttgtccttgcccatatattcagcaataaaattgaggtttcctaccaggaagctgttgctctaaagagacaagaagagctcattcgtgaagaagaagcagcatggctggctgaatgtgagcagaaagcaaaacgtggaaatgagagggaaaagaagtcaaagaagaaacaggccaaacagaaacggaacaatcggaaaggaaaggataaaggtagagaggagagacctattgtggctgtatatgacaagcagcaacacaatcctgctgatgagaaaaaggattctaacatggaagaagttcaagctcttgatgaaa

SEQ ID NO: 275480 - DNA, 399 bp, Glycine max
gatctcgaaagcgtgagaagaataatatcaggattcgtggagaaagaaaatggcaacgcggttttcaccacggccgagttcaaagagccttgctccgctgcgatgcagcgcgtcgtgaaaaccgtcgatgcctacctctctgagatcgccgcatacggcgatctcagcatctcgaagttcaacggcatcgctactcttattcctaaaagcgcgcgtaagatcgacgacgatctttaccgcgccgttgatatctatctcaaggcgcatccacagttggatgagatagagagagagaaggtgtgcagcgtgatggatccgttgaagctttcatacgaggcgcgtgtgcacgcgtcgcagaacaagcgattgccggtgcagattgtgctgcacgcgctttac

SEQ ID NO: 275481 - DNA, 317 bp, Glycine max
  unsure (1)..(317): unsure at all n locations
ggcacaagtgagtttgttgatcgagataactagaaacagtgtgatgaaaatgaaggtccttgttttcttcgttgctacaattttggtagcatggcaatgccatgcgtacgatatgttccctctccgaatgaacactggctatggtgcccgtactccggaggtgaaatgcgcaagttggaggcttgctgtggaagcacacaacatctttggctttgagaccattcctgaagagtgcgttgaagcaacanaggaatacatncatggcgaacaatatagatcagactccaaaacagttaaccaacaagcttacttttatg

SEQ ID NO: 275482 - DNA, 436 bp, Glycine max
ggaagaaggaagcatcataaccggccaaagctgctctctcttccatttatcccccataaataaaactaggtgaaaaaaatatactctgtgcttctcatgatgatagtgtagctgaagctgcttctgctgcagcattggtgatttggacacaaaaaaagtttcaaacttttcagttctctgagcttctggtttatcaattttgaaggagttcaatactttaccctattagttggttccctgaaatttgtattggtattgctgtatcagaaattcttctgaacaatctctttaatcaaccatgtcattattggctaaactacgctgtgtcaccatagatgttactggtaccctaatggcttacaaaggggagctcggtgactattattgcatggcagccaaagctgcaggcaaaccttgcccagactacaaacgtatg

SEQ ID NO: 275483 - DNA, 396 bp, Glycine max
ggagtagcgatggagaagaagaagggtgagctaaagtcaattgtccttcctttcctttccactagtcacataatcccgctagtggacatggccagactcttcgccttgcacgacgtcgacgtcaccatcatcaccaccgcacataacgccaccgttttccaaaagtccatcgatttagatgcgagtcgcggtcgccccatcagaacgcacgttgtcaacttccccgccgcacaagtgggtctccccgttgggatcgaagccttcaacgtcgatacgcctcgggaaatgacccccagaatctacatgggcctatcccttctccaacaagtcttcgaaaaactcttccatgactttgcaaccgatttcatcgtcaccgacatgttccacccttggagt

SEQ ID NO: 275484 - DNA, 433 bp, Glycine max
gacaattgatttgaggaaactgaatatgggtgagccttttgctcaaggagcttttgggaaactttaccgaggtacttacaatggtgaagatgttgcaatcaaaatcttggagaggcctgaaaatgatccagcaaaggctcaattgatggaacaacagttccagcaggaggtcacaatgttggccacactaaagcattctaacatagttcgtttcattggtgcatgccgcaagccaatggtatggtgcattgtaactgagtatgccaaaggtggttcagttcgacaatttttaatgaagcgtcaaaaccgctcagttcccctcaaattggctgtcaaacaagctttggatgttgcaagggggatggcttatgttcatggccttggatttatccacagggacttgaaatctgataatcttttgatttttggtgac

SEQ ID NO: 275485 - DNA, 416 bp, Glycine max
gacatacaaaccggcttcgtctggctcaaacaaaagaagagttacacccacaagttcgacaagatcggaaagcttgtctcctacgcgcccgaggtaactgctcatgtgcaacaaggtaaaattaccaaactcaccggggttaagaccaaggagctcttgctctggatcacgctcagtggtatctatgttgatgaccctcccactggcaaaatcaccttcaagacccctgccggcctatttaggtcttttcctgtctccgctttcgagattcaggaggagcctgaggctaaggacactactaagcgcgtgccggataccgctgagcctgtgcaagtcaaggaactctgattttattctcaaacaaggtcgccgtggtggttagcgtgcaaaatatatttatatatatgtttattaat

SEQ ID NO: 275486 - DNA, 281 bp, Glycine max
gacatacattttctcttcgtctggctcaaacaaaagaagagttacacccacaagttcgacaagatctgcaagcttgtatcctacccaccctaagtcactggtcatgttcaacaaggtaaaattaccaaactgaccggagttaataccaaggagctcttgctctggatcacgctcacttatatctatgtttatgaccctaccactcgcaaaatcacctttaagacccctgtcggcctattcatgaattttccattcttccctttcgagattcacaatgagcc

SEQ ID NO: 275487 - DNA, 324 bp, Glycine max
gagagaaagaggagtagtactagtgataaggtgatcataatagagcataatataagagagtgaaaactcatggaggttggcctcaacaagaaggagaacatggggtttgaggaaactgagctaaggcttggactgcctggaaacgtaggaggcactggcactgaagaagtgctcatcaggaagagaggtttctctgagactgaaactgaaactgaggaggatgagtctgctaccactgtggatttgatgcttaatctttcttctaaggaagctgctgctgctgcagatacaactgataagcacaagactttgcctaaggagaag

SEQ ID NO: 275488 - DNA, 429 bp, Glycine max
cccacgcgtccgaattcgagcggccgctttttttttttttttttttttttgttttttatggggccacgatgaagaaatccggggaaattatggcgaccaatttggtttagcaaacaaaacaaagcacaccagaaaaacatctcctgctaatgctatacttgataaactacgggtctaacacattgatcattacaaccggtgagtttcaagaactgaaatcagagcaaaatcttcaaaggaaactaattaaactagtaaaagaaacccagcactttcccaccaacattctttctcctagcttcttcatgatccatgatgccagctgaggtagtcaacacaatatacccaaactgcaacatttgtgtaaacaaaggttagggtcaacaatggaaactgtgtacaaagcctataccatgattaaaaaattta

SEQ ID NO: 275489 - DNA, 392 bp, Glycine max
gtgagaagccttgacttctctgcgacaggcatatcgacaatagtgcaggtgaacgaccttaagaactctcctgggcttggcaagagggagctgaggcaggccaccaatcaggtccttcaattgtttcaggataactaccctgagtttgtggccaagcagatattcatcaatgttccctggtggtaccttgccttttctaggatgatcagccccttcttcacacagaggaccaagagcaaatttctctttgctggcccatccaaatctgctcacacccttttccaatatatagctccggagctggtgccggttcaatatggtggacttagccgagaggctgaacaggaattcaccacttctgatcctgtcactgaggttacaatcaaacccgc

SEQ ID NO: 275490 - DNA, 367 bp, Glycine max
ggactcaaactgctcctgcaacccctgcgcttgcaagtgaggtgttgggagagcaagcttcaagcagagatagcccttaattaggaataatgataaactattaatgtgtagctaaaaacttatgtattatgtctgtgatggttttcgtgcactctggtgttttgtgttaaacaaacatccttagaataaagtggtcatgtcttgcctttcagcaagttcaagtgttttggacttgtgatgggtgtgttaagctcatggttgcttctcttttttttttttttaatgtttggtaattggtcgcttctgtataaagttcggctaatctgaattatgaatctctgcttataatattaaatactattactgc

SEQ ID NO: 275491 - DNA, 419 bp, Glycine max
ggcatgagtttgttgtgagctataagctagtttatcgtgaggagaatatgaagttgtttgttttctttgttgctgcagtagttttggtagcatggccatgccatggcgcaggctaccaaaggttccctctccgaatgaaaactggctatggtgagcgttcttcggaggtaaaatgcgcaagttttaggcttgctgtggaagcacacaacatccgagcctttaaaaccattcctgaagagtgcgttgaaccaacaaaggactacattaatggcgaacaatttagatcagactctaaaacagttaaccaacaagctttcttttatgctagtgaacgcgaagtccatcacaacgacatatttatattcggcatagataacaccgtactctctaatatcccatactatgaaaaacatggatat

SEQ ID NO: 275492 - DNA, 425 bp, Glycine max
ggaggcaaaggtgcaaaagaaggaaagtagttcagatgattcttcttcagaatctgaagatgagaaacctgcacccaaatctgctgttctttcaaaaaagatacctgctaagaatggtgctgcccctccaaagaaaggcaagctcgcctccagttcttctgaagatgactcctctgatgaggatggtgtgcgtgcaaagaagccacagaaaatggttgctgagaaacaaaagaatggagcaactgtgcaaaagaaaaaggtggaaagtagttcagatgattcttcttcagaatctgaagctgagaaacctgcagtaaaagctactgtaccttcaaaaaagacacctactaaaaatggcaatttaagtaccccagcaaagaaaggcaaggcagctagcagctccagttcttctgattcatctgaag

SEQ ID NO: 275493 - DNA, 361 bp, Glycine max
gacagagagaatgagtacggtgggagaagggaaggtgagtagtaatggtcatggatgttgcaaatcagggccaggctatgcttccccactggaagccatttctggtcccagagagtctctcatttatgtaacctctgtctacacagggaccggaatagagaagccagactatttggcgacagtggatgtggatccaaactcttcaacttattccaaagtcatccataggcttcctgttccttatttaggtgacgaattgcatcacacaggctggagttcatgcagctcttgccatggagacccctcagcagaccgacgatttctcatcgtacctgcactcgtatcaggtcgagtatatgtg

SEQ ID NO: 275494 - DNA, 380 bp, Glycine max
gaagcagaagctgaagaagaataataagcagtatgaggacttgattaataagtgcagggagaaccctgagagcgaggaggaaaaagaagaagaggagagcgatgaagagtatgacagtgatggtgagattattgatccggatcagcttcaaaaacccgaagcaaaatctgattcggaagcctctcaatatgaagatgaaaagccagatgctggtgaaggtccttgggaccaaaagcttagcaagaaggacaggcttttggatagacagttcatgaaaaaccctagtgagatcacgtgggatgcggttaacaagaagtttaaagaggttgtggctgccaggggaagaaagggaactggtaggtttgaacaggttgagcagc

SEQ ID NO: 275495 - DNA, 428 bp, Glycine max
aggggacatcgaggcaaaaaatgaaaacccaaagtgcttctctcctctgtctttttctctctcttgctatccttttggctagtggcactgctgcaagtgcaactccaagaagcgcagtgccaagccaccatgtttcaacattcaacagaagcctttttccttccacttttctctttggaattggttcttctgcttaccaggcagaaggagcagcaagtgtagatgggagaggaccaagcatatgggacacctacactagacagcatactgaaaagatttgggatcatagcaccggggacatgggagctgatttttatcatcgatacaagggtgacataaaaatagcgaaagaaattgtgctggactctttcagaatctctatctcatggtcaagaatatttccaaagggcaagggaagcagtaacccc

SEQ ID NO: 275496 - DNA, 401 bp, Glycine max
ggagcaagagtgaagagcgaagagaatggctcccaggggttgaatctttttggctgtgttatgcttctcaacactgtcactgagtcgttgtcttgcggaggataatggacttgttatgaacttctacaaggaatcatgccctcaggctgaagacatcatcaaagaacaagtcaagcttctctacaagcgccacaagaacactgctttctcctggctcagaaacatcttccatgactgtgctgatcagagttgtgatgcttcactgttgctggactccacaagaatgagcttgtctgagaaggaaacagatagaagctttgggttgagaaatctcaggtacattgagaccatcaaagaaactctggaaagggaattcccagaagttgtgtcctgcgctgata

SEQ ID NO: 275497 - DNA, 294 bp, Glycine max
ggatgaggcaagaagttgtattttggcatccccgtggcttcaagaagagaatctcaatggaggcccaggagctgaagcgcgtgttccagatgttcgaccgcaacggcgacgggagaataacgaagaaggagctgaacgactcgctggagaacctgggcatcttcatctctgacaaggacctgagccaaatgatccagaggatcgacgtcaacggcgacggttgcgtggacatggacgagtttggggagctgtatcagaccataatggacgagcgcgacaatgaggaggacatga

SEQ ID NO: 275498 - DNA, 361 bp, Glycine max
gagacaaggtaggactggctttcctttggttgatgcaggaatgagagaactttgggcaacaggatggatacacaacagaataagagtaatagtttccagttttgctgtgaaaatgttgcttctaccctggaaatggggaatgaaatatttctgggacacacttctggatgcagaccttgaaagtgatatcttgggttggcaatatatctcaggaggcttaccagatggccatgagcttgagcgcttggacaatcctgagattcaaggggctaaatttgatccagaaggtgaatatgtgaagcaatggctacctgagttggcaagaatgccaactgaatggatccatcatccttgggatgca

SEQ ID NO: 275499 - DNA, 422 bp, Glycine max
gagtgtgtgagttcattaacatatacaaattctgtgtgttgtgttgtgtacttgtgttaattgtgttgttgttgtaggaaatttaagtgaagagagaatgatgatgaagtctgctatgtgtgcattggtgcttgtggcactggttgtggttgaagtggggcccatggctgaggctgcggtgacttgcaacccaacacagttgactccttgtcttccggcaattaattcaggttctgcaccttcgagtgcttgttgccagaagctgaaggagcaaaagccatgcttctgtggctacctcaaaaaccctagcttgaagcagtatgttaactctcctaatgccaaaaaaaccgttagttcttgtggtattgtctatccaacttgttaagcacctcttatatatatatataaaatgtgtgaacaat

SEQ ID NO: 275500 - DNA, 420 bp, Glycine max
ggcggtggagaaggaaagaatatctatctctcattctctcgtgcctcaacgcttttgtaactcctttcgcttttccattccaacctctttcacacttcagatctgtttcttcatcggttgttcaagtaaatggcctttgtcaccactgctgaagtgtgtgatgcgaacccacagttaattttgagtggggagcttcgtgcccttcagccagtttttcagatttatggccgtcgacaggttttctctggacctatagttaccttgaaagtgtttgaagacaatgttttggttcgtgagttccttgaagagaaaggcaatggaagagttctagttgttgatggaggcgcgagtttacgctgcgctatattgggtggcaaccctgtggtacaagctcaaaacaatggatgggcaagtattatt

SEQ ID NO: 275501 - DNA, 424 bp, Glycine max
gaagcgaatgaggttatgaagaagcaggaggctgagcttgaggagctaaagagggtggttcgagagaaagaggaggagattgaggttttgttggttcagagggaggttgagagggagaagctgaaggtggctgaagcgaatttggagaagcaggcaatggactggatgttggcgcaagaagagctgaagaggctgggtgaggatgctgcgaggcatgctgaggagagtagtgagaccttggaggatttcaggagggtgaagaagcttctcaatgatgtgaggtctgaattagtttcgtctcagcaagcgttggcatcttccagaagcaaaatggaagagcaggagcggttgttggaactgcagctgagtgagcttggggagcagagggcaagtgtgatgtcctacatggaaaatttgaaggatg

SEQ ID NO: 275502 - DNA, 411 bp, Glycine max
ggaattgaaaatcgagaaacggaatgatgaaagagcgtagggagttggatctgtggtttggttgcgatgcggtgtgttgcgaatcactgtccaatcccgatcgcttgatccagacagtgaatcagaatcagaatcagaatcagaatcagagagaaacgatgagggcagtaagtgcgttaatggtggctcggatgttgacgcgggaccactcgctccctgtccttggcaacgaaagcatacccttcggatcggtgtggtggttcgcctatgccggcgtctcctgtttcctcgtcctcttcgctggcatcatgtccggtctcaccctcggactcatgtctctgggcctcgtggacctcgagatcctcgaacgcagtggttctcctgccgagaaaatgcatgctgcgattatac

SEQ ID NO: 275503 - DNA, 365 bp, Glycine max
ggtatttgatttgtcaaatacatcattattggatactcttttatatgtatggcgcaacccaatttttgttttttttttcaatttttaatctcctatccctttttttaattttggaatcgaaatatctaatctaaataatccaaaaattcactcttaatcttgacagtgatatatgttgtatatgtaaatcctagatgtaaaaataggcatacttctcccgggaaaaaaagtaggtaaaaaaatatgctaagtataaattgtctactgatgaaatacgaaagctgatgatattgaaaaaaaaagaattgtaaataaggttcaggttcgacttccatagagattatagatgatatcgtctataatga

SEQ ID NO: 275504 - DNA, 390 bp, Glycine max
ggagaaagaaagaagtaaaagacgtgagtctcagccggggcatgttctgaagtcttcttctctgcttgtatgcaacggccacagccatagtcgcctgaaaccgattgttgttgcagggaaaacacagagatccgggtcgacccgttgcagatccgatccaaataagaaaagatgaatattttcaggttagccggggacatgacccatttggccagcgtcctcgtccttcttctcaagatccacaccatcaaatcctgcgccggtgtctcattgaagactcaagaactctatgcactcgtttttgcttgtcgctacctagatatctttactaattatgtatctctctataataccactatgaagttgatattcttgggaagctcattttct

SEQ ID NO: 275505 - DNA, 177 bp, Glycine max
ggaacagagtgtgataatagtaagacagagcacctactcactcgtaaatggcgaggaagaagatcagagagtaccactccaagaggcttctcaaggagcatctcaaacgtctcgcctctatcgacctccaaatcctctcagctcaggtgacagaatctacggatttaactgacctga

SEQ ID NO: 275506 - DNA, 405 bp, Glycine max
ggcacaagtgagtttgttgatcgagataactagagacagtgtgatgaaaatgaaggtccttgttttcttcgttgctacaatcttggtagcatggcaatgccatgcgtacgatatgttccctctccgaatgaacactggctatggtgcccgtactccggaggtgaaatgcgcaagttggaggcttgctgtggaagcacacaacatctttggctttgagaccattcctgaagagtgcgttgaagcaacaaaggaatacatccatggcgaacaatatagatcagacttcaaaacagttaaccaacaagcttacttttatgccagagaccttgaagtccattccaaggacacatttgtgttcagtatagattgcaccggactttctaatattccatacttcaaaaaaca

SEQ ID NO: 275507 - DNA, 249 bp, Glycine max
caagaaaggtggcgagaagaacattctagtctttgatcttggtggtgggacctttgatgtcagtatcttgacaattgataacggtgtttttgaagttcttgctacaaatggagatactcatcttggaggtgaggattttgatcaaagaataatggagtacttcattaaattgatcaagaaaaagcatggaaaggatattagcaaggacaacagagcacttggaaagctgaggagagaggctgagcgtgc

SEQ ID NO: 275508 - DNA, 409 bp, Glycine max
ataagaggttcacgaggaattgaagaagccttattgaaacacttgggagtgaagcgcaatgaagtaacaccagatggtttgttttctgttggagaaatggaatgcatgggatgctgtgtgaatgctcctatgattacagtggccgattattcaaatggatcggagggatatacttataattactttgaagatataaccccagagaaagtagttgagatagtagaaaagctgagaaagggtgagaagccaccgcacggcaaccaaaaatcccggcgaattaaaagtggaccttgaagaaggaacactactttgttaaaggagcccaaaccttcttcctgccgtgacctggattactgctgaagtgttgtatactttttgcctttaataatgtgaggcttgcatgtcttgg

SEQ ID NO: 275509 - DNA, 407 bp, Glycine max
gtattcggttcacgaggaatctatgatgcctcagtgaaacacttgggagtgaagcgcattgaactaacacctcatagtttgcaatctgatgtacaaatgcattccatggcatgcttcttgaatgctcctatgaatactgaatccaattattcaaatggatccacatggatatacttaatatcactttgaatatataacttactcataatgtaattcatatagtataaaagctcatacatgatgacaaaccaccgcacagcacctcaaaattcccaacaaattaacagtgctacctgacggatggaacactactctgttaagtgagcttaagcctgctgcctgccgtgacctggatcactgctaaagtgtcacatactatttgcctacaataatgtgatgcttgcatg

SEQ ID NO: 275510 - DNA, 324 bp, Glycine max
gcgagaagacgacagacgggggggaaaaagaagagtaattggcaaattgattttggcttgctcggcaacacggtgggagcattcttcacttgtccttggttttggaacgactacagccgagctatctctcattccattttcatccatcaatggctccagtagcatcagcatcttcagattcaatcaagccaagagatgtttgcattgttggtgttgcacgtacaccaatgggtggatttcttggtaccctgtcatctctatctgccaccaagctaggctctatagctattgaagctgctcttaaaagggccaatgttgatccat

SEQ ID NO: 275511 - DNA, 414 bp, Glycine max
gacagcgatggtggcagcacgagtggctcgcgaagatgttaggcataaagggtggcttcttgatgggtaccctcggagttttggccaagcccagagtctggagaaaatgcagatacggcctgatgtgtatatcgtattagatgttcctgatgaaattctgatcgacagatgtgttggtagaaggctagacccagtgacagggaagatatatcatctaaagttttttccaccggatacagaagaaattgaaagcaggctgataactcggcctgatgacactgaagagaaagtcaaatctcgcctaaacatatacaagcaaaatgcagaagcagcattttcctcttactccaacataacacataagattggatggagtcattcaaaagaatcagttttcaaagagattgaattttt

SEQ ID NO: 275512 - DNA, 416 bp, Glycine max
cgggataagcattcattttcatcaactgctaagctaggtgaactctctctcgttgttcccttggcctctcgctctataaatacacatcgcatcattctctcacttgcacattgaaatctgaaccttccggatttcgttttgctttgttcaggtagccagccagtcatggtgctcttcaatgtttcacgcgtagagaccactcccttcgatggccagaagcctggaacctctggtctccgcaagaaggtgaaagtgttcgtgcaacctcattacctccataactttgttcagtcaacatccaatgcattaactgtggaaaaagttagaggtgcaacgctagttgtatctggtgatggtcgttatttttcaaaggaagctattcagattataactaaaatgtcagcagcaaatggagt

SEQ ID NO: 275513 - DNA, 340 bp, Glycine max
ggcacccagagaggatgaagcttcgagagagagagagggatgaggcaaaggggtgacgctccatcaagatgggtatttctagggattccatgcacaagaagcgtgccactggtggcaagaagaaggcattgagaaagaagagaaagtatgagcttgggcgtcaggccttaaacaccaagttatcaagcaacaaaactatccggaggattcgcgttccaagtggcaatgttaaatggagggcattgatgttggataccggctattactcatgtggtattgaaacagttactctcaagactctgattctagatgtttgatacaatgcctcaaacaatgagct

SEQ ID NO: 275514 - DNA, 371 bp, Glycine max
ggaagaagaagaaggtgtgtttcgacgcgcctaggcttgcggtgcggtgtgtgaaagcctcggcgcggcgaaccggtgatactatcgacgatggagagactcggactgggttcaccacacctgccatggaagtcaccacattcaatcgaaccactttcaccgatgctgctgactttcccgtttgggaaaagattggtgctgtcgtcagactcagttatggcctcgggatttatggtgccatggcagttgccggggagttttatatgttcaatcacgggaattgactctctggggggtttcaatcaatcgttggatcccatttggaaaggcctggattttccagttcttcaattattggccttttggttatt

SEQ ID NO: 275515 - DNA, 291 bp, Glycine max
  unsure (1)..(291): unsure at all n locations
ggcacaagtgagtttgttgatcgagataactagggacagtgtgatgaaaatgaaggtccttgttttcttcgttgctacaattttggtagcatggcaatgccatgcgtacgatatgttccctctccgaatgaacactggctatggtgcccgtactccggaggtgaaatgcgcaagttggaggcttgctgtggaagcacacaacatctttggctttgagaccattcctgaagagtgcgttgaagcaacanaggaatacatccatggcgaacaatatagatcagactccaaaac

SEQ ID NO: 275516 - DNA, 276 bp, Glycine max
gaaagagagaagtaacatcaaggtgcagagagaggaattgaagcatgggaagagggaaggtggttctggagagaatacagaacaagatcaatcgccaagtaaccttctcaaagcgcagaaatggtttgctcaagaaagctttcgagctatctgttctatgcgatgctgaaatcgctctcgtcatcttctccagccgtggcaagctttttcagtatagtagcactgacattaacagaatcattgagaagtatcgtcaatgctgcttcaacatgtctc

SEQ ID NO: 275517 - DNA, 423 bp, Glycine max
gacggacgagggtttcgtttcgggtttgacgttgttcacaatcactttctgcgcttcactcactcccttcgtgcggttttctttctttgtcgaactcgtgcgaaaatgcgtgagattcttcacatacagggagggcaatgcggaaaccagatcggagcgaagttctgggaggtggtgtgcgcggagcacgggatcgattccacggggaggtaccagggggacaacgagttgcaactcgagcgagtcaacgtctattacaatgaagcgagttgcggaaggttcgtgccgagggcggtgctcatggatctagagccaggggccatggacagcgtcagatctggtccctacggtcagattttccgacctgataacttcgtcttcgggcagtccggcgccggaaacaactgggccaaaggtcactac

SEQ ID NO: 275518 - DNA, 276 bp, Glycine max
tgggacggctaaaagctaaaaatcagcgaagtgctcaaattagcatggctgtcacggttgcattcttgaatttgatcatcatgtttacagtagtctctacaagcaagtcactgagcttaaactactattcaaaaacatgccctgatgtgtaatgcattgttgccaaggcagtgaatgatgccaattgtttggagcaaaactgttccagctgcacttctgcgaatgcacttccatgactgtttcgttcggtggtgtaatgcctctgtgctgctaaat

SEQ ID NO: 275519 - DNA, 329 bp, Glycine max
aattcgagcggccgcttttttttttttttttttttttttttttttgttgagcttcgttcaggtttggattgaaagttttctcctttacttgttcattttgatttggtttttcttgctttgcattttgagcaccccttttgatctggggcgttctggtgtttgtgtggttctctgttttagtgttttctttttggggatttcggagtggaagtgggagtttgggtgatctgggttttgagttgaggtaaggggtttgttggatgcacctattggcttaaatcatttgaagggtttttatgcttagttgcaaagatgcttcctgatcagag

SEQ ID NO: 275520 - DNA, 371 bp, Glycine max
gattctctctatgagggaattgatttctactccggtgttactcgtgccagattcgaggaactgaacatggatctctttaggaagtgtgtggagccggtggagaaatgtttgagggatgctaaaatggacaaaagaagtgttgatgatgttgtccttgttggtggttctaccagaattcccaaggttcaacaactgctgcaggacttctttaatggaaaggagctgtgcaagagcatcaatcctgatgaagctgttgcatatggtgctgctgttaaggctgcaattttaagtggtaaggccaatgaaaaggttaaggaccttttcttcttggaggtaaccctttaatttttgggttggaaacctgttgccgt

SEQ ID NO: 275521 - DNA, 317 bp, Glycine max
ggggccaaggtagtggctcagcgtgcccgatatcttccaccctttggctattcctaaccattgagtacaacttcacattttagaagaataccccctcttttgctgcatcagaggagttgtaaattaatagcatggctgcacaagctcttgtatcatcatcttctcttaccttctcagcggaggctgcaagacaaagtcttggaccaagatcactccaatctccatttggcttctccagaaaagcctcctttcttgttaaggcagctgctaccccccctgtcaagcaaggatcagacagacctttggggtttgcatca

SEQ ID NO: 275522 - DNA, 370 bp, Glycine max
ggttgatgccattaaagagttgcaatctcatggaaatattcgtttgaagagaatgggggaacttgatactagaccattccttgaagcaatgaagcaaagatataatgaggaggatgctgaagagagagcttcagaactgtgttcattgtgggaagaatatctaaaggacccagattggcatccattcaaagttatcatggttgaaggaaaagaaaaggaaattattagagatgacgatgaaaagctgaatgggttgaaaaatgacttgggtgaaggggcatataaagcagtggtggaagctttgttggaaataaatgaccttaatcctaggggacgatcctaaacctaagattaatggaactttaaccaa

SEQ ID NO: 275523 - DNA, 417 bp, Glycine max
ggtggctaggggtaaccaactctatggaaacacgacaacagattaggattacgtaccatttccttgatcctttttctgactcttactaaaagtctaagctcaactgcatttgatgtcagtgaatatgaagattgggagagcgttgatacagcagattctatcttaagttatggaagtgaattgggagacatggaagaaaatgaatggcagatggtgcaaacgaaaggaaaccaatttgtggtgaacgaccaacctttctatgtcaatggattcaacacatactggttgatggtatttgctgctgatgagtccacacgagggaaggtcactgaggtgttcaaacatgcatcctctgtgggtatgtcagtttgtaggacttgggccttcaatgatggccaatggcgtgctcttcagaaa

SEQ ID NO: 275524 - DNA, 379 bp, Glycine max
ggagtgagcaagagtgaagagcgaagagaatggctcccaagggtttaatctttttggctgcgttatgcttctcagcactgtcactgagtcgttgtcttgcggaggataatggacttgttatgaacttctacaaggaatcatgccctcaggctgaagacatcatcaaagaacaagtcaagcttctctacaagcgccacaagaacactgctttctcctggctcagaaacatcttccatgactgtgctgttcagagttgtgatgcttcactgttgctggactccacaagaaggagcttgtctgagaaggaaacagatagaagctttgggttgagaaatttcaggtacattgagaccatcaaagaagctttggaaagggaatg

SEQ ID NO: 275525 - DNA, 402 bp, Glycine max
atagtcaaagagtatgttttgggctcgcagatggagctggggaggagggaagttaaggacaatatagtacgacagcaggagcttgcagcatatttcactcactgcaaccttcagacacctcacttgaggctagctttgcagaatgcaatgactgtctgcttcagggcgaagaaccttgccactgctgcaaactttgcccggaggctacttgagacaaatcctaccaatgaaaaccaagctagggcagcaaggcaagtggtagcagctgctgaaaaaaacatgactgatgctacccagttgaactatgatttccggaacccatttgtaatttgcggtgcaacctacatgccaatctatcgaggacagaaagatgtctattgcccatattgttcttcacgtttt

SEQ ID NO: 275526 - DNA, 392 bp, Glycine max
ggggaataccaatattagagacgctccacatcaccctgggttttggactcaatcagacggtgatggtgtgtccatctttaattcgaagcatatttgggttgatcattgctctttgtctaattgtcgtgatggtctcattgatgccattcatggatccacggccatcaccatctccaacaattacatgacccatcatgacaaggttatgcttttggggcacagtgattcgtacactcaagacaaggacatgcaggtcactatagcattcaatcattttggagaaggccttgtccaaagaatgccaaggtgtagacacgggtatttccatgtggtgaacaacgactacacccactgggaaatgtacgccattggtgggagtgcaaaccctacca

SEQ ID NO: 275527 - DNA, 399 bp, Glycine max
ggttgaagtggggcccatggctgaggctgcggtgacttgcaacccaacacagttgactccttgtcttccggcaattaattcaggttctgcaccttcgagtgcttgttgccagaagctgaaggagcaaaagccatgcttctgtggctacctcaaaaaccctagcttgaagcagtatgttaactctcctaatgccaaaaaaaccgttagttcttgtggtattgcctatccaacttgttaagcacctcttatatatatatataaaatgtgtgaacaatatatatatattgattaaaaaatatagtttaatttatatacacactttgatcctataaaaacatcttgacacaagcattcaatagaatttcaccactttatcatgacattttactataatgatgt

SEQ ID NO: 275528 - DNA, 338 bp, Glycine max
ggtactttcgatgatgaaaatgataacccttctgaaggtgatgtggcgttgagcaaggggctccagccttttgtcaggaatagcaaaaacaagcatatgattgagcaactacttatgaaggagtcattctcaagggaagaatgtgaccggttaataaaaataataagatcaagagtggtagatcctgcaaatgatgatgatggggataagagccaacggatatgtccaccaggatcctggaaagtgattaacctaacctcaatgatgttgccataatgaaggcaaagaaatggctgcaggaaaggaattcagctttggatccaattccggatttaggt

SEQ ID NO: 275529 - DNA, 430 bp, Glycine max
ggcacaagtgagtttgttgatcgagataactagagacagtgtgatgaaaatgaaggtccttgttttcttcgttgctacaattttggtagcatggcaatgccatgcgtacgatatgttccctctccgaatgaacactggctatggtgcccgtactccggaggtgaaatgcgcaagttggaggcttgctgtggaagcacacaacatctttggctttgagaccattcctgaagagtgcgttgaagcaacaaaggaatacatccatggcgaacaatatagatcagactccaaaacagttaaccaacaagcttacttttatgccagagacctcgaagtccatcccaaggacacatttgggttcagtataaatggcaccgtactctctaatattccatactacaaaaaacatggatatggggtggagaaatttaac

SEQ ID NO: 275530 - DNA, 424 bp, Glycine max
cattgacaagcgtgttattgagaggtttgagaaggaagctgctgagatgaacaagaggtctttcaagtatgcctgggtgctggacaaacttaaggctgagcgtgaaagaggaatcaccattgatattgctttgtggaagtttgaaacaacaaagtattattgcacagttattgatgcgcctggacatagggatttcattaagaatatgattactgggacatcccaagctgactgtgctgttcttatcattgattcgaccactggtggttttgaagctggtatttccaaggatggacagactcgtgaacatgctctgctttcattcacccttggtgtgaaacagatgatttgctgctgtaacaaaatggatgctactacacccaagtattccaaggccaggtatgatgaaattgtgaaggaagtc

SEQ ID NO: 275531 - DNA, 427 bp, Glycine max
ggcacaagtgagtttgttgatcgagataactagagacagtgtgatgaaaatgaaggtccttgttttcttcgttgctacaattttggtagcatggcaatgccatgcgtacgatatgttccctctccgaatgaacactggctatggtgcccgtactccggaggtgaaatgcgcaagttggaggcttgctgtggaagcacacaacatctttggctttgagaccattcctgaagagtgcgttgaagcaacaaaggaatacatccatggcgaacaatatagatcagactccaaaacagttaaccaacaagcttacttttatgccagagacctcgaagtccatcccaaggacacatttgtgttcagtatagatggcaccgtactctctaatattccatactacataaaacatggatatggggtggagaaattt

SEQ ID NO: 275532 - DNA, 284 bp, Glycine max
ggttgttgttttcagtgtagtggaagaatcactcgcttatgcatttccacaccacaccatggcctcaaccaacgctctctcttcagcctccattctacgctctcccaaccgccagtctctgacccgaagagcgaaccataatggaagagtaaattaccggaaaccgaataaccgtttctccgtgaaagcctccggcaaagagattgcctttgaccagcattcccgctctgctatgcaggccggcattgacaagctcgccgacgctgttgggctcacttctgggc

SEQ ID NO: 275533 - DNA, 299 bp, Glycine max
gagagagagagagaaacaaagcaaaagccatttggatcctctcttctcttctttgatctccgttacccttttcgttttctcaacacagagagagagagagagtctttcggagttcgtttgcgtgtgttgtgtgatcagtcaccgatggcagcaccacctgcgagggcacgtgccgattacgattacctcatcaagcttcttcttattggcgatagcggtgtcggaaagagttgtctgcttttggcaattttctgatggttccttaacaaccagtttattaaccaccatggccttgaatt

SEQ ID NO: 275534 - DNA, 381 bp, Glycine max
  unsure (1)..(381): unsure at all n locations
ggattcttcttcttcttcaccaccctgtgatcgcggactcaacactctcgctagacacttccttccgcaaatggcttctcacgacagcatctccgcttctccaacctccgcttctgattccgtcttcaatcacctcgttcgtgctcccgaagatcctatcctcggggtaactgtcgcttataacaaagatccaagtccagttaagctcaacttgggagttggtgcttaccgaactgaggaaggaaaacctcttgttttgaatgtagtgaggcgagttgaacagcaactcataaatgacgtgtcacgcaacanggaatatattccgatcgttgggcttgctgattntataaattgagtgctaaagctatttttgggctgaca

SEQ ID NO: 275535 - DNA, 418 bp, Glycine max
ggctcaagtgagtttgctgatcgagataactagggacagtgtgatgaaaatgaaggtccttgctttcttcgttgctacaattttggtagcatggcaatgccatgcgtacgatatgttccctctccgaatgaacactggctatggtgcccgtactccggaagtgaaatgcgcaagttggaagcttgctgtggaagcacacaacatctttggctttgagaccattcctgaaaagtgcgttgaagcaacaaaagaatacatccatggcgaacaatatagatcagactccaaaacagtttaccaacaagcttacttttatgccagagacctcgaagtccatcccaaggacacatttgtgttcagtatagatggcaccgtactctctaatattccatactacaaaaaacatggatatggggtg

SEQ ID NO: 275536 - DNA, 398 bp, Glycine max
  unsure (1)..(398): unsure at all n locations
tcaatcagcatgaggcaatttcaaagtttatacaaggaactgttgctgatggtgcaccagtagtacctatttcagcacagttgaagtataatattgatgttgtgtgtgagtatattgtgaagaagatcccaatccctgaaaggaactttgtttctcctcctaatatgatcgctattcggtcatttgatgtcaataaacctggttatgaggttgatgaaataaaaggaggtgtagttggtgggagcattttgaggggtgttttgaaggtcaatcaattcattgaagttcgtcctgggattgctggtaaagatgagagtggaaatatcagatgcacgcccatatactcaagaatagtttcattgtatgctgaacaaaatgagcttcaatntgctgttcct

SEQ ID NO: 275537 - DNA, 403 bp, Glycine max
gagtactagcagtggggtccggggtgaggatgttgtatcctttggaaatcagagtgagctttccccccaacgtgctatttttggctgtgaaaatgatgagactggtgatatttataatcaacgtgctgatggcgtcatgggtttgggccgtggagatctaagtatcatggaccaactggttgagaaaaaggtgataagtgatgcgttctcactgtgctatggtggaatgggtgttggtgggggtgctatggttcttggtggcatatctcccccatctgacatggtctttacacattcatatcctgttcgaagtccatattacaatattgatctgaatgagatacatgtttcggtgaagcgactgcatttaaacccataggtttttgatgggaaacatggaact

SEQ ID NO: 275538 - DNA, 431 bp, Glycine max
tatggggatatacagccttggtaagaacgccgttctgcggaatatatgactcatgctcctttaggttccttaaattccgtgggtggcgtagctacagagattaatgcagtcaattatgtttctcctagaagttggttagctacttctcattttgttctaggattcttcctatttgtaggccatttatggcacgcgggaagagctcgcgcagctgccgcaggatttgaaaaaggaattgatcgagattttgaaccagttctttccatgactcctcttaattgagacatgagatccgatgaagtagaaatcacttttattttactataaatattactataaatattgggttgaattgagcgggtcgtatttaaataagaatttctttttcttttttcttaggttctatcgaaaaaaaaagattcgatagaaac

SEQ ID NO: 275539 - DNA, 412 bp, Glycine max
ggattttgaaggacgttcagatggaagatccattaaaaaggttctgtctcatgtggctcccttgaagctggttttggtgcatggatcagctgaagctacagagcatctgaaacagcactgcctgaagcatgtctgtccacatgtttatgctccccaaattgaagagacaattgatgttacctctgatttatgtgcttataaggttcaactgtccgagaagctcatgagtaatgtactcttcaaaaagctgggagattatgaaatagcttgggttgatgctgtagtagggaagacagaaaatgatccgctttcgctgctccctgtttctggagcagctcctccgcataaattctgtcttgttggtgatttgaaattggcagatatcaaacaggttctcttccagcagggtgtt

SEQ ID NO: 275540 - DNA, 290 bp, Glycine max
ggagacagagagaatgagtacggtgggagaagggaaggtgagtagtaatggtcatggatgttgcaaatcaaggccaggctatgcttccccactggaagccatttctggtcccagagagtctctcatttatgtaacctctgtctacacagggaccggaatagagaagccagactatttggcgacagtggatgtggatccaaacctctccaacttattccaaagtcatccataggcttactgctccttaattaggtgacgaattgcatcacacaggctggaattcatgcagc

SEQ ID NO: 275541 - DNA, 311 bp, Glycine max
ggcagatgagggtgctatttctctatggagaggaagcactgctaatgttatccgttatttccccacccaggctttgaactttgcatttaaggattacttcaagaggcttttcaactttaagaaggatagagatggctactggaaatggtttgctggcaacttggcctctggtggtgctgctggtgcatcatcccttttgtttgtttactctcttgactatgcccgtacccgtcttgccaatgatgcaaaggctgcaaaaaaaggtggagagagacaattcaattggtctcgtgatgtctacaagaagacat

SEQ ID NO: 275542 - DNA, 432 bp, Glycine max
gaacacaaagggggtgttagtttatttaccatatccaaatctttggggtggggttgtgtactggggttaatggtgttgttgttgtaggaaatttaagtgaagagagaatgatgatgaagtctgctatgtgtgcattggtgcttgtggcactggttgtggttgaagtggggcccatggctgaggctgcggtgacttgcaacccaacacagttgactccttgtcttccggcaattaattcaggttctgcaccttcgagtgcttgttgccagaagctgaaggagcaaaagccatgcttctgtggctacctcaaaaaccctagcttgaagcagtatgttaactctcctaatgccaaaaaaaccgttagttcttgtggtattgcctatccaacttgttaagcacctcttatatatatatataaaatgtgtgaacaat

SEQ ID NO: 275543 - DNA, 259 bp, Glycine max
ggattttgaaggacgttcagatggaagatccattaaagagattgtctctcatgtggctcccttgaagctggttttggtgcatggatcagctgaagctacagagcatctgaaacagcactgcctgaagcatgtctgtccacatgtttatgctccccaaattgaagagacaattgatgttacctctgatttatgtgcttataaggttcaactgtccgagaagctcatgagtaatgtactcttgaaaacgctgggagattat

SEQ ID NO: 275544 - DNA, 333 bp, Glycine max
gggaaaaagtttatgcaagatgatgttgctgacggcatggaacagtcactgggtccaagagcctctagttttcgatccttgagaaggtctgttggggtccaagctgaagcataacatacaaccattggattaactggaagagacaggccaggattgctttcacaagtgtctgctgttgttgcagacctcaaatgcaatgtggtagcagcagaagtctggacccacaattcaagaatggcatctgttgtttacatcacagacgaagcgacgggattggccattgacgatccggatcgccttgccaagattaagcagcttctactgtatgtgctg

SEQ ID NO: 275545 - DNA, 351 bp, Glycine max
gagggtcagttggagtttaaggctatactgtttggtcccaagagggcaccttttgacctctttgacacaaggaagaagcctaacaacattaagctctatgtccgccgtgtctttattatggacaactgtgaggagttgattcctgagtatttgggctttgtcaagggtattgttgattctgaagatctcccactcaacatttcaagagaaatgttgcaacagaacaagatcttgaaggtcatccgtaagaacttggtcaagaagtgccttgagctcttctttgaaattgcagagaacaaggaggattacaacaagttctatgaagctttctctaaaaacttaaagcttggt

SEQ ID NO: 275546 - DNA, 368 bp, Glycine max
gggaagaggaagggttgttctggaaagagtagagaacaagatcaaccgtcaagtaacattctcaaaacgcagaagtgggttgctgaagaaggcctttgagctttctgtgctatgtgatgctgaagttggccttatcatcttttctagccgtggcaagctttttcagtacagcagcactgatattaccaaaatcattgagaggtatcgccaatgtcgttacagcaagtcacacactggtgattcattggaacacgattcacagagcgcataccatgaattcttgaaattaagagcgaaatatgaatctcttgagcggacacaaaggcattttcaagggagaagaccttgagccacttagctttaaaaga

SEQ ID NO: 275547 - DNA, 359 bp, Glycine max
gatcgtggatttctctgaagaaaagggaagacaagctgcaatcctcgtcgagaaaattaactccaattttcattctaagttaggatttccgtctgccatatttgtgaaatgtgatgtgagtaatgcaagggatctagctgctgcatttgaaaagcattttttgacatatggaggactagacatttgtattaacagtgcggggattagtagttctgtaccattccgtgatgatcaaacggatggcacccgaacatggagatacactgttaatgtgaatttcactgctgttatcgattccactcgccttgcgattaaaatcatggaagcttccaaaaggcctggtgtgattatcaacttgg

SEQ ID NO: 275548 - DNA, 371 bp, Glycine max
gggccaggtaaccagaaaggtgtaccattccaaggggggtggttgttctttggcaacacttccttgccaacatgggtttctcaaaaaattctatccccaaaagccgtcccactggtggcaggaaaaaggctggaggaagaaaagaagtatgagcttgtcgccagcctgctaacactaaactgtcaagcaacaagacagtcagggaggatccggtttagaagtgaaatgtgaaatggagggcactgagattggatactggaaattactctctgggaagtgaagctgtaactcgcaagactcgtatactaggatgtggttacaatgcctcaaacaacgagcttgtgcgtactcagactcttgtaaaagtgcta

SEQ ID NO: 275549 - DNA, 424 bp, Glycine max
  unsure (1)..(424): unsure at all n locations
ggaggtgggaggggaaggacctgaaccttaacttggcgggattggaaagtgcccccaaaccagtgtattttttccatgaatcccaaaaaatctgtacaaaatgaggccccaaatgatttctgtggcaaacgcttgttatagggctattgcctttgatttcaaaggctatggactttctcagcaaccagcaaagcctgaaaaggaaaccatgtttgatctggttcatgaaattgtaagccttttggatgctttgaacatcttcaaagccttccttgttggaaaggattttggtgccattccaggacatcttactactgcagtgcacccaaaaagagtagctggtatcataactttaggcattcctttcatgcttncgggtccctctgctgtggagagccaccttcagctttccaaaggggtttat

SEQ ID NO: 275550 - DNA, 397 bp, Glycine max
agtccggcttacagatgacaaaaaaacttcagattgtgaacgagtaaaaaagaaagatcgtgtttggtattatatttaacagcgatgtagacgtattgaagatgttaaagtttggatcacacaaattctctgagaggcaagcactttttacatgagctaagagtgacaattactactactaggcaccaccagcacccttgtttgatccaggtgagttaaagtcatgctctttttacagagctttgatctcacagtttgttgccacattctttttcctctacatcactgtcttgactgtcatgggtttcaacatggcacccaacaagtgcttttctgttgtcattcaaagaatttcatgggctttttgtggcatgaatctttcccttttctacttcac

SEQ ID NO: 275551 - DNA, 383 bp, Glycine max
ggagagggggagaaagaaaaaagccctttgaattcgaaggttaaaagaatcatcaggattcacataggtcaagccgggatccaagttggcaactcctgctgggaactctactgcctggaacatggcatccagcccgatggcatgatgccaagtgactcctccttcggtgtagcccacgacgccttcaacaccttcttcagcgaaaccggatccggcaagcacgtccctcgcgccgtcttcgtcgatctcgagcccaccgtcatcgacgaagtccgttgtggcacttaccgtcaactcttccaccccgaacaactcatctccggcaaggaagatgccgccaacaactttgccagaggccactacaccgttggcaaagagatcgt

SEQ ID NO: 275552 - DNA, 316 bp, Glycine max
ggagaacaaacaagaatcaagagagagaggtgttactacgttagtctatgaacagtcaccccgagagactgaaatttccagaccctcaaatcaaactcttctattctctcatcaatcaatcaatccagttccctctcggataggaatgggaatatatctcagcactccaaaaactgaaaagttttctgaagatggtgaaaatgactgtcttagatatggtttatcatccatgcaagggtggcgtgcaacaatggaagatgctcatgctgcatatactgatctggatgagtccacttcattttttggtgtctatgat

SEQ ID NO: 275553 - DNA, 423 bp, Glycine max
gacggctaaaagctaaaaatcatcgaagtactcaaatgagcatggctgtcacggttgcattcttgaatttgatcatcatgttttcagtagtctctacaagcaagtcactgagcttaaactactattcaaaaacatgccctgatgtggaatgcattgttgccaaggcagtgaaggatgccactgctagggacaaaactgttccagctgcacttctgcgaatgcacttccatgactgtttcgttcgggggtgtgatgcctctgtgctgctaaattcaaaaggaagcaacaaagcagaaaaagatgggccaccaaatgtttctttgcatgcattctatgtcattgatgcagcgaagaaagcactagaagcttcatgcccaggtgtggtctcttgtgctgacatccttgctctagcagcaagggatg

SEQ ID NO: 275554 - DNA, 375 bp, Glycine max
gatagaagaagcagaaagagaagcattagcaagagcaagaagaactagtctaagcagaaatggcctcttcggtgatggcatctgtggccctcaaacctgcccctttcactgttgagaagtcctcagttagaggccttccctccctctcaaggaactcctcttcattcagagttgtggccagtggtggcaagaagatcaagactgacaagccttatggaattaatggtggcatggctttgagggaaggagttgatgcatctggcaggaaaggaaagggaaagggcgtttaccagtttgtagacaaatacggtgctaatgtcgatggttacagtcctatctacgacaccaaggactggtctccaccggtgatgtcta

SEQ ID NO: 275555 - DNA, 393 bp, Glycine max
  unsure (1)..(393): unsure at all n locations
gaggcagagagagagagagaaaagcgtgaatcatgtcggacgaagagcatcacttcgattctcaggcggatgcgggagcgtccaagacgtatcctcagcaggctggtaccattcgcaagaatggctacatcgtcatcaaatccaggccttgcaaggttgtagaggtctctacgtcaaagacaggcaagcatggacatgcaaagtgtcactttgttgcaattgatatttttaatgggaaaaagcttgaagatattgttccatcatcccacaactgtgatgttccacatgtgaatcgcactgactatcagcttattgatatctctgaagacggctttgtgagtctgttgactgataatgggaataccaaagatgatctgaagcttnctactgatg

SEQ ID NO: 275556 - DNA, 405 bp, Glycine max
gtcggtggtacagaccaaggatccggaatgggtctggttctgtccacaggaccggaagtatccaaatgggcatcgattgaacagagcgacaaataatgggtattggaaggcaacggggaaggatcgtagaatcaagtctgggaaggatttaattggaatgaagaagactttggtgttctacactggtcgtgcacccaaagggaataggaccaattgggttatgcacgagtatcgtcccactttgaaggagcttgatggtactaatcctggacagaatccatatgtcctttgtcgtttgtttaagaaacatgatgagagccttgaagtttcacactgtgatgaagcagagcagactgcttccactcctgtggcttactccacagaggaaatacaatctgatcttgc

SEQ ID NO: 275557 - DNA, 390 bp, Glycine max
  unsure (1)..(390): unsure at all n locations
gagaccagagcaggatcaaaccaaaccctaatatcaacttcatctgtttcatttgattttgattcgaacccagacagagacatagcctctttctttcgtttggagaaacanacccctcgtttcaatcattgatcctttcctgttagatacgaattactcttccaatttcatcatggccaaaacctccttcaagcttcagcatcctttggaaagaaggcaggctgaagcttctcgcattagagagaaatatcctgatagaatacctgtgattgtggagaaagctgaaagaagtgacattcctgatattgataagaaaaaataccttgtccctgctgatttgactgttggccagtttgtatatgttgtccgcaaaaggattaagctcagtgc

SEQ ID NO: 275558 - DNA, 209 bp, Glycine max
gaatctaaagattaattaaattgagggaaaaaaaaaaaaaaacatggtggtgaaagtgtattgtccaacctatggatcccccaagagggtcctggtgtgtttgattgaaaaggaaattgagtttgaaacaatgcatgttgatcttttcaagggagaggataaggaaccttggttccttaagctgcaaccatttggatccctttctggta

SEQ ID NO: 275559 - DNA, 333 bp, Glycine max
gacgagtaaaaagaaagaaggtttttgtagtatagttaacagcatggagagggaggaagatgttaaagttggagcacagaaattctcggagaggcaagcactgggtacaggagctaagagtgacaaggactacaaggaggcaccaccagcacccttgtttgagccaggggagttaaagtcatggtctttttacagagctgggatcgcagagtttgtggccacattcttgttcctctacatcactgtcttgactgtcatgggtgtcaacagggcacccaacaagtgctcttctgttggcattcaaagaattgcatgggcttttggtggcatgat

SEQ ID NO: 275560 - DNA, 378 bp, Glycine max
ggctgcaaatgtggaccgaactgctcctgcaaccgctgcacttgcaagtgaggtgttgggagagcaagcttcaagcagagatagcccttaattaggaataatgataaactattaatgtgtagctaaaaacttatgtattatgtctgtgatggttttcgtgcactctggtgttttgtgttaaacaaacatccttagaataaagtggtcatgtcttgcctttcagcaagttcaagtgttttggacttgtgatgggtgtgttaagctcatggttgcttcttttttttttttttttaatgtttggtaattggtcgcttctgtataaagttcggctaatctgaattatgaatctctgcttataatattaaatactattactcg

SEQ ID NO: 275561 - DNA, 375 bp, Glycine max
gacgatgagtcgatttgataactaagatattgttattcgtgatattgatccaatttgatatcatcgaaatccaatttataccattgttgaattaattatcgatgaaagatttatcatctctatgggattaaatcccgaattttttattggaaatttaagagaaataaaacataataaagattatggaagtaaatattcttgcatttattgctactgcactgtttattctagttcctactgcttttttacttataatttacgtaaaaacggtaagtcaaagtgactaatttcactgaaatctgacttcttcatttttatcaatgtaatcaatgattaaaaaaaatgaaaaaggttttcaatttttggtcttagtct

SEQ ID NO: 275562 - DNA, 392 bp, Glycine max
agatcaaagtgactttcccatcaggtcaagagcggaatgcaccatcacaggcaattaggaaatgcttgcactgtgagataaccaagacaccacagtggagggcagggccaatggggccgaaaacactctgcaatgcttgtggcgtgcgctacaagtcaggccggcttttccccgaatatcgccctgcagcgagtccaacgttttgtgcggccatgcactccaactcccataagaaggtccttgaaatgaggaacaagacaggcaccaaatctggctttgcaactgtttctgctgcctcaccagaactcattccaaacactaacagcagccttacccttgaatatatgtgaaagggggaaagggaggattctagttggaagaatctctaattc

SEQ ID NO: 275563 - DNA, 395 bp, Glycine max
gacactcatctactccacattgtcctctcaccggttctccaattgaaaaggcttcttcatcaaaagaaaaatggctcaaatttgtttgctcttggtggggcttctctcaatgttctcctctgcctatggctacggatatggtggtggctgggttaatgcacatgccaccttctatggaggaagtgatgcctcaggaacaatgggtggggcatgtggatatggaaacctctacagccaaggttatggaacaaatactgctgctttgagcactgctttgttcaacaatggtcttagttgtggctcatgctatgagataaggtgtgtgaatgaccataggtggtgcctccctggctccattatggtcactgccaccaatttctgtcctccaaacaatg

SEQ ID NO: 275564 - DNA, 396 bp, Glycine max
ggttctagtgtgtgattgtttgttgttgtgactggttcttcttcttttgttgttctgtgtttgtgtttgttttttctctcacctgaaaatgtcttgctgcggtggtaactgtggttgcggaagctcctgcaagtgcggcaacggctgcggaggctgcaagatgtacccagacttgagctacactgagtcaaccaccaccgagaccttggtcatgggagtggcacctgttaaggctcaatttgagggtgctgaaatgggtgtgcccgctgagaacgatggctgcaaatgtggaccaaactgctcctgcaacccctgcacttgcaagtgaggtgttgggagagcaagcttcaagcagagatagcccttaattaggaataatgattaactattaatgtg

SEQ ID NO: 275565 - DNA, 331 bp, Glycine max
ggaagtgggaaagagacagaggcgaaaatggttgcgactttgagtcttccgatcatagacctctcttctccccatcgtctttccacagccaattccattcgtcaggcatgcgtggaatatggtttcttttaccttgtgaaccatggggtggacaccgattttgtgagcaaagtcttcgaccaaagttgcaagttcttctcgcttccggtccaacgcaaaatggacctggcccgcaaggaatatagaggctacactcctctctatgctgagacacttgatcctacttcactctccaaaggtgatccaaaagagacctattacattggtccta

SEQ ID NO: 275566 - DNA, 333 bp, Glycine max
  unsure (1)..(333): unsure at all n locations
ggatctgtgggtggattgcatttgcagagagagagagagagagagagggaagacggttgtggggattcgatgggggccaccgttcactcgccgctagtcacttatgcttccgacatatctctgcttacactccgtcctgcgtttgtcatacttctatggtacaccatgactcttgctgacggatctgtttccgagacattccattatttaaggcagaatgggttgcagggtttgctacatatatggcccaccctcactcccaccgnctgcaaaatcattgcagtctatgctgcatttgaggcagcacttcagcttcttcttcccgggaaaacc

SEQ ID NO: 275567 - DNA, 415 bp, Glycine max
  unsure (1)..(415): unsure at all n locations
ggaacacanntttggaaggaagctcttacgtgaaagctgctaaaaagttgcatgagattgatcctttacaaaagcctaaacaggaccgttatgctcttaggacttcaccacaatggcttggtcctctaattgaagtgattagattctctaccaagtcaattgagagggagattaactcagtcaatgacaaccctttgattgatgtgtcaaggaacaaggcacttcatggtggtaacttccaaggaactcctattggagtctccatggataatacacgtttggctcttgcttcaattggtaaactcatgtttgctcaattctctgagcttgtcaatgattattacaacaatggtttgccttcaaatctcactgccagcagaaaccccagcttggattatggattcaaggggagctg

SEQ ID NO: 275568 - DNA, 392 bp, Glycine max
gggagcagaggacaagatgggtagtgtgagttatagcaatctgaagaacgccatgatagcattcttggtccctctaccctccatcctattctacctctcattccaatcggccattagtactccttcttcttggtcttctctgtggacatggtgctatcaccaccctctgctattggccaatgtccttttcttcttcaatgtcaatttcctcttctggctcatcggcctaatccaatccagccactggatgattgacccgtattggacagtgatacctgtgatgcttgttcattactattcaactcaccctttggcacagtatcagtggtggaggtcgaggatcgtaacgtttgtgacttgggcgttgaagtgtaggctgatccacaactact

SEQ ID NO: 275569 - DNA, 421 bp, Glycine max
  unsure (1)..(421): unsure at all n locations
gggttacgaggtaaacataatggtagtagcgcagctatttctccattagctggtaagctgtttgttgttattggggctggtggtgctgggaaggcacttgcttatggtgcaaaagcaaaaggagctagggttgtgattgcaaaccgtacctatgaccatgccagaaaacttgcttatgcaattggaggagatgctttagcccttgctgatttagataattaccatccggaggatggtatgattcttgcaaacacaacatcaattggaatgcaacctaaagttgatgagacgcctgtttctaagcacgctttgaaatattactccctagtttttgatgctgtctacacgcccaagattactagactcttgaaagaagcagaagaatcaggagccactattgtaacaggatnggagatgttta

SEQ ID NO: 275570 - DNA, 426 bp, Glycine max
gacacgcagttgtattgtagaactgaacaagggggtctctttctctttctctgtctgcttcttcactttctctcgtttcaatcgaaaaaaatcatgggcagaaaattcttcgtcggtggcaactggaaatgcaatgggaccactgaggaggtgaagaagattgttactactttaaatgaagctaaagtccctggagaagatgttgtagaagttgttgtgagccctccttttgtgttccttccttttgtaaaaagtttgctgcgccctgatttccatgtctcggcccaaaattgttgggttcgcaaaggtggtgcttatactggagaggttagtgctgaaatgcttgttaatttgggaattccttgggttattattggtcactctgaacggaggcagcttttgaatgaatcaaatgagtttgtggga

SEQ ID NO: 275571 - DNA, 405 bp, Glycine max
  unsure (1)..(405): unsure at all n locations
ggatcgggggtttcttttgaaaaaaagggaagccaggcggcattcttcgtcaggaaaataaactccaattttcattctaggttaggatttccgtctgccaaatttgtgaaatgtgatgtgagtaatgcaggggatctagctgctgcatttgaaaagcattttttgacatatggaggactagacatttgtattaacagtgcgggggattagtagttctgtaccattccgtgatgatcaaaccgatggcacccgaacatggagatacactgntaatgtgaatttcactgctgntatcgattccactcgccttgcgattaaaatcatggaagcttccaaaaggcctggtgtgattatcaactngggttctgcttctggtctttatccaatggtggctgacccaattta

SEQ ID NO: 275572 - DNA, 384 bp, Glycine max
  unsure (1)..(384): unsure at all n locations
ggaaggcaggaaaggtagggttttggtccttgccgaaggaaagagaaaagaggatggtgtaaggttcgggaatctgcccaaaccccgtggtggtggacccccgccacaacatgctgggtcggctcgcctcgattgtggcaaaggagctgctgaacgaacaaaaagtggtggtcgtgcgatgcgaaaagatttgcatttccggtggtctggtgaggcaaaaaatgaagtacttgaggttcctccgcaaacgcatgaacaccaagccttcccacggccccatccactttcgcgcacactgcaagatcttctggcgcaccgntcgtggaatgataccacacaagacaaagcgtggggaagccgctctcgctcgtttgaaggtttatg

SEQ ID NO: 275573 - DNA, 336 bp, Glycine max
  unsure (1)..(336): unsure at all n locations
gatagtgagtaaaaagccaagagacgagaaccgggatagccatctcatctcattcatttcaatggccactcaagggcaagtcattaccttccaaacttcggtgggctgggaacccaacaaggccttaactgtccaaaaccttcaaggggcttccccctaaggccgcgagggccgggttcaaattctcttcacccgttcttgccacaccgatgcttacacttggggcggcaaggatcccgaaggtctcttcccctgtattcttggccatgaagctgcanggattgtggagagtgttggagaaagtgttactaatgttcagcctggggatcatgtcat

SEQ ID NO: 275574 - DNA, 401 bp, Glycine max
gtcacgttaaagtttctttcatgtttgaacaggcgactatccatttgggagcaactgagctgcttggattgtatttttcttcttctagaaaaaattacagaccctcaccacccagacttagttgtatgaacggttggccaccttccgttatccttgaaggagattgttcaaggatacaggttaccttagaggctgaaatcacagctgcgtataatttgaattccagcatttgctgcctctgaatatctctggaactttgtaagtcaacaaacatggctttacagaacattggtgctgcaaacagtgatgatgccttctacaggtataagatgcctaggatgattaccaaaattgagggcagaggtaatggcatcaaaactaatgttgtcaatatggttgac

SEQ ID NO: 275575 - DNA, 407 bp, Glycine max
ggagcgaagagtgaagagaatggctcccaagggtttaacctttctggctgtgttaatatgcgtttcagcactgtcactgagtccttctgttgcgggggaagggcaaaataatggccttgttatgaacttctacaaggaatcatgccctcaggctgaagacatcatcacagaacaagtcaagcttctctacaagcgccacaagaacactgctttctcctggctcaggaacatcttccatgactgtgctgttcggagttgtgatgcttcactgttgctggactccacaagaaggagcttgtctgagaaggaaacagatagaagctttgggttgagaaatttcaggtacattgagaccatcaaagaagcttttgaaagagaatgccctggggagtgttcatgtgctgata

SEQ ID NO: 275576 - DNA, 393 bp, Glycine max
gatggtatatcattccaagaatctcagctgcagtaaacagcgaccatgaaactaatgacagcaacaacaacgtttgatgtctctgccacttgcttccgtgcccctcctccttcgtgctcaatgaatccatgccacaccagtttttcagttataaactccctgaatcctcacaagggacgacggataagcgttgctgttccacccaagtttccaaacttccggagggaagcatctctgcaggggaatttggaggctattagagtcccaacttcggtgcctgtgcgtgtagcatacgagcttcttctagctggtcatcgatatttggatgtaaggaccccggaagagttcgatgctggacacgctcctggcgcaattaacataccttatatgttc

SEQ ID NO: 275577 - DNA, 400 bp, Glycine max
atagcattggagttcaatgataagctcaagaaggtgaccattaagctaaaccaagagctccctggactcaaattggtgttttctaatccttattacattatgttgaacatcataaaaagacctcaactttatggatttgaatcgacctcagtggcatgttgtgctactggaatgtttgagatgggttatgcatgcagcaggggccaaatgttcagttgcactgatgcttccaaatatgtgttttgggactcttttcatccaactgagatgacaaatagtatcgttgcaaagtacgtggtgctgcgtgttttatatcaattcttacaataaacaaatagctactagtgaaattttatttatgtacggctatctcttcatgtctgcacattcgccataaagt

SEQ ID NO: 275578 - DNA, 424 bp, Glycine max
  unsure (1)..(424): unsure at all n locations
ggcttcagttggtgtggcaccaacatcatgaggcttgagagaatccagtggtgttgataggttgccagaggagatgaatgatatgagaattagggatgataaagaaatggaagccaccgttgtcgatggtaacggaacagagaccggacatattattgttactaccattgggggtagaaatggtcaaccgaagcagactataagctatatggcagagcggattgttggacatggatcatttggggttgtcttccaggctaaatgcttggagactggtgaaactgtggctatcaaaaaagttcttcaagacaagaggtataaaaaccgggagctgcaaacaatgcgccttcttgaccacccaaatgttgtctgtttgaagcatngtttcttttcaaccaccgaaaaggatgaactataccttaat

SEQ ID NO: 275579 - DNA, 363 bp, Glycine max
ggcccctttgaccaaaattaaggttttgtagtgtggcgggaaaaaccaccattgcccccgaaaataaaacgtaaggttagaaaaaaccttgaattgataaggggaatcggaaagtactcgaggtcgcagatgtaccacaagaggggcatttgggctatcaaggccaaaaacggtggcgttttacctcgccacgaccctaaacccaagcctgaagctcctgctgaaaaaccacccaaattttaccctgctgatgatatcaagaagccccttgtcaacaagcacaaaccgaaaccagctaagctcagggctagcattactcccgggacagtgttgattctcttgcccgtagatttaagggaaaga

SEQ ID NO: 275580 - DNA, 373 bp, Glycine max
  unsure (1)..(373): unsure at all n locations
gacccaagaacagagaagaatcagagaatggcaactatgactggtgtgagcctttcatgccccagggttttcttcaacgcatcaagctcaccgcaaaacgcgcatgcttattgtattttgtccagcagattctatgacttgacaggactgcagaatggaattctgaagcgagggagagagattttcctcactggttgctacctacgaactcccactggaggttctggacattcacgtcttttgccaacagagtatcttgtgattctattggatgaagtaatggtcaaagattctttaattttaaatntgtccactgtgaagtttaattgggctaacaagaggagtgagtgagtaggctcaacatacataaatg

SEQ ID NO: 275581 - DNA, 427 bp, Glycine max
  unsure (1)..(427): unsure at all n locations
ggttcaaaggaaactatcaagggggcaagggggggaaagattttattaataaccacttgggtttcaaaagtatgtatcacaaggatcctgaaactggttctgctcgtattgttggatttgaggtcaccccaaacagtataaatcacgaatacaaggagtggaatgacaagaatccacaggtaacaacatgcaataaagataccaagaatttgatgcaaggtagtactgtcccacaagaagtagatacaaacaaggatatcgtattcacatatgatgtttccttcaaggaaagtgatatcaaatgggcatcacggtgggacacatatcttttaatgaatgatgatcagatccactggttctncatcattaactctttgatgatngntcttttcctgtctggaatgggtggcatgatcatgatgagaac

SEQ ID NO: 275582 - DNA, 404 bp, Glycine max
  unsure (1)..(404): unsure at all n locations
ggagagagagagagagagggaggcacttggaatccaaaaatgagagaaatcatcagcattcacataggtcaggccgggatccaggttggcaactcctgctgggaactctactgcctggaacatggcatccagcccgatggcatgatgccaagtgactcctccttcggtgtagcccacgacgccttcaacaccttcttcagcgaaaccggatccggcaagcacgtccctcgcgccgtcttcgtcgatctcgagcccaccgtcatcgacgaagtccgttgtggcacttaccgtcaactcttccaccccgaacaactcatctccggcaaggaagatgccgncaacaactttgccagaggccactacacccgtggcaaaagatcggagatctgtgcttggatcgcgtc

SEQ ID NO: 275583 - DNA, 370 bp, Glycine max
ggcacttcaattgcaatcaaattagttcattcggtttgcgcagttccctacctctcctttcaagatgcagatcttcgtcaagaccctcaccggaaagaccatcacccttgaggtggaaagctctgacaccatcgacaacgtcaaggccaagatccaggacaaggaaggaattcccccggatcagcaacgtctcatcttcgccggaaagcagctcgaggacggccgtaccctcgccgactacaacatccagaaggagtcaacccttcaccttgtccttcgtctccgtggtggcatgcagatcttcgtcaagactctcactgggcaaaccataaccctagaggtcgaaagctctgacaccattgacaacgtc

SEQ ID NO: 275584 - DNA, 401 bp, Glycine max
  unsure (1)..(401): unsure at all n locations
gaggaagtgattgagaagatcatcgccaacgggggcgaggaagaggttctggggaaggccatacaggaacacgggagagggaaggttctggaaacagtggttgagattcaggacaggcatgatgctgccaaggaggtggagaagagtctactggagctgcaccaggtgtttcttgacatggctgtgatggtggaggcacagggtgagaagatggatgacattgagcaccacgtgctgcatgcttctcactatgtcaaggatgggaccaagaatctccagagtgcaaaggagtaccagaagaagagcaggaagtggatgtgcattgngatcattctgttgctcattcttattctgtttattggtattcctgttgtcaccagtttaagcagttcttgagtttt

SEQ ID NO: 275585 - DNA, 319 bp, Glycine max
agggggcacaagtgagttttgtgatcgagataactagagacggtgtgatgaaaatgaaggtccttgttttcttcgttgctacaattttggtagcatggcaatgccatgcgtacgatatgttccctctccgaatgaacactggctattgtgcccgtactccggaggtgaaatgcgcaagttggaggcttgctgtggaagcacacaacatctttggctttgagaccattcctgaagagtgcgttgaagcaacaaaggaatacatccatggcgaacaatgtagatcagactccaaaacagttaaccaacaagcttactttta

SEQ ID NO: 275586 - DNA, 340 bp, Glycine max
gagtgtgtgagttcattaacatatacaaattctgtgtgttgtgttgtgtacttgtgttaattgtgttgttgttgtaggaaatttaagtgaagagagaatgatgatgaagtctgctatgtgtgcattggtgcttgtggcactggttgtggttgaagtggggcccatggctgaggctgcggtgacttgcaacccaacacagttgactccttgtcttccggcaattaattcaggttctgcaccttcgagtgcttgttgccagaagctgaaggagcaaaagccatgcttctgtggctacctcaaaaaccctagcttgaagcagtatgttaactctcctaatgcc

SEQ ID NO: 275587 - DNA, 334 bp, Glycine max
ggcacacaaccactctttcttcttcttctctgaagagagcctttgctttttctttaggcctttccgaattaagtacttgtttcattttctctcgaagcaagaaaaatgttcatcgagagtttcaaggttgagagtcctaacgtgaagtacacagagactgagattcagtccgtgtacaactatgaaaccactgaacttgttcacgagaacaagaatggcacttatcagtgggttgtcaagcccaaaactgtcaaatatgaatttaaaaccaacacccatgtccctaaactaggggtaatgcttgtggggtggggtggaaacaatggctcaaccc

SEQ ID NO: 275588 - DNA, 356 bp, Glycine max
  unsure (1)..(356): unsure at all n locations
gggaggaaggaagagatccttgtgttgtgggttgaggtgagaagggaagggatgtgganttcaacttcaagcacagcagcgattccctccgacgaggaacctagcgaatcctcctcctcgtcctccttctccacctctctcttcaatttctcttctggaaacccgagaatcgaggagacccgtggcctcatgcatctcttcccagacgacactccttctactctacccgttggacggaagcctctcgtttgcgttgtcggcgtcccaaatcacatgacctatgcggatttctgccagttctgtggttccttcattcagcacatgctanagatgcgcatagtcaggatggatgggat

SEQ ID NO: 275589 - DNA, 308 bp, Glycine max
  unsure (1)..(308): unsure at all n locations
ggaatcacagtggtgccttatcgctgtgggtttgagcgncttccttctcttatatttctttttttttttgtcttcgccgcacgccgaaacaatggccggaaaaggagagggtcctgctatcggaatcgatctcggaaccacctactcttgtgtcggtgtgtggcaacatgaccgagttgaaatcatcgccaacgaccaagggaacagaacgacgccgtcttacgtcggcttcactgataccgagcgtctcatcggtgatgcggctaagaaccaagtcgccatgaaccccatcaacaccgtcttcgatg

SEQ ID NO: 275590 - DNA, 317 bp, Glycine max
accacaaaggggagtagcgatggagaaaaagaagggtgagctaaaggcaagggtccttcctttcctttccactaatcacataaacccgctagtggacatggccagactcttctccatgcacgacctctacgtcaccatcatcaccaccgcacataacgccaccgttttccaaaagtccatcgatttagatgcgagtcgcgggcgccccatcagaacgcacgttgtcaacttccccacctcacaagtgggtctccccgttgggatcgaagccttcaacgtgaatacgcctcgggaaatgacccccagaatctacatgg

SEQ ID NO: 275591 - DNA, 134 bp, Glycine max
ggtgggaaggttagaagaagcatgtgcatctggggcagtgataatggcaggtggaacagccagcataggcgaggatccagcgctggatcagttcatggaggcttactgtgagatgctgatcaagtacgagcaag

SEQ ID NO: 275592 - DNA, 332 bp, Glycine max
gagagtggtggagtgtgcaaaagagcgtcgtaggcgcaaccctaatcagaagaagcgcagcttcaagcgagtgacagccaccagccatgggtcgtatgcacagccgcggtaagggtatatcctcttctgctttgccctacaaaaggacacctcctagctggctcaagatctcttcgcaagatgtcgaagaaaatatctgcaagtttgcgaagaaaggtttgaccccgtctcagattggtgtcattctcagagattctcacggtattgctcaggtcaatagcgtcactggcagcaaaatccttcgcattctcaaagctcacggacttgcgcct

SEQ ID NO: 275593 - DNA, 329 bp, Glycine max
ggagcaagagtgaagagcgaagagaatggctcccaagggtttaatctttttggctgtgttatgcttctcagcactgtcactgagtcgttgtcttgcggaggataatggacttgttatgaacttctacaaggaatcatgccctcaggctgaagacatcatcaaagaacaagtcaagcttctctacaagcgccacaagaacactgctttctcctggctcagaaacatcttccatgactgtgctgttcagagttgtgatgcttcactgttgctggactccacaagaaggagcttgtctgagaaggaaacagatagaagctttgggttgagaa

SEQ ID NO: 275594 - DNA, 420 bp, Glycine max
  unsure (1)..(420): unsure at all n locations
gagactagagaagcaaagcaaaggccgcccttgcagtgccgccaaagcaaccctgccctaaaaattgaacagggcagagagcgagtgaacatgggaacctccgcgaacgctgtcgcaggtggtcgtggcggcgcccctgtccccaaagacgtcgactacgccaattacttctgcacctacgctttcctctaccaccagaaggagatgctctccgaccgcgttcgcatggacgcttatttcaacgccatttttgaaaacaaacgccacttcgctggcaagactgttttggatgtggggactggaagtggcattcttgctatatggtcggcacaggcaggtgcgaggaaggtgtatgcagtggaagctaccaagatgtcggaacacgcacgtgcactcatcanagcgaataatctccaggac

SEQ ID NO: 275595 - DNA, 396 bp, Glycine max
gaagggggcaaggtggaaccctacggggcgcgtggcacggcgccaaaatcgtcgacttgggcggcgtttggtgattacgggaggtccatcagtttcccctcgcagaaggaatcttcttctgtggggggtaagattgtgaaagcggtgcccaaggctgatacacaacaagatgtcaaaggtggcggcgtgcaaaagtttcgtgtcaagctgttggccgaaagtgggggtcagagcactatggatgttctctgtcagattggtttggatggaattcgtatgctggatccaaataccagccggacattgagaatttatcctcttgagaacataacaagatgtgatagaatcgattcatctacctttgcattttggtcaaagagtcctgttgacattgag

SEQ ID NO: 275596 - DNA, 313 bp, Glycine max
gggagaagaagttcctacaacaccaaaaaaaatgggtcagcttttgaatgagataattgaagctctttcttctgtatcatctcctgaactggccctgagactgtatctgcaatgtgctgaggctgctaatgactgtgaccttgagcctgttgcttatgaatttttcactcaggcatttgtattatatgaagaagaaattgcggactccaaagcccaagtaaccgcaatacatttaattattgggtctcttcagagaatgaatgtctttggcattgagaacagggatacattaacacacaatgccacagggtat

SEQ ID NO: 275597 - DNA, 410 bp, Glycine max
  unsure (1)..(410): unsure at all n locations
agtgtgtgagttcattaacatatacaaattctctgtgttgtgttgtgtacttgtgttaattgtgttgttgttgtaggaaatttaagtgaagagagaatgatgatgaagtctgctatgtgtgcattggtgcttgtggcactggttgtggttgaagtggggcccatggctgaggctgcggtgacttgcaacccaacacagttgactccttgtcttccggcaattaattcangttctgcaccttcgagtgcttgttgccagaagctgaaggagcaaaagccatgcttctgtggctacctcaaaaaccctagcttgaagcagtatgttaactctcctaatgccaaaaaaaccgttagttcttgtggtattgcctatccaacttgttaagcacctcttatatatatatataaaat

SEQ ID NO: 275598 - DNA, 406 bp, Glycine max
ggaagaacaacggcagggtaagtatattgggaatggtggtggatgagccgaagctctgtcttatgaaaaaattccagaactggctctgaaactgtgtcacaaagtgtgcatgggcaattgaagactatgaccgtgagcctgatgactatgcaatcgacactcaggcactcaggatacttggataagaattcacagccgacgatgtcctttttaaccgaatacttactactatgactgctttctagagactgcatgtctttggcattgataacatggatacattaacacacatggccgcatggtatttagcatagcttttgaagaaacctgatcagtgccgagcagtttatgcatgctctcatctcttttgggttgatgatcaagatggtattaaagatggaaaagg

SEQ ID NO: 275599 - DNA, 186 bp, Glycine max
gacgatgagtcgatttgataactaagatattgttattcgtgatattgatccaatttgatatcatcgaaatccaatttataccattgttgaattaattatcgatgaaagatttatcatctctatgggattaaatcccgaattttttattggcaaataaattatatgaagaaaaaattacaaagcgca

SEQ ID NO: 275600 - DNA, 378 bp, Glycine max
gaaagaaagaggtggtaacacgaagggcgcgtggcagccgctggtttaaccgaaaagaaagcaactttgtcctacatcagaggcaacggaaaagaggatcctttctgcttcttctcttctcttccacacaaagacatcgtttcattgctctctctcttgtgcggacacaatttttgatggggatatacctcagcactcccaaaacagagaaagcctctgaagatggtgagaacgacaagcttcgcttcggtttgtcttccatgcaaggctggcgtgctaccatggaagatgctcatgcagctcatccatgtttggacgagtccacgtcatactttggtgtttatgatggccatggaggcaaagcagtttcaaaattct

SEQ ID NO: 275601 - DNA, 332 bp, Glycine max
  unsure (1)..(332): unsure at all n locations
gagatcagaacagaacacagacaaacagaggaagagagaaagacccaagatgggcctttgctttggttgcttcggcgtagacaaacgcatgagcaaggaagaagagagattggcctctgaagaagcgcgtgccaaagctgctgaagccgcacagaaaaggcaagagcaatttgagaattctgcagcaggacgagctgctcgtgcacagcaacaagcaatggcaaagcaatctgcaaacgccaacaaagggcgaaccagttctaaagtggcanatgggttgaggttagacaatctgtctgttggagtaaacttttattacgttatcgatgaca

SEQ ID NO: 275602 - DNA, 435 bp, Glycine max
ggttctagtgtgtgattgtttgttgttgtaactcgttcttcttcttttgttgttctgtgtttgtgtttgttttttctctcacctgaaaatgtcttgctgcggtggtaactgtggttgcggaagctcctgcaagtgcggcaacggctgcggaggctgcaagatgtacccagacttgagctacactgagtcaaccaccaccgagaccttggtcatgggagtggcacctgttaaggctcaatttgagggtgctgaaatgggtgtgcccgctgagaacgatggctgcaaatgtggaccaaactactcctgcaacccctgcacttgcaagtgaggtgttgggagagcaagcttcaagcagagatagcccttaattaggaataatgataaactattaatgtgtagctaaaaacttatgtattatgtctgtgatggttttcg

SEQ ID NO: 275603 - DNA, 360 bp, Glycine max
  unsure (1)..(360): unsure at all n locations
gacaccaccacgganggggcaattgacgggggagaacaagatcaacaggcaagtgacctttgcaaaacgaatgaacgggcttttgaagaaagcttacgagctttccgttctttgtgatgccgaggttgctctcatcatcttctccaatagaggaaaactgtacgagttctgcagcagttcaagcatgctcaaaacgctagagaggtaccagaaatgtaactatggtgcgcctgaggctaatgtgtctacacgggaagccttggagttaagcagtcaacaggagtacttgaagctgaaggcacgttatgagtccctacaacggtcccagaggaaccttatgggagaagatctttgcccttt

SEQ ID NO: 275604 - DNA, 388 bp, Glycine max
gataccaaaaacaaaacaagccaagtgaaagagagaagaaaagtgaaagacaatgtcagggatcattcacaagattgaggagacccttcatgtgggaggccacaagaaggaggaggagcacaagggtgagcagcaccatggtggagaatacaaaggggagcatcatggtgaacacagtactgaatacaaaggagagcatcatgttggtgagcacaagccggagcaccatggaggagaagagcacaaagaggggttcctagacaagatcaaggacaagatccacggcgaggagggtggcgccaccgccgagggcgagaagaagaagatgatgaaggagaagaagaagcatgaacatggccatgacagcagcagcagcagtgacagtgat

SEQ ID NO: 275605 - DNA, 398 bp, Glycine max
gacacaagattgagacacgaaacagaaaatgccaggactcacagcaccttccgattactcccaagaacccccccgccactcttctcttctcatcaacgccaaggaacctttcaatgcggagccaccgcgtgctgcgttggttgcttcctacgtcaccccttccgatttcttctataagaggaaccacggtccaatccccatcgttgagaacatcaacagatattccgtgaacgtgtccggcttggtggagcgtcccaaacagctcttcatgaaagatatatggatgcttccaaagtataatgtcactgccacgttgcagtgtgcaggtaatcgaaggactgctatgagcaagaccaaaacagtgaagggagttggctgggatgtttctgctattggaa

SEQ ID NO: 275606 - DNA, 301 bp, Glycine max
  unsure (1)..(301): unsure at all n locations
gagagtgaaggggataataatatcaagtatgtcgcagctgagttggcaactgacatagtcattaatgttggaaatgtaaaatttcatctccataagtttcctcttttgtcaaaaagtgcacgcttgcaaaagctgattacaaacagtaatgaagagaacaatgatgaagtccatatccatgacattcctggcggatctgctgcttttgaaatatgtaccaagttctgttatggtatgacagtcactcttaatgcatacaatgtcgttgcagctcgctgtgcagcanaatatcttgagatgt

SEQ ID NO: 275607 - DNA, 308 bp, Glycine max
gagtgtgtgagttcattaacatatacaaattctctgtgttgtgttgtatacttgtgttaattgtgttgttgttgtaggaaatttaagtgaagagagaatgatgatgaagtctgctatgtgtgcattggtgcttgtggcactggttgtggttgaagtggggcccatggctgaggctgcggtgacttgcaacccaacacagttgactccttgtcttccggcaattaattcatgttctgcaccttcgagtgcttgttgccagaagctgaaggagcaaaagccatgcttgtgtggctaccttaaaaacccta

SEQ ID NO: 275608 - DNA, 262 bp, Glycine max
cttagaaaaggaaacagaaaagtcaaaaggtgacaaaacagagaaggaacaaggtgatgcagccaactcacaagagaaaaccctgaagaagccagataaagtgctaccatgcccccgctgcaaaagcatggacactaaattctgttactacaacaactacaatgtcaaccagccgcgttatttctgcaaagcctgtcaaagatactggactgcaagtggcaccatgaggaatgttcctgtgggggcaggacggcgaaagaac

SEQ ID NO: 275609 - DNA, 391 bp, Glycine max
ggacctaatgccaatcctttagatctctttccccagggccttccaaatgttgggtctggtgctgctggtgctggctctttagactttcttcgcaacagtcaacagttccaagccttacgcgctatggtacaggctaatccacaaatattgcagcctatgctacaagagcttggcaaacaaaatcctcatcttatgcgattgattcaagagcatcaagttgacttccttcgcctaattaatgaacccgttgaagggggtgagggaaatatactgggacagctagctagtgccatgccgcaagcagtgacagtcacccctgaggaacggcaagcaattgaacgtctcgaagcaatgggatttgatcgtgcaactgtattggaggtgtacttcg

SEQ ID NO: 275610 - DNA, 372 bp, Glycine max
  unsure (1)..(372): unsure at all n locations
ggacctaatgccaatcctttagatctctttccccacggccttccaaatgttgggtctggtgctgctggtgctggctctttagactttcttcgcaacagtcaacagttccaagccttacgcgctatggtacaggctaatccacaaatattgcagcctatgctacaagagcttggcaaacaaaatcctcatcttatgcgattgattcaagagcatcaagttgacttccttcgcctaattaatgaacccgttgaagggggtgagggaaatatactgggacagctagctagtgccatgccgcaagcagtgacagtcacccctgaggaacggcangcaattgaacgtctcgaagcaatgggatttgatcgtgcaact

SEQ ID NO: 275611 - DNA, 370 bp, Glycine max
ggaagcagtggaacaaagcaaggaagagaaagaaatttgtttctctctaaagagtctccgctgaactttttggtttcttgaagatgtcgttactctccgatcttatcaaccttaacctctccgacatcaccgataaggtgatcgccgagtacatatgggttggtggatctggcatggatatgaggagcaaagcaaggactctctcgggactggttaatgacccttccaagcttcccaagtggaactatgatggttccagcactggtcaagctcctggacaagatagtgaagtgatcttatatccacaagcaatttttcgggatccattcaggaggggtaacaatatcctggttatgtgtgatgcttacac

SEQ ID NO: 275612 - DNA, 433 bp, Glycine max
gatcaaacagatggtggtgatggctatgtttctgttgaagtatctcccaggctcgctgatgacactgagggaaccatagaagctgcaaaatggcttcataaagtggttgatcgccccaatgtgtatattaagattcctgctacagaggcatgtgtgccttcaattaaggaagttattgctaatgggataagtgtgaatgtgacgctgatattctctcttgcaagatatgaagctgtaatagatgcttacttggatggtcttgaggcatctgggttaaatgacctctctagagttacaagtgttgcctctttctttgtcagtagagtggacactctcattgacaaggcccttgagaaaattggcaccccagaggctcttaatctacgtgggaaggcagcagtagcccaagcagcattggcttaccagctctacc

SEQ ID NO: 275613 - DNA, 439 bp, Glycine max
gagagcgagagagagagagaaacaaagcagcacccatttggatcctctcttctcttctttgatctccgttaccctttttgttttctcaacagagagagagagagagaatctttcgaagttcgtttgcgtgtgttgtgtggtcagtcaccgatggcagcaccacctgcgagggcacgtgccgattacgattacctcatcaagcttcttcttattggcgatagcggtgtgggaaagagttgtctgcttttgcgattttctgatggttccttcacaaccagttttatcaccaccattggcattgattttaagataagaaccattgaacttgatggcaaacgcattaagttacaaatctgggatacagctggtcaggagcgatttcgaactattaccacagcttattaccgtggagccatgggtatcttgctcgttatgatgt

SEQ ID NO: 275614 - DNA, 435 bp, Glycine max
gagtggaaagacagtatggaaaaaccctgatgggtatttacctggtaggatggccccattaaagaagttctatgtatttatgacactggcttatgtttgccttagcatcatttggttttttcagtatgtgagattttgggatgatgtactgcaacttcagcactgtatcacagctgtcattgctcttggattgtttgagatgattctctggtattttgagtatgtcaatttcaacaatactggaatgagacctattgtgctcacaatatgggtcgtcactgttggggctataagaaaatcaatatcacgacttctcattctctctgtctcaatgggttatggtgttgtgcgacccactctgggtggtcttacatcaaaggttcttttacttggaataacttactttctagcatcggaggtactgaatattactga

SEQ ID NO: 275615 - DNA, 424 bp, Glycine max
ggtcaaaataatgaggtctttgatcctaaagctcatttgcctgtgaagacaaccttgaaggtgactatatatatgggggaaggatggtttcatgatttcaagcatacacactttgataaattctcacccccggacttctatgcaagagtgggaattgctggagtccctaatgatactgttatgaaaaaaactgagaaagtagaggataattggtcaccttcgtggaatcaagtatttgagttcccacttgctgttccagaactggctctgcttcgcgtagaagttcatgagtatgacatgtctgagaaggatgactttggtggccaaacgtgcttacctgtgtgggaactaagaagtggaattcgagcagttccactgtattcccgcaatggagataagtatgccaatgtgaagcttctcatgc

SEQ ID NO: 275616 - DNA, 283 bp, Glycine max
cgtgaagacgaccgacggaggggcacgagtgaagagcgaagaaaatggctcccacgggtgtaatctttttggctgtgttatgcttctcagcactgtcactgagtcactgtcttgccgaggataatggacttgttatgaacttttacaaagaatcatgccctcatgctcgagacatcctcaaagaacaagtcatgcttttctacaagcgccacaagaacactgatatctgctggctcagaaacatattacatgactgtgctgctcaaacttgtgatgcttcact

SEQ ID NO: 275617 - DNA, 358 bp, Glycine max
  unsure (1)..(358): unsure at all n locations
ttcttagggagttaagaannaaaaantgggttgccaggagggttggatgagagcaaggttactagatagtggcgcaccaccatattacaaggtttccacctttgaatcagtgtataagccaagcttttgtttccatattggttctaaggaattggccgcttatgctcttgttttcaccgctctcattatgttcgccaatggtgttctgttatgaatggcaagtgccttgtcaacactttgtggacaagcatatggggcaaaagaatatggcatgatgggagagtatcttcaaagatcatggatagttgtgttcttaactgcaaaactgcttcttcctgtgttcatcttcacaagcccc

SEQ ID NO: 275618 - DNA, 433 bp, Glycine max
ggggttagggtggttgttgcatatggtggagcaccaataaaccagcagctgcgggatcttgaaagaggggtggacattcttgttgcaactcctggaagactggtagatttgctggagagagctagagtttcactgcagatgattcgatatctggccttagatgaggcagatcggatgctggatatgggttttgagccgcaaataaggaagattgtagagcaaatggacatgcctccaccaggtgccagacagactatgttgttcagtgcaacatttccaaaagagatacagagattggcttctgatttcctttcaaattatattttccttgctgttggaagagtgggttcaagtaccgatttaattgtccaaagagttgagtatgttcaagagtctgacaagagaagtcacctaatggaccttcttcatgcac

SEQ ID NO: 275619 - DNA, 397 bp, Glycine max
  unsure (1)..(397): unsure at all n locations
ngatatatctaagcagcagtaccattgcagtggttgtggaatttgcagaactggaggaagcgaaaatttcttccattgctacaagtgtggttgttgctactcaactcttctgaaaaacagtcacccttgtgtagaaggagcaatgcatcatgattgcccggtttgttttgagtatttgtttgaatcaagaaatgatgtcactgttatgccttgtggacatacaatccataagagctgcctgaatgaaatgagagaacatttccagtattcgtgccctctctgcttgaaatcagtctgtgacatgtcaaaggtttgggagaaatttgatatagagattgctgctacaccaatgcctgagcaatatcaaaataaaatggtttggatcctgtgcaacgat

SEQ ID NO: 275620 - DNA, 401 bp, Glycine max
gaaggagagagggttcaagaaaagccccgaacagtgtaaatgcgggtggaagaatctcgttaatcgctacaagggaaaagagacatctgacccagagcatggcaagcaatgtccattttttgaagaattgcatgcggtctttacccaaagggcacataatatgcaacgattacttcttgaatctgaaactcgttcagctcataccaagaaaggggtgaaaagatcaagtggagatcggtcatcagaggaactctcagaagatgacaatgaggttgaatatgatagtgaagaggaaaaaccttccagaagtaatacccgcaaaaagaaagttgacaaagttggagtggagaagtcttcaagggcaagcaatccatcaaattctgccagtaatagtactagta

SEQ ID NO: 275621 - DNA, 422 bp, Glycine max
gggattgggaagtacatagcgtcggatatattctcggtgggagggtacgattgggcgatctatttttaccccgatgggaagagcgttgaggacaatgcaacgtacgtttcgctcttcatcgcgctcgctagcgaagggaccgatgttagggcgctttttgagttgacgcttttggatcagagtgggaaggagaggcacaaggtgcatagccattttgagaggaccctcgagagtggaccctacacgttaaaataccgtggtagcatgtggggttacaagcggttttttaagagaacagcactagagacatcagattaccttaaagatgattgccttagtgttaattgtagtgttggtgttgtgaagtcacacacaggaaggccctaaaatatataaaatcccaattccgccttccaacatgg

SEQ ID NO: 275622 - DNA, 334 bp, Glycine max
ggagggtcagagtgagaaagagagagagagagagagaaactgagagaaattcgcaaaccctaatttcggaaagatcggcgatggctgcctccaaggatcgcgagaacttcgtctacatcgccaagctcgccgaacaggccgagcgatacgaagagatggtggaatcaatgaagaacgttgcgaatctcgacgttgaactgactgtggaggagcggaatttactttctgttgggtacaagaatgtgattggtgctcggagagcatcgtggaagatcctgtcttccattgagcaaaaggaagaaacaaaagggaacgagttgaatgcgaagcggat

SEQ ID NO: 275623 - DNA, 441 bp, Glycine max
gatcctgaaaaggttctgcgtcgtggtacacagattacactctatttaagagaggatgacaagtatgaattctcagagccaagcaggattcagggtttggtgaagaattactcacagtttgtttccttccccatctacacatggcaagaaaagtcaagaactgtggaggtggaagaggaggaagaacccaaagaaggggaggaaccaaaagaagagggtgagaaaaagaaggtgaaaaagactaaaactgagaagtattgggactgggaattggccaatgaaacgaagccaatatggatgcgcaatccaaaggaagttgaaaaggaggagtacaatgaattttataagaagacttttagtgaattcttagaaccacttgcacatactcacttcactaccgagggtgaggttgagttcagaagtattctgtacgttccggga

SEQ ID NO: 275624 - DNA, 365 bp, Glycine max
ggagtgagtagcgagaatggagtttcaagggttaccggaaggttgcattgctagtatactctctcgcactacgccggcggacgtgtgtaggttttccgtcgtatcaaagattttccgttcggccgctgaatcggacgctgtgtggaaacgttttctcccttccgattaccattccatcatttcccagtctccttcgcctctcaactatccttccaagaaggagctctatctcgctctctcggatcgccctatcatcatcgatcagggtaaaaagagctttcaattggagaaaaagagtgggaagaagtgttacatgcttgctgctagagctctcaacattatttggggtgacactgagcaatact

SEQ ID NO: 275625 - DNA, 406 bp, Glycine max
ggcacaagtgagtttgttgatcgagataactagaaacagtgtgatgaaaatgaaagtccttgttttcttcgttgctacaattttggtagcatggcaatgccatgcgtacgatatgttccctctccgaatgaacactggctatggtgcccgtactccggaagtgaaatgcgcaagttggaagcttgctgtggaagcacacaacatctttggctttgagaccattcctgaagagtgcgttgaagcaacaaaagaatacatccatggcgaacaatatagatcagactccaaaacagttaaccaacaagcttacttttatgccagagacctcgaagtccattccaaggacacatttgtgttcaatataaatggcaccggactctctaatattccatactacaaaaaacat

SEQ ID NO: 275626 - DNA, 133 bp, Glycine max
ggctcaaataaattagctgagcgagagaactcgaagcagtgtgacgaaaatgaaggaccttgatttttatcctgctacaatattcgtagcatggcaaagccatgcgtacgatatgttaactcttacaatgaac

SEQ ID NO: 275627 - DNA, 446 bp, Glycine max
gacagcagcagagcaaaagaaagaaagaaagaaagtgcaacttcctctgttttgctcccctgtttaagccttatcataagcttagaatggcacacaaggaattttccattgccctagtgactctcattgttctctttgtcaacacgaacctccaaggtgccacggctgactatggtggtggttggcagagtgctcatgccactttctatggtgggggtgatgcttctggcacaatgggtggagcatgtgggtatggaaatttgtatagccagggatatggaactgacactgtggctctaagcactgctttgttcaacaatggcttaagctgtggatcttgctatgaaatgagatgtgatgatgacccaagatggtgcaaacctggctctattaccgtcactgctactaacttcttgccaccaaacccatctttgctaacaacaatg

SEQ ID NO: 275628 - DNA, 429 bp, Glycine max
  unsure (1)..(429): unsure at all n locations
acgcgtgcgaacacgagnagacgacagatgggggcacaagtgaatttgttgatcgagataactagaaacagtgtgatgaaaatgaacgtccttgttttcttcgatgctacaattttggtagcatggcaatgtcatgcgtacgatatgttccctctacgaatgaacactggctatggtgcccgtactccggagatgaaatgcgcaagatggaggcttgctgtggaagcacacaacatctgtggctctgagaccattcctgaagagtgcgttgaagcaacaaaggaatacatgcatggcgaacaatatagatcagactccaaaacaggtaaccaacaagcttacttttatgccagagacctcgaagtccataccgaggacacatttgtgttcagtatagatggcaccgtactctgtaatattccatactac

SEQ ID NO: 275629 - DNA, 415 bp, Glycine max
  unsure (1)..(415): unsure at all n locations
ggagcaagagtgaagagcgaagagaatggctcccaagggtttaatctttttggctgtgttatgcttctcagcactgtcactgagtcgttgtcttgcggaagataatggacttgttatgaacttctacaaggaatcatgccctcaggctgaagacatcatcaaagaacaagtcaagcttctctacaagcgccacaagaacactgctttctcctggctcagaaacatcttccatgactgtgctgttcagagttgtgatgcttcactgttgctggactccacaagaaggagcttgtctgagaaggaaacagatagaagctttgggttgagaaatttcaggtacattgagaccatcaaagaagctttggaaagggaatgcccaggagtntgttcctgtgctgatatcctcgttctctct

SEQ ID NO: 275630 - DNA, 344 bp, Glycine max
gggtgctgtgagtgagattacccatagatagagagcgcggcataacctaaacttacccttcttctctctgtgtgtgtgcgcatcaaacgcaaccagaagcagccatggccactgcaagaactgtgaaggacgtttctcctcatgagttcgtcaaagcttactcttctcacctcaagcgatctggcaagatggagctgccagagtggactgatattgtgaaaactgcaagatttaaggagttggctccttatgatcctgactggtactatgtcagagctgcttccatggcaagaaagatctacttgagaggaggacttggtgttggtgcctttcagaggatttat

SEQ ID NO: 275631 - DNA, 433 bp, Glycine max
gggaccacgaggttgaggattcttgttttcgatgaggctgatcaaatgcttgctgaggatggatttagagatgattccctgaggataatgaaagatatagaaaaagagaattctaagtgtcaggttcttttgttttctgctacatttaatgacaccgtcaagaatttcgtttcaaggacagtcaggatggatcataataaactctttgtaaagaaagaagaactatctttagatgcagtgaagcaatataaagtgtattgtcctgatgaacttgctaagattgatgtggtaaaagattacatatttgaaataggagagaatgtggggcaaacaattatatttgtgcgctcaaaaattactgcaagattaacacatgaagcacttgttaagttgggctatgaggttacatctatacaaggttctcttagtaatg

SEQ ID NO: 275632 - DNA, 423 bp, Glycine max
  unsure (1)..(423): unsure at all n locations
ggagtgtagaaaagaaagtccatggccatgagtgtgggcgtggcattgccatccaccaccaccagtctcagtttccttcgctaccgctctcgctctccaattcaaaataaaatccgttttccccgtcaaattgtttctaaattaaacagtgcagaggtccaggttcaaacctggtaattttgctttctgaatcacgtaattttatttttatttttctgttttttgaaacagtcttcangccttgtattgtagcgtgtgggattggaggggttactctattcgctatcaacattctggaaatattggccctgcactagttttagtccacggttttggagctaacagtgaccactggaggaataatatttcagttcttgcacaatcccaccgggtgtactccatcgatcttgatggatatggata

SEQ ID NO: 275633 - DNA, 312 bp, Glycine max
ggagaggaaggatgtgatgactaagaacgtctccatttacaagtcccaggcttctgcccttgaaaagcatgctgctgccaactgcaaggttcttgttgttgctaacccagcaaacaccaatgcattgatcttgaaagaatttgctccatctattcccgagaaaaacatttcttgtttgactagattggaccacaatagggcactgggccaaatttctgagagactgaacattcaggtttctgatgtaaagaatgtcattatctggggcaatcactcatcaacccaatatccctgatgttaaccatgcaactg

SEQ ID NO: 275634 - DNA, 287 bp, Glycine max
  unsure (1)..(287): unsure at all n locations
ggcacaagtgagtttgttgatcgagatagctagaaacagtgtgatgaatatgaaggtccttgttttcttcgttgctacaattttggtagcatggcaatgccatgcgtacgatatgtgccctctccgaatgaacactggctatggtgcccgtactccggaggtgaaatgcgcaagttggaggcttgctgtggaagcacacaacatctttggctttgagaccattccttaagagtgcgttgaagcaacataggaatacttncatggcgcacaatatagatcagactcca

SEQ ID NO: 275635 - DNA, 289 bp, Glycine max
tcaacaaaggacagaaacagatccactatctgttttacgtcaggcaatacgtggagtaactcccgatatagcagtaaaagcaagacgcgtaagcggatcaactcatcaaggtcccgttgaaataggatccacacatggaaaagcacttgctattcgttgggtattgggggcatgccgaaaacgttcgggtcgaaatatggctttcaaattaagttccgaattagtggatgctgccaaaagtagtggcgatgccatacgcaaaaaaaaaaaaagcacgcaaaaaataaaa

SEQ ID NO: 275636 - DNA, 373 bp, Glycine max
gatgacagaaaagtaaacagcatcgacttgaatttgagtgatgaatttgttgttgaagcttcactttggaaattttgaatgttacgagacacaagtttctccaacttgctgggtcccacacagtttcttcctctgtctatttccctcgcagatctcaaccaattcttatatataaacccctttcgagatctgcttcaagctctgtccccttcttccacttccaccctcctctcaggtttttgtggataagagtgagctataatggctgccaagagaccgggtttaattgctttgtttgatgttgacgggactcttacagctcccaggaaagtggtcacaccggaaatgttgacattcatgcaagaactacgaa

SEQ ID NO: 275637 - DNA, 397 bp, Glycine max
ggagaaagagagagagagagagagaaactgagagaaattcgcaaaccctaatttcggaaagatcggcgatggctgcctccaaggatcgcgagaacttcgtctacatcgccaagctcgccgaacaggccgagcgatacgaagagatggtggaatcaatgaagaacgttgcgaatctcgacgttgaactgactgtggaggagcggaatttactttctgttgggtacaagaatgtgattggtgctcggagagcatcgtggaggatcctgtcttccattgagcaaaaggaagaaacaaaagggaacgagttgaatgcgaagcggattaaggagtacaagcagaaagttgaattggagctttcaaacatctgtaatgatgttatgacagtgattgatgagca

SEQ ID NO: 275638 - DNA, 331 bp, Glycine max
gagaatgagaatggattggatacttctattaatggggctgaggtgaagcatgtgatgaaggtgagcctggatgatgatagacatgattactattcaattgggacttatgatgagaagaatgttctgttcacaccagatgatgctaagaatgatgttggcgttggattgaggtatgactatgggatattctatgcatccaagacgttttatgatcagaataaggagaggagagttttgtggggttggattggggagtctgacagtgaatatgctgatgtggccaaaggttgggcttcagttcagagtattcctagaactgtggaacttgata

SEQ ID NO: 275639 - DNA, 299 bp, Glycine max
gactctgaaacagttaaccaacaagctttgttttatgctagtgaacgcgaagtccatcacaacgacatatttatattcggcatagataacaccgtactctctaatatcccatactatgaaaaacatggatatggggtggaggaatttaatgaaaccttatatgatgaatgggttaacaagggcgacgcaccggcattgccagagactcttaaaaattacaacaagctgttgtctcttggcttcaagattgtattcttgtcacgaagatatcttgacaaaatggccgtaacagaagcaaa

SEQ ID NO: 275640 - DNA, 346 bp, Glycine max
  unsure (1)..(346): unsure at all n locations
ggagggagttttggtggatattgagaacatgttagctcgtggtaggatggacctaccagtgagtgtgtgctttgcggcagcaagaggagatgacttgttgttgcatcaattactcaaacgaggcatggatccaaatgaatccgacaacaatcgaaggacagctttgcatatagcggcatctcaaggaaaacagaactgtgttttgcttctgttagactatggtgcggatcccaacattagagatttggaaggtaatgtgccactatgggaggctatagtgggaggacatgaatcaatgagcaagctgttatcagagaatggagcaaatttgcaatgcggngatgtg

SEQ ID NO: 275641 - DNA, 379 bp, Glycine max
atggcgagaggattgaagaagcatttgaagaggcttaatgccccaaagcattggatgcttgacaaactgggtggtgcatttgctcctaagccctcatctggaccacacaaatccagggaatgcctgccactcatactcattttgcgaaaccggctgaagtatgctctgacataccgtgaagtcattgctattctgatgcagcgacatgtccttgttgatggcaaagtcaggacagacaagacatatcctgctggtttcatggatgttgtatcaatccctaagacaaatgagaactttcgcctgctgtatgacaccaaaggccgattccgtcttcactcagtcatagatgacgaggctaagttcaagctttgcaaagttc

SEQ ID NO: 275642 - DNA, 412 bp, Glycine max
gcaacaataattcttctgatccgtttcgttcaaatcaaaataaaaaatcgcctctttggaacgctgcctccttctgacaaaaaaacattgtaccatccgaaatgtcggccatggtggaacatacggatcaaagagctgaagctattccccaatccacagctgcaccaaattggactattcatgtgtcagacataaaaacagttaaggttagcaacatatcattggttactttcaagaaggacattgaagaattcttttcattctcaggtgatattcgatatattgagatgcaaagggaaagtggtcacactcaggttgcttatgttacattcaaagatacacaaggagcagacacggcagttctcttaacgggttccaagataagtgatctatatgtcaccattacacctgt

SEQ ID NO: 275643 - DNA, 336 bp, Glycine max
gatcgtgaggtgttcaagaagattctcaaggacggagtcgatggacccattttagtctaccctctcttgcgaaacaagtgggatagtcgtcattcagtggtggtgccggacagtgacatgttctacatagtagccttgctccgattcactccaccacccccaaagggcccagcagctgaactcttggtggcgcaaaataatgagattattgagttctgcacaagcagaagccttgatttcaagctatactttcctcactaccagtcacgggaggattggatcaagcactttgggaatcaatgggccagatttgcggagcgaaaggccaattttgat

SEQ ID NO: 275644 - DNA, 439 bp, Glycine max
  unsure (1)..(439): unsure at all n locations
agacgacagaaggggatcttggatatgtagattccgtttcagttcaggaaattggtggtgtcagggtgaccattgtgaaaaatgaagagggtggaaattctgtagccactgttgttttacgaggaagtactgatagtatactagatgatcttgaaagagcagtggatgatggagtgaacacttacaaggcaatgtgcagggatagccgctttgtacctggagctgcagctactgaaattgagttagctaaaagggtgaaagacttttccttcaaggagacagggttggatcagtatgctattgcaaaatttgctgaaagttttgaaatgattcctagaactttggctgagaatgctggcctanatgcaatggagatcatatcttctctgtatgcagaacatgcatctggaaatgccaaagttggcattgatttggaaga

SEQ ID NO: 275645 - DNA, 429 bp, Glycine max
gagaatctgagagtagtgtgtggttgaaagttaagaagtagcaaagatgtttccattcgggcacaagggtcaaaagataaaggggactatggtggttatgcagaagaatgtgttggatatcaacagcatcaccagtgttgacgggatcgtcggcaccggcttagacttcttaggcagtgcactcgatacagttacttttttagcctcctccatctccatccaacttattagtgctaccaaggctgatggtgggaaaggaaaagttggaaaggctacaaatttgagaggaaagataacattaccaaccataggagctaaggaagaagcatacgatgctcaatttgattgggacagtgacttcggaattcccggtgcattttatattaagaacttcatgcaaaacgagttctacctcaagtctttaattct

SEQ ID NO: 275646 - DNA, 431 bp, Glycine max
ggttgtattactactaaggaacttgggactgtgatgcggtcactagggcaaaacccaactgaggcagaactgcaggatatgattaatgaggttgatgctgatggcaatggaaccatcgacttcccagagttcctcaacctgatggctcgcaagatgaaagacaccgactccgaggaggagcttaaggaggctttccgtgtgttcgacaaggatcagaatggtttcatctctgcagctgagctccgccatgtcatgacaaatcttggggagaagctgaccgatgaggaggttgatgagatgatccgcgaggccgacgtcgatggtgatggacagatcaactatgaggagttcgtcaaagtcatgatggccaagtgaggaccattcaaccataacctaaatttgaaaagcatataaagagaagagggacagtg

SEQ ID NO: 275647 - DNA, 394 bp, Glycine max
gatggttagcgggaggaggaagaagtgtgtgaaaaaatggcggcggcgaactctgagggtaatggtcagaaaccgagattggaaacgtttcagttattctcttcctccgcttccgccttcggaatcttcgacgatgctgcgcaacaagttcctcatatacctcctcctccctgcgttgaagtccttgcttctgaggttccttcatccatcaaacacaacgtggactctgtaaatttggatggagttactttgttaaaggtaggatctggtcatggactccctggaatctttgcattgcttgagggggcagctgctgtacattttcaagacttcaatgctgaagtcctacgtttcctcacaattcctaatttaaatgctaatctttctagagata

SEQ ID NO: 275648 - DNA, 364 bp, Glycine max
  unsure (1)..(364): unsure at all n locations
tggcgcaaaaggttagggagatatgcggttgagtcatacttggaacaaattttatcacatggtttcttccatgctgaccctcatcctggaaatattgcagttgatgatgtcaatggtggaagattgatcttctatgattttggaatgatggggagtatcagtccaaacattcgagaaggtttgcttgaaacattttatggagtttatgagaaagatccagacaaggttctacaagcaatgattcanatgggagttcttgtccctactggagatatgactgctgttagaagaacagcacaattcttccttacagttttgaagagcgccttgctgcacaaaggcaagagagagaggaggcaacaac

SEQ ID NO: 275649 - DNA, 313 bp, Glycine max
acctgaaagaagctaagatctattttccatcaagagtgcgttgaaatttgtttcacagacacaaattgccttgccccggaaggctatttaacatcaactattatgaacttctacattcaatatttgcagcaacaagcattgttgacaaatagatcgttatctgcctaccattttttcaatacatatttctacaagaagcttaaagaagctgtttcctacaagcaaagtgattgagagatctttgcaaagttcagaagatggtggaaaggtgtaaatatttttcagaaagcttatgttttgattccaatacacg

SEQ ID NO: 275650 - DNA, 415 bp, Glycine max
gaatgtgcaagagtttgttgtgagctataagctagtttatcgtgaggagaatatgaagttgtttgttttctttgttgctgcagtagttttggtagcatggccatgccatggcgcaggctaccaaaggttccctctccgaatgaaaactggctatggtgagcgttcttcggaggtaaaatgcgcaagttttaggcttgctgtggaagcacacaacatccgagccttttaaaaccattcctgaagagtgcgttgaaccaacaaaggactacattaatggcgaacaatttagatcagactctaaaacagttaaccaacaagctttcttttatgctagtgaacgcgaagtccatcacaacgacatatttatatgcggcatagattacaccgtactctctaatattccatactatgaaaa

SEQ ID NO: 275651 - DNA, 295 bp, Glycine max
ggagcaagagtgaagagcgaagagaatggctcccaagggtttaatctttttggctgtgttatgcttctcagcactgtcactgagtcgttgtcttgcggaggataatggacttgttatgaacttctacaaggaatcatgccctcaggctgaagacatcatcaaagaacaagtcaagcttctctacaagcgccacatgaacactgctttctcctggctcagaaacatcttccatgactgtgctagtcagagttgtgatgcttcactgttgctggactccacaagaaggagcttgtct

SEQ ID NO: 275652 - DNA, 391 bp, Glycine max
ggcaacaaagagagcaaggagagaggagatgtcggtggagcagaaagcagcagggaaggaggaggagggaaaactgcagaagggaattgcagagttctacgacgagtcgtctggcatatgggagaacatttggggcgatcacatgcaccacggcttttatgacccggattccaccgtttctgtttctgatcatcgcgctgctcagatccgaatgatccaagaatctcttcgttttgcctctctgctttctgagaacccttctaaatggcccaagagtatagttgatgttgggtgtggcatagggggcagctccagatacctggccaagaaatttggagcaacgagcgtaggcattactctgagtcctgttcaagctcaaagagcaaattct

SEQ ID NO: 275653 - DNA, 320 bp, Glycine max
tgcacaagaagatgagacattaaggaatgctgttgcagtttttaagggaaagagttggaagaaaatagctgagttttttcctgatagatcagaagttcagtgtctgcacagatggcaaaaagttcttaatccagaacttgttaaaggaccttggacacaggaggttgaaacttggtccttttctttttaatttttcctacagctttattcaagcaataacttcttttgattggcttacaggaggatgataaaattgttgaactggtgtcaaaatatgggcctacaaaatggtctttgatagccaagtctttacctggtcg

SEQ ID NO: 275654 - DNA, 387 bp, Glycine max
ggggacaaacaatgagaaattactaaatggtgagttttacattgggcttatacaaaagagggcaactgggcaggaatattctgaacttttgcacgagttcatgactgctgtcaagcaaaactacggagaaaaagttcttgttcagtttgaagattttgcaaaccacaatgcttttgagttgcttgcaaaatatggcacaactcatcttgttttcaacgatgatattcaggggactgcatctgttgatcttgctggggttgtggcagccttgaagctcattggaggtactctggctgaccacacattcttgattcttgatgctggagaggcaggaactggaatagcagaactaatagctcttgagatgtcatagcagacaaagacacc

SEQ ID NO: 275655 - DNA, 228 bp, Glycine max
tgggatgcatacagtactgaatcatcacctcgtggggagaactctcgtgcctcacttgaccttgttacagttcttgatgtgagtggttgcatggctggttctaagctagcgttgctaaaacgagctatgggttttgtcattcagaatcttggtccatcagacctgctgtcttgcattgccttctcctccactgcacgccggatctttcctcttcggcagatgactgac

SEQ ID NO: 275656 - DNA, 387 bp, Glycine max
  unsure (1)..(387): unsure at all n locations
gttgaagctaaatggaggcttgggcacaactatgggttgcactggtcctaaatctgtaattgaagttcgtgatgggttgacatttctagatttaattgtgatccagattgagaatctcaattccaaatatggaagcaatgttcctttgcttttgatgaattcattcaacactcatgatgacactcaaaagattgttgaaaaataccaaaactccaatattgagattcatacttttaaccagagccagtatcctcgattggttgctgaagactttntgccattgccttcaaaaggcatactgacaaggatggatggtacccttctggccatggaaatgtctttccatcattattgaacagtggcaaacttgatgcactattgtcacaa

SEQ ID NO: 275657 - DNA, 283 bp, Glycine max; identical to SEQ ID NO: 234623

SEQ ID NO: 275658 - DNA, 319 bp, Glycine max
ggcacaaaaatacaatacaaaacaaaacagagcaaagagagagtgtgtgaaaagtgaaacaaaaaacagaacaacaatggcgacacttaaggttcctcagcctcttccccccgttgcagatgattgtgagcagctccgaaaagccttctcaggttggggaactaacgaggagctgattgtatcgatcttggctcataggaatgctgctcagaggaagcttatcagagaaacttatgcccagacctatggagaagatctactcaaggccttggacaaagaactcacgagtgattttgaaaggctggttcatcttttgaca

SEQ ID NO: 275659 - DNA, 326 bp, Glycine max
gatagacatcagtgtatctgatgcattgagtaggaaattccagtgtgcaactttgcagcttgacttccagcttcctgatcgttttaagttggaattctcagctgaggatgaagccaaaattgagagacctgtaatgatacacagagccatcctaggatctgttgaacgcatgtttgccatacttttagagcactacaagggtaaatggcctttctggctcagtcctcgtcaagcgattgtatgccctgtgtctgaaaagtcacaatcttatgcactacaggtgcgagatcagatccaccaagcagggtatcacgttgatgctgata

SEQ ID NO: 275660 - DNA, 414 bp, Glycine max
ggaaaaagggagtgcctgataacccataaccgaccgcaccaccgttttcctttgctttgcgttctacaatgtcgaaaacctcagagattattacatgcaaagctgctatttgctggggaataggaaaacctgtgactgtggaagagatacaagtagaccctcccaaagccaccgaagttcgagttaagatgctttgtgccagtatatgctccacagacatctctagcacaaaaggattcccacataccaattttcctatagcacttggacacgaaggagttggtattatagagagtgtcggtgatcaagtaacgaatctgaaagaaagggatgtggtaattccaacatacataggcgagtgccaagaatgtgagaattgtggttcagaaaaaacccatttgtgtatgacatacc

SEQ ID NO: 275661 - DNA, 319 bp, Glycine max
gagacaaagatgagaagctctaataataaccatgatgctcctgcaccttcacctctacttcaagacctgaaggtgatcatccacaatgcctccatgattttcccatccaaagagatcgagagaaagtcccttttcttgtcaaacattgacaaggtcctcagcttcgatgtggaaacggttcacttctttggtgcccacaaagattttcctcctcgtgttgtgaatgagaggctaaagaatgccctagaggatgcccttgtggtttatgacttcttgggtggaagattgaagctcaactttgacaccaaaagattggaga

SEQ ID NO: 275662 - DNA, 378 bp, Glycine max
ggcagcgcttgatttgaggccaggcaagccccactcaaccaccacacctctcctcgttcacgctacccctttctgctcttcttctacctttcaagttttaaaagtataaagatggcagagacattcctatttacctcagagtcggtgaacgagggacaccctgacaagctctgcgaccaaatctccgatgctgtcctcgacgcttgcctcgagcaggacccagacagcaaagttgcctgcgaaacatgcaccaaaaccaacttggtcatggtcttcggagaaatcacgaccaaggccaacgttgactacgagaagatagtgcgtgacacctgcaggaacatcggcttcgtctcaaatgatgtgggactggatgccgac

SEQ ID NO: 275663 - DNA, 259 bp, Glycine max
ggagtcgaacaagaaagaaaagaaaagaagaggaaaaggagagtggagaggaagaaaaggattgaagttgttgctgtgagaaagagaaagagtgaaatcggagtttgggaaggaattgcaatcaatggatgtgataaagacgcagcaaatctcatctcgaccaatcgagaaggtggtggttcaccctctcgtgcttctcagcatcgtcgacaactacaacagagtcgccaaagacactcgcaagcgcgttgtcggcgtc

SEQ ID NO: 275664 - DNA, 395 bp, Glycine max
gggtaggcgaaatggaggtttgggccttggaaggatttggtgttgctcatattttacaagagatgcttacttataaatctgatcatattaaaactcgccaagaagtactcgggactacgatcattggaggaacaatacctaaacctacagatgctccagaatcttttagattgctagttcgagaattacgatctttagctatggaactgaatcatttccttgtatccgagaagaacttccggattcataggaaggaagcttaattggactgaatcagaatttttattctatgattgatcagtataaacatcaacaactccgaattggatcagtttctcctcaacaaataagtgcttgggcaaaaaaaatcctacctaatggagagatagtggggg

SEQ ID NO: 275665 - DNA, 387 bp, Glycine max
tgctgatggggggacggatgtgggcgtatacggtgattgcataaatgggagtctctgcagagctgaacacgcgctcaaacgatgatactgctaatactcatgatgagctattgcggtcgaccctgtcagcatatgaccatgttgttacctgatctgaagccggagaatgagtgttgccacttataacgacgacgaggacaacgctcaatggccattgaattgtgatgcagtctgactatgtaaagccacctgagacgttgagtgatattgcagggcgtggttaatacgtggcttgagaccttttgcatgtatcttatgggacacaggcaagaatagcagagcattgctgtaagtgcttatattaccagatgcggaaaacagcccttt

SEQ ID NO: 275666 - DNA, 355 bp, Glycine max
  unsure (1)..(355): unsure at all n locations
gacggattcaaagtgaagttagtgcaacttcacttttagttctctctctccctggtcctttgagcttcaagaagttgttcctgtttgttgtagcagttcctgtccttaatttcttcaaccttctcaacacataaccaccttggtctgtgtttgtttgtgtgtgcttattacttggtctcttcatattgtacatataaaaattatggatgatgaatatgccaatcttattagaaggatgaacccaccaagggttgtgattgacaacaatgcctgtgaaaacgccactgttattcangttgacagtgtcaacaaacatgggattctcctcgatgttgtccaagttatatcagatatg

SEQ ID NO: 275667 - DNA, 332 bp, Glycine max
gggtactcaaacaacactttggtgtagagcaagaactactataagtgtaggaggtgattggaagttgttcgaatccagaatccgaaaaaagggcaccaccgtgtcaacaagtagaagcagaagctgtttttgttcttcgccgctgacactaatcgtttcttcaatgccttacgagaaggaattcgccgctgcaaaaaaagcagccactctcgctgctcgtctctgcaagaaagtacagaaagctcttctgcaatccgatgtgcactcaaagtcagacaaaagtcctgtcacaatggctgattatggttcacaagcattggtcagctttatac

SEQ ID NO: 275668 - DNA, 323 bp, Glycine max
gttcccaacatgattagtggtgcatctcaagctgatattggggtgttggttatttctgctcggaagggagagtttgaaactggatacgagagaggtggacaaactcgtgaatatgtccagcttgcaaaaacgctgggtgtgtctaagcttcttgttgttgtcaataaaatggatgagcctacagtgcaatggtcaaaagaaaggtatgatgaaattgagtcaaagatggttccatttctaaagcaatctggatacaacgtaaaaaaagatgtcttgtttttaccaatttctggtctaatgggtgcaaacatgaaaacaagagt

SEQ ID NO: 275669 - DNA, 437 bp, Glycine max
gattcgggcacggttataacccggttcgtggagcccgtttacaacgcggtgagggaggagttcaggaagcaggtgggaggcactacattcacgagcattggagccttcgatacgtgttttgtgaaaacctacgaaactctggcgccgccaattacgctgcacttcgaggggttggacctgaaactgccgttggaaaacagcttgatccacagcagcgcgggttcgctggcgtgtcttgcaatggcggcggcacccgacaatgtgaactcggtgttgaacgtcatcgccaactttcagcaacagaaccttaggattttgtttgataccgtcaataataaggttggcatagcccgtgaggtttgtaactagctggttggctacatttttatttatttatttattaatatgtaccagtggctttcttgattagctaacta

SEQ ID NO: 275670 - DNA, 426 bp, Glycine max
gattcgggcacggttataacccggttcgtggaggccgtttacaacgcggtgagggaggagttcaggaagcaggtgggaggcactacattcacgagcattggagccttcgatacgtgttttgtgaaaacctacgaaactctggcgccgccaattacgctgcacttcgaggggttggacctgaaactgccgttggaaaacagcttgatccacagcagcgcgggttcgctggcgtgtcttgcaatggcggtggcacccgacaatgtgaactcggtgttgaacgtcatcgccaactttcagcaacagaaccttaggaatttgtttgataccgtccataataaggttggcataacccgtgaggtttgtaactagctggttggctacatttttatttatttatttattaatatgtaccagtggctttcttga

SEQ ID NO: 275671 - DNA, 381 bp, Glycine max
gatggtgaaacatggcaagctgaagttccagagattcagggaaacaagttgagagggggccctcagatgattcaattgagtttagatgggaagcggctctatgctaccaactcactatttagtacttgggacaaacaattttatccagagcttgtccagaaaggctcccacataatacagattgatgttgatactgagaaaggtggactgaaaatcaaccccaacttctttgtggactttggaactgagcctgatggtccttctcttgcccatgagatgagatatcctggtggtgactgtacttcagatatatggatttaaacatacgtgtcattatttccctttaataaacggatctgtcatatggttgtaatgagctac

SEQ ID NO: 275672 - DNA, 387 bp, Glycine max
ggtaccaaaaacaaaacaagccaagtgaaagagagaagaaaagtcaaagacaatgtcagggatcattcacaagattgaggagacccttcatgtgggaggccacaagaaggaggaggagcacaagggtgagcagcaccatggtggagaatacaaaggggagcatcatggtgaacacagtactgaatacaaaggagagcatcatgttggtgagcacaagccggagcaccatggaggagaagagcacaaagaggggttcctagacaagatcaaggacaagatccacggcgaggagggtggcgccaccgccgagggcgagaagaagaagaagaagaaggagaagaagaagcatgaacatggccatgacagcagcagcagcagtgacagtga

SEQ ID NO: 275673 - DNA, 351 bp, Glycine max
gattcaattgtgattcttattagagatatccctgatgctaaggaaagtgggttgcttcatctttgtgagtttattgaagattgtgaattcacttatttgtccacacagatgctgcacttcctgggagttgaaggaccaaaaacttctgaccccagcaaatatattcgttatatttataacagagtacatcttgagaatgcgactgttagggccagtgctgtgagcacattggcaaagtttggtgctgctgttgatgcactaaagccccgcatatttgtactgctaaggcggtgtctttttgatagtgatgatgaggttcgtgacagagcaacactttatctgaacacactt

SEQ ID NO: 275674 - DNA, 298 bp, Glycine max
  unsure (1)..(298): unsure at all n locations
gtatcagagagagtgagagaagagagagaatatttctgttcgtgcagatagatagatagatggctcggagctccacaagaatgaaatgggtctccatcttcacacttctattcctctcccactcgcccctcacaaccttcgcagaagatgggctagtggcgaatggagattttgaggttagcccatcaagtgggttccctaacgaggcgattgtggagggccccagcgaggtcccaaactggaagtcaaacggcaacgttgagctagtggaatcggngcaaaaacagggtgggatgat

SEQ ID NO: 275675 - DNA, 362 bp, Glycine max
cacacaagtgggacaaggaaagtttgttatttccaatagaatatcttttcccatgtacatgaacttaccgatatctgattaaatgcaggtggctgcaagttttgcgtcagaaggatccgtaatgaatgagttgaagcagtggaatgatttgtatggagaaggaggttcaaggaagaaacaacaactcacttacttcctatagattgtggaatgctacttttatttttggttttgtgaccattcatcctcaacgatacatttcaacaaaggaaggaatccttcaccagagatgttgaattgaaagcatgccgaaatgtcagagatcttatgattcccagaaaagctcgagttcttgcacacac

SEQ ID NO: 275676 - DNA, 420 bp, Glycine max
ctgagattggttgggtgaagctgaacgtggatggttcacgcgacccatacaaaagttcctccgctggttgtggtggtgttctgagggacgcatcagcaaagtggctccgtggctttgctaaaaaactgaaccctacttatgcagtgcaccagacagagttagaagccattctcacgggcttgaaggtggcttcagagatgaatgttaagaaactaattgtggagtcagacagtgactctgtggtgagcatggtggagaatggggttaagcccaatcaccctgactatggtgtcgtggaacttataaggacgaagcggcgtcgttttgactgggaagtgaggtttgtttctgtctccaacaaggcgaatcgtgtggctgataggctcgccaacgatgctcggaaattggcttgtgatgatg

SEQ ID NO: 275677 - DNA, 423 bp, Glycine max
ggagcggcggggcagaggaaggggcagagttttggagtttgaaagagaaaatattgattgcagttgagttctaatgagtaacgaatacgattacctgttcaagcttctcctaatcggagactcttccgttggaaaatcctgcttgcttctcagattcgctgatgactcctatgtcgacagctacataagtaccattggagttgatttcaaaatcagaacggtggagctggaagggaaaaccgtcaagctgcagatttgggatacagctggacaggagcgattcaggactataacaagcagttattatagaggagcacatggaattattattgtctatgatgttactgagatggaaagctttaacaatgtcaaacagtggttgaatgagattgacagatatgcaaatgacactgtatgcaagct

SEQ ID NO: 275678 - DNA, 356 bp, Glycine max
gaagacaagagtgattagggttttggtttggtgtttttcttaagcttgagatcaggaattaatttcagaggttcagagaatggcaacggattcttctaatggtaatggacatcaccaaacaacaacaaagcaacctcctttgccgtctcccctgcgcttttccaaattttttcagtccaacatgagaatcttggttactggaggagctggattcattgggtctcacttagttgacagattgatggaaaatgaaaaaaatgaggtaattgttgctgacaactacttcactggatccaaagacaacctcaaaaaatggataggtcatccaagatttgagcttatccgtcatgatgtca

SEQ ID NO: 275679 - DNA, 375 bp, Glycine max
gacggctaaaagctaaaaatcatcgaagtactcaaattagcatggctgtcacggttgcattcttgaatttgatcatcatgttttcagtagtctctacaagcaagtcactgagcttaaactactattcaaaaacatgccctgatgtggaatgcattgttgccaaggcagtgaaggatgccactgctagggacaaaactgttccagctgcacttctgcgaatgcacttccatgactgtttcgttcgggggtgtgatgcctctgtgctgctaaattcaaaaggaagcaacaaagcagaaaaagatgggccaccaaatgtttctttgcatgcattctatgtcattgatgcagcgaagaaagcactagaagcttcatgcc

SEQ ID NO: 275680 - DNA, 389 bp, Glycine max
gggggaaagcaagagtagtgacagagagaggcgaggatcgttcacataaaacatcgacagagatcgacgaggaaaagctaagcctaacaatgtggagctccaaaacgacattgatgtttggcgtcgcagccattgctctgatgatgtttctctcatctgcttcagcggacgacgtcgttgcactcacagaggaaaccttcgaaaacgaggttggcaaggatcgtgccgctctcgtcgagttttacgctccctggtgtggacactgtaaaaggcttgcaccggagtacgaacagctcggaacgacttttaagaaaacgaagtccgttttgattgccaaggtggattgtgatgaacagaaaagtgtttgtagtaaatatggggtatctggt

SEQ ID NO: 275681 - DNA, 397 bp, Glycine max
gggagaaggtaattgggatgcatgacacaaaaagcgtttgcataagggcactagcaaggttgccagtggtgatacccatatggttcttggccataatcttccctttctttgggcccataaactctgcagttggagctcttctggttagtttcacagtctacatcattcccgccacagctcatatgcttacttacagaaaagcctcagccagacagaatgctgctgagaagcctcctttctttatgccaagctggactgcaatgtatgtcttcaatgcattcattgtggtgtgggttttggtggttgggtttgggtttggaggatgggccaacatgaccaacttcgttaagcaaattgacacatttgggctctttgccaaatgctaccaatgcaagcc

SEQ ID NO: 275682 - DNA, 389 bp, Glycine max
ggattctccaacagccacaaaaagcagaacagatgatggtcttatatgggtgagtcaatggaactctttgcaacatcctgttgcatctgcattcttagctgctgtttacagtgactatatgctaacatcgcagacaccaaaactaaaatgtgattcagattcctttaccccatcagatcttcgagactttgccaaatctcaagctgattacgtattgggcaagaatcctatgcatatgagttttctggtgggctatggagataaatacccacaatttgtgcatcataggggtgcttcaattcctgctgatgcaaaaactggctgcaaggatggcttccagtggcttgaatcatctgatcctaatcccaatgtagctactggagcacttg

SEQ ID NO: 275683 - DNA, 387 bp, Glycine max
  unsure (1)..(387): unsure at all n locations
ggcattttaagaggcaataaggggcacaagatcaagggtactgtggtgttgatgagcaagaatgtgttggacttcaacgaaatagtgtccactactcanggtggtttggatggtgctgccaccaccatcttcggtgctgacaccgatattgatggtggagttgtcaatggagctactgacatcttcagtcgcaacattgccatccagttgatcagtgccaccaagactgatggacttggaaatgggaaagttggaaagcaaacctatttggagaaacatctttcttcgttaccaaccttgggagacaggcaagatgcattcagcgtttattttgaatgggataatgattttggaattgcaggagcattttacatcaaaaattttatg

SEQ ID NO: 275684 - DNA, 430 bp, Glycine max
gagagtgagaaagagaaagagagaattcgtgaggcctaatttcggaaagatcggcgatgactgcctccaaggatcgcgagaacttcgtctacatcgccaaactcgccgagcaggccgagcgttacgaagagatggtggaatcaatgaagaacgttgcgaatctcgacgttgaactgacggtggaggagcggaatttgctttctgttgggtacaagaatgtgattggtgctcgcagagcgtcctggaggatcctgtcttccattgggcagaaggaagaaacaaaagggaacgagttgaatgcgaagcggattaaggagtacagacagaaggttgaattggagctatcgaacatctgtaatgatgttatgagagtgattgatgagcaccttatcccttcggctgcagctggtgaatccactgagttgtacta

SEQ ID NO: 275685 - DNA, 423 bp, Glycine max
gacattttcccccctacaaaaagatccattgaagctttctctgagcatttcaccaaggaaggattggtggccttggtggagtataatgaaaagaaaatttttgaggtgaaacttaaggaaatgaagtcttctttaacagcacagataacagaggaggctgatacatctgaagtcattgagactgtgaagctgcgagttagagatgctaaattgccggaaattgaggtggtgcggatcttgtgggatgttttaatggatgctgttcagtggtctggaaaaaatcagcaacagaatgcaaatgcagcccttcgtcaggtaaaaacttgggcagaattgttgaatacattctgcaccagcgggaaacttgagctggagctgatgtacaaagtacagatgcaatgctatgaggatgctaaactgatg

SEQ ID NO: 275686 - DNA, 430 bp, Glycine max
gagagtgagaaagagaaagagagaattcgtaaaccctaatttcggaaagatcggcgatgactgcctccaaggatcgcgagaacttcgtctacatcgccaaactcgccgagcaggccgagcgttacgaagagatggtggaatcaatgaagaacgttgcgaatctcgacgttgaactgacggtggaggagcggaatttgctttctgttgggtacaagaatgtgattggtgctcgcagagcgtcctggaggatcctgtcttccattgggcagaaggaagaaacaaaagggaacgagttgaatgcgaagcggattaaggagtacagacagaaggttgaattggagctatcgaacatctgtaatgatgttatgagagtgattgatgagcaccttatcccttcggctgcagctggtgaatccactgtgttttacta

SEQ ID NO: 275687 - DNA, 384 bp, Glycine max
  unsure (1)..(384): unsure at all n locations
gatgaaaaagaaggatggtgatcatgatgacgacgaagatgaggatggtcctcgtgaagcaaatccagaggggagagtagaaaagtacattggagtgaaagtgaaggtctcatttactggacaaggggagacacagtccatgaagcagttgtctgggggtcaaaaaactgttgtcgcccttacacttatctttgccatacagcgatgtgatcctgctcccttttatctatttgatgagatcgatgcagcgctggatccacagtacagaactgctgttggaaatatgattcgtcgcttggtgacatagcaaacactcaatttatcacaacaacattccgnccggagctagtgaaagttgctgataagatatacggagtaacacat

SEQ ID NO: 275688 - DNA, 392 bp, Glycine max
gatcatttatttgtcatccaattttcgctctttcggtctctccaaattgagttcagagtcaccaccgaatccgttcctacaatggcgacggtgacgttttccttttccgctaaaaccttaactctaccctatcaccccaaaacctcaatctcgagcttcgctccggtaacgaatcttcgcctctctcattctatcgtcacccgaacccgaaattgtaaccggattcgggcggcgctggatggggatttctcggcgaaaaggagcaacaacaacgagcagagggagacgataatgttgcccggctgtgactacaaccattggctgattgtgatggagtttccaaaggaccctgcacccactcgtgaacaaatgattgacacttacctcgacac

SEQ ID NO: 275689 - DNA, 385 bp, Glycine max
ggaagaggggagcgcaaggaacttgataggatctatgattatgatgtctataatgatttgggcaacccagacgagaatgacgatctagctcgtcctattcttggcgggtctagtaagcatccataccctcgcaggggaagaactggtagaaaaccaacaaagaaagaccccagatgtgagagaccaaccagcgacacttacatcccgagagacgaaaattttggtcacttgaagtcatcagacttccttacatatgcaataaaatccttaactcaaaacgttttacctcaattcaacactgcatttggtttcaataatgagtttgatagcttcgaggacgtgcgttgtctctttgatggcggagtttatctccctacagatgtac

SEQ ID NO: 275690 - DNA, 324 bp, Glycine max
  unsure (1)..(324): unsure at all n locations
ggccattgttgctggcatcatcccgagctgctgttattcgcaccgcaaacaaacagtgagccatgggcggaggaaagaacacgcgcatgtgcaaacggaaaaagggtggtaagaagaagcagctgatccattgccaagaaggattggtatgacattaangcccgttatatttttgaggtgaaaaatgttggcaaaaccgtggtatttcgtacgcagggtaccaggattgcttctgaaggacttaaacatagagcgcttgacgactacttggctgatcttgatggggatgaggatcatgcattgaagaagattatgttgagagct

SEQ ID NO: 275691 - DNA, 412 bp, Glycine max
ggagcagaggaagaacaaaggagaagagaaaaaatggtgggtaatgaaatagtagtaccaatggacgacaaagcgaagaggatgcgagatctgctatccagtttctactccctagacccttccatctccaacaccaccttcaaacacgcttctctcgacgacatcaattccacctccttcgatcccgatcagtacatgaacattctggcacacaagtccaatttggaaggccttctacaacgccacgttgcaatggctgctgaaatcaagaatctcgacaccgacttgcaaatgctagtttacgagaattacaacaagttcatcagtgccacagacactataaagaggatgaaaagtaacatttcggggatggagacgaatatggagcagcttcttgagaaggtaaccgtaa

SEQ ID NO: 275692 - DNA, 412 bp, Glycine max
ggagcagaggaagaacaaaggagaagagaaaaaatggtgggtaatgaaatagtagtaccaatggacgacaaagcgaagaggatgcgagatctgctatccagtttctactccctagacccttccatctccaacaccaccttcaaacacgcttctctcgacgacatcaattccacctccttcgatcccgatcagtacatgaacattctggcacacaagtccaatttggaaggccttctacaacgccacgttgcaatggctgctgaaatcaagaatctcgacaccgacttgcaaatgctagtttacgagaattacaacaagttcatcagtgccacagacactataaagaggatgaaaagtaacatttcggggatggagacgaatatggagcagcttcttgagaaggtaaccgtag

SEQ ID NO: 275693 - DNA, 373 bp, Glycine max
ggaggggacgaggaacatagtagaagagaaaaaatggtgggtaatgaaatattagtaccaatggacgacaaagcgaagaggatgcgagatctgctatccagtttctactccctatacccttccatctccaacaccaccttcaaacactcttctatcgacgacatcaattccacctccttcgatccctatcagtacatgaacattctggcacacaagtccaatttggaaggccttctacaacgccacgttgcaatggctgctgaaatcaagaatctcgacaccgacttgcaaatgctagtttacgagaattacaacaagttcattaatgccacagacactattaagaagatgaaaagtaacatttccgggattg

SEQ ID NO: 275694 - DNA, 403 bp, Glycine max
gagaagaaggaggagctttgtgctgatcttgagcttaatcaagttatagatcgtaatgttggtgatctttcgggtggtgagctccaaaggtttgccattgcggttgttgcgatccagaatgctgagatatacatgtttgatgaaccttctagttatcttgatgtgaaacagaggctgaaagctgcccaagttattcgatcattgcttaggcctaatagctatgtaattgttgttgagcatgatcttagtgtcttggactacttatcggactttatttgctgtctatatggtaaacctggtgcatatggagtggtgacacttcctttctcagtcagagaaggaattaacattttcttggctggctttgttccaacagaaaatcttaggttccgtgatgactcac

SEQ ID NO: 275695 - DNA, 384 bp, Glycine max
gatagaaagaatgagcaaacagctgccatactgaagatgcaagcagttcaactagctgaaatggaattgctttataaggaagagcaggttctcagaaagcgatattttaataccatagaagatatgaaaggcaagataagagtttattgtcggttaagacctcttagtgaaaaagagattgcaagcaaagaaagagattctcttactactactgatgagtttactgttgagcatccttggaaagatgataaaccaaaacaacacatttatgaccgtgtgtttgatggtgatgccactcaagaagatatatttgaagatacaaggtacttaatgcaatctgctggggatggttataatggttgcatatttgcttatggtcaaact

SEQ ID NO: 275696 - DNA, 427 bp, Glycine max
ggcagccactctgtgagagaaagagatagtgtggtagagagagaggagcggaggagagaaaatgacgacgaggttcaagaagaacaggaagaagagaggccacgtcagcgccggtcacggtcgtatcgggaagcaccgcaagcatcccggtggtcggggtaacgccggtggcatgcaccaccaccgcatcctcttcgacaagtaccatcccggtttcttcggaaaggtgggtatgcgctacttgcacaaactccgcaacaaattctactgccccatcgtcaacattgataagctatggtcccttctaccccaggaggccaaggacaaggccaccgccgacaaggcgccattgctcgatgtcacccagttcggttactttaaggttttgggtaaaggggttttgcctcagaaccagcctctggtcgtg

SEQ ID NO: 275697 - DNA, 427 bp, Glycine max
ggcagccactctgtgagagaaagagatagtgtggtagagagagaggagcggaggagagaaaatgacgacgaggttcaagaagaacaggaagaagagaggccacgtcagcgccggtcacggtcgtatcgggaagcaccgcaagcatcccggtggtcggggtaacgccggtggcatgcaccaccaccgcatcctcttcgacaagtaccatcccggtttcttcggaaaggtgggtatgcgctacttccacaaactccgcaacaaattctactgccccatcgtcaacattgataagctatggtccctcctaccccaggaggccaaggacaaggccaccgccgacaaggcgccattgctcgatgtcacccagttcggttactttaaggttttgggtaaaggggttttgcctcagaaccagcctctggtcgtg

SEQ ID NO: 275698 - DNA, 424 bp, Glycine max
gctatctccgaaggtgcaacatcctttcttttcagctgaatatcaatatgtggggatcttcatggttgcttttgcaatactgatcttcctttttctgggctctgtggaaggcttcagtactaagagccagccctgcacatatgataagagcaagctatgcaagccagcccttgcgactgcattgtttagcactgtatctttcttgcttggtgctataacttcagtcctatctggtttccttgggatgaaaattgcaacctatgccaatgcaaggacaaccttggaagccagaaagggagttggaaaggctttcattactgcatttaggtctggtgcagtgatgggtttccttcttgcagcaaatggtcttttggtgctctacattaccatcaatctcttcaagctatattatggtgatgattgg

SEQ ID NO: 275699 - DNA, 408 bp, Glycine max
ggagctgaaaccgagaagaagaagatggagatgtatcagatctggagcaggagaatagcgttgggagcgttcgcgtttgttctgcttttcctatcggcctcagcagacgacgtcgttgtgctctctgaagataacttcgagaaggaagttggtcaggacagaggagctctcgttgagttctatgctccttggtgtggacactgcaaaaagcttgctccagaatatgaaaagcttggtagcagcttcaagaaagccaaatctgttttaatcggcaaggttgactgtgatgagcacaagagtttgtgcagcaaatatggagtctctgggtacccaacaattcaagggtttccaaaaggatctcttgaacccaaaaagtatgaagggccacgcactgctgattcacttgct

SEQ ID NO: 275700 - DNA, 383 bp, Glycine max
  unsure (1)..(383): unsure at all n locations
ggaaattaaagacactactaaagaaggatatagttttgaagagctatgcatcaagaaagaagccattgagggagaagagaagttttgtgcaaaatccttgggaacagtaattggttttgccatttcaaagctgggaaagaacattcaagtactttcaagttcctttgtcaataagcaagaccaatacactgtggaaggagtgcagaatcttggagacaaagcagtgatgtgtcataggctaaatttcagaactgcagtattttactgccatgaagtccgtgaaacaacagctttcatggttccattggtggctggtgatggaaccaaaactcangcacttgctatttgccactcaaatacttctggaatgaatcatcaaatgc

SEQ ID NO: 275701 - DNA, 175 bp, Glycine max
caccaacaagggagctagcacagcagatcgagaaagttatgcgagctcttggtgattacttgggagttaaggtccatgcttgtgttggtgggacaagtgttcgtgaggatcagcgcattctccaagctggtgtccatactgttgttggcactcctgggcgagtgtttgacatgct

SEQ ID NO: 275702 - DNA, 414 bp, Glycine max
gagagcaagagtgaagagcgaagagaatggctcccaagggtttaatctttttggctgtgttatgcttctcagcactgtcactgagtcgttgtcttgcggaggataatggacttgttatgaacttctacaaggaatcatgccctcaggctgaagacatcatcaaagaacaagtcaagcttctctacaagcgccacaagaacactgctttctcctggctcagaaacatcttccatgactgtgctgttcaaaagtgtgatgcttcacttgtgctggactccacaagaaggagcttgtctgagaaggaaacagatagaagctttgggttgagaaatttcaagtacattgagaccatcaaagaagctttggaaagggaatgcccaggagttgtttcctgtgctgatatcctcgttctct

SEQ ID NO: 275703 - DNA, 353 bp, Glycine max
ggatcgcagactcaacactctcgctagacacttgcttccgcaaatggcttctcacgacagcatctccgcttctccaacctccgcttctgattccgtcttcaatcacctcgttcgtgctcccgaagatcctatcctcggggtaactgtcgcttataacaaagatccaagtccagttaagctcaacttgggagttggtgcttaccgaactgaggaaggaaaacctcttgttttgaatgtagtgaggcgagttgaacagcaactcataaatgacgtgtcacgcaacaaggaatatatttccgatcgttgggcttgctgattttaataaattgagtgctaagcttatttttggggct

SEQ ID NO: 275704 - DNA, 85 bp, Glycine max
  unsure (1)..(85): unsure at all n locations
ggtggactaactagcgaaagaaaaatagaactaggaaaattcttaaaagaaaaaggtggaacttactatatatgatgatgatgna

SEQ ID NO: 275705 - DNA, 224 bp, Glycine max
ggagcagtgtgaatgattccattgtggaacagatggctgggaggctttctatgatttctttcttggatgtgagctactgtattaaaattggtccctatgcgcttgagatgattggcatgaactgcaagcttctataagggttgtgtcgaaacatgcacccattggatactgcggagaagccgcatcaagacgatgaagcctatgcaattgtctccacaatgcct

SEQ ID NO: 275706 - DNA, 374 bp, Glycine max
ggagcaagagtgaagagcgaagagaatggctcccaagggtttaatctttttggctgtgttatgcttctcagcactgtcactgagtcgttgtcttgcggaggataatggacttgttatgaacttctacaaggaatcatgccctcaggctgaagacatcatcaaagaacaagtcaagcttctctacaagcgccacaagaacacttgtttctcctggctcagaaacatcttccatgactgtgctgttcagagttgtgatgcttcacttgtgctggactccacaagaaggagcttgtctgagaaggaaacagatagaagctttgggttgagaaatttcaggtacattgagaccatcaaagaagctttggaaagggaat

SEQ ID NO: 275707 - DNA, 405 bp, Glycine max
gaagtagacagttttttgggtgagcgtcgtggaacagatcacgaggctatgttaaacatgaaaactgaattcatggctctgtgggatggatttacaacagatcagaatgctcaagttatggttcttgcagcaactaatcgtccttcagaacttgatgaagcaatacttcggcgtcttcctcaagcctttgaaattggaattccagaccaaagggagagggctgaaatattgaaggttgtcttaaagggtgagagggttgaagacaacatagactttggtcatatagctggtttgtgtgagggttacactggttcagatctatttgatctttgcaagaaagcttgctattttccctatagagaactactggatgaagagaagaaagggaaacaatctcatgcccct

SEQ ID NO: 275708 - DNA, 351 bp, Glycine max
gactccaagccctcaccaaatacttctcttggcattttgtgtcccttctctctttctcttgctcgatattttccaaccaaaataattattaaaaccaaacgtagctaggcaccactgctaggaatggcaagtgagatatttcttgcccttctgatcacaacctttgtggttgcagcctctgctggtaacttcaaccaagactttgagataacatggggtgatggtcgtgccaaaatcctcaatagtggggaacttctcacctttgtcctagacaaaacctctggctctggatttcgttctaagaatgaatacttgtttggaaaaattgacatgcaactaaaactcgtgcct

SEQ ID NO: 275709 - DNA, 385 bp, Glycine max
ggttctagtgtgtgattgtttgttgttgtaactcggtcttcttcttttgttgttctgcgtttgtgtttgttttttctctcacctgaaaatgtcttgctgcggtggtaactgtggttgcggaagctcctgcaagtgcggcaacggctgcggaggctgcaagatgtacccagacttgagctacactgagtcaaccaccaccgagaccttggtcatgggagtggcacctgttaaggctcaatttgagggtgctgaaatgggtgtgcccgctgagaacgatggctgcaaatgtggaccaaactgctcctgcaacccctgcacttgcaagtgaggtgttgggagagcaagcttcaagcagagatagcccttaattaggaataatgataaa

SEQ ID NO: 275710 - DNA, 327 bp, Glycine max
  unsure (1)..(327): unsure at all n locations
ggttctagtgtgtgattgtttgttgttgtaactcgttcttcttcttttgttgntctgngtttgtgtttgttttttctctcacctgaaaatgtcttgctgcggtggtaactgtggttgcggaagctcctgcaagtgcggcaacggctgcggaggctgcaagatgtacccagacttgagctacactgagtcaaccaccaccgagaccttggtcatgggagtggcacctgttaaggctcaatttgagggtgctgaaatgggtgtgcccgctgagaacgatggctgcaaatgtggaccaaactgctcctgcaacccctgcacttgcaagtg

SEQ ID NO: 275711 - DNA, 368 bp, Glycine max
gagagaaaggaggagaaacagcatcggcggtggatgggttgcctccgaggtttctggaaccgttaataatgaacgctcttaaggtcgatctcatcgaaactggtcgcgttgtctgctccatgaagatacctccgcgtttactcaatgctgggaattcgttacacggtggcgccatcgctgctctggtcgacgtggtggggtccgctgcgattcccaccgttggatattcggctcccaatactggggtttctgttgagattaatgtttcgtatttggatgctgcctatgccgatgaggagattgagatcgaggccagggctttgcgtgtaaggaaagctgttgccgttataagcgtggagttcaagaag

SEQ ID NO: 275712 - DNA, 412 bp, Glycine max
ggagaaggaaaggctgaagaagacatagagagagagagagaagtgcagaaaaaatgagactgttcgatccatggcctgttttcttcaagagagaatggaagcggaattggcccttcttggttggattcgccatcaccggaactctcatcaccaaactttcccttggtctctctgaggaggaagccaaaaagtcgaaattcgtccaggcacacaagaggtgactttagaatggaagatttgcagtggctttgcacattgtattagatgtgtgaagagagcttttgtttgtaataaatgaagagagatgttgtatacactccatgttcctatttccattttggttggttactttaatgtgattgagaaattcatactaagcagttctgaatcgatggattcacattatgattag

SEQ ID NO: 275713 - DNA, 411 bp, Glycine max
  unsure (1)..(411): unsure at all n locations
ggagaaggaaaggctgaagaacacatagagagagagagagaagtgcagaaaaaatgagactgttcgatccatggcctgttttcttcaagagagaatggaagcggaattggcccttcttggttggattcgccatcaccggaactctcatcaccaaactttcccttggtctctctgaggaggaagccaaaaagtcgaaattcgtccaggcacacaagaggtgactttagaatggaagatttgcagtggctttgcacattgtattagatgtgtgaaaagagcttttgttgtaataaatgaagagagatgttgtatacactccatgttcctatttncattttggttggttactttaatgtgattgagaaattcatacctagcagttctgaatcgatggattcacattatgattag

SEQ ID NO: 275714 - DNA, 338 bp, Glycine max
ggagtgagcaagagtgaagagcgaagagaatggctcccaagggtttaatctttttggctgtgttatgcttctcagtactgtcactgagtcgttgtcttgcggaggataatggacttgttatgaacttctacaaggaatcatgccctcaggctgaagacatcatcaaagaacaagtcaagcttctctacaagcgccacaagaacactgctttctcctggctcagaaacatcttccatgactgtgctgttcagagttgtgatgcttcactgttgctggacttccacagaaggagcttgtctgagaaggaaacagatagaagctttgggttgagaaatttc

SEQ ID NO: 275715 - DNA, 433 bp, Glycine max
aagacgacagaaggggccattgtcatggatgccgatgctacctcagcgttgcacaaaaggggcattgtcccaacaaatgatagcttcaaatatgcttggttcaaggaccatgagagtgtggtaaaagcaatatatactggttctgagtttgttgatactgttaacaccggtgatgatattggtgtagttctggagtctacaagcttctatgctgagcaaggtggtcagatttttgatactggatcacttgagggcccacatgctttatttgaagtgcgtaatgttcaagtttatggaggctttgttcttcacattggtaatgggactgggggctcagttggcgacaaaatattgtgcaaggttgattatggaagacgcgccctttatgcccctaaccatacctgcacacacatggtaaaatttggccttaggg

SEQ ID NO: 275716 - DNA, 289 bp, Glycine max
ggcaatcagcagggaaaaggactcaagcccagatgcaaccagttaaactcggaacccaaggctttgaggtactattaactacattacttgctcttattttgatgattgatacaattaatgtgattctatgtttcaaaattgggattcggatgtatgggccttactggagcgtacagcgaccctctccaagaacaggatggcatatctgttatcaaatatgcgttcagaaagggaatcacatttctgatactgcggatgtttatggagccaatgctaatgaacttttggc

SEQ ID NO: 275717 - DNA, 392 bp, Glycine max
ggaaggaagaaggggaagaagaggccaatctcacaaacccagaaacgatagagcggaagaggttgaaatccttggccatttcccacaacattctctctgagacacctgcacggagctccgttcagctgaacccttcctccgtcgtggccaagcaccacggcaaagacatcatcaagaagtctcagaggaagagcagcaggtacctcttctccttccccggcttaattgctcccatcgccggtggcaagatcggtgacctcaaggacttgggcaccaaaaaccccgttctctacctcgatttcccccagggtcaaatgaagttattcgggaccattgtatatccaaagaacagatacttgactctacagttccctaaaggtggaaagagtgta

SEQ ID NO: 275718 - DNA, 362 bp, Glycine max
gtagtggatgaatactgctttgacttcagggatttatggtctattgtattcccatctgaatcagaaaagattattgcaacagtaacaagaaaatcaaatgaggtagttcatactcaagcaaaagttatgactgatcacgatgtcatgtataagtatgtatcgaagaatgtacttattgtcgcaaatgcagcaccaaaagccataagggaaattggaacagccaccccagaggaggcattgttggtcatctatatcattgatactgtgactggtcgcgtattgcatctcatggcacatcatgggtgccagggtcctgttcatgcttgatttattgaaaacttggttgtctaccaatattttta

SEQ ID NO: 275719 - DNA, 377 bp, Glycine max
  unsure (1)..(377): unsure at all n locations
ggagacagagagaatgagtacggtgggagaagggaaggtgagtagtaatggtcatggatgttgcaaatcagggccaggctatgcttccccactggaagccatttctggtcccagagagtctctcatttatgtaacctctgtctacacagggaccggaatagagaagccagactatttggcgacagtggatgtggatccaaactctccaacttattccaaagtcatccataggcttcctgttccttatttaggtgacgaattgcatcacacaggctggaattcatgcagctcttgccatggagacccctcagcagaccgacgatttctcatcgtacctgcactcgtatcaagtcgagtatatgtggntgatgtgaaaa

SEQ ID NO: 275720 - DNA, 408 bp, Glycine max
ggagtgagtagtgagaatggagtgtcaagggttaccggaaggttgcattgctagtatactctctcgcactacgccggcggacgtgtgtaggttttccgtcgtatcaaagattttccgttcggccgctgaatcggacgctgtgtggaaacgttttctcccttccgattaccattccatcatttcccagtctccttcgcctctcaactatccttccaagaaggagctctatctcgctctctcggatcgccctatcatcatcgatcagggtaaaaagagctttcaattggagaaaaagagtgggaagaagtgttacatgcttgctgctagagctctcaacattatttggggtgacactgagcaatactggaactggacaaccgataccaattccaggttcccggaagttgc

SEQ ID NO: 275721 - DNA, 211 bp, Glycine max
ggattagggaaggaatttgttgatcttgcattcagaggaagtgtgtcgaaaattggcggattaacttttgatgaggtggcaatagagactttgtctttctgggtgaaggcattctctgaagatacatctaaaaggtttgaaaatttcgtatttatacagttcataccaggaggggagtatcatgcagataacccataaatgtcaaagttgc

SEQ ID NO: 275722 - DNA, 379 bp, Glycine max
ggagcaagagtgaagagcgaaaagggtggctggcaagggtttaatgcggtttggctgtgttatgcttctcatcactgtcactgagtcgttgtcttgcggaggataatggacttgttatgaacttctacaaggaatcatgccctcaggctgaagacatcatcaaagaacaagtcaagcttctctacaagcgccacaagaacactgctttctcctggctcagaaacatcttccatgacttggctgttcagagttgtgattgcttcactgttgctggactccacaagatagagcttgtctgataaggaaacagatagaagctttgggttgagaaatttcaggtacattgagaccctcaaagaatcctttggaaagggaatgc

SEQ ID NO: 275723 - DNA, 391 bp, Glycine max
tgatgtaatgtgatgttttgtgtgtcagtgggtgtgaattttattggtggattcgcattcgcctctggaattcccaaatcatcagtttcagcgaccatggcttccaactccgtccgagttgccgccgctcagatgacatccatcagcgacctcgctgccaatttggccacttgctctcgtctcatcaaagaagcagcatcagctggagccaaattgctttgctttccggaggccttttcttacgtgggtactaaagatggcgacagtgttcgtgttgctgaaccattggatggaccaattatgagccactactgctctttggccagagaatccagcatttggttgtcacttggaggcttccaagaaaaaggatccggtcctcaacgcttgt

SEQ ID NO: 275724 - DNA, 413 bp, Glycine max
ggaatgaatgattttaattgagcggcggggcagaggaaggggcagagttttggagtttgaaagagaaaatattgattgcagttgagttctaatgagtaacgaatacgattacctgttcaagcttctcctaatcggagactcttccgttggaaaatcctgcttgcttctcagattcgctgatgactcctatgtcgacagctacataagtaccattggagttgatttcaaaatcagaacggtggagctggaagggaaaaccgtcaagctgcagatttgggatacagctggacaggagcgattcaggactataacaagcagttattatagaggagcacatggaattattattgtctatgatgttactgagatggaaagctttaacaatgtcaaacagtggttgaatgagattgaca

SEQ ID NO: 275725 - DNA, 401 bp, Glycine max
ggaagcacaagagaagagaagagaagagaggagagggggggagaaggggttgcagagagagagagagagagatgtcatcatcttcagacctggacaggcaaatagagcagttgaagaggtgtgagcctcttaaggagtctgaagtgaaggcgctttgcctcaaagccatggaaatccttgtcgaagagagcaacgttcaaagggtcgacgcccctgtcaccatatgtggtgatattcacggtcagttttatgacatgaaggagcttttcaaagtaagaggggattgccccaaaactaactatttgtttctgggggattttgttgatagagggttttactcgggtgaaacgtttctgcttctgctcgctcttaaagtgaggtatcccgatcggataacactc

SEQ ID NO: 275726 - DNA, 383 bp, Glycine max
  unsure (1)..(383): unsure at all n locations
agcagtaatttaaccatcaacaataggcaaattacgggagccagtcttttcgtaaatttgccacccaataaagccttttctctgatccttgcgactgatgctaagcttgctaatgcgacatttcgagatgctgaactttgtaggcctggaacacttgatcctgaaaaagtaaaacggaaaatagtgcgttgtattagagatggaaaaataaaatccgttggcgagggtcaggaagctctatctaaaggcgccgtggcaatgcttttgggcaatcaaaagcaaaatgggagaacccttcttgcagagcctcatgttttgtctactgtgaccgacagtaaaagacatgcaagggcacagnctggttacataactgccattgggga

SEQ ID NO: 275727 - DNA, 383 bp, Glycine max
agcagtaatttaaccatcaacaataggcaaattacgggagccagtcttttcgtaaatttgccacccaataaagccttttctctgatccttgcgactgatgctaagcttgctaatgcgacatttcgagatgctgaactttgtaggcctggaacacttgatcctgaaaaagtaaaacggaaaatagtgcgttgtattagagatggaaaaataaaatccgttggcgagggtcaggaagctctatctaaaggcgccgtggcaatgcttttgggcaatcaaaagcaaaatgggagaacccttcttgcagagcctcatgttttggctactgtgaccgacagtaaaggacatgcatgggcacagcctggttacataactgccattgggga

SEQ ID NO: 275728 - DNA, 397 bp, Glycine max
actacaaaatgagtcagttactctgaaatggccaagaaagactggaatttctgaagctgatttctttgaatctgatgactcatggtttgatgctccaccagagggtttcagtttgactttgtcaccttttgcaactatgtggaataccctcttttcatggacaacatcatcttctttggcatatatatatgggagggatgaaagttttcatgaagaatatctatcagttaatggcagagaatatccttgcaaagttgtcttggcagatggtcgctcatctgaaataaaacaaactttagccagttgtcttgctcgagctttacctgcgcttgttgctgtgctccggctgccaataccagtatctatcatggagcaagggatggcatgcttgctggaa

SEQ ID NO: 275729 - DNA, 389 bp, Glycine max
gttgataaaggtcttggtaacccgggtgttggttggtttctggagcatgttcgagatgaatttaaaaagctagctagaaaaggttcaagaggaattttgccaaacatgaattcaatttacattcaggaaaaactggttcctgtcattcgtggtctgatcacttcattggagagtgtttcacatggtggtagtaattggagagatgaaacttccttgtcttttcaagtggatctgtctccatcaccaagtaatttgaatggacaaattgaaggtgctagttcaacaaaagccccattattgggaaaatctaacaagccagataagaagaaagtaaaagatcatgtcattgctatgagagatgttgagttggaggagcatcagaaatctac

SEQ ID NO: 275730 - DNA, 255 bp, Glycine max
gtgtgcttgctgctatacaacggcgcgattgggattcacctactggggcgtcaattcttccccttggcaccggaaatgatttgtccagggtacttatctggggaagaggcttctttacacttgatggacaatgcggattgactatgcttttgcatgacattatcattgcagcattttctatgctacatcgcttggaagtaaaaatcgttgaataaagctctgaacgaaaatcaaattaagttgaaaacctaatct

SEQ ID NO: 275731 - DNA, 397 bp, Glycine max
  unsure (1)..(397): unsure at all n locations
ggcaagcagaagaagaagaagtggagcaagggtaagcaaaaggaaaaggtgaataacatggtgctcttcgatcagggtacctatgacaagctcctctctgaggcacccaaatacaagctcattactccttccattctctctgaccgtttgaggattaatggatcacttgcaaggaaggctattagggaattgatggctagaggttcaatcaggatggtgtctgcccatgcaagtcagcagatttacactagagctacaaacacctagatgtactggttataatttatgtagtattgatgcacctctgaagtgaaattttgntttttctgtttgagacgtacctcatgctagattgcatcagttcgacagttgctaaattcatggtttattcccttct

SEQ ID NO: 275732 - DNA, 393 bp, Glycine max
ctagagtaaccggggctaagtattcataccagtggatggccttggcccagcagaacaactggcatgtcttactggatgctggatcattgggccccaaggacatggattctcttggcttgtccctatttcggccagattttatagttacatcattttacagggtttttggatatgatcccacaggttttggttgtcttctgatcaagaaatcagtgatgcaaagccttcaaaatcagtctggttgtactgggtctggaatggtgaagattaccccggagtttccaatgtatttgagtgattctgttgatggtttggataaattggttgggattgaagacgatgatgaaatcactgggatgggtgaaaagacttctgaaactcgtcaagggacac

SEQ ID NO: 275733 - DNA, 407 bp, Glycine max
gaggaagagatgagggagaggtacgagatattctcgcaaaacctcaggttcatccgctcccacaacaagaaccgcttgccctacactctctctgttaatcattttgctgattggacttgggaggagttcaaaagacacagactaggcgctgcccaaaattgctctgccactcttaacggcaaccacaagctcactgatgctgttcttcctcccacgaaagactggaggaaagaaggaatagtgagtgatgttaaagatcaaggcagctgcggatcatgctggacattcagcacaactggggctttagaagcagcctatgcacaagcatttgggaagagtatctctctttctgagcagcagctagtggattgtgctggcccgttcaacaactttggctgtaatggtgg

SEQ ID NO: 275734 - DNA, 376 bp, Glycine max
gaacacaaagaagtctaattgatggggtgttgttgcaccaaacagcgagtcgatcataaagatccagcagatcttgcttcccaaacctatgttaatatttctgaaattgaagctctgtatgatctgtacaagaaattaagcagctccatcatccacgactgagatatcagcaaagaagagtttcagcttggcttatttggaagcagcgagaaacggagcctctttgccgacaggggctctcaattatttgactcataaaaatgatggggtgatagaatttggagagttcgttaaagctctcaacgtcttccagccagcagcgccacaagcacaaagagcagattttgcatttcgactctatgatataagtcaaaga

SEQ ID NO: 275735 - DNA, 279 bp, Glycine max
gaagaaaggaagaaacataccgtaggagagcatcaaactctgcttcttcgatttccattgcgaaacgttactttcctaacttctttctcttcatcttcttcgctcttcgatcttcgaccggggactgctcccaataccaccaccaccactcgtcgatggccacgatcggaagcttacacgactcccaaggctctcaaaacagcttcgaaaccgaaaccctcgctcgaatcgccgttgacgaactcatcatgatgcaggattcgcttcttgagtttgcta

SEQ ID NO: 275736 - DNA, 397 bp, Glycine max
ggcgatctgagagtgaagttgaatgcaaagaaaaaatggcgtcgataactggaccacagattctactgcactctggttctccatggttgaaacagacgatgaaaccctcgtcatcaccctttctcctcttcccaaaacacactcctcgtcgcaccttctgctccatcaattccaattccaagggttcgagttccatcgttcccgacctcctccattacctgaaccactcctggacccaattccacgccacagccgaagctaaacgacaattactcgccgccggtttccacatgctcgacgagaaccacgactggcacctcaagcccggcggacgctacttcttcacccgcaacatgtcctgtttggttgctttcgccatcggagataagtacaatgt

SEQ ID NO: 275737 - DNA, 408 bp, Glycine max
ggtgcacaagtgagtttgttgatcgagataactagaaacagtgtgatgaaaatgaaggtccttgttttcttcgttgctacaattttggtagcatggcaatgccatgcgtacgatatgttccctctccgaatgaacactggctatggtgcccgtactccggaggtgaaatgcgcaagttggaggcttgctgtggaagcacacaacatctttggctttgagaccattcctgaagagtgcgttgaagcaacaaaggaatacatccatggcgaacaatatagatcagactccaaaacagttaaccaacaagcttacttttatgccagagacctcgaagtccatcccaaggacacatttgtgttcagtatagatggcaccgtactctctaatattccatactacaaaaaacat

SEQ ID NO: 275738 - DNA, 388 bp, Glycine max
ggaagaagaagaagaaaccacgacgcaagtcgaaagtttgattccaaaatgcgatcctcaagcattcgcagcttcaccatcttcaccctctttctcattgcgatcctcccccacggacacgcaacaactccaacctccaaacttcgcctcaaacctctctcttctcccttttcaaccgccctcgaaaccctccagaaacaactcgggtacaccttcaagagcatcgatcttcttcgtcgcgccatgacacacgcttccttctccgaagaaaacaacaaagctttcgccattctcggcgccagcgtcatcgaaacctccgtctctttccatctgctctccagagacgttgatctttcttccaaagagctgaaccgtcgattgtcccaaa

SEQ ID NO: 275739 - DNA, 395 bp, Glycine max
cgtgttggctgcttgagactacagaagggatagtggaaacaacggggaaggtcaaccacttcaaaatctaatttcagaccatatgggatcgactttccattatgaccaactgggagatataccaatggccgaacagaaattgacataatcactcaatttctgggatttgagaaatttatcccaccctttgcaaacactagtggttcatacatacttaaaggtgttaactatgcatcatgtggatctggtatacacaacgaaactggctggcattatggttctgctatcggcttgggattacagttagcaaatcacagagtcatagtatttgaaattgctaccaaacttggaagtcctgacttagctcgacaataccctgaaaaatgcttgtatta

SEQ ID NO: 275740 - DNA, 366 bp, Glycine max
ggtttcataggctcctttgtgattacgaaaatgtggaagagaacgggttttgaagaagaagcagttcaattgatcaactcagatttcagggacctaagtctagctgctaatagactcgcccatcatgccatcaaacttggtggcattggctttggagcctcttttttcggattgtttgctgccattgctgctatttatctgttgattttggatcgtacaaactggaaaacaaatattctcacagcactactcattccatacattttcttcagcttgccttcattaattttcgacgtcttcaggggagagcttggaaaatggattgctgcagttgctgttgtattacgccttttccttccaagacac

SEQ ID NO: 275741 - DNA, 399 bp, Glycine max
ggctctagaaaattcagtgctgaaacatggcttcggctactctctctgtagccaaaccagcccttcaggcaaatgggaaaggcttctctgaattctctggcctccgaagctcatcaggcttccttcccttttctagaaaatcttcagaggatttccattctgtcattgccttccagacctatgcagttggaagcagtggaggatacaagaagggtgtgacagaagcaaaactgaaggttgccataaacgggtttggaaggattggaaggaacttcttgaggtgctggcacggtcgcaaagactcccctcttgatgtcattgccatcaacgacaccggcggcgtgaaacaagcctctcaccttctcaaatacgattccatcctcggaaccttcgatgctg

SEQ ID NO: 275742 - DNA, 364 bp, Glycine max
gaggaaaatgagaggaaaaagttggcaatcttcacagcacttgctttctctcagaagctgtctggtctcccaccagaaactgtgttccaaccacttcttaaagataaccttgtggccaaagggctagttctgtcatttatgactgacttctttaaggagtatctgattgacaacagccttgatgatcttatttcaattctaaaacggggaaaagtagaggaggatcttttggacattttcccccctacaaaaagatccattgaagctttctctgagcatttcaccaaagaaagattggtggccttggtggagtataatgaaaagaaaatttttgaggtgaaacttaaggaaatgaagtcttctt

SEQ ID NO: 275743 - DNA, 334 bp, Glycine max
gcagcaagagtgaaaagcgaacagaatggctcccaagggtgtaatcttattggctgtgctatgcttctcagcactgacactgagtcgctgtcttgcggaagatcatcgacttgttatgaacttctacaaagaatcatgctctcaggctgaagacatcatcgaagaacaagtcaagctgctttacaagcgccacacgaacactgctttctcctggctcagacacatcttccatgactgtgctgttcacagttgagatgcttcactggtgctggactccacatgaaggagcttgtctgataaggtaacagatagaaactttgggttgagaaatttc

SEQ ID NO: 275744 - DNA, 391 bp, Glycine max
ggaagaaggaagcatcataaccggccaaagcttctctctcttccatttatcccccataaataaaactaggtgaaaaaaatatactctgtgcttctcatgatgatagtgtagctgaagctgcttctgctgcagcattggtgatttggacacaaaaaaagtttcaaacttttcagttctctgagcttctggtttatcaattttgaaggagttcaatactttaccctattagttggttccctgaaatttgtattggtattgctgtatcagaaattcttctgaacaatctctttaatcaaccatgtcattattggctaaactacgctgtgtcaccatagatgttactggtaccctaatggcttacaaaggggagctcggtgactattattgcatg

SEQ ID NO: 275745 - DNA, 406 bp, Glycine max
gacggacgagggtttcgtttcgggtttgacgttgttcacaatcactttctgcgcttcactcactcccttcgtgcggttttctttctttgtcgaactcgtgcgaaaatgcgtgagattcttcacatacagggagggcaatgcggaaaccagatcggagcgaagttctgggaggtggtgtgcgcggagcacgggatcgattccacggggaggtaccagggggacaacgagttgcaactcgagcgagtcaacgtctattacaatgaagcgagttgcggaaggttcgtgccgagggcggtgctcatggatctagagccagggaccatggacagcgtcagatctggtccctacggtcagattttccgacctgataacttcgtctttcgccagtccggcgccggaaacaact

SEQ ID NO: 275746 - DNA, 378 bp, Glycine max
gggaaaaagaagtctagtagtagtagtagtaaatcaattttttacgaagctcccctcggatacagcattgaagacgttagaccaaacggtggaatcaagaaattcagatctgctgcttactctaactgttctcgcaaaccatcctgatacacatccggattgatagttcgttgcatgcaaccatagttttattaggattttttcttctttgttttcaattaggtttttttgttgctctccttcaaactccatctttccaaatcctctctttgcgattgtgttttgatctgcttcctactgcgatagtttctctactggtacatggccatggcggtttccgcaattggttttgaaggtttcgagaaaaggttggaaata

SEQ ID NO: 275747 - DNA, 409 bp, Glycine max
ggtgcaaaggaggaagaggaaaaagaggattggagggtcgccacgtttagcaacaaccaaaccctctctactctttcttcttctcttcgctagggttttagcttcttcctcttcacttcgttcttctggcctctacaatgagcaacgacaaggacaccttcaacgtcgctgatctcacttccgctctcaacgaggacaatagagcagaccttgtcaatgctctcaagagcaagatacagagtttggctggacagcattctgatattctagagtctctgtcgcccaatgtcaggaagcgtgtggaggttcttagagagatccagggtcaacatgatgaattagaggcaaaattttttgaggagagagcagctcttgaggccaaataccaaaaattgtatcaaccacttta

SEQ ID NO: 275748 - DNA, 378 bp, Glycine max
  unsure (1)..(378): unsure at all n locations
ggagacagagagaatgagtacggggggagaagggaaggtgagtagtaatggtcatggatgttgcaaatcagggccaggctatgcttccccactggaagccatttctggtcccagagagtctctcatttatgtaacctctgtctacacagggaccggaatagagaagccagactatttggcgacagtggatgtggatccaaactctccaacttattccaaagtcatccataggcttcctgttccttatttaggtgacgaattgcatcacacaggctggaattcatgcagctcttgccatggagacccctcagcagaccgacganttctcatcgtacctgcactcgtatcaggtcgagtatatgtggttgatgtgaaaac

SEQ ID NO: 275749 - DNA, 413 bp, Glycine max; identical to SEQ ID NO: 273753

SEQ ID NO: 275750 - DNA, 422 bp, Glycine max
acagaaggggggacgatgaaagaaaaaataactgattagtctttctattataaaatagagtataggcattatttttttcttctaaaaaaataaaattaagaaattttcatggtaaccattcgtgcagatgaaattagtaaaattatccgtgaacgcattgagcaatataatacggaagtaaaaattgtaaatacgggtaccgtacttcaagtaggcgacggtattgctcgtatttatggtcttgatgaagtaatggcgggtgaattagtggaatttgaagagggtactataggcattgctttgaatttggaatccaaaaatgttggtgttgtattaatgggtgatggtttgatgatacaagaaggaagttcagtaaaagcaacaggaagaattgctcagatacctgtaaatgaggcttattt

SEQ ID NO: 275751 - DNA, 410 bp, Glycine max
ggaagagaagaggaagaagacgaagaagaatccaaaagcaatcccatctgtgtgtttgcacatcagaagggagggctatcaaactcaaagatctaatctaatcaggcttttgggggtgtttcagacattgcatgcatatgggtggttgtgttggatgctataaaaggcctacactgagtgctactgtggatgtgccatcgaaagggttggcaacacaaggtaacggagtgaggaaaccaagttcatcagaggatttttggaccactagcacgcatgatatggacaacagcgctgtccagtcacaggggagcatctcttcagccagtctaacaaaccaagctgtggttcttcatgctggttcttccaaaagcagcaccaaccccactggaattgtaaatcacggtgtaatt

SEQ ID NO: 275752 - DNA, 355 bp, Glycine max
ggatgacagaagggaacggtgacagaactctgggaaagatcgcagacgcattcaatgaccttgcaaacgttttgaccgatttttagaccgcagaaacatacgtcaaagttgatccattctatcatgcctgctctctcgagtccaatctgttcggttgattgggcgtggtcttcaagttcagcgaaatggattacgttgacaagggttatgatctggcagaggcgtacatatctattcaaaatatgcagtctttgattgagctggatgtgcaagctaacactgttaagaaaggatgtagccatacgcggaatctgctcagagtgaagcgcagacttgacatggtcagagtgctctt

SEQ ID NO: 275753 - DNA, 426 bp, Glycine max
accggttgcaaaagaccaccggaaggggacacacattggtcctagtagtgcctacagactcgatatgatacgccacttgtgagactgtagccttatcactcgcgtgcgacctgcagcaccacagctagctcaagggcgtatccccaacgatcataatgtacggtcactgtgctctaaccatacgctggcacgggtacatgatgatctaaaggcgtcacagcactgaatcagagagctcgactctgataacggtagatgacatgcacgctaaccagcactatgctgtagaagatacagtcgctatcgtgaaacttgaggatattgaggcctccaatgacaactgtgacgatgcttatgatgaaccaactgactgcctcatcattgatatagctcaggatggaccgttcagactccttactgaaaatg

SEQ ID NO: 275754 - DNA, 346 bp, Glycine max
ttggaattgccggggcgagccactcgttcttacggctgttagatgacgactttaaggtactgctaaaagctaaatatcatggaggtactcaaattagcatggctgtcatggctgcattcttgaatttgatcatcatcttttcagcagtctctacaacaggcaagtcactgagctcaaactactatgcaaaaacatgccctaatgtggagttcattgttgccaacgcattaaaggatgccactgctagggacaaaactgttccagcaccaattctgcgaatgcacttccatgattgtttcggtcgcaggtgatgatgcctctgcgctggctcaattcataaggaaac

SEQ ID NO: 275755 - DNA, 143 bp, Glycine max
ggcaaaagttagtagtagtgaagaaaatgaaagtcctggttttctttgttgctatagttctagcagcatggcattgccatggctcagaccatgaccatgaccatggccacacctaccaaattttccctctgagaatgaaaact

SEQ ID NO: 275756 - DNA, 354 bp, Glycine max
ggaacgtggtggacttgcagagaaggtggtcagagacaaagttttggtatttcgttttactgatgttgggaaacttccccctccagttctccagtttgttgaggtgtcatttggttatactcctgataatctcatctacaagaacattgactttggggttgatttagattctcgggttgcgctggttgggcccaatggtgctgggaagagtacactactgaagctaatgacaggtgacttgatgcctagtgatggcatggtccgacgtcataatcatcttcgaattgcacaatatcaccagcatttggccgaaaagctagacatggaaatgtctgctctccagtttattgatta

SEQ ID NO: 275757 - DNA, 403 bp, Glycine max
  unsure (1)..(403): unsure at all n locations
gacactaaacaagttaaaagaagagcatcagtgaactaacaaagcaaccctatgtcgaaggtggtttgtgtcaccggagccagcggcgccatcggatcatgggtggtcctactcctcctccagcgtggttacaccgtccatgccaccgtccaagatatcaaggatgaaaatgagacgaaacatttggaggaaatggaaggagcaaagagtcatctccatttttttgaaatggatcttcttgacatcgactccattgccgctgccataaagggttgttccggcgtaatccaccttgcatgtcctaacatcattggtcaagtcgaagatcccgagaaacagatattggaaccggcgataaaaggaacggttaatgtgttgaaagcggcgaangaagcaggggtgg

SEQ ID NO: 275758 - DNA, 323 bp, Glycine max
ggttctagtgtgtgattgtttgttgttgtaactcgctcttcttcttttgttgttctgtgtttgtgtttgctttttctctcacctgaaaatgtcttgctgcggtggtaactgtggttgcggaagctcctgcaagtgcggcaacggctgcggaggctgcaagatgtacccatacttgagctacactgagtcaaccaccaccgagaccttggtcatgggagtggcacctgttaaggctcaatttgagggtgctgaaatgggggtgcccgctgagaacgatggcttgcaatgtgggaccaaactgctcctgcaacccctggacttgc

SEQ ID NO: 275759 - DNA, 344 bp, Glycine max
gagtggcggagtgtgcagaagagcgtcgcagtcgcaaccctaatcagaagaagcgcagcttcaagcgagtgacagccaccagccatgggtcgtatgcacagccgcggtaagggtatatcctcttctgctttgccctacaaaaggacaccttctagctggctcaagatctcttcgcaagatgtcgaagaaaatatctgcaagtttgcgaagaaaggtttgaccccgtctcagattggtgtcattctcagagattctcacggtattgctcaggtcaatagcgtcactggcagaaaaatccttcgcatcctcaaagctaacggacttgcgcctgaaatccagaggac

SEQ ID NO: 275760 - DNA, 314 bp, Glycine max
ggaacaaaacaagtgtttcgaatagattatcctaagtctttgggaatagtgctgcaatggcttcaagtcaggaggaggtgacccttttgggagctactggaagcccatttgtgtgcagggttcatattgccctcaagttgaagggagttcaatacaaatatgtcgaagaaaatttgaggaacaagagtgaactgcttctcaaatccaacccagttcacaagaaggttccagtgtttattcacaatgagaagcccatagcagagtctcttgtgattgttgaatacattgatgagacatggaagaacaaccccatc

SEQ ID NO: 275761 - DNA, 392 bp, Glycine max
ggaagaaagagagagagagagagagagagaggtgtgaagtgggtgaaggtttttgagaagaaagatggaacgaagtggcggaatggtaactgggtcgcatgaaaggaacgaacttgttagagttagacacggctctgatagtaggtctaaacccttgaagaatttgaatggtcagagttgtcaaatatgtggtgataccattggattaacggctactggtgatgtctttgtcgcttgtcatgagtgtggcttcccactttgtcattcttgttacgagtatgagctgaaacatatgagccagtctttgtcccagtgcaagactgcatttacaagtcaccaagagggtgccttaagttgaaggagatgatgatgatgaaaaccatgcttatgat

SEQ ID NO: 275762 - DNA, 371 bp, Glycine max
ggacaccaaattcaatcaaagattgattcaattgaatgggttcagtaatgctcagtggaactgaaaagctcaccctcagaaccctaaccgggaacggtttaggtttcactggttcggatttgcacggtaagaacttcccaagagtgagtttcgctgctaccactagtgctaaagttcccaactttagaagcatagtagtacccaagtgtagcgtctcggcttacaggccaagctcgcagccaaggttcattcagcacagaaaagagaccttttggttctataggtctctctcaattgggtatgaccatgtcattaaccctggccattggaccgaggacatgaaggatgatgcccttgaacccggtgatctc

SEQ ID NO: 275763 - DNA, 357 bp, Glycine max
gaaggcttgattgagattgctggcggatgtcaccggttagagaagcttgtcctatgcaagtgtcctaatatttctgactagactttaattgcagttgctaagaactgtccaaagctggctcgatttatcaatagagtcgtgtcctaacatatggcaatgaaggtctacaagctattgggaagtgtcccaatctaaggtctatctcaatcaaggattgctctggagttggtgatcagggagttgctggtgtgttgtcttcagcttctttagctctaacatacgtgaaacttgagtcgctgaatgtttctgatcactatctaacagcgattgggcattactgcattgcaggtaccgatc

SEQ ID NO: 275764 - DNA, 304 bp, Glycine max
ggaagaaagatagagagagagagagagagaggtgtgaaggtggtgaaggtttttgagaagaaagatggaacgaagtggcggaatggtaactgggtcgcatgaaaggaacgaacttgttagagttagacacggctctgatagtaggtctaaacccttgaagaatttgaatggtcagagttgtcaaatatgtggtgataccattggattaacggctactggtgatgtctttgtcgcttgtcatgagtgtggcttcccactttgtcattcttgttacgagtatgagctgaaacatatgagccagtct

SEQ ID NO: 275765 - DNA, 421 bp, Glycine max
ggtggttatgcagaagaatgtgttggatatcaacagcatcaccagtgttgacgggatcgtcggcaccggcttagacttcttaggcagtgcactcgatacagttacttttttagcctcctccatctccatccaacttattagtgctaccaaggctgatggtgggaaaggaaaagttggaaaggctacaaatttgagaggaaagataacattaccaaccataggagctaaggaagaagcatacgatgctcaatttgattgggacagtgacttcggaattcccggtgcattttatattaagaacttcatgcaaaacgagttctacctcaagtctttaattctcgaagacattcaaaaccatggaaccattcacttcatatgtaactcctgggtttacaattcaaaacactacaagactgatcgc

SEQ ID NO: 275766 - DNA, 401 bp, Glycine max
  unsure (1)..(401): unsure at all n locations
gggccaagggaatagtggaaaatcctcgtaactatttgacattcttctgccttggtaatagggaggtgaagaaacaaggagagtacgagcctccagaaagaccagatcctgatacagattatatcagagctcaggaggcccggcgcttcatgatttatgttcatgccaagatgatgatagttgatgatgaatacataatcgttggatctgccaacataaaccagagatcaatggatggtgccagagattctgagattgccatgggtgcttatcaaccatttcatttggctgccaggcagcctgccaggggacagatccatggtttccgcatgtcgttgtggtatgagcaccttggcttgcttcatgactctntcctccaccctgaaaatgaagaatgtatt

SEQ ID NO: 275767 - DNA, 425 bp, Glycine max
ggcacaagtgagtttgttgatcgagataactaggaacagtgtgatgaaaatgaaggtccttgttttcttcgttgctacaattttggtagcatggcaatgccatgcgtacgatatgttccctctccgaatgaacactggctatggtgcccgtactccggaggtgaaatgcgcaagttggaggcttgctgtggaagcacacaacatctttggctttgagaccatttctgaagagtgcgttgaagcaacaaaggaatacatccatggcgaacaatatagatcagactccaaaacagttaaccaacaagcttacttttatgccagagaccttgaagtccattccaaggacacatttgtgttcagtatatatggcaccgtactttttaatattccatacttcaaaaaacatggatattgggtggagaaat

SEQ ID NO: 275768 - DNA, 400 bp, Glycine max
gagagaaagagagagaaagatgtcgaagcgtggtcgtggtggttcggcggggaacaagttccgcatgtcgctgggtcttccagtggcggcgacggtgaactgcgccgacaacacgggggcgaagaacctctacatcatttcggtgaaagggatcaaaggccgtttgaaccgtcttccctcggcctgcgttggcgacatggtgatggccaccgtgaagaagggaaaacccgatctgaggaagaaggtcttgccagctgtcatcgttcgccagcgcaagccatggcgccgaaaggacggcgtctacatgtacttcgaagataatgctggtgttattgtcaatcccaagggagaaatgaaaggttctgctatcactggtcccattggaaaagagtgtgctgat

SEQ ID NO: 275769 - DNA, 313 bp, Glycine max
ggcagtggagagagagtgttagcaccagcaatgtggaagttaatcttcgtgtaccttgcactaattcctcttctctgcacctacttctcgccagagaaaccctcagatcggcgcatcctcgatctgctcgatgacttcgccatcaaatcctgtcactctctcttcttcaactccctcaaatctcgcggcttcgatctccaatttcacctcggcgacgaccccaaaattgcgctccagagatacggccagtacctctacgacgccctaattctcttttcccccaccattgaacgttttggaagatccattgacg

SEQ ID NO: 275770 - DNA, 203 bp, Glycine max
accaaatacctggatggtatgtcactttgtatgatgatgttcttctagaatttggtgcttataatgatcattgggtagtggcaaaaaatgaagaggaagctcataaagaggctatccacatgtataatggaaagcattttcatttaagccaagatcctgacgttcttgatacatggttttcttctgattctgttcccattatc

SEQ ID NO: 275771 - DNA, 403 bp, Glycine max
gacaacattgctatcaagaagcttttcactgctcttaaacccaaggacaatgcagtgatcaatggggattttgaagagggtccatggatgttcaggaacacttcactgggtgtgttgcttcccacaaatttggatgaagaaacttcatcactgccaggttggatagtcgaatccaaccgtgccgtccgttacattgattccgatcactactctgttccacaaggcaggagagccattgagttgctctcaggaaaggaaggaatcatatctcaaatggttgagaccaaaccagacatgctctacagcttgaccttctcattgggtcatgctgatgataagtgcaaggagcctcttgctgttatggcctttgctggggaccaggctcagaacattcactacactc

SEQ ID NO: 275772 - DNA, 330 bp, Glycine max
ggacgaccggcttgcccaatcgactgcgtgtctctctgaattgacacgcttaaagacaaagtcttaaatggctggtccaaggattgcccatgctaccttggctggtactaatgtggttaaagagataataatcggaataacacttgtcttatctgctggttgcgtgtggaagatgcaccactggaatgaacagaggagaaccatgaccttctacgatttactggaaaaggctgagatcagtgttgatgcacaggaacagtgaaaatgttcttgctttagacgactatgcgtctcattcatacgcttgtttgtgcatgctatattcaattg

SEQ ID NO: 275773 - DNA, 407 bp, Glycine max
ggtgcacaagtgagtttgttgatcgagataactagaaacagtgtgatgaaaatgaaggtccttgttttcttcgttgctacaattttggtagcatggcaatgccatgcgtacgatatgttccctctccgaatgaacactggctatggtgcccgtactccggaggtgaaatgcgcaagttggaggcttgctgtggaagcacacaacatctttggctttgagaccattcctgaagagtgcgttgaagcaacaaaggaatacatccatggcgaacaatatagatcagactccaaaacagttaaccaacaagcttacttttatgccagagaccttcaagtccattccaaggacacatttgggttcagtatagatggcaccgtactctctaataattcatactacaaaaaaca

SEQ ID NO: 275774 - DNA, 355 bp, Glycine max
  unsure (1)..(355): unsure at all n locations
ggagcaggggagttcaaagaagttgttttccaggccacacgcgtagcctacagtgctacaggtatagtgtctctcttgtctggtcaacccaaaggagaagtttcggttgaagcccggtcagagtcaaaaggctattttgaggaaactgtgacagattcatctggaaattatcgtctgagaggactactgcctgatactgactatgttgttaaagtggctaaaagggatgtgggcagttctaatatagagcgtgcatctccagattctattgctgtcaaggttggaactgangatatcaagggatcggattgtatagtttttgaggagccggaaatgacaattataagttgccacg

SEQ ID NO: 275775 - DNA, 426 bp, Glycine max
ggtccacccgttcgttagatctaacaaccacttatcccctttctccttctaacgagtgaggaaaaatggcgcgtaagaagatcagagagtatgactcaaagaggttgttgaaggagcactttacgagactctctggcaaggagttgccgatcaagtctgcacaaattaccgcatcaactgatttcactgagctacaagagaaggaaccctggctttcatcttctaaattggttgttaaacctgacatgttatttggaaagcgtggcaaaagtggtttggttgccttgaatttggattttgcacaagttgtttcatttgtgaaggagcgtcttggaaaagaggttgagatgagtggatgcaaaggacccataacaactttcattgttgaacctttcatgccacacaatgaagaagtttacctttaca

SEQ ID NO: 275776 - DNA, 405 bp, Glycine max
gatggcaatggggactatgtgaaactgagggcgaacgccgacgacggttctcctccgggtgcggcggcggagctttctccgccgacgctaagagccgccgtgtggtattgggtgaaattggtggtgttgtttctattcctggggtttttggctgtggttgtgctcgtctgggtcggaccctatttcatagacaaggagattattccgattataaattgggagacagagactttcagtactccagtgttaactgttttggtgtttgcatctgtggcaatattcccaaccctacttttgccatctacaccttccatgtgggtggctggaatgacatttggttatggctttgggttcttgctaattatatctgcagcagctattggtgtatcactcccttttgtcatc

SEQ ID NO: 275777 - DNA, 386 bp, Glycine max
ggatgaaagaaatataaatagaagcagcagcgggatttggtaaagctagaaattgcaatgaagaagaggagcagcagcagcagcagcagttcagtttttgaggcgaatggagtggaggaacctcaacaaccttcatcctgtgcagcagcagcacttgatgagttgcataaagagaaaaatgagaatggagaagaaaccctcgtgccttccaatccctatcccaatcttgacgatggcttctatgaaatcgaaaccatacgccgtaagaggctacgcaagggtcagctccagtacctaatcaaatggcgtggatggcctgagactgccaacacttgggaacctcttgaaaatctacagtccgttcctgatctcggtgatgcttttga

SEQ ID NO: 275778 - DNA, 406 bp, Glycine max
ggaatgaccaagaacaacatgaattttctagccttcgttactgttctactcttcatactaccagcaacctcatcttcccagtatttggggaacaaccttctcactcatcgcaagatattcctaaaaaaagacaacattattacctcgtacgctgtcatctttgacggtggtagcacaggaacccgtgtgcatgccttccattttgaccagaatttggatctccttcccattggtgatagtcttgagcttaataaaaagatcacacccggtttaagtgcttacgaggatgatcccgagcaagctgcagaatctctgattccacttttggaggaagcagaaagtgtagttcctgaggacttgcgtcccaacacacccgttaggctaggggcaactgcaggcttaaagc

SEQ ID NO: 275779 - DNA, 341 bp, Glycine max
acgcgtgagcagatgtgagaagacgacacagaggggactcgataatgtgatcgcaagggacagtggtttaggcaaagcaaccagacttgctgttgaggcatggggtctgaagaattgcacccaaaaggaatagtggtacagtgacactgtgactgctgttcttgttcctgcttacattgatagtactgaaatagttaggagggcatggaagagatacaattggagcttaagtattggactgaacaaagatgctgtgaaggttttaagaattggacatatctgccacttgaatgagttgcaactgttacgatgtctagctggtgtacagatgatactcaaag

SEQ ID NO: 275780 - DNA, 400 bp, Glycine max
gccacagaaattcaatactaaacacaacagatcggagagagagtgtgtgaaaagtggaacacacaacagaacatcaatggcgacacttaatgctcctcagcctcttacccccgtatgcagatgattgtgagcagattctaaaagccttctcaggttggtgaactaacgaggagctgattgtatcgatcttgcctcatatgaatgctgctcacaggaagcttatcagataaacttatgcccagacctatggagaagatctcctcaaggccttggacaaagaactcacgagtgattttgataggctggatcatcattggacacttgattctgctgaacgtgatgcatttatggcaaacgaggcgactaaaaaacggactttaagcaatcagggtctggtgga

SEQ ID NO: 275781 - DNA, 285 bp, Glycine max
gattaagaggtcattcaaatacgcctgggtgcgggacaagcttgaggctgaacgtgagagaggaattaccattgatattgcattatggaagtttgagaccaccaaatactactgcactgttattgatgctccatgacatcgtgatttcatcaagatcatgattactggaacttcccaggcttgattgtgctgtccttatcattgatttcacaactggttgatctgaagctggtatttccaaagatggtcagactttcgagcatgctctacttgctctttactctt

SEQ ID NO: 275782 - DNA, 430 bp, Glycine max
aattcgagcggccgcttttttttttttttttttttttttttttttgggattgaatacgaacctgtaacatgaaggctacgactataacagtaagaaatagtgctgcagtctcaaaaagttgaaagtttaagtccataggttgccctattatccagccaataacaacacaaaatggtatctgcataaggaaaaggaaaacgtgaaggaaatgaaagactttttgttattaggaggaacttataaatgaaaaaagcagattactgtccatgaatgctgcatcaagccatcaactactacataaaggaagaagttgaaaaaattcagtggtttcatcacttagtttcaatcgtactattatgttatatatcctactaaattttgctttttcttatttagacaacatgccaatcttttagcatggtgaactcca

SEQ ID NO: 275783 - DNA, 336 bp, Glycine max
ggagtataaaattgcaatccctgggattggaaatggcagcggcaggttgcccgaagcttctggaattgagcacgaagatcgtcgctgttggcaaaaactacgctgctcatgccaaagaactaggcaacgccgttcccaaggagccggtgttgtttctgaaaccgacgtcggcttacttgactaacggcggtaccattcatatcccacacaacgagggctctctgcatcacgaggttgacctcgctgtggtcatctccaagaaagcccgtgacgtctacgaatcctgtgccatggattacctcgtcggttatgcactggctctggatatgactgcta

SEQ ID NO: 275784 - DNA, 335 bp, Glycine max
gtttatagctatggtgatgtggtgttggaaatccttacaactagactaccagttgatgaggactttggtgaaggtgtagatttggtgaaatgggttcacagtgctccggtaagaggggaaactccagagcagatattggatgctaagcttagcacagtttcctttggttggaggaaagaaatgcttgccgctttgaagggcgcgttgctgtgcactgacaacacaccagccaaacgaccaaaaatgaagaatgtcgtggaaatgcttcgagagataaaagaaaatcgagaacagttagccacttaagtattctattctgtgctgtaatctactcc

SEQ ID NO: 275785 - DNA, 367 bp, Glycine max
gacgaggacgatgaagacgaggaggagttgaagaagaggccctttgggttctctcgctccagcaacaaggctgcttctaagcctctctctcgtggatcagcaactgtggaatcaaaggggcaagctgagaagtgtgccaagagaaagaggaagaaccagtatcgtggaatccgtcagcgtccatggggaaagtgggctgctgagatccgtgacccaagaaagggggttcgtgtttggcttggaactttcagcactgctgaagaagctgcaagagcttatgatgctgaagcaaggaggatccggggcaagaaagccaaggtgaatttcccggatgagccttcaagcgctgctgcttcctcaaaacgcc

SEQ ID NO: 275786 - DNA, 359 bp, Glycine max
agagtggtggagtgtgcaaaagagcgtcgtagtggcaacgggtaatcagaagaagcgcagcttcaagcgagtgacagccaccagccatgggtcgtatgcacagccgcggtaagggtatatcctcttctgctttgccctacaaaaggacacctgctagctggctcaagatctcttcgcaagatgtcgaagaaaatatctgcaagtttgcgaagaaaggtttgaccccgtctcagattggtgtcattctcagagattctcacggtattgctcaagtcaatagcgtcactggcagcaaaatccttcgcatcctcaaagctcacggacttgcgcctgaaatttcagaagaccctgaccatttg

SEQ ID NO: 275787 - DNA, 367 bp, Glycine max
gacctaaaaatggcatcaaaactgaccctgattaggttggttgttgcggccctgtgcgccgttgatctaacccagagagcatcatcatcatcatcatcccctcacgcgccagcgccctccgtggactgctccaacctggttctcaccatggccgattgcttgtccttcgtcaccaacggcagcaccatcacaaagccagagggcacatgctgctctggtttgaagtctgttctcaaaaccgctccagcgtgtctctgcgaggctttcaagagcagcgctcaattctgcgtcgttttgaatgtcaccaaggcaaccactcttcctgctgacttcaaagtctctgcttcttttgccaccaactgtggat

SEQ ID NO: 275788 - DNA, 221 bp, Glycine max
gtcacaagtgagttatttggtggaaatatcgagaaacagtgtgttgaaaatgaatgtccttgttttcttcggtgctacaatttttgtagcatttcattaccatgctttcaattttttcccttttcaaatgaacactgtctatacttcccttactacaaatgtaaaatgctcaagttgtaggctttctacataagcacacaacatctttgacttttatacca

SEQ ID NO: 275789 - DNA, 383 bp, Glycine max
gacactaaacaagttaaaaggggagcatcagtgaactaacaaagcaaccctatgtctaaggtggtttgtgtcaccggagccagcggcgccatcggatcatgggtggtcctactcctcctccagcgtggttacaccgtccatgccaccgtccaagatatcaaggatgaaaatgagacgaaacatttggaggaaatggaaggagcaaagagtcatctccatttttttgaaatggatcttcttgacatcgactccattgccgctgccataaagggttgttccggcgtaatccaccttgcatgtcctaacatcattggtcaagtcgaagatcccgagaaacagatattggaaccggcgataaaaggaacggttaatgtgttgaaggc

SEQ ID NO: 275790 - DNA, 334 bp, Glycine max
gtcagacgaaggaagtaaggaagctagtctatatattttaaatttgtgatcatcttcattaatatttcattccatggcttcttgtcactcgtctcccactctagtgtttacagtacgaaggaggcaagcggagctaatagcgccggctaagccgacgcctcgtgaagttaagaaactatcggacattgatgaccaagaagggcttcgtttccaaatccccttcatacaattctatggtaataataaagagtcctccatgaaagaccctgttgaagtgataagaaaggcacttacaaaaactctagtattttactacccctttgcgggtaggctt

SEQ ID NO: 275791 - DNA, 381 bp, Glycine max
gacgttccagtggacattatgcgcttgttacgcaacaaccacttagaggaagggccaagcagggaggacaacgggtaggcgaaatggaggtttgggccttggaaggatttggtgttgctcatattttacaagagatgcttacttataaatctgatcatattaaaactcgccaagaagtactcgggactacgatcattggaggaacaatacctaaacctacagatgctccagaatcttttagattgctagttcgagaattacgatctttagctatggaactgaatcatttccttgtatccgagaagaacttccggattcataggaaggaagcttaattggactgaatcagaaattttattctatgattgatcagtattaaca

SEQ ID NO: 275792 - DNA, 327 bp, Glycine max
ggagtaagggcggtgcagtgcttcaaaccccgttttcggttctcatttcctttcatcactctcttgcttcttttcttcttctcgcaattttccattttcacacttttagcaacatcttttaatggcgtcccaaatccgtgagtggtctggaatcaatacattcgcacctgctacccagactaagttgcttgaactcttgggaaatcttaaacaagagaatgtgaactccttgactatacttgtgatgggaaaaggaggtgttggaaaatcttcaactgtgaactccatcattggggaaagagtggtttcgattaatcctttccagtc

SEQ ID NO: 275793 - DNA, 389 bp, Glycine max
tcggacaggtcatcgaaggattgaacgttggggaggacatcgagaaggtcggatccagctccggcaggacctccaagcccgttgtcatcgccaactgcggtcaactctcttagacgacgttgacccgcggctttaatctctgaatctgtgttatttctttcggtgtcgtttttgccttttttttctcttcttttctttctcgtgtcgtcgtttaggggattgtggtgttaaggatatcatttcgaaacccttcccctttccttttcaatatcagtatcatgtggttggttggttggggttcatagagtgagtgaatggagtctgttatgagaagcataaaaaaaacatgaagagctaccctcaataaaaattagacatctataattcac

SEQ ID NO: 275794 - DNA, 364 bp, Glycine max
gtcggcgaggaggttatcggatgtggtgctgggctgcgtgatgcggtacatacacgactccaaggaccgcgacgccgtgtcgcaggtgtgcaggcggtggtacgagctcgactcgctcactcgtaaacacgtcactattgcgctgtgttacaccaccacgccggaccggctaaggcggcggttcccgcacctggagtcgctgaagctgaagggaaagccgcgggcggcgatgttcaacctgatacctgaggattggggaggtttcgtcacgccttgggtcagagtgatctctcaatactttgattgcttgaagtcgcttcactttcggcgcatgattgtgagggattccgatcttcaagttcta

SEQ ID NO: 275795 - DNA, 401 bp, Glycine max
aggtctatgcacaatgcagatgcaaattcaattcttgctgccaaagccaaaacaaaactgagtcatttctttgcttaggagatcggttctgcaaaaagccaaaaagaagaagaagaataaatggaagcagagacctcaaacggtggtggtattggaggcctttacgtcaaagttatgaccgacgaccaaatggaactgctcaggcaacagatttctgtctacgccaccatctgtgaacagctcgttgagatgcacaaggccgtcactacccaacaggaccttgcatggctgaggctgtgtaattagtactgtgatccgttgatggcatgctctggacacaagataactgcgaggcagcgctggactccaacgcctctgcagcttcaaatacttgagcgtat

SEQ ID NO: 275796 - DNA, 385 bp, Glycine max
ggagaaaaaaaataaaataaaaaataaggggaatgaatctggtggcctggtggggagtggggactccgcgatcctcgacagtacaatttcaccgagttcccatcagcagtgcgaaggggagtcccatggctgaccccaagcgagtagttgtctgcggcggcggagtcatcggagtctccaccgcctactttctggcggagaagggcgccgacgtcacgctcatcgagaagtccgacgtggcatgcgccgcgtccggaaaagccggtggattcctcgccctcgattggtgcgacggaggaccgctggaagagctagctcgcacgagcttcaatctccaccgttcgctctccgaagaactggacggtccgcgatcgtacgggtacag

SEQ ID NO: 275797 - DNA, 362 bp, Glycine max
ggttagggcgtgagaaaaacaaaagagtagtgggctttaggtggtgaagaacaagagctcaaatcaaatcgaatcgaaaaaagaaagaaagatcatattcatggcgatggcaagcctggctcgacggaagggttacgccgtcgttttgtcgtcgaggtcgtcgttttgtctgacaagctggaggggattcgcgtccggatctgacgaaaacgacgtcgtcgtcatcggcggcggtcccggcggctacgtggccgccatcaaagccgcgcagctcggtctgaaaaccacttgcatcgaaaagcgtggcactctcggcggtacctgcctcaacgtcggatgcataccttccaaggttcattttc

SEQ ID NO: 275798 - DNA, 389 bp, Glycine max
gggacttgagatggcaatgggatcattagaacatcttctacaatatggagagcagaatattcgccgagcagttcctttggcccttggtctactctgtatatcaaatccaaaggtcaatgttatggatacgttaagcagacttagccatgatactgattcggaagtagctatggcggcagttatatccttgggtctaataggtgccggaacgaacaatgctcgaattgctggcatgcttcgcaatctttcaagttattactacaaggataccagccttctattctgcgtgcggattgcccaaggtcttgtacatttgggaaagggcttattaacccttaatccatatcattccgatcgctttctactatcaccgacagcacttgctggat

SEQ ID NO: 275799 - DNA, 393 bp, Glycine max
ggttctagtgtgtgattgtttgttgttgtaactcgttcttcttcttttgttgttctgtgtttgtgtttgttttttctctcacctgaaaatgtcttgctgcggtggtaactgtggttgcggaagctcctgcaagtgcggcaacggctgcggaggctgcaagatgtacccagacttgagctacactgagtcaaccaccaccgagaccttggtcatgggagtggcacctgttaaggctcaatttgagggtgctgaaatgggtgtgcccgctgagaacgatggctgcaaatgtggaccaaactgctcctgcaacccctgcacttgcaagtgaggtgttgggagagcaagcttcaagcagagatagcccttaattaggaataatgataaactattaat

SEQ ID NO: 275800 - DNA, 370 bp, Glycine max
ggttctagtgtgtgattgtgggttgttgtaactcgttcttcttcttttgttgttctgtgtttgtgtttgttttttctctcacctgaaaatgtcttgctgcggtggtaactgtggttgcggaagctcctgcaagtgcggcaacggctgcggaggctgcaagatgtacccagacttgagctacactgagtcaaccaccaccgagaccttggtcatgggagtggcacctgttaaggctcaatttgagggtgctgaaatgggtgtgcccgctgagaacgatggctgcaaatgtggaccaaactgctcctgcaacccctgcacttgcaagtgaggtgttgggagagcaagcttcaagcagagatagcccttaatt

SEQ ID NO: 275801 - DNA, 408 bp, Glycine max
  unsure (1)..(408): unsure at all n locations
ttggggtagattggggcgtggacataagggggtttatgacgcaatcaataattcaattcattttcaattaggtcttgctctagcctctttaggggttattacttccttggtagctcaacacatgtactctttacccgcttatgcatttatagcgcaagactttactactcaagctgcattatatactcatcatcaatatatagcgggcttcattatgacaggggcttttgctcatggagctatattttttattagagattataatccagaacagaatgaagataatgccttagcaagaatgttagaccataaagaagctatcatatcccacttaagttgggctagcctctttctggggttccatactctgggactntatgtccataatgatgtcatgcttgcttttgg

SEQ ID NO: 275802 - DNA, 406 bp, Glycine max
gtaagaaaggcagagttattgccattgcctcggcctcttgcaacaccaaactggtacacacttaataatattattataaaaattaacccaccaaatccactaaccctttttttaatacaactcattacctggattggaccaaggtgaaagtaaaatcatttgcaaccaatgccgttgaacatatttcaggacaaagatggattgccacggattatattgactgagccaaagggttcatcagctgaggttcttctttatggagggcatattatttcttggaagaatcatctaaaggaagaacttctttttatgagcagtaaggctaacaagaaacagcataaagcaatcagaggaggaatatcatcttgcctagcacggtttgtgatctcagttcacttgacaacat

SEQ ID NO: 275803 - DNA, 371 bp, Glycine max
ggcttgaaggaggctctagtgtggtctgcaactatgagcaaggattatctaatcatactttctctccttctttccacggtgcttgcaactgcaagttcttcttcttcttcttcctccctctatcttgggaagggcttctcccatcgcaaattgtctcccagttatcacattcacaaaaccattgacgaatcctatgcagttatcttcgatgctggtagcacgggaagccgtgtacatgtctatcgttttaaccaacaattagatctccttcgcattggccaagaccttgagttgtttgtcaagactatgccaggtttaagtgcttacgctgagaatccacaagatgctgcaaaatctcttattccactttt

SEQ ID NO: 275804 - DNA, 379 bp, Glycine max
ggtgagattggtgtgctttgttataagccacagcttttcacagctcgaacgaagcgactaagtcagttgctcaggctaaaccgtactacgttcttgaatattgttcaggccaacgtgggagatggaaccataataatgaataatctccttcagcatttgaaagagatcaacgatccaatcatggagggagttttggtggatattgagaacatgttagctcgtggtaggatggacctaccagcgagtgtgtgctttgcggcagcaagaggagatgacttgttgttgcatcaattactcaaacgaggcatggatccaaatgaatccgacaacaatcgaaggacagctttgcatatagcggcatgtcaaggaaaacagaact

SEQ ID NO: 275805 - DNA, 375 bp, Glycine max
ggtgcacagcttgaacacagcgcgtttcggagagagacgtcgcaatggggaggaggcctgcaaggtgttatcggcagataaaaaacaagccataccccaaatcacgcttttgccgtggtgttcctgatcctaagatcagaatttatgatgttggtatgaagaagaaaggtgttgatgagtttcccttctgtgttcatctggttagctgggaaaaagaaaatgtttcaagtgaagcattggaagctgctagaattgcatgcaacaaatatatggcgaaatttgctggaaaagatgctttccacttgagagtccgagtacatccattccatgttcttaggatcaacaaaatgctttcatgtgctggagctgataggc

SEQ ID NO: 275806 - DNA, 337 bp, Glycine max
ggtgtgagttcattaacatatacaaattctctgtgttgtgttgtgtacttgtgttaattgtgttgttgttgtaggaaatttaagtgaagagagaatgatgatgaagtctgctatgtgtgcattggtgcttgtggcactggttgtggttgaagtggggcccatggctgaggctgcggtgacttgcaacccaacacagttgactccttgtcttccggcaattaattcaggttctgcaccttcgagtgcttgttgccagaagctgaaggagcaaaagccatgcttctgtggctacctcaaaaaccctagcttgaagcagtatgttaactctcctaatgcc

SEQ ID NO: 275807 - DNA, 386 bp, Glycine max
gacagctgatggtggcgtcaccaaatacctgcatggtatgtcactttggaggatgatgttcttcgggaatttggtgcttataatgatcattgggtagtggcaaaaaatgaagaggaagctcagaaagaggctcgccagaggtataatggaaagcagtttcatttaagccaggatcctgacgttcttgatacatggttttcttctggtctgttcccattatctgagctgggatggcctgatgacacagaggacctgaagacattctatccaacttctgttctggaaactggccatgatatcctctatatctgggttgcccgaatggtgatgcaaggattgaagttgggtggtgatgtgcctgttacgaagatttatttgcatcctat

SEQ ID NO: 275808 - DNA, 409 bp, Glycine max
atcggagaaagagttcgtactcacattggatgactctaacggtcacgacactgtcagcaagcacgatttcatcgtcgtcgagttctacgctccatggtgtggccactgtaagaagcttgctcccgagtatgagaaagctgcttctatcttgagtagtcatgatcctccggttgttttggctaaaattgatgccaatgaggagaagaacaaagaccttgcatctcaatatgatgttaggggatacccaacaattaagattctgagaaatgggggaaagaatgttcacgaatacaaaggtccccgtgaagcagatggcatcggtgactatttgaagaaacaaagtggtcctgctttaactgaaattaaatctgctgatgaaactactgctttcattggtgaaaataaagtt

SEQ ID NO: 275809 - DNA, 414 bp, Glycine max
ctagatgaactattgataggagagaatgacaggatggagcaagtattagtacaagggcactgcaaagatcaaagaacggcaatggagacagcaaaaacaatcattttcttgggacttcttgaccagactgaaatccctgcttcctgcaaaagtgcttttgatgttgcttgtttccgcatggaggagaggttatcatacaccagcacagaaaaggatatggtgcttttgcatcatgaagtggaaatagaatacccagatagccaaattacagagaagcatatagctactttacttgaatttgggaagactcttgatgaaaaaaaccacaactgccatggcccttactgttggtattccagctgctgttggagctttgcttttattgacaaacaaaattcagacaagaggagtctt

SEQ ID NO: 275810 - DNA, 408 bp, Glycine max
ggtatcacattggtttattttgaaaccctaaagtttgccgccttacacgttttttgtcttcttttttctcccatctttgtttcgagaagcacttgacgaagagaagagacagtgaatcgcggtttcaattcaacccacttcatctcaggtgtttgaagttgagataaaaatgagcggaacagagaaagcaggatcaggaaccaccaaaacccccgccgatttcctcaaatccattcgtgggaggccggttgtcgtcaagctcaattctggtgttgattacagaggtatacttgcttgtctagatggctatatgaatattgcaatggagcagacagaggagtacgtcaatggacaactgaagaacaagtatggtgacgctttcatccgagggaataatgttctatacat

SEQ ID NO: 275811 - DNA, 366 bp, Glycine max
ggagaggagaggagagaagagaggaagttttggggtttgaatctatagaatagaatcaaaccaaattgaaagaagatcgatcgatcgatcgatggctctggtcggagttgaagtgaagcatgcggcggatggcgcaccggaggagaattgctccgccaagcccaccaagcagggcgagggcctccgccactactattctcacaacatccacgagcatcagctccttctccgtcaaaagacgcataacctcaaccgtcttgaggctcagagaaacgagctcaattccagggtgaggatgctgcgcgaagaattacagcttttgcaggaaccaggctcttatgttggtgaagttgtcaaagtcatggg

SEQ ID NO: 275812 - DNA, 399 bp, Glycine max
gacggctaaaagctaaaaatcatcgaagtagggaaatgagcatggctgtcacggttgcattcttgaatttgatcatcatgttttcagtagtctctacaagcaagtcactgagcttaaactactattcaaaaacatgccctgatgtggaatgcattgttgccaaggcagtgaaggatgccactgctagggacaaaactgttccagctgcacttctgcgaatgcacttccatgactgtttcgttcgggggtgtgatgcctctgtgctgctaaattcaaaaggaagcaacaaagcagaaaaagatgggccaccaaatgtttctttgcatgcattctatgtcattgatgcagcgaagaaagcactagaagcttcatgcccaggtgtggtctcttgtgctgaca

SEQ ID NO: 275813 - DNA, 362 bp, Glycine max
cgatggagaaatggtggtttaattctatgttgtttaataggaagttagaatacaggtgtgaattaagtaaatcaatggatagtcttggtcctattgaaaataccagtctaagggaagaccctaaaattttaaccgatatagaaaaaaaaattcacagggatttggattatttagaaatggaaggttttttttctagcgatctgaatactgtttctaagaatgatgatgatcattacatgtatgagactcaatttagttttaacaataatattactagtttcattgatagttgcattgagagtttcaatttaggtgatattgacaaatacaatgatatttatttttatagttacatttttttg

SEQ ID NO: 275814 - DNA, 299 bp, Glycine max
ttcaggcttctgctaaaagctaaaaatcatgcaagtgcgcaaatttgcatggctgccacggtttcattcttgaatttaatcatcatgttttcagtaatctctacaatcaattcactgagctttatctactattcaaaaacatgccctgaccttgaatgcattgctgccaaggcaaagaaagttgccactgctatggacaaaactgttccagctgcactttttcgaatgcacttccatgactgttttattcgggagtatgatgcctctatgctgctaacttcataaagattcaacaatac

SEQ ID NO: 275815 - DNA, 397 bp, Glycine max
gtacggctttctataagactacttaaggtttttgaagaaattcaactccaccgggtatagtgaattgtttaacaagggcaatccaccatctctgtcctatactcttaataattacaacaagctgcagtctcttgtcttcaatattatattcttgtcaataaaaacactgtacaaacattccttaacagaatcaaacttaaataatgctgtcttccacacattggaaaaattaattctcaaagatccacaagatccttccacttcaaatgcaatttcatacaaaacatctcctaaaaataaacttataagtcaattatacaacattgtttagatcattgtaaaccaaattatcaatctcctttttatccacatattctaaatcatgacctttaatctt

SEQ ID NO: 275816 - DNA, 382 bp, Glycine max
gacaacagtaaaatcatattatacacaataaaaaaatgaagtaaatagtagaatattcaagaggccttaaaagatcaagataaagacgaaggagccgacttgatattttagcattataaccaaaaagaatagctttcggatctctattttttattatcgtcaaagaaaattagaatcataggattaaataaagaaatttcaaactttctattacacatatctgttttcgttacaagcagtatttgggtatttttgtttgagccgtacgagatgaaattctcatatacggttctcagggggggtccgttggtttacctatctcaataaagtctatgattggttcgaagaacgtcttgaaattcaagcgattgccgatgatata

SEQ ID NO: 275817 - DNA, 407 bp, Glycine max
  unsure (1)..(407): unsure at all n locations
ttatgagttctaatatatcattcaaaagtttgtgaaatgttggcaccccttcttctatttctatgcctaactcttcctttgtttttgttgtccttcttcaaataccgtaaaaccttcaagaatccaccacttccaccaggtcctagaggccttcccataatagggaatcttcatcaactagatagtccttctcttcatgagcagctatggcatctctcaaagaaatatggtcctttattttcccttcaatttggattaaggccagccatagttgtttcctctccaaaattggccaaagaggtaatgaaagacaatgaccttgagtgctgtggacgacctanattactaggccaacagaaactaacctataatgggttagacatgggatttttctcatacgatagtta

SEQ ID NO: 275818 - DNA, 397 bp, Glycine max
  unsure (1)..(397): unsure at all n locations
gaaagagagtattttatggtggacttgaccacgaattacaaaatgaggtatggggtttgcttttgggatattatccatatgaatcaacatatgctgagagagaattcctgaagtcagttaagaagttagaatacgagaacataaagaaccagtggcagagtatatcctcagcacaggctaaaagattcacaaaattcagggaaaggaaagggcttattgagaaagatgtggtgagaactgatagatcactcgctttctatgaaggcgatgataatccaaatgtaaatgttctgcgagatatcctgttgacatattcattctacaactttgatcttggttattgccagggaatgagtgatcttctatctncaatattgtttgtgatggataatgaatc

SEQ ID NO: 275819 - DNA, 433 bp, Glycine max
  unsure (1)..(433): unsure at all n locations
gtaagaagaataangaataangaagaaggagcgacggaaaaaagacctcggtgagattgtctatccgaggagcgtccagaggaangagagaatgangaataatacnagatnnagcgatggagatatcctcgaagaagaagaagaagaaagaagggtggaagggagaaagntgaagtgaaagagaaaaaagggtgaagaaacaatggtggctttctggaattatgagcanctgagtcatttgnnaatctctcggattggtctgannacctacttataaagccattatggatatngggattccaccacatgaaactcagattcaagcgaagggcaattccaccgcttttgaattggaaaaagatgnttcttggtgctgcaaggactggttctgggaaaactcttgccttcttaattcctgctgtggagctgttgt

SEQ ID NO: 275820 - DNA, 370 bp, Glycine max
gggaccacacagttaaaaaaatgatacactaagcgagaaagttttcttaccgagattgcagggaatttatccttttggattctacccaaagaagataaaattctcatcttctaatataagtggtgaccctgtctcttcacagttcagcgtttcacacctagacaattggctcagaagaaaagaaaagcaaccaaaaatggttctcacatccactgccacacacccagatgaacaagaccagagcctaaactatacttttgcttccagatatgtgcgtgaacctattccaaagttcaagatgctggagaaatccataccaaaagatgctgcttatcagataataaacgatgagttgatgttggatggtgca

SEQ ID NO: 275821 - DNA, 323 bp, Glycine max
gttgaacatggggaaaactttgtggacatgcgggatgggatcttctcatttggtctactgtacacccgtgacaacagttttatagcggctcgggatgctattggggtcacttccttgtacattggatgggggttagatggctctgtttggatttcatcagaaatgaaaggcctgaatgatgattgtgaacactttgagtgtttttcacctggtcacttgtactctagcaaaaaaagagggttcctcaatatggtcaatccttcttggttctctgaggctatttcatctgtcccttattatccttttgttttaatacactcttt

SEQ ID NO: 275822 - DNA, 392 bp, Glycine max
gggaagagttttgctactaggaaagtggatgcaattcaaaagggaaatgtcatattcactttgctggcttcatttcacaaggaagaagtagggtttcaccaccaggaagtgtctatcccatcagtccctgctccagatacgcttttatcgttggaagagcttcgggaacaacgtcttactgaccctcgtctcccaagaacataccggaacaaggttgctacaattgaattcattccctggcccatagagatacggttctgtgaacctaaaatttcaacaaatcagaccaaatctcctcctagtttgagatattggcttagagcaaggggaaaactttcagatgatgaagccttgcataggtgtgtggtagcatatacttcagatctaatctt

SEQ ID NO: 275823 - DNA, 428 bp, Glycine max
tacccaatcgagccacacattctaattctatcgaacgttttattaattttttttctatttctttttttcgacattaatacgggacctttatcatgaatgctactactattacattaagaaataattcttcattctcataaagattaaactttaagtccatattttgccctattatccatccaatttcaacacaaaatgttatcttcttaacgaaaatgtaaacttgaactaaattaaatacttttctttattattaggaacttattaattaaaaaatcatattactttccattaattctttattaatccatcaactactacttaaatgaataaatttcaaaaattctatgatttcattatttaattttaatcctactattatcttatatatcccactaaaatattttttttttcttattttttaccaa

SEQ ID NO: 275824 - DNA, 384 bp, Glycine max
ggcacatgggagttggtacggaaacggtgcattcgagcgcgtgtttatctagtctctctgcgtggatctgcagaagtggaagaagaagaagatgcagtggtactttgtcgctgcgctcctcaccgtcctcaccagttctcagggaatactaaccaccctctcgcaaagtaaaggagagtacaagtatgattacgccacggtcccatttctcgccgagattttcaagcttgtggtgtcaagtttgttactgtggaaggaatgcaaaaagtcacctttgccaaagatgacaacggagtggaaaacggtgtctctgttccccattccctcagttatatatctgatccacaacaatgttcagtttgctacactcacttatgtggacac

SEQ ID NO: 275825 - DNA, 362 bp, Glycine max
gggtggagagaggggcactgactcacacccacaatagtcgggggcagcttcaaagtacctccacattgtctcctactcttactgttctcttctcttctcatcatttttattttttccaatcaaaccaaacaaaacataagcaccgctcttttctctccgaaatccccatctcccttcacttctgagctctggacgagatcccagatctcaccatctttcacgcactcttccatcagattcaccctttcgtttaacgcaaactcataacttgaaggttaatggctgctccaccggcaagggctcgtgccgattacgattatctcataaagcttctcttgatcggtgacagcggtgctgggaaa

SEQ ID NO: 275826 - DNA, 393 bp, Glycine max
gtatcaggcacttctcatgatcatgggttgcgttcaccaagtgctggaatgttttatgcgatgcctgaaaattatgtacaccagccttctaattctaattatgacagacaagcattttctgctgctgatggggtttttaatgatcttacaatgggaaatggacgagggcctcaaaagcgaaagagccctggaattcctcctgtctgtgaatgaggcagtacaagcagatatttcaatgctgcaagtgcatctgatcgtcctacatcttcagaattgtggccagagaagcccaatatggattctctatatatgccttgggatcatgttaatatgacacccacatttagaggtagaagcctttctatacggggcgaagggtcctttaagaatgtt

SEQ ID NO: 275827 - DNA, 212 bp, Glycine max
gggcttcggtgcaagagagagctgtggagggggcagtacgcgctcagccgcatacgcaacaacgcgcggaacctcctcaccctcgacgagaagaacccgcgccggatcttcaaggaaaaggcgctgctccaaaggatgttccgttacggcttcctcaataagccccagaacaggcttaataccgtcctggccttaacggctaaaaccttctt

SEQ ID NO: 275828 - DNA, 285 bp, Glycine max
ttgcttcggtgcaagagagagctgtgtagggggcaatacgcgcgtcattccatccgcaacatcgcgcgtaaccttctcaccctcgacgagaagaacccgcgccggatcttctagggagaggcgctgctccgaaggatgttccgttacggtctcctcgatgagacacagaacaagcttgattacgtactcgtcctcaccgcacaaaactttctcgagcgccgacttcaaacccttgatttcatgttcggcatggccaagttcatccaccatgctaggggacttatt

SEQ ID NO: 275829 - DNA, 374 bp, Glycine max
  unsure (1)..(374): unsure at all n locations
gacagtggatgtggatccaaactctccaacttattccaaagtcatccataggcttcctgttccttatttaggtgacgaattgcatcacacaggctggaattcatgcagctcttgccatggagacccctcagcagaccgacgatttctcatcgtacctgcactcgtatcaggtcgagtatatgtggttgatgtgaaaacaaatccaagggctccatctttgcacaaagttgtcgagcctgccgatatcatacagaagactggattagcttatccacacacatctcactgccttgcttctggtgatataatgatctcgtgtcttggagataaagatggaaatgctgcangaaatggatttcttcttcttgattctg

SEQ ID NO: 275830 - DNA, 238 bp, Glycine max
gtttcaagagtgaagagcgaagagaatggctcgcgaaggtttaatctttttggctgtgttatgcttctcagcactgtcactgagtcgttgtcttgcggaggataatggacttggtatgaacttctacaaggaatcatgcccctaggctgtagacatcatctaagaacaagtcaagcttctctacaagcgccactagaacactggtttcttctggctcagaaacatcttccatgactgt

SEQ ID NO: 275831 - DNA, 157 bp, Glycine max
  unsure (1)..(157): unsure at all n locations
tattggcaaattttttgacagagggcaattttagagcaagtgttgatgtgcagcgcactcatcgtattagaggaatgattaanatggtggccacagttggtattcctgagaatacaggtatatcattggcctgtgctatgaataggtcttttagggg

SEQ ID NO: 275832 - DNA, 331 bp, Glycine max
gtggaaagaggatgagaccagctttggtgttcttggtgtcaagggcgactgcagagttacttggcttgaaggaacttactgcaaagcatcgacgtttagcagagataattgaaatgattcatactgcaagtttgatacatgatgatgtactagatgagagtgaccttcgacgagggaagaaaactgttcatcaaatgtttggaacaagagttgcagtgctggctggagacttcatgtttgcacagtcatcatggtatctagccaaccttgaaaatattcaagtcattaaactcatcagtcaggtgataaaagattttgcaagtggggaaat

SEQ ID NO: 275833 - DNA, 441 bp, Glycine max
agaacacatattgctgcaaaagcagttgagattgctgagaggggcatatcaagagacaggtggccagaatattacgacacgaagagatcccgattcattggaaaacaatctcaactatatcagacttggtcaatcgcaggataccttgttgcaaagctgctgcttgcagacccaagtaaagcaaacatactgatcaccgaagaggattctgagcttgtgaatgccttgattagtgccaaccctagaggaaagcgagggcgcaaaaatttgaggcagacttacattgtatgagtctttaattgcaattcttggttcctttgggtcaaattcatttttcctctgattattagcagcatgttattcttgctagatacggcaagaatatgcaaaaatatattgtagtttgagttggttgtgatgaaacaaaaatactagtatgta

SEQ ID NO: 275834 - DNA, 332 bp, Glycine max
tttcttttctttcaacacccgtaactttacacaccctttcttcttcacacattgagcaaattctcacaaacataacctatctattcacatttcaatctcctaactattctcacccctgactagctgtgctaccacatctataattcattgctcaatccatacctagaacaagaccctgacatcaaggtagcctgtaacacatacacccaaaccaacatgttcaaaatctttagagagatcacaaacaaacccaacctagactattagaaaattgtccctcacacataccgcgaaattttattcatctataataatgtttgtctttatgctca

SEQ ID NO: 275835 - DNA, 279 bp, Glycine max
acagtctacagtttttgatattctcttgggaatctctcaagagtttgaaattgctggtaatactcttatgccagctttttctgttccacaggctactgccagatcttctgaaaatgcggaatcctctgcatgatctggaatttgtgttttctttcgcttgttcgtttgtttaattcaataaaggaaattaggcatgaccctcttgttgagtatgctctgcctatttgaaaatttccacacctcttttaattgtcgtaatgatgtgtgaagtgtgtgtta

SEQ ID NO: 275836 - DNA, 420 bp, Glycine max
cgcgactctcgatactaaccaccaggacaaccaacccgccagaatggtcaacctccgcactcagaagcgcctcgcggcctccgtggtcggttgcggaaagcgcaagatctggctcgaccccaacgagaccagcgaaatcgccaacgccaactcccgtcagaccgtccgcaagctcgtccaggatggcctcatcatccgcaagcccgtcaccatgcactcgcgtgcccgcgcccgggagctgaccgccgctcgacgaattggtcgccaccgtggtttcggtaagaggaagggtaccaaggacgctcgtatgccaagccaaatcgtctggatgcgccgtctccgtgtcctccgccgtctcctcgtcaagtaccgtgccgccggaaagatcgacaagcacctttaccacgagctgtaccacct

SEQ ID NO: 275837 - DNA, 310 bp, Glycine max
gacctattgtgttttaaatccacaaaatccttttgtgttaaataggtggatgggaaaattgactttcccccagggcacttcccgaagtgttaagagaatgcctctttctatagggggaggagctggtgcaaagaatgctattctcatgaatatgccaaatgctgttctttcaatgtggagatattttgttggagatctcgtctttgaagtttctaagatgacttctccctacattaaatgtacagtctctttcttcatagcatttggaaatttggctgatgataccatcaattttgaggcttttccccac

SEQ ID NO: 275838 - DNA, 327 bp, Glycine max
cagcaacagtacagagcattttgatgcatgtaagtggacaaagtcagaaccacattcctgggaattgatcttcccaatagaggtatgtggtcctaataatggttttgaaatgtggagttctgagtgggcaaatcaaacttcatggcatttgagtttccttattgacaatcccaaacagtctacagtttttgatattctcttgggaatctctcaagattttgaaattgctggtaatactcttatgccagctttttcttgttccacaggctactgccagatcttctgaaaatgcggaatcctctgcatgatctggaattgtgttttctt

SEQ ID NO: 275839 - DNA, 322 bp, Glycine max
attcctcagtccatttcacagcaaactgttggaatcaaatggcgacagtgagaacaccattgaattttgattctagcaagcagagcttttgtcagttttctattgaccttctcggtggaggaatcttagtggacaaaactggagattggatcacacttatacaaaattctccaattagtaacttgttgagagttgctgcttggaagaaaggctgtttaatggtcaagattgtgatgtctgggaatgcagcaatcaaaaggagtgattgggcctcattggtacaagtgtttttaacaaacagcaacagtacagagcattttga

SEQ ID NO: 275840 - DNA, 374 bp, Glycine max
ggctcgagcggctcgagccagatgacagaagcagaggaagagagagaaacaccaaagatgggtctttgctttggttgcttcggcgtagacaaacgcatgagcaaggaagaagagagattggcctctgaagaagcgcgtgccaaagctgctgaagccgcacagaaaaggcaagagcaatttgagaattctgcagcaggacgagctgctcgtgcacagcaacaagcaatggcaaagcaatctgcaaataccaacaaaggcgaaccagttctaaagtggcaaatgagttgaggttagacattctgtcagttggagttaactttttattacgtgtaagtatcgatgacaggtccaaccagaattatatgctctgcatg

SEQ ID NO: 275841 - DNA, 418 bp, Glycine max
atcagtagaacccaagccacagccagtctctgctccttcaccaaaggtgagcactaagttttctgatgtgttggcattcagtgggccagcacctgagaggatcaatggaaggttggccatgattgggtttgtggctgcaatggcagtggaagtagccaaagggcaaggtgtgttagaacaaatatccaatggtggcatcccatggttcttggggacaagtgtggtccttacccttgcttccttgattccactcttccaaggtgtcagcgtggagtctaagtccaaagggttcatgtcctcagatgcagaactgtggaatgggagatttgctatgttgggtttgattgctctggcttttactgagtatgttaaggtagtactttggtataattcagtcatgaaggcacaccacaatgga

SEQ ID NO: 275842 - DNA, 390 bp, Glycine max
tgatagttcagtgtctacaataccaggtgattttgtcattggggtcaagttgacaaccataaacaatatgtgtgcatatgggctcaatcctggtatttcaggttctcgtcttttgggcaccattcctcagtccatttcacagcaaactgtttggaatcaaatggcaacagtgagaacaccattgaattttgattctagcaagcagagcttttgtcagttttctattgaccttctcggtggaggaatcttagtggacaaaactggagattggatcacacttatacaaaattctccaattagtaacttattgagagttgctgcttggaagaaaagcttgttaatggtcaagattgtgatgtctgggaatgcagcagtcaaaaggagtgattg

SEQ ID NO: 275843 - DNA, 347 bp, Glycine max
ggtattgcaagttctcgtatcttgggcaccattcctcattggggttgacatcaaactgtctggaatcaaatggcaacagagagaacaccattgaattgagattctagcaagcaaagctttggtcaggtttatattgaccttctcggcggatgaatactaggggacaaaactggagatcgtatcacacttatacaaaattcttcaattagtaacttattgagagttgctgcttgtaagaaaggctgtacaatggtcaagattgcgatgtctagaaatgcatcacccaaaaagagtgattgctcctcattggtacaaagtgctgtaacaaacagcagcagctcacatca

SEQ ID NO: 275844 - DNA, 425 bp, Glycine max
cacttatacaaaattctccaattagtaacttgttgagagttgctgcttggaagaaaggctgtttaatggtcaagattgtgatgtctgggaatgcagcagtcaaaaggagtgattgggcctcattggtacaagtgtttttaacaaacagcaacagtacagagcattttgatgcatgtaagtggacaaaatcagaaccacattcctgggaattgatcttcccaatagaggtatgtggtcctaataatggttttgaaatgtggagttctgagtgggcaaatcaaacttcatggcatttgagtttccttattgacaatcccaaacagtctacagtttttgatattctcttgggaatctctcaagattttgaaattgctggtaatactcttatgccagctttttctgttccacaggctactgccagatct

SEQ ID NO: 275845 - DNA, 416 bp, Glycine max
atttcatttcgttaatcactcctaacttctgcattccaaaggggaactcggacacgacgtcgtattggtgctacagttgcacgcgcttcgttcacatccacgagcagaacgacgtcgtgtgcccccgctgccatggcggcttcgtcgaaaaggtcaccgccgggcaatcggcaaggcaggggttccgccgccgccgccgcaacgccgggagccactcgccgttcaacccggtgatcgtgctccgtggaccgggggaggacgaggagagcagctttgagttatactacgacggattcgacggcgaggggctccgcccgctgccgtccaccatgtcggagtttctgctcggatcgggattcgaccggttgctggagcaggtttcgcagatcgagataaacggcttgggaaggccggag

SEQ ID NO: 275846 - DNA, 261 bp, Glycine max
gagatattttgttggagatctcgtctttgaagtttctaagatgacttgtccctacattaaatgtacagtctctttcttcatagcatttggaaatttggctgatgataccatcaattttgaggcttttccccacaagctggtgcagtttggagagattcaagaaaaagttgtattgaaattttcacaagaggaatttcttacagcttggtcaactcaagtgcgttctgcaacaactctggtggctgatgggtgtccatattt

SEQ ID NO: 275847 - DNA, 406 bp, Glycine max
gtgatgataacttaattagtgttcatgaatatgtcaagcctgacttgagtggttctaaattgaaaagctttctagctagtcataacatcaccattactgatggtattgacaaaactagtgcaactttgcaatttagaaagttagcagattgtgattttctcaagagaaactttaagcagatgtctaatgttttgtgggtggctcctgaggacaaggcgagtttatggtcacaacttcattatgtttcgtgtaataatctggaaatgcaagaagcttatcttgtcaatctcgtaaatgtgttacgagaattgtatttgcacagtccagaggaagctcgccaattgagaaggaaagctctctctcgtattgaatggctgcaaaaaagctgatgtgcctaccatagcac

SEQ ID NO: 275848 - DNA, 280 bp, Glycine max
tgggaatgcagcagtcaaaaggagtgattgggcctcattggtgcaagtgtttttaacaaacagcaacagtacagagcattttgatgcatgtaagtggacaaaatcagaaccacattcctgggaattgatcttcccaatagaggtatgtggtcctaataatggttttgaaatgtggagttctgagtgggcaaatcaaacttcatggcatttgagtttccttattgacaatcccaaacagtctacagtttttgatattctcttgggaatctctcaagatttt

SEQ ID NO: 275849 - DNA, 429 bp, Glycine max
  unsure (1)..(429): unsure at all n locations
gcttggaagaaaggctgtttaatggtcaagattgtgatgtctgggaatgcagcagtcaaaaggagtgattgggcctcattggtacaagtgtttttaacaaacagcaacagtacagagcattttgatgcatgtaagtggacaaaatcagaaccacattcctgggaattgatcttcccaatagaggtatgtggtcctaataatggttttgaaatgtggagttctgagtgggcaaatcaaacttcatggcatttgagtttccttattgacaatcccaaacagtctacagtttttgatattctcttgggaatctctcaagattttgaaattgctggtaatactcttatgccagctttttctgttccacaggctactgccagatcttctaaaatgcggaatcctctgcatgatctggaaattgnngtttctttc

SEQ ID NO: 275850 - DNA, 369 bp, Glycine max
cgacaatgaagaaagtagtcttacagttggacttacatggtggtagaatcaagcaaaaagctatgaaaacagcatctggcctttcaggggttgaatcagtttctgttgatatgaaagacatgaaaatgatcgtgttgggggacattgatccagtgagtgcagtgtcgaagctacgaaagtgttgtcacactgaaatagtttcagttggaccagcaaaagaggagaagaaggagaatgtggagccagcaaaagtaccagttcctctaaagctccatgaagcctatcccctttattatcagatgacaccacattatggtcaaagtcactatgtcacaagttacgaagaggatcctagtggctgtgtcatct

SEQ ID NO: 275851 - DNA, 325 bp, Glycine max
ccgagaagaaccgtaaagagatctgcaaatacctcttccaagagggagtttgctttgcgaagaaggacttcaatctggcgaagcacccggagattgatgtgccgaatctgcaggtgataaagctgatgcagagcttcaaatccagagagtacgtgagggaaacatttgcgtggatgcactattactggttcctcaccaacgatggaattgagttccttaggacttacctcaaccttccatccgaaattgtccctgccactctcaagaagcaggccaagcccgccggaagaccattcggtggcccacccggtgatcgccccaaggg

SEQ ID NO: 275852 - DNA, 371 bp, Glycine max
  unsure (1)..(371): unsure at all n locations
ctccactggttttttatctgcatgcacacagttgcatagctgtggaaaccaaaaattcctgaagaagggtagcatcaacaagcagttctgaaaatggagatcaccaacgtcagtgagtatgaggctattgcaaagcagaagttgccaaagatggcgtttgactactacgcatctggtgcagaggaccagtggactctgcaagagaacagaaatgccttttccagaattttgtttcggccacgtattcttattgatgtgagcaagatagacttgacaactactgtcctangcttcaaaatatccatgccaatcatgattgccccaacagccttttagaaaatggctcatcctgagggagaatatgcaacatc

SEQ ID NO: 275853 - DNA, 421 bp, Glycine max
gaacacactaccctcaacatagtaaagcagctggtgcaagtgaagcaatggctcaaaccatgttgctcatgtctagtgtctctagcagttattccgtggatttgaagaaagaccttttcctccaattgcagagtcaaagtttaaggcctaagttctctcaactctcattcaacccacttccaccatcaacttcttccttttcttcaccccgtacattcacaaccctggctctcttcaaatctaagacaaaagccgctcctgctaagactaaggttacaaagccaaagcaaaaggttgaagatggtatctttggcacttctggaggatttggttttactaagcagaacgagctctttgtgggtcgtgttgctatgcttggttttgcagcatcattgttgggtgaaggaataactgggaaagg

SEQ ID NO: 275854 - DNA, 426 bp, Glycine max
ctagttttgatggtttgattaccaagcaagttatgagcaagagggcagaaatgataaacagtctttgtggtggtgatgaaaaattgatgcgtgaaaggacgcacctgctgttggcttgttgttcaaggatggcaatttgtaagaaagatgtttggagagttgaatgtggaatcccttctggatttccgctcacagttatttgcaatagcatttttaatgagatgctcattagatatagctatgaaaaattactgcgccaggctaaagctccaagtatgtttttacaatccttcaaaaattttgtttctttgtgtgtgtatggtgatgataacttaattagtgttcatgaatatgtcaagccttactttagtggttctaaattgaaaagctttctagctagtcataacatcaccattactgatggta

SEQ ID NO: 275855 - DNA, 264 bp, Glycine max
  unsure (1)..(264): unsure at all n locations
ctaatagctgaacgggagaaaactattcctacattggttggcattgaatgtcccacggatgataaacttactcatccacaactattgacaaacctaagactcgctccttcactattctccctatggattataatcttgaggaccgncaaaagcttcataaaaatgagaggttcattatgattaacacggacaaacttagtcgccaagattgaatcatcccatactccatgtaatgcactgctatgatcaaaaaattactgagaa

SEQ ID NO: 275856 - DNA, 349 bp, Glycine max
gtatgctggtgaggtgggctatctatctgcatcaataagaacagtagctgatgctagagtgggtgacactattactcactatggcagaaaggctgacaattctctccctggatatgaggaagccactcctatggtgttctgtgggttgtttcctgttgatgctgaccaattccctgatctgcgtgatgcacttgaaaagctacaactcaatgatgctgcacttaagtttgaacctgagacatcaagtgccatgggatttggctttagatgtgggtttctgggccttcttcatatggaaattgttcaggagaggcttgagagagaatacaatttgagcctaataacaact

SEQ ID NO: 275857 - DNA, 386 bp, Glycine max
  unsure (1)..(386): unsure at all n locations
ctcnagccgctcgagccgatcacacttatacaaaattctccaggtagtgacttgttgagagttgctgcttggaagaaaggctgtttaatggtcaagattgtgatgtctgggaatgcagcagtcaaaaggagtgattgggcctcattggtacaagtgtttttaacaaacagcaacagtacagagcattttgatgcatgtaagtggacaaaatcagaaccacattcctgggaattgatcttcccaatagaggtatgtggtcctaataatggttttgaaatgtggagttctgagtgggcaaatcaaacttcatggcatttgagtttccttattgacaatcccaaacagtctacagtttttgatattctcttgggaatctctcaagattt

SEQ ID NO: 275858 - DNA, 439 bp, Glycine max
cgctagtgcaaagggtttctttgaggtcacccatgacatttgtgacctgacatgtgcagatttccttcgagcccctggagttcagacgcctgtaattgttcgtttctcaactgtcattcatgagcgtggtagccctgaaaccttgagggaccctcgaggttttgccgtgaagttttacaccagagagggtaactttgaccttgttggaaacaaccttcccgtcttctttgtacgtgatggcatgaagtttccagatatggttcatgctcttaaacccaatcccaagaaccacatccaggagaattggaggatccttgacttcttctctcactttccagaaagccttcacatgttcacctttttatttgatgatttgggtgttccacaagattacaagcatatggatggttttggagttaacacatacacactgatcaac

SEQ ID NO: 275859 - DNA, 298 bp, Glycine max
taacaatcgctcctcagatatcaacaaaaggattcgcacagcgcttgggaaaggtaagaaaattgtttttcttactagagttgatccttttccagtagctttactggctgttctttttggcgttaagaatgaaattctgagttctaacgccactaatcctatgctgacgcgacttcttgagaactgtaagagtctcaaatatctggttgatgagtgtccttttgcatttgtgaactagtatgtagtattttattcacttaaataaagcgcattactatgtgcaatgagtgtgtttaaa

SEQ ID NO: 275860 - DNA, 304 bp, Glycine max
  unsure (1)..(304): unsure at all n locations
aagaagaagcttcttcagtgccacctgcaccgcccatagtggccatgctgccataccctggcatgggccacctaatcccaatgatcgaagttcgcaagcgagcggtgcgctaccataacctggccgtcaccttcgtcattcccactgacggcccaccttctaaagcccaaaaggccgtctttcaggcccttccggacttcattttccacacctttctcccttcggtcaatctcttcgacttttcaccgggcaccaaaattgaaaccctgatcttccacaccgnnctccttttcctccctttcct

SEQ ID NO: 275861 - DNA, 427 bp, Glycine max
tggacagtggacctgatgatcatatatttgtatactatactgaccatggaggtccaggggtgctcgggatgcctgctggtccttacttatatgcggatgatctgattgaagtcttgaagaaaaaacatgcttctggaacgtataaaaacctagtattttatctggaggcatgtgaatctgggagtatctttgaaggtcttcttcccgaagatatcaatatttatgcaaccacagcttccaatgcagaagaaagtagttggggaacatattgccctggggagtatcctagtcctcccccagaatattcaacctgcttgggtgatctgtacagtgttgcttggatggaagacagtgacagacacaatttacgaacagaaactctgcatcaacaatataaattggttaaagagaggactatatctggaga

SEQ ID NO: 275862 - DNA, 415 bp, Glycine max
gcctaccatagcacagattgaagagttccattcgatgcagaggatgatgaatgctcctgattcaaatgataatattgatttactgttgagcattgatttgttgggtttacaaggagcaggtaaagcttttccaaacaaaattgtttttgatgataagcttgtgttggctaacacacaagaattctttgatggaaattttccagtggattcttggttaccaatttttgtgaattgtctttatcctgtaagtcaattaccttcagaagctgtcgttgtaaatgttacatgtggtagtggacgtggtggtttacccaccactgcttggattagttctgcagttaacaatcgctcctcagatatcaacaaaaggattcgcacagcacttgggaaaggtaagaaaaatgtttttcttact

SEQ ID NO: 275863 - DNA, 426 bp, Glycine max
ggttacaattgattggtttatttcctctcaggaatgtgttcgcaggacctattgtgttttaaatccacaaaatccttttgtgttaaataggtggatgggaaaattgactttcccccagggcacttcccgaagtgttaagagaatgcctctttctatagggggaggagctggtgcaaagaatgctattctcatgaatatgccaaatgctgttctttcaatgtggagatattttgttggagatctcgtctttgaagtttctaagatgacttctccctacattaaatgtacagtctctttcttcatagcatttggaaatttggctgatgataccatcaattttgaggcttttccccacaagctggtgcagtttggagagattcaggaaaaagttgtattgaaattttcacaagaggaatttcttacagc

SEQ ID NO: 275864 - DNA, 168 bp, Glycine max
gcggaatcctctgcatgatctggaatttgtgttttctttcgcttgtgcgtttgtttaattcaataaaggaaattaggcatgaccctcttgttgagtatgctctgcctatttgaaaatttccacacctcttttaattgtcgtaatgatgtgtgaagtgtgtgttatttt

SEQ ID NO: 275865 - DNA, 309 bp, Glycine max
tattaataaaacctagagttatggcaacacgaacccccatcaattttgagggcactatgaacggctcgagaaaagattctaaagaaatataactaatattctttagaataatcaaaaagaatattaaattcaaataaattttagatagaaaaaagacttaaaaaggaggatttgaaatgcgagatctaaaaacatatctttccgtggcaccagtagtaagtactctatggttcggggctttggcgggtctcttgatagagatcaatcgtttttttccagatgcattgatattcccttttttttcattct

SEQ ID NO: 275866 - DNA, 379 bp, Glycine max
gttgaatgtggaatcccttctggatttccgctcacagttatttgcaatagcatttttaatgagatgctcattagatatagctatgaaaaattactgcgccaggctaaagctccaagtatgtttttacaatccttcaaaaattttgtttctttgtgtgtgtatggtgatgataacttaattagtgttcatgaatatgtcaagccttactttagtggttctaaattgaaaagctttctagctagtcataacatcaccattactgatggtattgacaaaactagtgcaactttgcaatttagaaagttagcagattgtgattttctcaagagaaactttaagcagatgtctaatgttttggtgggtggctcctgaggacaag

SEQ ID NO: 275867 - DNA, 277 bp, Glycine max
ggacatttactacatcacaggagagagcaagaaggcagtggagaactgtcccttcttggagagactcaagaagaagggctatgaagttcttttcatggtggatgcaattgatgagtatgctgttggacaactcaaggagtacgatggcaagaaattggtttcagctacaaaggaagggttgaagctagatgatgagacttggggaagagaaaaagaagaaagaggagaagaagaagtcatttgatgaactctgcaaggtcatcaaggacattctggg

SEQ ID NO: 275868 - DNA, 436 bp, Glycine max
  unsure (1)..(436): unsure at all n locations
ctcaagttttttctcttctctcggtttcatcgccatggatgaggaagtgcgcaagatcttcagcaagttcgacaagaacggcgacggcaagatctcgtgcgccgagctgaaggagatgatggtggcgctgggatccaaaacgacgtcggaggaggtgaagcgcatgatggcggagcttgatcggaacggcgacggctacattgacctgaaggagttcggcgagttccattgcggcggcggcgacgggagggagctccgggaggcgttcgagctgtacgatctggacaagaacgggctgatctcggcgaaggagctgcactccgtgatgcggaggttgggggagaagtgctccctcagcgactgccggaggatgatcgngaacgtggatgccgacggtgacgggcacgtcaattttgaagagtttaagaagatgatg

SEQ ID NO: 275869 - DNA, 384 bp, Glycine max
  unsure (1)..(384): unsure at all n locations
attttagaagaataccccctcttttgctgcatcagaggagtggtaaattaagagcatggctgcacaagctcttgtatcatcatcttctcttaccttctcagcggaggctgcaagacaaagtcttggaccaagatcactccaatctccatttggcttctccagaaaagcctcctttcttgttaaggcagctgctaccccccctgtcaagcaaggatcagacagacctttgtggtttgcatcaaagcaaagtctttcttacttggatggcagccttccgggtgactatggatttgaccctctgggactntcagaccctgaaggaacaggagggttcattgagccgaaatggctagcatatggtgagataatcaatggtcgttatgc

SEQ ID NO: 275870 - DNA, 421 bp, Glycine max
caaaattgtttttgatgataagcttgtgttggctaacacacgggaattctttgatggaaattttccagtggactcttggttaccaatttttgtgaattgtctttatcctgtaagtcaattaccttcagaagctgtcgttgtaaatgttacatgtggtagtggacgtggtggtttacccaccactgcttggattagttctgcagttaacaatcgctcctcagatatcaacaaaaggattcgcacagcacttgggaaaggtaagaaaattgtttttcttactagagttgatccttttccagtagctttactggctgttctttttggcgttaagaatgaaattctgagttctaacgccactaatcctatgctgacgcgacttcttgagaactgtaagagtctcaaatatctggttgatgagtgt

SEQ ID NO: 275871 - DNA, 332 bp, Glycine max
cccgccttgcgattcgcgcgttcgtcgtctcttccctggcgaggaggtgcctgagctcctacgtggtcaactgccacacgcctacgcacgacgccacgtcgattcggccgcttacgctgcgtgaagattcgagcaagcggagcgtgcattgggtgttcctcggctgacccggcgtcagaaaaggaacgtacgctaggcgcctctcgaacctgctgggcgttcctgacatcgccaccggcgatctcgttcgcgacgaactcaccttctttgggcccctttcttcccagctatcagaaattgtaaaacaagggcaattggcgttagaagaaatt

SEQ ID NO: 275872 - DNA, 370 bp, Glycine max
ctccagctgttaccactgtcaaccgtgccggtgccggcatgggggctgcattcactggcctcaagtccatggctggcttccccaccaggaagaccaacaatgacattacctccattgctagcaacggtggaagagtgcaatgcatgcaggtgtggccaccagttggcaagaagaagtttgagactctttcctacctgccagaccttgatgatgcacaattggcaaaggaagtagaataccttcttaggaagggatggattccttgcttggaattcgagttggagcacggtttcgtgtaccgtgagcacaacaggtcaccaggatactacgatggacgctactggaccatgtggaagctgcctatgtttgg

SEQ ID NO: 275873 - DNA, 421 bp, Glycine max
  unsure (1)..(421): unsure at all n locations
caactacaaaggttgctgtaggagataagatattgaagtagtgctaagtgcctaacacctgcagtgaacaatggcctctgcatcagcatctcttctcaagtcttcacttgttcttgacaagtctgagtgggtgaagggacaaacacttcgccaaccttctgctgcatcagttgtgagatgcaaccccaccaccccatcaggcctcaccatcagagctggttcctatgctgatgagctcgttaagaccgcgaaaacagtggcttcaccagggaggggtattttggccatggatgagtccaatgctacctgtgggaagcgtttggcttcaattgngctagagaacactgaagctaaccgccaggcataccgtaccctncttgtgacagntccaggacttggtcagtacatctcttgtgccatt

SEQ ID NO: 275874 - DNA, 304 bp, Glycine max
aatccttcaaaaattttgtttctttgtgtgtgtatggtgatgataacttaattagtgttcatgaatatgtcaagccttactttagtggttctaaattgaaaagctttctagctagtcataacatcaccattactgatggtattgacaaaactagtgcaactttgcaatttagaaagttagcagattgtgattttctcaagagaaactttaagcagatgtctaatgttttgtgggtggctcctgaggacaaggcgagttaatggtcacaacttcattatgttttcgtgtaataatctggaaatgc

SEQ ID NO: 275875 - DNA, 369 bp, Glycine max
  unsure (1)..(369): unsure at all n locations
ttttatttacncaacagtgaatttggcgtctcagatggggcgtagaaagagagtattcattcatttcgtgattggaggataataccaatttgcactttctttcaggatgccagactagtttttaaagcagacagtcttggtcgggaaattttgtcaattgcattgcctgcagcaatggctttgacagctgatcctattgcttcactagttgacacagcatttattggccaaataggtccagttgagcttgctgctgtaggagttaccatagctctcttcaatcaagtatcaaggatcgcaatattcccacttgtcagtgtcacaacttctttngnngctgatgaagatacccttagtggagcaaaccct

SEQ ID NO: 275876 - DNA, 426 bp, Glycine max
ggaagaaaggctgtttaatggtcaagattgtgatgtctgggagatgcagcagtcaaaaggagtgattgggcctcattggtacaagtgtttttaacaaacagcaacagtacagagcattttgatgcatgtaagtggacaaaatcagaaccacattcctgggaattgatcttcccaatagaggtatgtggtcctaataatggttttgaaatgtggagttctgagtgggcaaatcaaacttcatggcatttgagtttccttattgacaatcccaaacagtctacagtttttgatattctcttgggaatctctcaagattttgaaattgctggtaatactcttatgccagctttttctgttccacaggctactgccagatcttctgaaaatgcggaatcctctgcatgatctggaatttgtgttttcttt

SEQ ID NO: 275877 - DNA, 427 bp, Glycine max
cgcattgcctcttacgtttccgcttcgcatgttttgttctcggcgcttccgtcgcatgttgcttttcacacccttctctcctcggtatacaccctctagatgagaaatattacaactctgaggtgatcaagtgcagggatggatcaaaatccttctccagagaccgtctcaatgacaatttctgtgattgtcctgatggcactgatgagcctggaacttcagcttgccccaacggaaaattttattgcagaaacctaggtagcaagccgcagtttatagtttcttctcatgttaatgatcatttttgtgattgttgtgatgggagtgatgaatatgatggaatcatttgttgcccaaacacatgtgtcatgggtgggaatgctgagtccacgtttagcaattgcaagtcagaagcaagtcaaaatgg

SEQ ID NO: 275878 - DNA, 389 bp, Glycine max
ggaggaatgtattagctgcggatgtttaatgtactttgtgatgtaactatattagcttcattagacgttgggatgaagaatttgagagattagcccctgaatcttcagaataggtcacaatgcattggaaaactcttgactttgtgcactcaaattgcgtggttttatgattttatcggtttgtttcaaaaaaaaaaaaaaaaaaaaaaaaaaaaaaaaaaaaaaaaaaaaaaaaaaaaaaaaaaaataaaaaaccacaaaaaaaaaactaaaataaccaaacacaaaaaacataaaccacacctaaaaaaagaacaaattcacattaaagaaaatcctattataacaaaagggggggccccccctttattgaatttgttccccccttt

SEQ ID NO: 275879 - DNA, 389 bp, Glycine max
ctcgagccgcatgaactgaataaaaggatgcctcatgcttgggctaaaaaaaaaaaaaaaaaaaaaaaaaaaaaaaaaaaaaaaaaaaaaaaaaaaaaaaaaaaaaaaaaaaaaaaaaaaaaaaaaaaaaaaaaaaaaaggaagtaggaaaaaaaaaaaaaaaagaaaaaaattaaaaaaaaaaaaaatgaaggaaaaaaaaattaaaaaaaaaaagggggtggttagaagcttggagaaatcatggcaataaaaataataatgggtgaaatgtgtaaaagggtcacaattttacaaaatatacgagcataaaacatagggggcataaacttggaaagcctaaggggtgaataaattaaaataaattgcattatttctaaatgcctgat

SEQ ID NO: 275880 - DNA, 408 bp, Glycine max
  unsure (1)..(408): unsure at all n locations
cctcatcatgggaaccatttttcctcctcactctctctctccgctccgcaacatcaaaccttcaccctcaagaattctcttggctccctctccccaacccaagtcaaattctctcttttgctccaaacccattgtttcaagtctcagaaagaaccaaacttcatctcccaaaccttcatcgggcacaagctggttggctcatgctcaacagggcctagcagctttggctatctccttggcactcaactttagcccagttttgtttaatggcaatgcattggcatctgagtttgatgtgcttaatgagggtccacccaaagattcttatgtgtttgatgatgcangagttgctagtaaggtgaccagntctggatttaaagcagttgttgtctgatttggaatcaagga

SEQ ID NO: 275881 - DNA, 384 bp, Glycine max
cggctcgagcggctcgagcggctcgagaccaaagccttcctagaacgaaaaaaaaaagaagagcaattttccctcaccaaagaagaagaagcaaacaatggccgatcaacttaccgatgaacagatctccgagttcaaggaagccttcagcttgttcgacaaggacggcgatggttgcatcacaaccaaggagcttggaactgttatgcgttcattggggcaaaacccaactgaggcagagctccaggacatgatcaatgaagtggatgctgatgggaatggtaccattgacttccctgagttcctaaatctcatggccaggaagatgaaggacactgattctgaggaggagctgaaagaggcatttccgggttttcgacaagg

SEQ ID NO: 275882 - DNA, 377 bp, Glycine max
  unsure (1)..(377): unsure at all n locations
cttctccaaaaccatccaactctcatgttcgaagaaaacatacacaggctcttcaaactctaattttcttttcctttcatttaatttcctcaatggcggcttccgtcgaccagcgtccgtaccccggcctccacaatggcgtcgttcggcccctcaaaccaggcccggatatcccgcgtcccaagaagctaccccagccgccgccgccactctcggattcctcaagcgacgaagaagaagacaccaccttgaacttgaaggacctgattcgcaagggaacaacggaagttgaatcctccattttcgacccgcgcgacgatggaacctctgaccactggatccaacgaactcttnccttgtnccgttaacgggaaagc

SEQ ID NO: 275883 - DNA, 364 bp, Glycine max
cctgtttgggtgacttgtacagtgttgcttggatggaagacagtgacagacacaatttgcgaacagaaactctgcaccaacaatataaattggttaaagagaggactatatctggagattcatactatggctctcacgtgatgcagtatggtgatgtagggctaaccaaagatgttctcttccattatttgggtacagatcctgctaatgataatttcacttttgtggatgaaaactccttatggtcaccttcaaaaccagtcaaccaacgtgatgctgatctcatccatttttggaatagttccgcaaagctcctgaaggttctctcaagaaaaataccgcttaaaaaccagttttgaagcaa

SEQ ID NO: 275884 - DNA, 420 bp, Glycine max
  unsure (1)..(420): unsure at all n locations
ctctatctgnnnccgctcgagcagttatttgcaatagcgttggtaatgagatgctcattagatatagctatgaaaaattactgcgccaggctaaagctccaagtatgtttttacaatccttcaaaaattttgtttctttgtgtgtgtatggtgatgataacttaattagtgttcatgaatatgtcaagccttactttagtggttctaaattgaaaagctttctagctagtcataacatcaccattactgatggtattgacaaaactagtgcaactttgcaatttagaaagttagcagattgtgattttctcaagagaaactttaagcagatgtctaatgtatcgtggttggctcctgaggacaaggcgagtttatggtcacaacttcattatgtttcgtgtaataatctggaaatgcaag

SEQ ID NO: 275885 - DNA, 391 bp, Glycine max
  unsure (1)..(391): unsure at all n locations
gaaacattcaaaagagtttcttctcctttcttccatcgtgccgcggcgaagatgaagatagcgtggcttctgctgctcctcctggtatcagtgtccgttcaagtttgggccctgaaatcgccgtttcacccgcgagacgtacttcctctgcttcccaaacagttgtcgtggcccatcctcaatcgcctccacagcgcggtggatctcctccccgtcttcgtcggcgccgcctcttctccggacgacaatctcaagtggaaaggtgcatgcttctacgagaacaaagcctggatggtgtttcacaacaagagcggcactcaatttggcggtggaacccttcacctaaaggttagcaatgctcacagttggacatgcatggatncttatattt

SEQ ID NO: 275886 - DNA, 390 bp, Glycine max
agtgcttctgctgcaagacctcgctgaaaattagggtttcgagtcggaggtagacgaagatgttcggaagggctccgaagaaaagcgacagcaccaggtactacgaaatcctcggcgtttccaagaacgcttcgccggatgacttaaagaaggcttacaagaaagccgccattaagaaccatcctgacaaaggcggggatcccgagaagtttaaagagcttgctcaagcctatgaggttctgagtgaccctgagaagcgcgagatttatgatacatatggagaagatgctcttaaggaaggaatgggtggtggtggcggtggccatgatccatttgatatcttcagttcattcttggtggaagtccgtttgggtcaggtggtagcagtag

SEQ ID NO: 275887 - DNA, 413 bp, Glycine max
ctttgaagttttttagatgacttctccctacattaaatgtagggtctctttcttcatagcatggggaaatttggctgatgacaccatcaattttgaggcttttccccacaagctggtgcagtttggagagattcaggaaaaagttgtattgaaattttcacaagaggaatttcttacagcttggtcaactcaggtgcgtcctgcaacaactctgttggctgatgggtgtccatatttgtatgctatggtgcatgatagttcagtgtctacaataccaggtgattttgtcattggtgttaagttgacaaccataaacaatatgtgtgcatatgggcttaatcctggtatttcaggttctcgtcttttgggcaccattccttaatccattttacagcaaactgtttggaataaat

SEQ ID NO: 275888 - DNA, 296 bp, Glycine max
ccacagcaacaataacaatggcagcctcactacaagctgcagctaccgtcatgcaacccaccaaggtgggcatggccactcgcaacctcaaatctacacaatgcatttctaaggcttttggcttggaacccgctgcagctaaactcatttgctcccttaagcccgatctcaaagattttgctcaaaaatgtgtcgacgccaccaaaattgcaggattcgcccttgccacctcagctctcgttggttctggagcgagtgcagaaggtgttccaaagaggctaacctttcgacgaaat

SEQ ID NO: 275889 - DNA, 393 bp, Glycine max
gtaaagcttttccaaacaaaattgtttttgatgataagcttgtgttggctaacacacaagaattctttgatggaaattttccagtggattcttggttaccaatttttgtgaattgtctttatcctgtaagtcaattaccttcagaagctgtcgttgtaaatgttacatgtggtagtggacgtggtggtttacccaccactgcttggattagttctgcagttaacaatcgctcctcagatatcaacaaaaggattcgcacagcacttgggaaaggtaagaaaattgtttttcttactagagttgatccttttccagtagctttactggctgttctttttggcgttaagaatgaaattctgagttctaacgccactaatcctatgctgacgcgac

SEQ ID NO: 275890 - DNA, 365 bp, Glycine max
caagccttactttagtggttctaaattgaaaagctttctagctagtcgtaacatcaccattactgatggtattgacaaaactagtgcaactttgcaatttagaaagttagcagattgtgattttctcaagagaaactttaagcagatgtctaatgttttgtgggtggctcctgaggacaaggcgagtttatggtcacaacttcattatgtttcgtgtaataatctggaaatgcaagaagcttatcttgtcaatctcgtaaatgtgttacgagaattgtatttgcacagtccagaaggaggctcgccaattgagaaggaaagctctctctcgtattgaatggctgcaaaaagctgatgtgcctacc

SEQ ID NO: 275891 - DNA, 403 bp, Glycine max
gcagaatatggatgatagcaatgaagttgccagtggatcacctgtgccaggtgtgaagcctcagaaactggatgaagcaataaaaattcccaaggaaacaattgaaattcttaagaaccaagtttttgggtttgacacttttttcgtaactagccaagatccttacgagggtggagtgctgttcaaaggaaacttgcgagggcaagctgctaaaagttatgataaaatatcgaagagattgaaagataaatttggagatgaatacaagcttttccttttagtaaatccagaggataatatgccagtggctgttgtggttccaagaacaaccttacaaccagagacaactgctgtacctgagtggtttgctgctggatcttttggactggttacaggttttacc

SEQ ID NO: 275892 - DNA, 376 bp, Glycine max
gtttttcattgtgcattattcaatggccaccacagcagctcgatccggaaccatggtgagcacctccttcatgaggaagcaacctatgacgaccaagagcctaaagacattccccaacgctctttttggtctgaaaggtggacgaggtggtcgtgtaacttgcatggcctcgtacaaggtgaagctcataaccccagaaggagaagtggagtttgaatgcccagatgatgttttcattgttgacaaggctgaggaagaaggcattgaacttccctactcgtgcagggctggttcttgcgtttcatgtgttgggaaaattgtgaaaggtgacgtggaccagtcagatggtagcttccttgatgatgaacaaatagaa

SEQ ID NO: 275893 - DNA, 427 bp, Glycine max
caatggtgcatgatagttcagtgtctacaataccaggtgattgtgtcattggtgtcaagttgacaaccataaacaatatgtgtgcatatgggctcaatcctggtatttcaggttctcgtcttttgggcaccattcctcagtccatttcacagcaaactgtttggaatcaaatggcaacagtgagaacaccattgaattttgattctagcaagcagagcttttgtcagttttctattgaccttctcggtggaggaatcttagtggacaaaactggagattggatcacacttatacaaaattctccaattagtaacttattgagagttgctgcttggaagaaaggctgtttaatggtcaagattgtgatgtctgggaatgcagcagtcaaaaggagtgattgggcctcattggtacaagtgtttttaac

SEQ ID NO: 275894 - DNA, 316 bp, Glycine max
tccatccagattgatagttcattgcatgcaaccatagttttagtaggttttttcttctttgttttcaattaggtttttgctgctctccttcaaactccgtctttccgaatcctctctttgtgattgtgttctgttctgcttcctaccgcgatagtttctcttctgaagcatggccatggcggtttctgcaattggttttgaaggtttcgagaagaggctggaaatatcctttttccagccgggactttttgctgaccctgagggaatgggtttaagagctctttgcaaagtccagttggatgagatactttacacc

SEQ ID NO: 275895 - DNA, 404 bp, Glycine max
cggctcgagcccagctgttgctagagcagaagatgatgacagttttgtaggtgaaggggttcactatgatgtacctggtaaagacttgagccaaagtccggtctctgaggacatggaagagtctcctaagaacaaagaaaaaccttcatatgtcacagaacctacttatggtcctgtcccaccttcaatggttcctcaagggtggcaagaaacaaatggatatgatgtaatgcaaacacaagcctttgatgctggctaccaaggagagtggcaggaataccagtatgctgaacaactggcttacccagatcagtatcttcagcaaaatatgcagccttatgatgtgcaagcaggtttaaatcttccacaagatccacgctttatgtctcaagaagaaaaggatc

SEQ ID NO: 275896 - DNA, 429 bp, Glycine max
  unsure (1)..(429): unsure at all n locations
ctcgagccgattcggctcgagccccaatgcaggatgttcaggttacaattgattggtttatttcctctcaggaatgtgttcccaggacctattgtgttttaaatccacaaaatccttttgtgttaaataggtggatgggaaaattgactttcccccagggcacttcccgaagtgttaagagaatgcctctttctatagggggaggagctggtgcaaagaatgctattctcatgaatatgccaaatgctgttctttcaatgtggagatattttgttggagatctcgtctttgaagtttctaagatgacttctccctacattaaatgtacagtctctttcttcatagcatttggaaatttggctgatgataccatcaattttgaggcttttccccacaagctggtgcagtttggagagattcangaaaaag

SEQ ID NO: 275897 - DNA, 368 bp, Glycine max
gataaatctctcataaccatttctaaatataatattgcgtatatgcatgatatcatacaagaaatgggttgggagattgttcgccaagaatctattgaagaccctggcagtcgcagccgattatgggatgccgatgacatttatgaagtattaaaaaataataagggaactgagtccataagaagcataagagcagacttgtcagtaattagggagctgaagttaagccctgacacatttactaagatgagtaaactacaatttttgcattttcctcatcaaggttgcgttgatcattttcctcacaggcttcaatctttttcagttgagctaaggtattttgtttggaggcatttcccactaaaatc

SEQ ID NO: 275898 - DNA, 421 bp, Glycine max
tgatagttcagtgtctacaataccaggtgattttgtcattggtgtcaagttgacaaccataaacaatatgtgtgcatatgggctcaatcctggtatttcaggttctcgtcttttgggcaccattcctcagtccatttcacagcaaactgtttggaatcaaatggcaacagtgagaacaccattgaattttgattctagcaagcagagcttttgtcagttttctattgaccttctcggtggaggaatcttagtggacaaaactggagattggatcacacttatacaaaattctccaattagtaacttgttgagagttgctgcttggaagaaaggctgtttaatggtcaagattgtgatgtctgggaatgcagcagtcaaaaggagtgattgggcctcattggtacaagtgtttttaacaaac

SEQ ID NO: 275899 - DNA, 199 bp, Glycine max
gtttgtcgacaacatcttcgacggagcgtactccatcgaggcggcgtgtcacgctcccaagctggaagaagtgtacgccgaaatcttccgagttctgaaaccgggggcgctctacgtttcctacgagtgggtgacgacggataagtacagcggcgatgaccctgaacacgtggaggtcattcaggggattgagaggggt

SEQ ID NO: 275900 - DNA, 412 bp, Glycine max
gccatttgggagttaggttctgcacgctctgcttccagcgagtgttctttcttcgtttcaacaccttaatttgcacacgctgcttcttcagcttgagaaatggcacaagaaacctttctattcacatctgaatctgtaaacgagggtcaccccgacaagctgtgcgaccagatctctgatgcagtgctcgatgcgtgccttgaacaggaccctgacagcaaggttgcctgtgagacatgcaccaagaccaacatggtcatggtctttggagagatcacaaccaaggccaacgtagactatgagaagattgtccgtgacacatgccgcgaaattggattcatctctgatgatgttggtcttgatgctgacaaatgcaaggtgttggtcaacattgagcagcagagccctgata

SEQ ID NO: 275901 - DNA, 244 bp, Glycine max
ggcttccttaagtctccttagtgctgctccttgcagctctaatgggatcccctcaagttcttgcaaactatgagaatcccccagtgtacaagccttccactgagataccaccattttatatgcccccacttgagatgcctcctgtttacaaacctccacttgaaaaccccccaatttattagcctccagtagagaagccaccattgtacaagcccacagttgagaaacccccagtgtacaagcc

SEQ ID NO: 275902 - DNA, 359 bp, Glycine max
cggctcgagctctcttcttcagtggtggaagctactagaacacgagtttgttgagcactgcgatgaggaagtggacggttgcttccgctctccttcttctctctctcctctttctctttgcagatcaaggtcgaaagtttcaggcgaatgccgagggagattccgacgagcttgtacatccacccaaggtggaggacaagatcggtgctgtgcctcatggcctttcaaccgattcagatgtcgtcaagagggaggcggagtcgatctcgaagagatctctccggagcaacgcggagaagtttgagttccaagcggaagtgtcgcggcttatggatatcatcatcaattctctctacagt

SEQ ID NO: 275903 - DNA, 368 bp, Glycine max
gttcttttgtgtggtggatgatgattacatacaggatgactgggacctctgtggattgagcagtcaagtgccctactttgattatgcccttgatttgattctcgacgttgagtcatcccatggtgacatgttcacggaggaacagaatgagttgattgaatcggcggcggaaatgctttatggtatgattcatgctcgatatgtgttgaccagcaaaggaatggctgccatgcttgacaaatacaagagctatgattttggtagatgcccaagagtttactgctctggacagccctgccttccagttggtcaatcggacattcctaggtcaagtactgtgaaaatatactgccctaggtgtgaagatc

SEQ ID NO: 275904 - DNA, 342 bp, Glycine max
cctcagtccatttcacagcaaactgtttggaatcaaatggcagcagtgagaacaccattgaattttgattctagcaagcagagcttttgtcaattttctattgaccttctcggtggaggaattttagtggacaaaactggagattggatcacacttatacaaaattctccaattagtaacttgttgagagttgctgcttggaagaaaggctgtttaatggtcaagattgtgatgtctgggaatgcagcagtcaaaaggagtgattgggcctcattggtacaagtgtttttaacaaacagctacagtacagagcattttgatgcatgtaagtggacaaaatca

SEQ ID NO: 275905 - DNA, 326 bp, Glycine max
tgttactcctctatccactggtttggagactgcaggaggagtgatgactgtgttgattcccagaaacacaaccattcccaccaagaaggagcaggtgttctcaacctactctgacaaccagcccggtgtgttgattcaggtctatgaaggtgaacgaacgaggactcgtgacaacaatttgcttggcaaatttgagttatctggaattcctcctgctcccagaggtgttcctcagatcactgtttgcttcgacattgatgccaacggtatattgaacgtgtctgcggaggacataaccactggacagatgaacaagattacaatta

SEQ ID NO: 275906 - DNA, 423 bp, Glycine max
cgccgagcttcatgaccgagaagtcggagacggcactacttgggtcgtcattgtcgctgctgagcttctcaaaagggcaaatgaccttgtcaggaacaagattcatcctacctcgattatcagtggatatagacttgctatgcgtgaggcttgtaaatatgtagaagaaaaactagctgtcaaggttgaaaagctgggaaaggattcactaattaactgtgccaagaccagtatgtcctcaaagttgatagctggtgatagtgacttcttcgccggtttggttgtggatgcagtgcaagctgtaaaaatgaccaatgctcgaggtgaagttaaatacccaatcaagggaatcaatatcttgaaagctcatggaaaaagtgctagagacagctttctgatgaatggttatgctctaaatactgg

SEQ ID NO: 275907 - DNA, 425 bp, Glycine max
gacgcgctgcttcactattctccctatggagtttaatcttgtggttcgtcagaagtttttaaattttgtgaggttcattatgaagaaaagggacaagcttagttgtcaagttggaatcaacccatactccatggaatggactggtttggccaatagattactgagtaagggcaacgatattctgtgttgcgattatgctagttttgatggtttgattaccaagcaagttatgagcaaaatggcagaaatgataaacagtctttgtggtggtgatgcaaaattgatgcgtgaaaggacacacctgctgttggcttgttgttcaaggatggcaatttgtaagaaagatgtttggagagttgaatgtggaatcccttctggatttccgctcacagttatttgcaatagcatttttaatgagatgctca

SEQ ID NO: 275908 - DNA, 419 bp, Glycine max
ctcaagagaaactttaagcagatgtctaatgttttgtgggtggctcctgaggacaaggcgagtttatggtcacaacttcattatgtttcgtgtaataatctggaaatgcaagaagcttatcttgtcaatctcgtaaatgtgttacgggaattgtatttgcacagtccagaggaagctcgccaattgagaaggaaagctctctctcgtattgaatggttgcaaaaagctgatgtgcctaccatagcacagattgaagagttccattcgatgcagaggatgatgaatgctcctgattcaaatgataatattgatctactgttgagcattgatttgttgggtttacaaggagcaagtaaagcttttccaaacaagattgtttttgatgataagcttgtgttggctaacacacaagaattctt

SEQ ID NO: 275909 - DNA, 420 bp, Glycine max
cgtgaatcgatatgcaaccaaaccgacgtcgctctgagcatcagaaagctcctgttgtcgaaaaacgctcgggacagtaacctcgtgtactcgccgctgtcgttgcacgttgttctgagcatcatcgcttctggctccaagggccccacactcgatcagcttctctccttcctccgatccaagtccaccgaccatctcaactccttcgcctctcagctcgtcgccgtcgtgctctccgacgccgttcccgtctgcgggcctcgcctctccttcgccgacggcgtgtgggttgagcaatccctctctcttcacccttccttcaaacaacttgtcagtgctcaatacaaggccactttggcttgacgtgatttccagaccatggcggttgaagtgacaaatgaagttaatcatgggctgaaa

SEQ ID NO: 275910 - DNA, 333 bp, Glycine max
tagaatggaatttcgatgctcagtcatctcttttaccattctcttctctcttgctcttgcaggagagagccatgtccatgcatcgctacctgaggaagattattgggaagctgtttggccaaacactcccattcccactgcactgcgagagcttctaaagcctctccctgcaggtgttgaaatcgatgaactccctaagcaaattgatgatacacagtacccaaaaacattcttctataaagaagaccttcatccaggcaaaacaatgaaagtacaattcaccaagcgtccctatgcacaaccttatggtgtatatacatggttaacggatat

SEQ ID NO: 275911 - DNA, 411 bp, Glycine max
atcacctccacctccggtttatatctatgcttccccacctccacctatctacaagtaagctcaaattgtgaaagcaccattcatgatgaatcatgttctagttttcatcgaggaataaaggcaagctctattttgagccaagtgaaacatctatcttcctgtctaagttctttgaataaaagtctgaatgtgtcatctctatgctacaatgtttatgattcagatcaggttgattctatttgtttgatggccatcttgcacgtcctgatcttattgtgttcaagtgacggacaaatccaaacaggaaagagagatttgaaatgtaaatgccaagtaaatgtgaaaagtacagtccatttttagtgatctctttaatttatttgttcatagattaatatggtcgtgtatgat

SEQ ID NO: 275912 - DNA, 420 bp, Glycine max
ctaagatgacttctccctacattaaatgtacagtctctttctgcatagcatttggaaatttggctgatgataccatcaattttgaggcttttccccacaagctggtgcagtttggagagattcaggaaaaagttgtattgaaattttcacaagaggaatttcttacagcttggtcaactcaggtgcgtcctgcaacaactctgttggctgatgggtgtccatatttgtatgcaatggtgcatgatagttcagtgtctacaataccaggtgattttgtcattggtgtcaagttgacaaccataaacaatatgtgtgcatatgggctcaatcctggtatttcaggttctcgtcttttgggcaccattcctcagtccatttcacagcatactgtttggaatcaaatggcaacagtgagaacac

SEQ ID NO: 275913 - DNA, 422 bp, Glycine max
gggtttacaaggagcaggtaaagcttttccaaacaagattggtgttgatgataagcttgtgttggctaacacacaagaattctttgatggaaattttccagtggattcttggttaccaatttttgtgaattgtctctatcctgtaagtcaattaccttcagaagctgtcgttgtaaatgttacatgtggtagtggacgtggtggtttacccaccactgcttggattagttctgcagttaacaatcgctcctcagacatcaacaaaaggattcgcacagcacttgggaaaggtaagaaaattgtttttcttactagagttgatccttttccagtagctttattggctgttctttttggcgttaagaatgaaattctgagttctaacgccactaaccctatgctgacgcgacttcttgagaact

SEQ ID NO: 275914 - DNA, 415 bp, Glycine max
cgagggtttgggtttctcttcctcccttggagaaaaagaagagccaccgctgcgacgccgttcgtgcatttttgaggtgccgctgtcatgtttgggcgtggtggaccaaggaggagtgataactccaaatattatgatattctcgggatttccaaaaatgccagtgaagatgaaatcaagaaggcctatagaaaggcggctatgaagaaccatccagataagggaggagatcctgaaaagtttaaggagttaggtcaagcatatgaagttttaagtgatcctgagaagaaagaactgtatgaccagtatggtgaagatgcccttaaagaagggatggggggaggaggctcgtttcataatccatttgatatatttgaatcattttttggaagagcaagctttggtggtggtggta

SEQ ID NO: 275915 - DNA, 427 bp, Glycine max
cagaaaccttcatgcctcaggtgaaaagaagaagattgtgggggtgttctacaaagggaatgaatatgctaaattgaatccaaattttgttggatgtgttgaaggtgcattgggaatacgtgagtggctggaatcacagggtcatcagtacattgtcactgatgacaaagaaggacctgattctgaacttgagaaacacattccagatgcacatgtcatcatatctactccattccaccccgcctatgtcaccgcagaaagaattaagaaagccaaaaatttggagctgcttttgactgctggcattggttctgatcatgttgatctcaaagctgcagctgctgctggtttaactgtggcagaggtcacatgaagcaacgttgtgtcggttgcggaggacgaactcatgagaatcctcattctaatg

SEQ ID NO: 275916 - DNA, 367 bp, Glycine max
ctctctctcaccaaagccttcctagaacgaaaaaaaaaagaagagcactgttccctcaccaaagaagaagaagcaaacaatggccgatcaacttaccgatgaacagatctccgagttcaaggaagccttcagcttgttcgacaaggacggcgatggttgcatcacaaccaaggagcttggaactgttatgcgttcattggggcaaaacccaactgatgcagagctccaggacatgatcaatgaagtggatgctgatgggaatggtaccattgacttccctgagttcctaaatctcatggccaggaagatgaatgacactgattcttgaggaggagctgaaagaggcattccgggttttcgacaagga

SEQ ID NO: 275917 - DNA, 433 bp, Glycine max
caccgattgctagaatggaatttcgatgctcagtcatctcttttaccattctcttctctcttgctcttgcaggagagagccatgtccatgcatcgctacctgaggaagattattgggaagctgtttggccaaacactcccattcccactgcactgcgagagcttctaaagcctctccctgcaggtgttgaaatcgatgaactccctaagcaaattgatgatacacagtacccaaaaacattcttctataaagaagaccttcatccaggcaaaacaatgaaagtacaattcaccaagcgtccctatgcacaaccttatggtgtatatacatggttaacggatattaaagacacctctaaagaaggatatagttttgaagagatatgcatcaagaaagaagcgtttgagggagaagagaagttttgtgcaaaatc

SEQ ID NO: 275918 - DNA, 418 bp, Glycine max
aaaaaaagcgttaaaatcgtctattcgctcatacttcgagaagaatagagaaaatataataaaaaaaaaaaaaaaaaaaaaaaaaaaaaaaaaaaaaaaaaaaaaaaaaaaaaaaaaaaaaaaaaaaaaaaaaaaaaaaaaaaaaaaaaaaaaaaaaaaaaaaaaaaaaaaaaaaaaaaaaaaaaagggggggggggccaattagggggctggtaaaccgggaaataaattggggacgggaacctgggggggaaaaagttttccttaagggaggcggaataaaagttgggcaaaacaagggaaaaaggtgttcccgggggaaaagtgtattcggtaaaaatcaaaaaaaaattagagccggaaagaaaaaagtaaaagggtgggggggctaatgaggggggaaacttaaatttatggg

SEQ ID NO: 275919 - DNA, 328 bp, Glycine max
ggctcgagaaaatgcattggaaaattatgcctataacatgaggaacacaatcaaggatgacaagattgcttccaaactgtcttctgatgataagaagaaaattgaagatgcgattgagcaggctatccaatggctagatggaaaccaacttgctgaggctgacgaatttgaggataagatgaaggagttggagagcatttgtaatcccatcatagcaaagatgtaccagggtgctggtggtgatgcgggtggagccatggatgaggatggtcctgcagctggcagtggaagcggtgctggacccaaaattgaggaagtcgattaagca

SEQ ID NO: 275920 - DNA, 413 bp, Glycine max
ctcgagccgattcggctcgagggaaaaagttgtattgaaattttcctgaatctctccaaactgcaccagcttgtggggaaaagcctcaaaattgatggtgtagtttggagagattcaggaaaaagttgtattgaaattttcacaagaggaatttcttacagcttggtcaactcaggtgcgtcctgcaacaactctgttggctgatgggtgtccatatttgtatgctatggtgcatgatagttcagtgtctacaataccaggtgattttgtcattggtgttaagttgacaaccataaacaatatgtgtgcatatgggcttaatcctggtatttcaggttctcgtcttttgggcaccattcctcattccatttcacagcaaaccggtttggaatcaaatggcaacagtgagaaca

SEQ ID NO: 275921 - DNA, 422 bp, Glycine max
caccaaacccgtagctctcttcttcctcgcaaactgcaaagggaactctgagaaagaaaaacccaacgaccccttttgccatttcctgcaaaacccgtttctcttcttcaattcgcgcgtccatggcttcaccctccatcacagacgccgaaacaaagccgttttctgttctcttcgtgtgcctcggcaacatctgcagaagccccgctgctgaaggagtcttcactgacttagtcaacaaaagggacctcaattcgaagttcaaaatcgactctgctggcaccatcaattaccacgagggaaatgaagcggattcgagaatgagggcagcttcaaaaaggcgtgggattcagataacttctatttcgaggccaatcaagccctctgatttcgttgactttgacctcattcttgctatggac

SEQ ID NO: 275922 - DNA, 411 bp, Glycine max
cttgggagaagaggtcgagtttcacagcagcaatggtgtacgtcaaggctcataaatcaaaagcctacttcaagagatatcaagtcaagttcaagagaagaagagagggaaaaaccgattaccgtgccaggattcggttgattaatcaggacaagaacaaatataacactccgaaataccgatttgttgttcgctttagcaacaaggacattgttgcacaaataatatctgctagcattgctggcgatattgttcttgctgcagcatatgcacatgagctgccacgatatggtcttgaagtagggcttacaaattatgctgcagcttattgcactggtctcctgttggcccgaagagtcctcaaaacacttgaaatggatgaggagtatgaaggaaactgtgaggctactg

SEQ ID NO: 275923 - DNA, 428 bp, Glycine max
gtaaatgtgttactagaattgtatttgcacagtccagaggaagctcgccaattgagaaggaaagctctctctcgtattgaatggctgcaaaaagctgatgtgcctaccatagcacagattgaagagttccattcgatgcagaggatgatgaatgctcctgattcaaatgataatatcgatctactgttgagcattgatttgttgggtttacaaggagcaggtaaagcttttccaaacaagattgtttttgatgataagcttgtgttggctaacacacaagaattctttgatggaaattttccagtggattcttggttaccaatttttgtgaattgtctttatcctgtaagtcaattaccttcagaagctgtcgttgtaaatgttacatgtggtagtggacgtggtggtttacccaccactgcttggat

SEQ ID NO: 275924 - DNA, 424 bp, Glycine max
cctctacaaaagttcaatttgttagtggaaaaaccttcaaatgtgatataattggtgctggttcacattcttcagaagattttcctgaaaaggaagatcaagaaaaacccaaaaagattgatgccagattgagacaaagaatagatcctcaatacaatgaggttcaggctcagatggaaacaaatttgtttaaattgtctcttgatgatgttgaaactcctaaaggttccatgttggatcttaaaatttctcaatctaaaattgcacttcccaagatcacagttggaggaaccattctgctgtatgatttattggcaaattttttgacagagggcaattttagagcatgtgttgatttgcatcgcactcatcgtattaaatgaatgattaaaatggtggccacagttggtattcctgagaatac

SEQ ID NO: 275925 - DNA, 388 bp, Glycine max
  unsure (1)..(388): unsure at all n locations
ggctcgagttgttccatgttgtttactgcaatttggtatcccttgagcttgagaatttggggtattccacacaattaattccattgccggttaaggattgtttgggagaacaagtttgggaaggtgtgaaacaaagatattggcagctcgatacgtactatcttcctgtctgtcaggccgtagaggaccctgagtgaggcaggaaatggatttcctgcagcttagaaagaactgcaccatgtgcagttaaaatttcaccgtccatgcaagttttttctcttctttatatattaaaattaaaggaataattgaaatctcatgcaggttttttttttaactgtagagaatcntaatccccagtgatgtatggattggatttttaatcaca

SEQ ID NO: 275926 - DNA, 384 bp, Glycine max
ttatgggtataaatctgatatgtggtctcttggttgctgcatgggtgagattgctgcacatcaaccagcatttcgcgctccagacatggctggacttatcaataaaataaacagatcctccatttctccactgccaattgtttattcttccacactgaaacaacttatcaaaagcatgcttaggaaaaacccagaacataggccaactgcagctgaattgtaaggcatccgcttttacagccttatgttcttcgctgtcataatgcatcatctaatgttcttccagtatatcccttagttaatccaaaggataaaacaagaagatctaataaatctagtggtggcaaggaccataaggacaaagaagctagtttggtaaatcgt

SEQ ID NO: 275927 - DNA, 425 bp, Glycine max
cgaggcgcgagctagggtttatcgagggtttcgtttctctctgcaacaacgatggcgaaacccgggcgaggtcgtcgctctcactccggctccgtttccggctcctcctctcgctcctcttccccctccgactcccgctcctcctctcgctcgcgctccgtttctcgttcccgctctccctcgcgctccagatcctcctctccctcctcctcgtctccctcccgaagttctcgcagccgcagccctcccccacagcgccgccgaagtcctgctgatgcagctaggcgaggtcggtctcctccacctcaatctaagagagcttcacctcccccaaggaaaccttctcctgtacgtgaatcacttgttcttcatgtagaaaagctcagcagaaatgtcaatgaagggcatttgaaagaaatttcagt

SEQ ID NO: 275928 - DNA, 418 bp, Glycine max
aatgataaacagtctttgtggtggtgatgaaaaattgatgcgtgaaaggacacatttgctgttggcttgttgttcaaggatggcaatttgtaagaaagatgtttggagagttgaatgtggaatcccttctggatttccgctcacagttatttgcaatagcatttttaatgagatgctcattagatatagctatgaaaaattactgcgccaggctagagctccaagtatgtttttacaatccttcaaaaattttgtttctttgtgtgtgtatggtgatgataactttaattagtgttcatgaatatgtcaagccttactttagtggttctaaattgaaaagctttctagctggtcataatatcaccattactgatggtattgacaaaactagtgcaactttgcaatttagaaagttagc

SEQ ID NO: 275929 - DNA, 420 bp, Glycine max
gtggtgaagaaaccaaagacatccttctcctggatgtggctggcctcactctcggaattgaaactgttggtggagtcatgacaaagttgattcccagaatcactgttatcccaaccaagaaatctcatgtgttcaccacctatcaggaccagcagactacagtctccattcaagttttcgaaggcgagaggagtctcacaaaggattgccgccttcttgggaaatttgatctgtctggaattcctccagccccaaggggtacgcctcaaattgaagtgaccttcgaagttgatgccaacggcattctaaatgtgaaggcagaagacaagggcactggtaaatcagaaaagatcaccattacaaacgataagggacgtcttagccaggatgaaattgatagaatggttcgcgaagcaaaag

SEQ ID NO: 275930 - DNA, 391 bp, Glycine max
ggctcgagtgttgatcgagataactagaaacagtgtgatgaaaatgaaggtccttgttttcttcgttgctacaattttggtagcatggcaatgccatgcgtacgatatgttccctctccgaatgaacactggctatggtgcccgtactccggaggtgaaatgcgcaagttggaggcttgctgtggaagcacacaacatctttggctttgagaccattcctgaagagtgcgttgaagcaacaaaggaatacatccatggcgaacaatatagatcatactccaaaacagttaaccaacaagcttacttttatgccagagacctcgaagtccatcccaaggacacatttgtgttcagtatagatggcaccgtactctctaatattccatactac

SEQ ID NO: 275931 - DNA, 423 bp, Glycine max
gaggagacaagaaaagaaagagaaagagtttgcagagttgaatggccgaaagaggaatggcgaagcacgaggagcttcctatcccgattaacaataacctagaacccgtctatggcggaggttccgcactcgaagaagctcagcttcgtttcgataatttgaagtccaaattcgtcgaaatcttcggtcatcatcctcaaatcttcgctcgctcacctggaagagtgaacttgattggggagcacattgattatgaaggttattcggtgctgcctatggcaattcggcaagacacgatcgtggcgattcggaaaaatgaagcggaaaaggttctcaagatagctaacgtgaatggtgaaaaatattcactttgtacttatcccgccgatcctctccaggaaatcgacttgaagaaccacaaat

SEQ ID NO: 275932 - DNA, 428 bp, Glycine max
tcaagcttcaatttgctttgtgctcactcatctatctattatggaccaaacactcttcttcatattcttcttcttcttcttgttcttgttctatctgtgacgagcatcatggcctcgagagcagtgctattgttggctatgtgtgtgcttccggccatggttgtggccattcgcccagcaaagaaccctttttgcgtgaagggtcgcgtctactgtgacccttgccgtgctggttttgagacctcagcaaccacctacattgccggtgctgagattatgttgcaatgcaagagcagggttagcaacgaggttgtgtacaccaagaaggggtacactgactcaactggagcatacacaatgtacgtggacgaggatcacgcagatcaaatatgcagtgccaagcttgtaagcagccctcaccctcaatg

SEQ ID NO: 275933 - DNA, 397 bp, Glycine max
cttggttattcatcagaagtataggatttcctatgatgaaatgattaatgatttatgcccaatcatgagtgtccagcagctatacagaatatgtacactttactgggatgctaactacaatactcgaagtgtatctccagatgtcctttcaagcatgagagtacttatggctgaggactctaataatgctcagagtgattctttcttgttggatgacagttccagcatccccttctcagtggatgacttctctacatcactgcaagagaaggatttctctgacatgaaaccagcggatgagctgcttgagaatcccgccttccgatttttaaatgagttggcaagggaagcttagtgtatgtgtttatcatagtcgtcaaggcaagcaaccaaatca

SEQ ID NO: 275934 - DNA, 426 bp, Glycine max
ggctaatctattacgcgctgttctctcgtcttctacaagatggtctgttcgatctcaaccaaggttgttccttccacctccgccatgagtttcatctttggaaagcgaaaaacccccgcagagcttctgcgggaaaataagaggatgctggacaaatcaatcagagaaattgagcgtgagcggcaaggattgcaaacacaagaaaagaaattgattgcggagataaagaaaagtgccaaacagggccagatgggagctgttagagttatggcaaaagatcttgttagaacaaggcatcaggttgagaagttttataagctaaaatctcagctccaaggtgtatcactcagaattcagactttgaaatctacacaagcaatgggtgaggctatgaaaggcgtgacaaaggccatggggcaaatgaat

SEQ ID NO: 275935 - DNA, 336 bp, Glycine max
cgagctcttcatcgccgccgagggtctctacaccggccagttcatctactgcggcaagaaggccaccctcgttgtcggcaatgtgttgcctcttcgatccattcctgaaggagctgtcatctgcaacgtcgagcaccatgtcggcgaccgcggcgtcttcgctagggcgtctggagactacgccattgttatcagtcacaaccctgataatgacacctctaggattaagctcccatctggttcaaagaagattgttccaagtgactgtagggccatgattggtcaagttgcaggtggagggagaactgagaagcctcttctcaaggctggaaatgc

SEQ ID NO: 275936 - DNA, 325 bp, Glycine max
gtaaatgtgttacgagaattgtatttgcacagtccagaggaagctcgccaattgagaaggaaagctctctctcgtattgaatggctgcaaaaagctgatgtgcctaccatagcacagattgaagagttccattcgatgcagaggatgatgaatgctcctgattcaaatgataatatcgatctactgttgagcattgatttgttgggtttacaaggagcaggtaaagcttttccaaacaagattgtttttgatgataagcttgtgttggctaacacacaagaattctttgatggaaattttccagtggattcttggtaccaatttt

SEQ ID NO: 275937 - DNA, 376 bp, Glycine max
  unsure (1)..(376): unsure at all n locations
tattgacaaaactagtgcaactttgcaatttagaaagttagcagattgtgattttctcaagagaaactttaagcagatgtctaatgttttgtgggtggctcctgaagacaaggcgagtttatggtcacaacttcattatgtttcgtgcaataatctggaaatgcaagaagcttatcttgtcaatctcgtaaatgtgttacgagaattgtatttgcacagtccagaggaagctcgccaattgagaaggaaagctctctctcgtattgaatggctgcaaaaagctgatgtgcctaccatagcacagattgaagagttccattcgatgcagaggatgatgaatgctcctgattcaaatgataatattgatcntactgtg

SEQ ID NO: 275938 - DNA, 424 bp, Glycine max
  unsure (1)..(424): unsure at all n locations
cggctcgagggggggaacagtatctccaaattgaaagttcctttcatacttaggacgcctgacatgtcatccatgcaccatgacacaagttctgatctgaaagtagttggaaacaaattaaaggatatattagagatctctaacacatccctaaaaatgaggaagattgttgttgaactgtgtgacattgttgctactcgtggggctcggcttgctgctgctggtattttgggcatccttaagaaaataggaagagacacggttaaggttggggagaagcaaaagtcagtgatagctttggatggnggattgtttgaacactacaccaaatttagagaatgcttggagggtaccctgaaggaattgctgggagatgaggctgctgagaccattgtcattgagcatgctaatgatggctctggca

SEQ ID NO: 275939 - DNA, 401 bp, Glycine max
  unsure (1)..(401): unsure at all n locations
tatgaaatcgctgagagcactgacaaggccgatatcactggggatgcaaggagttttagttgggcagtggacagtgcgataaagagtgagactgcgtcattttggtaagtctgaatttgccatcttttcccgtttagaccataggaacttggttgggctggttgggtactgtgaaaacagagatgaaaggctgtcagtttacgagtatatgaagaatgggttgttgcgtgattgcttgcatgataagaacaatgtggacaaggatagcagtgtgttgaattcgtggaaaatgaggatcaagattgcttgtgatgcttccttgngaatacaatatctgcataattatgcagatccatctattattcacatggatatcaagtcttccaatattcttcttgatg

SEQ ID NO: 275940 - DNA, 415 bp, Glycine max
atcccaggcgaggagaaagatggaggggaaggagcaggatgtgtcgttgggagcgaacaagttccccgagagacagccgattgggacggcggcgcagagccaagacgacggcaaggactaccaggagccggcgccggcgccgctggttgacccgacggagtttacgtcatggtcgttttacagagcagggatagcagagtttgtggccacttttctgtttctctacatcaccgtcttaaccgttatgggagtcgccggggctaagtctaagtgtagtaccgttgggattcaaggaatcgcttgggccttcggtggcatgatcttcgccctcgtttactgcaccgctggcatctcatgtggacacatatacccggcggtgacatttgggctgtttttggcgaggaagttgtcgttg

SEQ ID NO: 275941 - DNA, 427 bp, Glycine max
cccgcctcgcgaagcgcgcgttcgtcgtctcttccctggcgaggaggtgcctgagctcctccgtagtcaactgccacgcgccgccgcacgacgccacgtcgttccgcccgtttccgctgcgtgaagattcgagcaagcggtgcgtgcagtgggtgttcctcggctgccccggcgtcggaaaaggaacgtacgctagtcgcctctcgaacctcctcggcgtccctcacatcgccaccggcgatctcgttcgcgacgaactcacctcctctggccccctttcttcccagctatcagaaattgtaaaacaaggtcaattggtgtcagatgaaattattattagtttattgtcaaagagacttgttgccggggaagctaaaggcgatttgggatttattcttgatggttttcctcgaacaattaagcaagc

SEQ ID NO: 275942 - DNA, 426 bp, Glycine max
caactttgcggtgttcccttcgctgcagggtgggccccacaggcaccagatcggggctcttgccgtggcgctgaagcaggccgcgtcgcccgggtttaaggcctacgccaagcaggttaaggccaacgccgttgcgcttgggaattacttgatggggaaagggtacagtcttgtcactggaggcacggagaaccatcttgtcttgtgggatctcagacctcttggattgactgggaataaggtggagaaactctgtgatctctgcaacattactgttaataagaacgcagtttttggtgatagcagtgccttggcccccggtggagtgcgaattggggcccctgccatgacttctaggggtttggttgaaaaggactttgagcagattggtgagttccttcaccgtgctgtgactctcacactgga

SEQ ID NO: 275943 - DNA, 382 bp, Glycine max
aacgggacatgcccttggctgagacctgatggcaagacccaagtcactgttgagtactacaatgacaagggtgccatggttccaatccgcgtccacactgtgctcatctccacacagcatgatgagactgtcacaaatgatgagattgcagctgatcttaaagaacacgtgattaagcctgtgattcctgagaagtaccttgatgagaagaccattttccatttgaacccttctggcaggtttgtcattggagggccgcatggcgatgctggtctcaccggccgcaagatcatcatcgacacctatggaagatggggtgcacatggtggtggtgccttctctgggaaggatcctaccaaggttgataggagtggtgcctaca

SEQ ID NO: 275944 - DNA, 428 bp, Glycine max
attgaaaagctttctagctggtcataatatcaccattactgagggtattgataaaactagtgcaactttgcaatttagaaagttagcagattgtgattttctcaagagaaactttaagcagatgtctaatgttttgtgggtggctcctgaggacaaggcgagtttatggtcacaacttcattatgtttcgtgtaataatctggaaatgcaagaagcttatcttgttaatctcgtaaatgtgttacgagaattgtatttgcacagtccagaggaagctcgccaattgagaaggaaagctctctctcgtattgaatggctgcaaaaagctgatgtgcctaccatagcacagattgaagagttccattcgatgcaaaagatgatgaatgctcctgattcaaatgataatattgatctacttgtgagcattg

SEQ ID NO: 275945 - DNA, 381 bp, Glycine max
gcgttttagagtggaaaatggcaggaagcagcattaacagaggagaaagatggtctctcaatggaatgactgctcttgtcaccggcggcactcgtgggatcgggcactccatagtgagtgacttggctgcgtttggcgctgcagtgcacacctgttccaggacccaaacagagctcaacaaatgcttacaagagtggcagagtcaggggtttcaggtaactgggtcgctctgtgacgtgtcctcaccaccccagagagagaagctcattcaggaagttgcatccaccttcaatggcaagcttaacatctacgtgaacaatgttggaataaacattagaaagccaaccattgagtacactgctgaagaatattcacagatta

SEQ ID NO: 275946 - DNA, 389 bp, Glycine max
accaaatttggttccattgattggtattgatgtttgggagcatgcgtactacttacagtacaagaatgttagaccagactatcttaagaacatttggaaagttattaattggaaatatgccagtgaagtgtatgagaaagagagctcttagtctgaaggagctacttgatatagcaattgagatgacagatttgcagcacggtaagagatgtggaataaaatgatatgatgtaatagatagcactattttatgtagttgtactgaagaacctcgagcatattatatggctgcatttcttgtaccaagttggtcatgtcttatggattttttgatgccctgttaagatactatacctttccagtgatgtatatcttttgcttctagagtg

SEQ ID NO: 275947 - DNA, 343 bp, Glycine max
agaatggctcccaagggtttaacctttctggctgtgttaatatgcgtttcagcactgtcactgagtccttctgttgcgggggaagggcaaaataatggccttgttatgaacttctacaaggaatcatgccctcaggctgaagacatcatcacagaacaagtcaagcttctctacaagcgccacaagaacactgctttctcctggctcaggaacatcttccatgactgtgctgttcagagttgtgatgcttcactgttgctggactccacaagaaggagcttgtctgagaaggaaacagatagaagctttgggttgagaaattcaggtacattgagaccatcaa

SEQ ID NO: 275948 - DNA, 414 bp, Glycine max
  unsure (1)..(414): unsure at all n locations
gtcaagccttactttagtggttctaaattgaaaagctttctagctagtcataacatcaccattactgatggtattgacaaaactagtgcaactttgcaatttagaaagttagcagattgtgattttctcaagagaaactttaagcagatgtctaatgttttgtgggtggctcctgaggacaaggcgagtttatggtcacaacttcattatgtttcgtgtaataatctggaaatgcaagaagcttatcttgtcaacctcgtaaatgtgttacgagaattgtatttgcacagtccagaggaagctcgccaattgagaaggaaagctctctctcgtattgaatggctgcaaaanagctgatgtgcctaccatagcacagattgaagagttncattcgatgcanangatgatgaatgc

SEQ ID NO: 275949 - DNA, 430 bp, Glycine max
ctcgtctttgaagtttctaagatgacttctccctacattaaatgtacagtctctttcttcatagcatttggaaatttggctgatgacaccatcaattttgaggcttttccccacaagctggtgcagtttggagagattcaggaaaaagttgtgttgaaattttcacaagaggaatttcttacagcttggtcaactcaggtgcgtcccgcaacgactctgttggctgatgggtgcccatatttgtatgctatggtgcatgatagttcagtgtctacaataccaggtgattttgtcattggtgttaagttgacaaccattaaacaatatgtgtgcatatgggctcaatcctggtatttcaggttctcgtcttttgggcaccattcctcagtccatttcacagcatactgtttggaatcaaatggcaacagtg

SEQ ID NO: 275950 - DNA, 429 bp, Glycine max
attttgttggagatctcgtctttgaagtttctaagatgactggtccctacattaaatgtacagtctctttcttcatagcatttggaaatttggctgatgacaccatcaattttgaggcttttccccacaagctggtgcagtttggagagattcaggaaaaagttgtgttgaaattttcacaagaggaatttcttacagcttggtcaactcatgtgcgtcccgcaacgactctgttggctgatgggtgcccatatttgtatgctatggtgcatgatagttcagtgtctacaataccaggtgattttgtcattggtgttaagttgacaaccatatacaatatgtgtgcatatgggctcaatcctggtatttcaggttctcgtcttttgggcaccattcctcagtccatttcacagcatactgtttggaatc

SEQ ID NO: 275951 - DNA, 426 bp, Glycine max
ctttgaagtttctaagatgacttctccctacattaaatgtacagtctctttcttcatagcatttggaaatttggctgatgacaccatcaattttgaggcttttccccacaagctggtgcagtttggagagattcaggaaaaagttgtattgaaattttcacaagaggaatttcttacagcttggtcaactcaggtgcgtcctgcaacaactctgttggctgatgggtgtccatatttgtatgctatggtgcatgatagttcagtgtctacaataccaggtgattttgtcattggtgttaagttgacaaccataaacaatatgtgtgcatatgggcttaatcctggtatttcaggttctcgtcttttgggcaccattcctcagtccatttcacagcaaactgtttggaatcaaatggcaacagtgag

SEQ ID NO: 275952 - DNA, 410 bp, Glycine max
gtgtttgtcacgagacccatagtgctgccaaattatagtaacgctctttctctatctgaagaagaagaagttctgaagaagcatgtgtggaggtgctatcatctcagacttcattggtgtgaagcgtggccgcaacctcgccgcgcaggaactgtggtccgagcttgaccctttctctgacctccttggcttcgataccaccaccaccaccaccaaccaaccaccccttccagacaaaaaagtggtgtcatcatgtgagaagaagaagaagaaaagtgtgagtgcagaaaagaagagtggtgggcgagctcggaagaacgtgtacagaggaatcaggcaaaggccgtggggcaagtgggccgcggaaataagggacccacataagggcgtccgcgtctggctcggcacct

SEQ ID NO: 275953 - DNA, 353 bp, Glycine max
cccatgtgctttcacgcaaaaatggtgaaaaaggcaaaaggagatttgtttctggggatggtgaagagatgacattgattccgggaaccagtgttgaagaggcttacaataagctaatagttgaacttgagaaaagtgttcctacattggttggcattgaatgtcccaaggatgagaaacttcctcgtcgcataatttttgacaaacctaagacgcgctgcttcactattctccctatggagtttaatcttgtggttcgtcagaagtttttaaattttgtgaggttcattatgaagaaaagggacaagcttagttgtcaagttggaataaacccatactccatggaatggact

SEQ ID NO: 275954 - DNA, 422 bp, Glycine max
caattttcaagttgttggacccccacatgaggtacaccttggagatcaatgccttggctagacagagtttgatcaatgctgatggaatcattgaaaattgctttactcctggtcgctatgccatggagattagttctgctgcctacaagaacttttggcgctttgacatggatagcctccctgcagatctcatccgcaggggaatggccgtacctgacccaacacagccacatggtctaaagctcatattggaagactacccttatgcagctgatggaatactaatctggtctgcaatagaagactgggttcgaacctatgtgaaccattactaccctcactcatgccttatatgcaatgacaaagagttacaatcttggtactctgagtcaatcaatgtatgccatgctgatctcaggcat

SEQ ID NO: 275955 - DNA, 417 bp, Glycine max
gaaaaatgtcgaagctgatcttcgtgttcctttcgcttattcgctcttctctgcacctccttctccccagagagaccctcagatcgacgcgtcctcgttttgctcgatgacttcgccatcaaatcctctcattctctcttcttcaactccctcaaatctcgcggcttcgatctccaattccacctcgcagacgacccccaaattgcgctccagagatacggccagtacctctacgacgccctaattctcttttcccccaccattgaacgttttggaggatccattgacgcggctgcaaatttggattttgttgattcgggtcatgatttgatcgttgctgctgatagcaatgcatctgatttaatcagggaaatcgccaccgagtgtggagtggcccttgatgaggatcctgctgct

SEQ ID NO: 275956 - DNA, 364 bp, Glycine max
atggatgccactaccccgaagtactctaaggctaggtatgatgaaattgtgaaggaagtctcttcctacttgaagaaggttggttacaacccagacaagattccatttgtgcccatctctggtttcgagggtgacaacatgattgagaggtccaccaaccttgactggtacaagggaccaactctccttgaggctcttgaccaaatcaatgagcccaagaggccctcagacaagccactcatgcttccattgcaggatgtctacaaaattggtggtattggtaccgtgccagtgggacgtgttgagactggtgtcgtgaagcccggtatggtggtgacttttggtcccactgggctgacaactg

SEQ ID NO: 275957 - DNA, 363 bp, Glycine max
  unsure (1)..(363): unsure at all n locations
ctggtttgcaaaaagacagagggttaattgtggagtattttggaaggatgtcttacgttgctcataacgttaatcagccccaagagaaagatttgttggagggaaatttttcctttgatattaaatctcgctctagattggaaaaagtttcctctacaaaagcacaatttgttagtggaaaaaccttcaaatatgatataattggtgctggttcacattcttcagaagattttcctgaaaaggaagatcaagaaaaacccaaaaagattgatgccagattgagacaaagaatagatcctcaatacaatgaggttcatgctcagatggaaacanatttgtttaaattgtctcttgatgatgttg

SEQ ID NO: 275958 - DNA, 427 bp, Glycine max
gaacagcacacatgcacttgacatgttaccatactcgctaagcacgtgtctagtagcttccattttttcatgcttcaatcctaacttagcctcaacttggtccaaaattgctggtccaccagggtgtgcaatccaaaagatagagttgtaatcatcaatttctaagggtttgaaggcttcaaccaaggccttttcgatgttcttggagatgagtccaggaacatccttgaggagatggaaagtgagtcctacttggcgaaggtggccatcaatagcgccttcgctgtctggaaggattgtttgtgcagtccacacaagctcaaacaaaggcttttcagctggcagaggatctgatccaacaatgacagcagctgcaccatcttcaaacaaggcttgccccacaaggcttgcaagatgtgtgtcactc

SEQ ID NO: 275959 - DNA, 424 bp, Glycine max
ctcgagccgaatcggctcgagcgtaaatgtgttacgagaattgtatttgcacagtccagaggaagctcgccaattgagaaggaaagctctctctcgtattgaatggctgcaaaaagctgatgtgcctaccatagcacagattgaagagttccattcgatgcagaggatgatgaatgctcctgattcaaatgataatattgatctactgttgagcattgatttgttgggtttacaaggagcaggtaaagcttttccaaacaagattgtttttgatgataagcttgtgttggctaacacacaagaattctttgatggaaattttccagtggattcttggttaccaatttttgtgaattgtctttatcctgtaagtcaattaccttcagaagctgtcgttgtaaatgttacatgtggtagtggacgt

SEQ ID NO: 275960 - DNA, 432 bp, Glycine max
caaatgaggcgttaaggatcaatgttttattcagacacatacagaacatgttgtccagtcacaccactgtgattgctgaagctggagacacttggtttacttgccagaagctcaaattgccacaaggctgcgggtatgaatttcaaatgcagtatggatcaataggttggtcggttggtgcaactcttggttatgcacaggctgctccccataagagagtgattgcttgtattggcgatggtagcttccagatgacagtacaggaagtgtcaacaatgttacggtgtgagcagaatggcatcatctttctaattaacaatggtggatacactacagaggtagaaattcatgatggaccttacaatgtcataaaaaattgggactatgctggactcgtggaaagaatagataatggtgaaagcaaatgctgga

SEQ ID NO: 275961 - DNA, 238 bp, Glycine max
gaagattccgcatcatagagtataaaagatggcgcggttgatggcagttgttttgtgcgcgttggcggagctactatgctcctagtttgtccctattactttgaagtttcgttggaccgtacccgacccagttctttggttgaagttgtactttcacaacattggcagatttgcaattgaatttaatttatttgcttacaaaaaaaaaaataaaaaaaagggcggctcgctactattt

SEQ ID NO: 275962 - DNA, 453 bp, Glycine max
  unsure (1)..(453): unsure at all n locations
cccacaagctggtgcagtttggagagattcaggaaaaagttgtgttgaaattttcacaagaggaatttcttacagcttggtcaactcaggtgcgtcccgcaacgactctgttggctgatgggtgcccatatttgtatgctatggtgcatgatagttcagtgtctacaataccaggtgattttgtcattggtgttaagttgacaaccataaacaatatgtgtgcatatgggctcaatcctggtatttcaggttctcgtcttttgggcaccattcctcagtccatttcacagcaaactgtttggaatcaaatggcaacagtgagaacaccattgaattttgattctagcaagcaaagcttttgtcaattttctattgaccttctcggtggaggaattttagtggacaaaactggagattggatcacacttatacanaatttctcaattagtaact

SEQ ID NO: 275963 - DNA, 163 bp, Glycine max
gagaattgggagagctactataactccggtttgtacatacaacttggaggttctgctggaccgtaccgcacccagttctctggttgaggttgtactttcacaacagtggcagatttgcaattcaattcaatttatttgtttacaagaaaaaaaaaaacaacaa

SEQ ID NO: 275964 - DNA, 196 bp, Glycine max
caatttcaatgaactcattgaatttttagtttatttttcgactatatattttggagaattttgagagttactataatttgattttgtacatagtacttggaagttttgttggaccgtaccggacccagttctctggttgaggttgtactttcacaacagtggcagatttgcaattcaattcaatttatttgtttac

SEQ ID NO: 275965 - DNA, 424 bp, Glycine max
tgaatatgtcaagccttactttagtggttctaaattgaaaagctttctagctggtcataatatcaccattactgatggtattgacaaaactagtgcaactttgcaatttagaaagttagcagattgtgattttctcaagagaaactttaagcagatgtctaatgttttatgggtggctcctgaggacaaggcgagtttatggtcacaacttcattatgtttcgtgcaataatctggaaatgcaagaagcttatcttgtcaatctcgtaaatgtgttacgagaattgtatttgcacagtccagaggaagctcgccaattgagaaggaaagctctctctcgtattgaatggctgcaaaaagctgatgtgcctaccatagcacagattgaagagttccattcgatgcagaggatgatgaatgctcct

SEQ ID NO: 275966 - DNA, 422 bp, Glycine max
ctcccctttgccgctgttgttgttgctgcaccaccgaacaacttcccctgtaaatcgcgtttcgtttgtgcaaggttttaaaagatggctgatgctgaggacattcaacctcttgttgttgataatggaactggaatggtcaaggctggttttgcaggtgatgatgctcctagggccgtgttccccagcattattgggagaccacgccatactggtgtaatggttgggatgggtcagaaggatgcttacgtgggtgatgaagcccaatcaaaaaggggtatactcaccttgaagtatcctatagagcatggcatagtcagcaactgggacgatatggagaagatttggcatcacacattttacaatgagctacgtgttgcccctgaagaacaccccgtacttcttaccgaggcaccactcaa

SEQ ID NO: 275967 - DNA, 430 bp, Glycine max
agcaagcagagcttttgtcaattttctatcgaccttctcggtggaggaattttagtggacaaaactggagattggatcacacttatacaaaattctccaattagtaacttgttgagagttgctgcttggaagaaaggctgtttaatggtcaagattgtgatgtctgggaatgcagcagtcaaaaggagtgattgggcctcattggtacaagtgtttttaacaaacagcaacagtacagagcattttgatgcatgtaagtggacaaaatcagaaccacattcctgggaattgatcttcccaatagaggtatgtggtcctaataatggttttgaaatgtggagttctgagtgggcaaatcaaacttcatggcatttgagtttccttattgacaatcccaaacagtctacagtttttgatattctcttgggaa

SEQ ID NO: 275968 - DNA, 411 bp, Glycine max
  unsure (1)..(411): unsure at all n locations
cttcatgggaggaggcagccattaaacaacttgtaagtgttaggaaggacacaagaaaaggtggccctttagaaggagcacatgttcacatcgtccacttgtctgattcaagtgcttccttagatctgattaaggaagcaaaaagtcatggtgacagcataagtgttgagacttgtcctcattacttagctttcacgtctgaagagataccaaatggggatactcgttttaagtgttccccacccattcgtgatgcatacaacaaagacaaattatgggaggctgtattagagggacacattgacctattaagtactgatcattcaccaactgtgcctgaactcaagcttatggaggagggtgactntntaaaagcttgggggggcattatatcttngcaagttaatcttt

SEQ ID NO: 275969 - DNA, 311 bp, Glycine max
  unsure (1)..(311): unsure at all n locations
ttcaaaaatatgccactcccatgagcccctagatgaagaaatgctgtctaaggttgcacaagatatggttgaggaatggttcgattgtgttgatgaggaggattcctttgaggaagtttctttaagtgcagcacttaatggtgttgagggtttggactatatggaaagaattcctcttgccacatctgagggatttcctcatgtgctttcacgcataaatggtgaaataggcaaaaggagatntgcctctggtgatggtgaagagattacactgattcacttaaccagtgttgttcaaggatggcaatttg

SEQ ID NO: 275970 - DNA, 338 bp, Glycine max
tttcaagtttccatcattagctttggacttatccttctgaatgccactttcttctctttcacttccatgcgaagagatcttgcttgattcgaaaaggaaggaacttgagacttgtttctctcagagatggcgttgcctaaggttgatttcgaggttggaactgatggggttgctgtcatcactatgtgcaacccatccgtcaacgctttggccattccaactatcatggggttgaagaacatatttgatgaggcagctcggaggaatgacgtgaatgctatagtttggacttgcaaatgtggcatattttctggaggctttgatatcaaatgttatgc

SEQ ID NO: 275971 - DNA, 447 bp, Glycine max
agaagactgttgatggtccttcaaacaaggactggagaggtggaagagctgcttcgttcaatataattcctagcagcactggagctgctaaggtactacctaattgttatatttaaaattatacatacattgctcctttagttggatggtgtaaattttattctaaagctttttgttctttattgaatgttgaatttgggataaacaacaggctgtaggaaaagttcttccagcgctgaatggtaaattgactggaatgtccttccgagtccccactgttgatgtttcagttgttgacctaactgtcaggctagagaagccagcaacctatgagcaaatcaaagctgctatcaagtaagtttttgaacctttttgaaaatctttgcatttggcaaatcgaatcatgttttttccccgttgacccaacaactctttgtgttcaaattt

SEQ ID NO: 275972 - DNA, 449 bp, Glycine max
caaacacggagttaatgttccgagaggcgtggctgtttcctctgttgaagaggtcagaaaggccatcaaggaccttttccctaatgaaaatgagttggtggttaagagtcaaattttagccggtggaagaggtttgggaactttcaaaagcggccttaagggaggagtgcacattgttaagactgaccaggttgaagacatagctgggaagatgcttgggcagatactagttaccaaacagactggtcctcagggaaaaatagttagcaaggtttacttgtgtgaaaagctgtcactagtaaatgagatgtactttgctataacactggatcgtacgagtgctggtccaattataattgcttgtagtaagggaggaaccagcattgaagacctagcagagaaatttccggacatgattataaaggtacctgttgatgtttttgaggaat

SEQ ID NO: 275973 - DNA, 423 bp, Glycine max
gtttgttgttgtaactcgttcttcttcttttgttgttctgtgtgtgtgtttgttttttctctcacctgaaaatgtcttgctgcggtggtaactgtggttgcggaagctcctgcaagtgcggcaacggctgcggaggctgcaagatgtacccagacttgagctacactgagtcaaccaccaccgagaccttggtcatgggagtggcacctgttaaggctcaatttgagggtgctgaaatgggtgtgcccgctgagaacgatggctgcaaatgtggaccaaactgctcctgcaacccctgcacttgcaagtgaggtgttgggagagcaagcttcaagcagagatagcccttaattaggaataatgataaactattaatgtgtagctaaaaacttatgtattatgtctgtgatggttttcgtgcac

SEQ ID NO: 275974 - DNA, 418 bp, Glycine max
  unsure (1)..(418): unsure at all n locations
gttatcctcaattttcaatggctcaatcccattctggaaaaaggtcttccatgacttcaatactcctcctgtttatgcttcttatcagtaatacaggcacaacaggtgcacaatctggtgtatgctatggaagagttggcaacaatctgccatcgccacaagaagtagtttccctttttaaacagtacggcttccaaaggatgagaatctatgatcgaaaccatgaagtcctccaagctctgagagattccaacattgagttgctgctagatcttcctaacatcgacctccaatatgtagcttccagccaagataacgcanacagatgggtgcaagacaatgtcagaaacttttggaatgtcagattcaggtacattactgtgggaaatgaagtgaagccttgggactcatttgcaca

SEQ ID NO: 275975 - DNA, 419 bp, Glycine max
attcaagaccggcatggctaatgaagaggaacagaaaaaccagctcttcggcatcaaagatctcggtcacaagactctccttcagagtgatgcactctatcagtatatacttgaaaccagtgtctatccaagagagcacgagtgcttgaaagagatacgcaagatgactgcaaaacacccactgaacatcatggcaacaccagcagacgaaggacaacttctgagcatgcttgttaagctcacgaattcaaagaacgccttggaaattggtgtattcactggttactctctgctctccactgccctggctcttccccctgatggaaagatcttggctttggatgtgaatcgcgaatactatgagttaggattgccaataattcaaaaagctggagtggctcacaagattgatttcagag

SEQ ID NO: 275976 - DNA, 424 bp, Glycine max
caattctcaaatccaagctcgggaacagagaaggagaaagagaatggacgccattgattctgtgttcgatccgttgagagaattcgcaaaggacagcgtgaggctcgtgaagcgctgccacaaacccgatcgcaaagaattctccaaggttgccgtgcgtaccgcaattggtttcgttgtgatgggattcgtgggtttcttcgtgaagcttattttcattccaattaacaacatcatcgtcggatctggttaggatgaagggtactacaatcgcctcaggaattcaggttgtcaagcaaaagtaggcagaaagagttcccacatcaatagatcattctatgccctcaatcttagttctgttttcatttttgtttttttttctcatctcaggaagtgttacttactttagacgtaaaattttatg

SEQ ID NO: 275977 - DNA, 445 bp, Glycine max
gtgcgtcctgcaacaactctgttggctgatgggtgtccatatttggatgcaatggtgcatgatagttcagtgtctacaataccaggtgattttgtcattggtgtcaagttgacaaccataaacaatatgtgtgcatatgggctcaatcctggtatttcaggttctcgtcttttgggcaccattcctcagtccatttcacagcaaactgtttggaatcaaatggcaacagtgagaacaccattgaattttgattctagcaagcagagcttttgtcagttttctattgaccttctcggtggaggaatcttagtggacaaaactggagattggatcacacttatacaaaattctccaattagtaacttgttgagagttgctgcttggaagaaaggcttgttaatggtcaagattgtgatgtctgggaatgcagcagtcaaaaggagtg

SEQ ID NO: 275978 - DNA, 408 bp, Glycine max
cgtctggcgatttaatagaaaagacacacacttcgcacttacatacgacttactgatggtgtggacaaatctagtgcgacttggcagtttataaagttagcagattgtgattttctcaagagaaactttaagcagatggctaatgttttgttggtggcttctgaggacaaggcaatgtttatggtcacaactttattatgttacgagttataatctgaaaatgcaagatgcttatcttgtcaacctagtaaatttgttacgagaattgtatatgcgcaatccagacgaagctccccaattgagaaggaaagctgtatctcgtgttgaatggctgcaaacatctgatgtgcctaccatagcacagattgaagagttccattcgatgcatatgatgatgaatgctcctga

SEQ ID NO: 275979 - DNA, 426 bp, Glycine max
cacacacacactctccccgaggtttgagagggtactggcatcgaaaaaatgggttctaaaactaatgcttcgggccatagagcacgaaggccgctgtcaatatttgctgtgcttggtctttgctgtttcttttatcttttgggagcatggcaaagaagtggatctgggaagggagataaccttgcattgaaagttaataacctgatgactgactgcactgttttacccaatttgagttttgaatctcatcacaatgatgtagaaattgtcgaacctgctgagccaaaagctaaagagttcaagccgtgtgatgtgaaatatactgattatacaccttgccaagagcaagaccgagcaatgacatttcccagagagaatatgatctatagagaaaggcattgtcccgctgaaaaggagaaattgcgc

SEQ ID NO: 275980 - DNA, 327 bp, Glycine max
tccaattctccccccacgctctcccacgcgcagctgcgtggcgtcgaaagcgatgccgccgcggtccgccatcgcgtagattcggtccccgacgacggcgctggcgtgcatccacttctcccggacctccgtcggactggcgaccctctcccaccggcccgaggcggggtcaaggacctctgcccagttggcggagcgggaccaggtgtcggcgacgcagcctccgaggacgttgatcttgccgtggaggacgccggcggcggcgaactctcgggcgacgcgcatggtgggaccacggagccagctgtggatgcggccggtgaggag

SEQ ID NO: 275981 - DNA, 425 bp, Glycine max
gtgggtatggctctttggcactagacataagtggtggacaccttgcagctggtgtggattctctcttcaaaaatggagcaggttgtggtgcctgctttcagataagatgcaagaacccaactctatgtagcaaagaaggtaccaaagtggtattgactgatcttaatcacaacaatcaaactgattttgtgctaagcagcagagcctttgcgggcatggctcaaaagggtatgggccaacaaatactgaagcttggcattgctgaaattgaatacaagagagtaccttgtgattacaaaaatcagaatttggccgttcgagttgaagaatcaagcaagaagcctgattacttggcaattaaacttttgtatcaagggggacaaacagagattagtagccgtgatgtggctcaagttgggtcttca

SEQ ID NO: 275982 - DNA, 390 bp, Glycine max
  unsure (1)..(390): unsure at all n locations
atcgaggagggtattttcgaggtgaaggccactgctggtgatgctcacttgggaggtgaagattttgataacagaatggtgaaccattttgttcaggaattcaagaggaagaacaagaaggatattagtggaaatgccagagctctgaggaggttgagaacagcatgtgagcgggcaaagaggactctctcttccactgctcaaaccaccatagagattgattccttgtacgagggtattgacttctacacaaccattacccgtgcccgttttgaagagctaaacaagaacaacatcatggacggtactcttatccatcttggcatcccgcaaacacttctccacggtctccatgcacttnctgaataaatccatgtttaagcttttaaa

SEQ ID NO: 275983 - DNA, 330 bp, Glycine max
cccatactccatggaatggactggtttggccaataaattactgagtaagggcaacgatattctggttgcgattatgctagttttgatggtttgattaccaagcaagttatgagcaagatggcagaaatgatataacagtctttgtggtggtgatggaaaattgatgcgtgaaaggacacacctgctgttggcttgttgttcaaggatggcaatttgtaagaaagatatttggagagttgaatgtggaatcccttctggatttccgctcacagttatttgcaatatcatttttaatgagatgctcattatatatagctatgaaaaattact

SEQ ID NO: 275984 - DNA, 409 bp, Glycine max
gtgagttggaccagtcactagcttctgcagtcaatcaagcaactggccgtcttcgtttttgttggagtaatgtctgcttacacatgttcactctggattttctgaatcaagtggcaaatggccttgaaaaagacagcatttatcatcttgcagagaagaaaataccttccatacatggatatacaatgggattaaaacttgaacagtttatatttgatgcatttccatatgctcctacaactgcactttttgaggtgttacgggaggaggaatttgcaccagtgaaaaatgcaaatggatccaatgttgacactccagacagtgcgaaactacttgttcttcgactccatactcgttgggtagttgctgcaggtggcttcttaacacattcagtgcccttatatgcaac

SEQ ID NO: 275985 - DNA, 420 bp, Glycine max
atttaatccaaacccttgttctgatgcatggagtttggaatggctgaagcgtaccggatttcattgtgatatcatttgtgtcactggatggactgccaccccaatgcaggatgttcaggttacaattgattggtttatttcttctcaggaatgtgttcccaggacctattgtgttttaaatccacaaaatcctcttgtgttaaataggtggatggggaaactgactttcccccagggcacttcccgaagtgttaaaagaatgcctctttctatatgggggggagctggtgcaaagaatgctattctcataaatatgccaaatgctgttctttcaatgtggaaatattttgttggagatctcgtctttgaagtttctaagatgacttctccctacattaaatgtacaatacttttcttcat

SEQ ID NO: 275986 - DNA, 450 bp, Glycine max
gaaatatttttcgaaactaattttgtggagatctgtcggaggggaaagcaaataattatcctctttccattcattcgctgttcacttggttctggtgagcgcagcagaggggaagaaagaagctgatgagaggagctcgttggatgaatatataatataaattggtttgtttgatgggcaacacttgccgcggatctttgaaaggtaaatattctcagggcttgagccagcccgaagaccattcaaagcccaccaccacccattctgatccctcctccgaccacccctctaccaagcaatctgcagaaaactacaacaacaacaactatcttcccttcaacgccaagagagagtccatcatgcgccgcggcctcgacaaccaagcctattatgtcttgggccataagactcccaacattcgtgatctatacactcttggccgtaaattgg

SEQ ID NO: 275987 - DNA, 443 bp, Glycine max
cagcaattcacactggtctttgcttctcgttactcatttgtcacctaactttctattcttctcagtctcagatcagaaccttagccatggcagcgttccagaagatcaaggtcgccaaccccatcgtcgagatggacggagatgaaatgactagggttatctggaagtcaatcaaggacaagctcattttgcccttcttggagttggacatcaagtattatgacttaggccttccttaccgtgatgagaccgatgataaagttacaattgaaagtgcggaagcaactctcaagtataatgtggcaattaagtgcgcaactattactccagatgaagctcgtgtgaaggagtttggtctgaagtcaatgtggaagagtccaaatgggacaattaggaacattttgaatggaactgtcttcagagaaccaattctttgcaaaaac

SEQ ID NO: 275988 - DNA, 445 bp, Glycine max
ggatgggctggtatagctgcagaggttttgatgttgaaaccggtaatcatatatcacttgaagaattttttcttggtgaagactgaaaaggatagggaagaggctatggatcctgggagtattggcttcaacactggagaacctcgaatacagttgtactttttgctgggtctagtctatgcttcagttacacctactgttcttcctttcataatagttttctttgggctcgcctatgttgtgttccgtcatcagattatcaatgtttataatcaagagtacgagagtggtgcagcattctggcctgatgtccattttcgtgtcattattgcactgatagtgtcacagatagttctgatgggactccttaccactaaagaggctgcttcatcaactccatttctaattgtactcccagtactgacgatatggttccatatatact

SEQ ID NO: 275989 - DNA, 447 bp, Glycine max
gtggaggagaacaaggctacaattttggagctacgttatcgaacaaatgtgggtgagttgcttgggcatctgcgcaagaggctgccatggggtgatgcaaaagttgccaagcaacttgttgatgcaaaactatatgaactacttggtgatcggacagcagctgatgatgaaaagccttctagaaagaagaaggagaaacctgcaaaagtagaggataaggcagcacctgttgctactcctgaaaagtcacctgaagaagaccttaatccatttttaatattccctaatccagaggaaaatttcaaggtgcatactgaagtgccttttagtgatggtagtattttgagatgttgcaatacaagggatcttcttgacaaacacttaaaagcaacaggtggaaaagtcttgacccgctttccacccgaacctaatggatatttgcatatt

SEQ ID NO: 275990 - DNA, 329 bp, Glycine max
  unsure (1)..(329): unsure at all n locations
cacatatcatcatacttagatagtcagatacatcacccaataggtaaattaaatacatgctagcactttaacagtactcctttctctaatatctctctcatattttcctttctgcggatattcagctaattaaactaagtcactaagatgactgagggaaagctagttgaagctgcagaagctcataagacacttcaggatttcgatcctccaaagaagcgcaaaaggaacaagtatgcttttgcttgtgctatgctggcctccatgacttccatctngcttggttatgatattggagtgatgagtggagcagccatatacataaaaag

SEQ ID NO: 275991 - DNA, 262 bp, Glycine max
gaactgtaagagtctcaaatatctggttgatgagtgtccttgggcgtttgtgaactagtatgtaatatttaattcacttaaataaagcgcattactatgtgcaatgagtgtgtttaaatataaaaaacaaaactataaaaactactagaaaaacaaacaaaaaaaaaaagaaaaaaaaaacaaataaaaagaagaaggaaaaacacagaaaaaaaaaaaggggggggccccccactagttacttcttaaacccgacaattaa

SEQ ID NO: 275992 - DNA, 265 bp, Glycine max
  unsure (1)..(265): unsure at all n locations
ctcnagcctaattcggctcgagctcgagccgtcctacagggggataaaatcgaactttcggcagacaaattcattttacgttccccactccactatattcccatccccacacacctctcattgtactcttactgctttcaaaagttgtgacaaatccatgaccgtccatgcctcatctactgctacaccaccaaaaccctcacctactccgacgacaatctctacgatcgccgcatgtgcaccggcctgcacaaaatcatcatct

SEQ ID NO: 275993 - DNA, 418 bp, Glycine max
ccccccttctctctctctctctctataaacttctctctcgtcggctctttccttctcactctctctctctctcaccccactcactcactctcttactctctgcatgcttctgcttcttctctcgctctgattccgcggaatcaattcaaatcagcttctgggaatcgaatctcagatctcggagatcagaatggtggatccaactggaaaaggatcggaggttgaagttgaggactcaaactcaaaccctaacgctccttcctcagggaacagtccgagcagcaacaatgagcagaagaaaacctgcgccgattgcggcaccaccaagacccctctctggaggggtggtcctgcaggacctaagtctctgtgcaacgcgtgcgggatcagaagcaggaagaagaagagagcgatcctg

SEQ ID NO: 275994 - DNA, 429 bp, Glycine max
gcggaatgataaaccggattgctggcgtgttcgcgaggagaggatacaacatcgagtcgctcgccgttggcctcaatgaggacagggcgctcttcaccatcgtcgtgtcagggactgataaggtgctgcgccaagtcatggagcagcttcagaagctcgtcaatgtcttaaaggtagaggatctttcgagggaaccgcaggtggaacgtgaactgatgctcataaaagtgcatgcggatccgaagcaccatgcggagttgaagtggttggtggacatcttcagagctaagattgtggatatctcgcaacattcggtgacaattgaggtcactggagatccagggaagatggctgcggttcaaagaaatttcagcaagtttggaattaaagagatagccagaactggaaagattgcattaagaagggaaa

SEQ ID NO: 275995 - DNA, 279 bp, Glycine max
ctcgagccgtcaattttgaggcttttccccacaagctggtgcagttgggagagattcaggaaaaagttgtattgaaattttcacaagaggaatttcttacagcttggtcaactcaggtgcgtcctgcaacaactctgttggctgatgggtgtccatatttgtatgcaatggtgcatgatagttcagtgtctacaataccaggtgattttgtcattggtgtcatgttgacaaccatatacaatatgtgtgcatatgggctcaatcctggcatttcaggtt

SEQ ID NO: 275996 - DNA, 404 bp, Glycine max
gcaggtgattgatactggaattattactattctcgtaaaaattgtgaagaaaaagtctgatttgcctgtcagggagcggatatttctcctactagatgccacacaaacatcccttcgtggtgcatctggaaagtttccacagtattataatgcatattatgatttggtgagggctggagtgcagtttgctcaaagggatcaagtggtccaaccaaatattcctatttcacaacctagtaggactagtaatgtaccaaacagggagcaggcctcacctagacatgaagcagttgctcagccagcagagtcccagactgtccctgaatctagcattattcaaaaggctagcaatgcattagaaggactaaaagaggtccttgatgctgttgatgctcaaaatcctc

SEQ ID NO: 275997 - DNA, 199 bp, Glycine max
gcatgcacccccacgtaacgctcttacattccgctcgtgaaaaaaaatttttcaaaaaaaaaaaaaaaaaaaaaaaaaacaaggaaaacaaaaaaaaaaaaaaaaaacaaaaaacaaaaaaaaaaaactaaaatcaatcccaaaacttaccaacccacccataccaaccctttccctcccacatccttcctaccccttc

SEQ ID NO: 275998 - DNA, 428 bp, Glycine max
gtccatatttgtatgctatggtgcatgatagttcagtgtgtacaataccaggtgattttgtaattggtgttaagttgacaaccataaacaatatgtgtgcatatgggctcaatcctggtatttcaggttctcgtcttttgggcaccattcctcagtctatttcacagcaaactgtttggaatcaaatggcaacagtgagaacaccattgaattttgattctagcaagcagagcttttgtcaattttctattgaccttctcggtggaggaattttagtggacaaaactggagattggatcacacttatacaaaattctccaattagtaacttgttgagagttgctgcttggaagaaaggctgtttaatggttaagattgtgatgtctgggaatgcagcagtcaaaaggagtgattgggcctcattggta

SEQ ID NO: 275999 - DNA, 416 bp, Glycine max
cacaactcactaacatcacaacttctctctttctacacaaataactccttctcagtgtgagcagttgataagagagatgatgatcaacgtgaaggaatcgaccatggtgcggccggcggaggaggtggcgcggcgggtggtgtggaactccaacgtggacctggtggtccccaatttccacacgcccagcgtctatttctataggtccaatggcgcccccaactttttcgacggcaaggttatgaaggaggcactgaccaaggtgctggtgcccttctacccaatggctgggcggctcctgcgagatgacgacggtcgcgtcgagattgactgcgacggtcagggggtgcttttcgtggaggccgacactggcgccgtcatcgacgatttcggcgatttcgctcccacccttgagc

SEQ ID NO: 276000 - DNA, 356 bp, Glycine max
  unsure (1)..(356): unsure at all n locations
ctcgcgaattcagtctcgattgaaattaaaatataccgcgatcacaggttgccgcaccttaagacgggatacaaacgcaacccctacacccatctatacaaatcctacatttactacaactacatcctgatcaattccttaattcaccaatcattcccttctgcgagacctacaaaccccccacgctcctccatccccgtactccgtctccgtcgccccttcccccttcatcttctccaacctccctccaccgccaccccttcctanatcctccgtctccgccgtccctccgccccctcccccgccgcgcgcctaccatctcttcttcttattcgtctcctcccccaacactctca

SEQ ID NO: 276001 - DNA, 440 bp, Glycine max
aagaggggctgagggagaggggatggaggacattgaggatttgctgattggaagtgcaactccaccgggctttcgtttgccattagcagcggctgttggcgtggggacaaagcggaatcaactctcttcttcttcgctttcgccttcacctgcaatccctggcactcagactatcttcataaagacctttggctgctctcataaccagagtgacagtgaatatatggctggtcagctttctgcttttggctattcattgagcgatgatcctgaccatgcagatctctggctcatcaacacttgcacggtcaaatccccaagtcaatctgctatggataccatcatatcgaaaggaaaatcttcaaataaaccactagttgttgctggttgtgtccctcaaggaagtcgggatttgaaagagctcgaaggaatcagcatag

SEQ ID NO: 276002 - DNA, 428 bp, Glycine max
aagaagtagtggagtgatcctggttgggtgtgaaaaatgtcggacagcgataccataccccttcacccatcttcccaatccgacattgacgagatcgagaacctcatcaatgccagcgttcaccaatcagtcccttcggcgagacctcccagtcccccacgcgcctccatccccgtctccgtctccgccgccccttcccccttcatctcctccaacctccctccaccgccacccctccctaaatcctccgtctccgccgtccctccgccccctcccccgccgcgcgccgacatctcctcctccgggttcggctccgcccccaacacgctcactgagcccgtctgggacaccgtgaagcgcgatctctcgagaatcgtgagcaatctgaagctcgttgtgttccccaaccctttccgcgaggaccccgg

SEQ ID NO: 276003 - DNA, 417 bp, Glycine max
gggtgtttgagttggctcgattcacaaccgagtcatagtggggtgtttctgagtttcggaagcatggggagattctcgaggactcagttgagagagattgctattgggttggagaagagtgagcaaaggttcttgtgggtcgtgaggagcgagttcgaagagggtgactcgggggagccaccgagtttggacgagttgttgccagaagggtttttggagaggacaaaggaaaaggggttagtggtgagggactgggccccacaggcggcgatactgagtcatgactcggtgggtgggttcgtgactcactgcgggtggaactcggtgttggaggcggtgtgtgaaggtgtgccaatggtggcgtggcctctctacgcagagcagaagctgaataaggtgatcttggtggaggaaatg

SEQ ID NO: 276004 - DNA, 433 bp, Glycine max
gcttattctctcgcattccgtggagatctagtgcttctgctggaagacctcgctgaaaattagggtttcgattcggaggtagacgaagatgttcggaagggctccgaagaaaagcgacagcaccaggtactacgaaatcctcggcgtttccaagaacgcttcgccggatgacttaaagaaggcttacaagaaagccgccattaagaaccatcctgacaaaggcggggatcccgagaagtttaaagagcttgctcaagcctatgaggttctgagtgaccctgagaagcgcgagatttatgatacatatggagaagatgctcttaaggaaggaatgggtggtggtggcggtggccatgatccatttgatatcttcagttcattctttggtggaagtccgtttgggtcaggtggtagcagtagaggacggaggcag

SEQ ID NO: 276005 - DNA, 422 bp, Glycine max
tagggccgaagcccatccctatgaagcacgtgggcatgcctccgaagcccacgaagctatacagaggggttcgacagaggcactgggggaagtgggtggctgagattagactcccgaagaaccggaccaggctatggctgggaaccttcgacaccgccgaggaagccgctctggcgtacgacaaggccgcgtacaagctccgaggtgacttcgccaggctcaacttccccaacctccgacaccagggttcctccgtcggtggtgacttcggggagtataagcctcttcattccgccgttgacgccaagcttcaggccatttgcgagggcctggctgagctgcagaaacaggggaagaccgagaagcctccgaggaaaacgcgatccaaactcgcttctccgccagagaacgacaacaacaac

SEQ ID NO: 276006 - DNA, 422 bp, Glycine max
  unsure (1)..(422): unsure at all n locations
gtgactcgttcttcttcgtcgttatcttcttcttttgttgtttgtgtgtttgttttttctctcacctgaaaatgtcttgctgcggtggtaactgtggttgcggaagcgcctgcaagtgcggcaacggctgcggaggctgcaagatgtacccagacttgagctacaccgagtcaaccaccaccgagaccttggtcatgggagtggcaccagttaaggctcaattcgagagtgctgaaatgggtgttcccgctgagaacgatggctgcaaatgtggagctaactgcacctgcaacccctgcacttgcaagtgaggtgttggagagctaaagcttcaagcagaaatggcccttagaaataatgataaacactatatgtagtttcaaaacttcaaaattatgtagtatgtattatgtngcactctg

SEQ ID NO: 276007 - DNA, 449 bp, Glycine max
gacttggtgagtgtcactgctgaagagagaaccacgcagaactgacgcaatgggaagcacaagtttgcttcatctattacttggtgttgttttggctctgctgagtgtgtctcttgtggaaggagaagatgcatacaaatactacacgtggactgtgacatatggcattctttctccactaggtagtcctcagcaggtggttcttatcgatggtcagtttcctgggcctcaactagacttggtaactaatgaaaatgttgttctcaaccttgtaaacaagttagatgagccatttcttcttacttggaatggcatcaaacaaaggaaaaactcatggcaagatggggtattgggaaccaattgccccattccttccaactcaaattacacatacaagtttcaagtcaaggatcaagatggaacctacacatacttttcatcgacttcac

SEQ ID NO: 276008 - DNA, 447 bp, Glycine max
gctcctgctagtgcggctacggctgcagaggctgtaagaggtgcccagacttgatctacactgagtcaaccaacaccgagacctaggtcatgggagtggcacctgttagggctcactttgagggtgctgaaatgggtgtgcccgctgagaacgatggctgcaaatgtggaccaaactgctcctgcaacccctgcacttgcaagtgaggtgttgggagagcaagcttcaagcatagatagcccttaattaggaataatgataaactattaatgtgtagctaagaacttatgtattatgtctgttatggttttcgtgcactctggtgttttgtgttaaacaaacatccttagaataaagtggtcatgtcttgcctttcagcaagttcaagtgttttggacttgtgatgggtgtgttaagctcatggttgcttcctttttttttttttta

SEQ ID NO: 276009 - DNA, 277 bp, Glycine max
  unsure (1)..(277): unsure at all n locations
cggtgacccattcattggaagcctggaaaccccagttacatccagccctttgatcgcatggtacttgtccaacctgcccgcatacagaaccgcagtgagcccactactaagagggatcgaggtgggcctggcccacggataccttctggtgggcccattcgtgaaggccgggcctcttaggaacaccgagatcgccgggcaagcgggctctctggccgccggtgggcttgtggtgatcctcagcctttgcctcacaatctntgggatttcatccttc

SEQ ID NO: 276010 - DNA, 219 bp, Glycine max
  unsure (1)..(219): unsure at all n locations
agccatcatcatgggagcagtgattctcccagatctcggcaccgagattttgattccggtctgcgccatcattggaatagggttcgccctcttccagtgggtcctcgtctccaaggttaagctctccgctgccagagacgcttcccctaacgccgccggcaaaaatggctacaacgattacctcatcgnagaagaggaaggcctcaacgatcacnacgt

SEQ ID NO: 276011 - DNA, 273 bp, Glycine max
gtcacaacccaagcctccgccgcgattttccggccatgtgcctcgaaatcgaggtttctgaccggctcttccggtaaactcaaccgggaagtgactatgaggccaatggggtgccctccttctgcctctttcaaggttgaagccaagaagggagagtggttacctggcttggcctccccaacttacctcaatggcactcttcctggtgacaatggatttgaccctctgggactagctgaggacccagagaacttgaggtggtacgttcaagcc

SEQ ID NO: 276012 - DNA, 277 bp, Glycine max
  unsure (1)..(277): unsure at all n locations
agaacaagtagttgagaactaagaaggagaagcaaatggcttcctcaatgatctcttccccagctgttaccactgtcaaccgtgccggtgccggcatggttgctccattcactggcctcaagtccatggctggcttccccaccagaaagaccaacaatgacattanctccattgctagcaacggtggaagagtgcnatgcatgcaggtgtgggccaccagttggcaagaagaagtttgagactcnttcctacctgccagaccttgatgatgcacatt

SEQ ID NO: 276013 - DNA, 270 bp, Glycine max
ccttattttctttccctagtcaaggagattcatctctgcagcaggttgttttagaaaagaaaaaatgctgaagatttgctgcattggggctggatatgtggggggtccaacaatggcagtcattgcactgaaatgcccctcaattgaagtggctgttgttgacatctctaaatccaggattgcagcatggaacagtgaccagctccctatctatgagccaggccttgatgatgtggtgaagcaatgtcgtggcaagaaccttttcttcag

SEQ ID NO: 276014 - DNA, 269 bp, Glycine max
  unsure (1)..(269): unsure at all n locations
cnagatttgaaggttcgttatgctccacatctcccacttgtcttgcgcggtcttacatgcaaatttcgtggaggactgaaaactggcattgttgggagaacaggaagtggtaaatccactctcatacaaacacttttccgaattgttgagcctactgccggccaagttatgattgacagcatcaacatctcttcaatggacttcatgatttgaggtctagactaagcatcatcctccagattccacaatgtttgaagggaccgtgagaa

SEQ ID NO: 276015 - DNA, 276 bp, Glycine max
  unsure (1)..(276): unsure at all n locations
ctcgggctcttgcatcgatgaagaacgtagcgaaatgcgatacttggtgtgaattgcagaatcccgtgaaccatcgagttctttgaacgcaagttgcgcccgaagccattaggccgagggnacgcctgcctgggtgtcacacatcgtttccccaaacgcaaacatgtaacaatgttgctgcgcggggtgtatgctgacctcccgcgagcaaccgcctcgtggttggttgaaatctgggttcatgggccgactttcgccgtgataaaatggtggatg

SEQ ID NO: 276016 - DNA, 275 bp, Glycine max
gccttatgggactacgttttcaacagttgcaagatctatggaatcaagcagatgctgatggaaatggtgtcatagactttgaagaattcaagcagaaaatatggaattctacatgtccagagcatgtgttggaaaatctgaatggttgcacggaagattgtaacacagaacaggagcaagaagctattggttttaaggtgaagaatgcaatgctgtatccgcgtgaagtggagaaaggactatggccagaagattattctctttctgatcatgct

SEQ ID NO: 276017 - DNA, 269 bp, Glycine max
  unsure (1)..(269): unsure at all n locations
ctcttgcaaaacctaattttcatttcttcnctcaaatttcaaaatgcgtgagatgccttcacatccagggtggccaatgcggcaaccagatcggcgccaagttctgggaggtggtttgcgcggagcacgggatcgaccctaccggaaggtacggtggggactcggagttgcagctcgagaggatcaatgtctactacaacgaggccagttgcggtcggttcgtgcncgcgcgcggttctcatggacctcgnancgggcaccattggaca

SEQ ID NO: 276018 - DNA, 274 bp, Glycine max
  unsure (1)..(274): unsure at all n locations
gcaattgaagttgaagtcttggcccttctctcttcaactccaaacacaagacatcatcatccatggctgcctccgtctccactgtcggagctgtcaacagagctcttttgaacctgaatgggtctggacctggggtttcagctcccagttcatccttctttgggagcagcttgaagaaggttattggctcaagggtccccaacacaaagatttccnctggaagcttcaagattgttgctgtagaagagaagaaaganattgaagaganccagcc

SEQ ID NO: 276019 - DNA, 269 bp, Glycine max
  unsure (1)..(269): unsure at all n locations
caattgaagttgaagtcttgcccttctctcttcaactccaaacacaagacatcatcatccatggctgcctccgtctccactgtcggagctgtcaacagagctcttttgaacctgaatgggtctggacctggggtttcagctcccagttcatccttctttgggagcagcttgaagaaggttattggctcaagggtccccaacacaaagatttcctctggaagcttcaagattgttgctgtagaagagaagaaagagattgnagagaccca

SEQ ID NO: 276020 - DNA, 261 bp, Glycine max
  unsure (1)..(261): unsure at all n locations
ttaaaaatggaagacttgctatgtttgccatgcttggtttctacttccaagcttatgtncactggagaaggtcctgntgagaaccttgcaaaacatctcagtgacccttttggcaacaacttgctcactgtcatttctggatctgctgagagagctccaactctctaaatcattcatcttcatgtttttctccaatcttacttaatgtacaatacatatcactgagatattaaggcattggctttgttccttggaactcaa

SEQ ID NO: 276021 - DNA, 270 bp, Glycine max
ggggagaagaggtcgagtttcacagcagcaatggtgtacgtcaaggctcagaaatcaaaagcctacttcaagagatatcaagtcaagttcaagagaagaagagagggaaaaaccgattaccgtgccaggattcggttgattaatcaggacaagaacaaatataacactccgaaataccgatttgttgttcgctttagcaacaaggacattgttgcacaaataatatctgctagcattgctggcgatattgttcttgctgcagcatatgca

SEQ ID NO: 276022 - DNA, 268 bp, Glycine max
gaagattgttgacgtgctgcttgagcaaaacattgttcctggtattaaagtcgacaagggtttggtgccccttgcaggttccaacgacgagtcatggtgccaaggtttggatggtctagcctctcgctcagctgcatactacgagcaaggtgcccgtttcgccaaatggcgtactgttgtgagcatccccaacggtccctctgctctggcagttaaggaagcagcctggggtctggctcgctatgctgcaattgctcaggacaatggg

SEQ ID NO: 276023 - DNA, 276 bp, Glycine max
  unsure (1)..(276): unsure at all n locations
cgnaggggactacactcatcagatctctaacattataagcnaacgcttcctgcaccacaaactgtccttgctccctttgtgaanatcctggatgaagantttggaattgtgaagggaaccatgacaaccacacattcctacacaggagancagaggcttttggatgcttcacaccgtgacttgagaagagccanggctgcagcactgaacattgtcccaaccagcactggagctgccaaggctgtgtctcnagtgttgccacagctgaagggcaag

SEQ ID NO: 276024 - DNA, 251 bp, Glycine max
  unsure (1)..(251): unsure at all n locations
gaatcagtgaacgaggggcaccctgacaagctctgtgaccagatcctccgatgctgtgctcgatgcatgcttggagcaggaccctgacagcaaggttgcctgtgaaacctgcaccaagaccaacatggtgatggttttcggagagatcacaaccaaggccaacgtggactatgagaagattgtgcgtgacacatgcaggaacattggttttgtctctgatgatgttngtcttgatgctgacaactgcaagt

SEQ ID NO: 276025 - DNA, 268 bp, Glycine max
  unsure (1)..(268): unsure at all n locations
cacactatagcaataganacatttgcttttgaaaaacccctcacttcttcatcactacactagctagccacatacaatgtcgaccaaatttaaggtgtttcgtgaattcacaagcgatgactcattcctaaaccaagttatccctgaaaacatcaccgaattccaagtgactctgtccctcgctagagactacgatggcaacaactcaaccaacggaaagttcattccttactgggacactgaaaaggtcactcccgaagtgataaaa

SEQ ID NO: 276026 - DNA, 267 bp, Glycine max
  unsure (1)..(267): unsure at all n locations
cggntcganagaagattgggatgacaaagaatatattcctgatcctgaggataagaaaccagaggggtatgatgacatcccaaaagagctcccagaccccgaagccangaagcctgaaagattnggatgatgaggaagatngtgagtggacaccccctaccatgccaaccctgagtacnaggcccatngaatggcagagaaaatcaagaaccccaatatnnnggaaaatgganggcaccattgattgataanccagatttcanggat

SEQ ID NO: 276027 - DNA, 267 bp, Glycine max
tgaagggtggtagcagaaaaaaatggactcacatctccccgaccacttcaagtgtccaatttccctcgaaataatgtcggaccctgtcattctctcttcgggtcacaccttcgaccgttcctccatccaacgttggctcgacgcgggtcaccgaacatgtccaattaccaaactacccctccccgaccaccccgccctcatccccaaacacgcgctgcgaagtttaatctccaactacgcattcctctcacttctccaacaatacgt

SEQ ID NO: 276028 - DNA, 267 bp, Glycine max
  unsure (1)..(267): unsure at all n locations
tgaaagatgcttactgtttgctcaactttggagacagtatcacaactgaccacatctctccagctgggcagcatacataaggacagtcctgcagccagataccttatagaacgtggggttgatagacgggacttcaactcctatggaagtcgccgtggtaatgatgaggtgatggcccgaggaattttgcccaatattcgcattgtcaacaaatttttggaatggagaagttggacctaaaactattcatattccttctggggngaa

SEQ ID NO: 276029 - DNA, 269 bp, Glycine max
caaaggttgctgtaggagataagattgcagtagtgctaagtgctaacacctgcagtgaacaatggcctctgcatcagcatctctgctcaagtcttcacttgttcttgacaagtctgagtgggtgaagggacaaacccttcgccaaccttctgcatcagttgtgagatgcaaccccaccaccccatcaggcctcaccatcagagctggttcctatgctgatgagctcgttaagaccgcgaaaacagtggcttcaccagggaggggtattt

SEQ ID NO: 276030 - DNA, 269 bp, Glycine max
  unsure (1)..(269): unsure at all n locations
gagctgtcaacggagctccactgagcttgaacagctctggagctggagcttcagttcccagttncagccttctttggcaccagcttgaagaaggttattgcctcaaaggtccctaacgtcaagatttcttctggaagtttcaaaatcgttgccgcggaaaaagagattgatgagnaacaacagacagncaagggcagatggaaaggtcttgcctatgatgtttcagacgancagcaagacatcacaagagggaaggtttngttgattcc

SEQ ID NO: 276031 - DNA, 269 bp, Glycine max
  unsure (1)..(269): unsure at all n locations
cngcaattcactctgtacaattcttcgttcgttctctgcagttatatcctttttgagcttcaatggcggacgtgaaaccttncgctttccagngctgagatcaaccagcttctaagtcncatcatcaacacattctacagcaacaaggagattttcttgcgtgaactcatcagcaatgcttctgatgctttggataagattcgattcgagagcttaaccgacaagagcaagctcgatgctcagccagagctcttcattcgtcttgtgcc

SEQ ID NO: 276032 - DNA, 268 bp, Glycine max
gacaaacaagtagttgagaactaagaagaaggaaatggctttcctcaatgatctcctccccagctgttaccaccgtcaaccgtgccggtgccggcatggttgctccattcaccgggcctcaaatccatggctggcttccccacgaggaagaccaacaatgacattacctccattgctagcaacggtggaagagtacaatgcatgcaggtgtggccaccaattggcaagaagaagttcgagatctttcctacttgccagacctcgatga

SEQ ID NO: 276033 - DNA, 266 bp, Glycine max
aagttaaaagtcttagccttccctacaactccaaacacaaagacatcatcatccatggctgcctccgtctccactgtcggagctgtcaacagagctcttttgaacctgaatggttctggagctggagcttcagctcccagttcagccttctttgggaccagcttgaagaaggttattgcctcaagggtccccaacagcaaggtttccggtggaagcttcaagattgttgctgtagaagagaagaaagagattgaagagacccagca

SEQ ID NO: 276034 - DNA, 268 bp, Glycine max
  unsure (1)..(268): unsure at all n locations
gacntaacaacagcacaaagcgggttactgtctgttcaagntanccatctntgctctctctttcttagtgcctccttgcnagaagntanaatggcccaagnaaactttcctattcacatctgaatcagtgancgaggggcaccctgacaagctctgtgancagatctccgatgctgtgctcgatgcatgcttggagcaggaccctnacagcaaggttgcctgtgaaacctgcaccaagaccaanatggtgatngttttcggagagatc

SEQ ID NO: 276035 - DNA, 263 bp, Glycine max
  unsure (1)..(263): unsure at all n locations
gctgcacaanctcttgtatcatcatcatctcttaccgtctcagccgaggctacnatacnaagtcttggaccaagatcactccaatctccagttggcttctcaagaaaagcctcctttcntgtaaaggcagctgctactcccnntgtcaagcaaggatcagacagacctttgtngtttgcncaaagcaaagtctttcctanttggatggcngcnttccgggtgnctatnganttgagcctcnnggacattcggaanctgaanga

SEQ ID NO: 276036 - DNA, 268 bp, Glycine max
  unsure (1)..(268): unsure at all n locations
gcaagctagaacctacagatggaatctgacagcaaatgcngctaggcntaatccacaagggtcattccattatgggaagattactcctacaaaagtaattaaggtggccaattcagcacctttgatcaatgggaagctccgttatgctgttaacagtgtctcnatatggttaaccctgacaccctctcaagcttgctggattacntcaacattcccggagtcttcagtgtgaatttactcccaaaatctcctcaaacggtctaggata

SEQ ID NO: 276037 - DNA, 269 bp, Glycine max
  unsure (1)..(269): unsure at all n locations
agaaaaacaagtagttgagaactaagaagaaggaaatgggcttcctcaatgatctcctccccagctgttaccaccgtcaaccgtgccggtgccggcatggttgctccattcaccggcctcaaatccatggctggcttccccacgaggaagaccaacaatgacattacctccattgctagcaacggtggaagagtacaatgcatgcaggtgtggccaccaantggcaagaagaagttcgagactctttcctacttgccagacctcgatga

SEQ ID NO: 276038 - DNA, 266 bp, Glycine max
tcaccaaagccttcctagaacgaaaaaaaaaagaagagcaattttccctcaccaaagaagaagaagcaaacaatggccgatcaacttaccgatgaacagatctccgagttcaaggaagccttcagcttgttcgacaaggacggcgatggttgcatcacaaccaaggagcttggaactgttatgcgttcattggggcaaaacccaactgaggcagagctccaggacatgatcaatgaagtggatgctgatgggaatggtaccattga

SEQ ID NO: 276039 - DNA, 264 bp, Glycine max
  unsure (1)..(264): unsure at all n locations
gcaaaataaaagcctggttatacgataatatgggttctagggntgattatgatnccccaggtcattggtgtactacaatgctttacagtgctgatggaagtagactgttttcttgcggaactagtaaagatggagagtcatttcttgttgaatggaatgaaagtgaangagccattnagagaacatacaatgggntcagnaagaaatccactggntttgtgcagtttgacacaacccaaaatcgntttttggctgctggtgnag

SEQ ID NO: 276040 - DNA, 263 bp, Glycine max
gctccaatagcgtatatttaagttgttgcagttaaaaagctcgtagttggaccttgggttgggtcgatcggtccgcctccggtgtgcaccggtcggctcgtcccttctgccggcgatgcgctcctgtccttaactggccgggtcgtgcctccggtgctgttactttgaagaaattagagtgctcaaagcaagcctacgctctgtatacattagcatgggataacaccacaggattctgatcctattgtgttggccttcgggat

SEQ ID NO: 276041 - DNA, 275 bp, Glycine max
  unsure (1)..(275): unsure at all n locations
gagaatggctcccaagggtttaacctttctggctgtgttaatatgcgtttcagcactgtcactgagtccttctgtngcgggggaagggcaaaataatggccttgttatgaacttctacaaggaatcatgccctcaggctgagacatcatcacagaacaagtcaagcttctctacaagcgccacaagaacactgctttctcctggctcaggaacatcttccatgactgtgctgttcagagttggtgcttcactgttgctggactccacaagaagga

SEQ ID NO: 276042 - DNA, 277 bp, Glycine max
  unsure (1)..(277): unsure at all n locations
cnggctcagangnanaganaagcaaccacaaatngttctcacatccactgccacacacccagatgaacaagaccagagcctaaactatacttttgcttccagatatgtgcgtgaacctattccaaagttcaagatgccggaaaatccataccaaaagatgctgcttatcagataataaacgatgagttgatgttggatggtgcaccaaggctcaacttggcctcgtttgtgaccacttggatnngcctgagtgtgacaagctcataatggcttcact

SEQ ID NO: 276043 - DNA, 271 bp, Glycine max
agcaaacctatttggagaaacatcttccttcgttaccaaccttgggagacaggcaagatgcattcagcgtttattttgaatgggataatgattttggaattccaggagcattttacatcaaaaattttatgcaatctgaattttcctcgtgagtgtcactcttgaagacattccaaatcatggaaccattcactttgtttgcaactcatgggtttacaatgcaaaaagttacaaaaggggtgatttcttgctaataagacatatctcccaa

SEQ ID NO: 276044 - DNA, 272 bp, Glycine max
gaaaatgaagaacaatgccattgtttgcaacattggtcactttgacaatgagatcgacatgcttgggctggagaactaccccggcgtgaagcgcatcaccatcaagccccaaactgacagatgggtcttccctgagacaacaccggtatcattgtcttggctgagggtcgattgatgaacttgggatgcgccactggacaccccagttttgtgatgtcctgctccttcaccaaccaggcatgctcagcttgagttgtggaaggagaagagta

SEQ ID NO: 276045 - DNA, 269 bp, Glycine max
gtttcttacaaggctctactctactgcttcaccttctgctctagaaaattcagtggtgatacatggcttcggctactctctctgtagccaaaccagcccttcaggcaaatgggaaaggcttctctgaattctctggctccgcagctcatcaggcttccttcccttttctagaaaatcttcagaggatttccattctgtcattgccttccagacctatgcagttggaagcagtggaggtcaagaagggtgtgacagaagcaaaactgaag

SEQ ID NO: 276046 - DNA, 271 bp, Glycine max
  unsure (1)..(271): unsure at all n locations
ggcaganagcaagctcatcctagagttttaaaaatggcagcagcctacctccatggctctctcttccccatccttggctggcaaggccgtgaagctgggcncatcagcccccgaagtcgggagggtcagcatgaggaaaccgtcaccaagcaggcctcctccggaagcccatggtacggcccagaccgcgtcaagtacttgggcccattctctggcgagccnccgtcctacctcactgngagttcccaggtgantacggctgggacatgct

SEQ ID NO: 276047 - DNA, 270 bp, Glycine max
gcttcggctactctctctgtagccaaaccagcccttcaggcaaatgggaaaggcttctctgaattctctggcctccgaagctcatcaggcttccttcccttttctagaaaatcttcagaggatttccattctgtcatgccttccagacctatgcagttggaagcagtggaggatacaagaagggtgtgacagaagcaaaactgaaggttgccataaacgggtttggaaggattggaagacttcttgaggtgctggcaggtcgcaaagact

SEQ ID NO: 276048 - DNA, 269 bp, Glycine max
  unsure (1)..(269): unsure at all n locations
aacactcataacacaaagcacaaagcaaagctcatccttgagttaaaaaatggcagcagcttcttccatggctctctcatccccatccttggctggcaaggccgtgaagctgggcccatcagccccagaagtgggagggtgagcatgaggaagaccgtcaccaagcaggtctcctcaggaagcccatggtacggcccagaccgagtcaagtacttgggcccattctctggcgagcncgtcctacctaaccggtgagttcccaggcgact

SEQ ID NO: 276049 - DNA, 267 bp, Glycine max
  unsure (1)..(267): unsure at all n locations
tcatanatgcttcaggagtacaaggccagttggtggatattttgcagaatcagtcactgatctcagggaattacaggcttttgtacgtatttttggtggttatggcgtagacaggttagacagaatgctaaaaaacacacggctgctcttttaaattgcattgacacttcactacgctcaaaccgagatgtgctagaagcagttgctaccagtctgcatgctggtgatagaatgaaagagaagcttctgtgaagcaaatagttgatc

SEQ ID NO: 276050 - DNA, 261 bp, Glycine max
  unsure (1)..(261): unsure at all n locations
cgtggttccaatgcctacacatttacagttgatcaaggcaagacgtanagattccaggatatcaaatgtgggactcacttcttccatcaactttagaatccaagggcataaaatgacaattgttgagtggaagggacccacactctccaaaacatttatgattcacttgatgttcatctagggcagacttactctgtgttggttactgctgatcaaccaccccaagatacctcattgttgtcacaacacgattcacctccc

SEQ ID NO: 276051 - DNA, 205 bp, Glycine max
cttattcctttctacctctcacacccttctcaatgaccaacaacaacgacaacatcgccgtgacagatctccttccgccctcaatgaagagaatcgcgccgacctagtcaatgctctcaagagcaagattcagagtctggctggggctcattctgatgttctggagactctaccccaatgtcaggaagcgtgttgaatctcttag

SEQ ID NO: 276052 - DNA, 267 bp, Glycine max
  unsure (1)..(267): unsure at all n locations
cnataagctagtttatcgtgaggngaatatgaagttgtttgtttnctttgttgctgcagtagttttggtagcatggccatgccatggcgcaggctaccaaaggttccctctccgaatgaaaactggctatggtagcgttcttcggaggtaaaatgcgcaagttttaggcttgctgtggaagcacacaacatccgagcctttaaaaccattcctgaagagngcgttgaaccaaccagactaaattaatggcgaacnatttagattcgt

SEQ ID NO: 276053 - DNA, 268 bp, Glycine max
  unsure (1)..(268): unsure at all n locations
ggacaattaccttggtgagctcaacagcacaagtgaacaagaaacaaagatacgcagtgaacagtgtttcattcacacctgctgacactcctttgaagctagcagattactttaacattggagggattttccaattggaagcatcccagatagcccttctggtagacccatgtatcttgacacctcagtcatgggtgccgactttcgagccttcgtcgaggtcgtgtttcagaanagaaaacatcatccagagctggcacattgatgg

SEQ ID NO: 276054 - DNA, 224 bp, Glycine max
  unsure (1)..(224): unsure at all n locations
aacaaatacaaacngcatttattganacacgnnngnnnnnngcattcatggngttatgggtacacacaacataatattgcaaganaaggatagttctttcaggtaatccaaaatcacatccttatcgtactctttgcacgtctgcaactctaacaatcattctggagttggcaacaacattaaatatttnctcgtgctgagatgagangctatctttnngccta

SEQ ID NO: 276055 - DNA, 263 bp, Glycine max
  unsure (1)..(263): unsure at all n locations
anaatcttcaaagctgatgctgtacttcattttgggacacatggttcccttgaattcatgcctggaaaacnggtggggatgagtgatgtatgttaccctgacagtctgattgggaatattccaaatgtatttactatgctgcaaacaacccttctgaggccaccattgccaagcgcaggagttatgcaaacaccattagctatctgactcctccagcggaaaatgctgggttacaaaggtcttaagcagttaagtgagctcat

SEQ ID NO: 276056 - DNA, 265 bp, Glycine max
  unsure (1)..(265): unsure at all n locations
ccgattggaaacattgggaggccttatgatatggttgactgcaacttttgctgtcatgcagaacnggagagcggagaaccagcaagaattcgcatccaccatggggttactacttagctatgctctgaacatactagtttgcttactggtgtgctgaggcttgcaagtttggctgagaatagtttaaatgcagttgaacggattggcacttacatagatttgccctcggaggtccctctgtcatcgataataatcgccctcctcc

SEQ ID NO: 276057 - DNA, 265 bp, Glycine max
gccccctccacccctgagcttggtgttggaagggttagcatgaggaaaacagcctccaaaactgtttcctcaggaagcccatggtacggcccagaccgtgtcaagtacttgggcccattctcaggtgagccccatcctatctcactggtgaattcccaggtgactatggttgggacactgctgggctttctgctgacccagagacttttgccaaaaaccgtgaatggaagcatccactccagatgggccatgttggggagcctgg

SEQ ID NO: 276058 - DNA, 263 bp, Glycine max
cgagctgaacctgaaacagatgaagtatatgcacagataactttgcttcctgaagcagattcaaagtgaggtgaccagccctgatgatcctctgcctgaatctccgagggtcaagatccattcattttgcagacacttactgcttctgacacaagtacccatgggggtttctctgttcttcgaagacatgcagacgattgtctgcctccactggatatgtctcagcagccacaggcaagaattggttgcaatgatttacatgg

SEQ ID NO: 276059 - DNA, 263 bp, Glycine max
  unsure (1)..(263): unsure at all n locations
ggagaaccttgctgatcaccttgcggacccagtcaacaacaatgcctgggcctacgccaccaacttcgtccccggcaagtgagcatgaaagaaaaggatgacttgtggacttttgagagtttttagatttggtttngcgaagtatatgttattgcaatgtacttcagataatgtgaattatcttgtgtatcccaatccaacttaatgttacttgctttttacaaaaaaaannaaaancaaaaannggangaaaaagagnaaga

SEQ ID NO: 276060 - DNA, 264 bp, Glycine max
  unsure (1)..(264): unsure at all n locations
atcgagataactagaaacagtgtgatgaaaatgaaggtccttgttttcttcgttgctacaattttngtagcatggcaatgccatgcgtacgatatgttccctctccgaatgaacactggctatggtgcccgactccggaggtgaaatgcgcaagttggaggcttgctgtggaagcacacaacatctttggctttgagaccattcctgaagagtgcgttgaagcaacaaaggatacatccatggcgaacaatatagatcagactc

SEQ ID NO: 276061 - DNA, 265 bp, Glycine max
  unsure (1)..(265): unsure at all n locations
gccgagccaccgcgttcgccggaccaggcccaggcccatcaccggcccacaaagagatccgctaccgaggcgtccggaaacgcccctggggccgctacgccgccgagatccgcgaccccggcaagaaaacggcgtctggctcggcaccttcgacacagccgaggaagccgctcgagcgtacgacaccgcagcgcgtgagtttcgcggtgcnaaggccaagaccaattttccaaccctcagaactcatccttaacaacaacattcg

SEQ ID NO: 276062 - DNA, 260 bp, Glycine max
tacgacccctgggacttacccggattggctacttatggagagaaagagtggtacttcttttcaccacgggaccggaaatacccaaacggttcgaggccgaaccgggcggctggcaccggttactggaagcaaccggggcggataagcccattggtcagcccaaaccggttgggattaaaaaagctttggtgttttacgcagggaaagctcctaaaggggacaaaagcatggatcatgcacgagtatcgtctcgcagacgt

SEQ ID NO: 276063 - DNA, 263 bp, Glycine max
  unsure (1)..(263): unsure at all n locations
gaaagcnnggagttccgtggacggaggaagagcacaagctgtttttggttggattgcagaaggaanggaaaggtgattggagaggaatctccaaaaactacgtcaaaacgcgaacgccaacgcaggttngagccatgctcagaagtactttctccgacgaagcaacctcaatcgccgtcgccgtagatccagcctctttgacatcaccaccgacacggtctctgcaattcatggagggagaacaggtccagaatcaagacacg

SEQ ID NO: 276064 - DNA, 263 bp, Glycine max
cgttgccattctcatcctcttctttctctctctaccattgccatggatccctacaagcaccggccatccagcgccttcaattctcccttctggactacaaattctggtgctcctatttggaacaacaactctctttaaccgttggagctagaggtccaattctgctggaggattatcatcttgtggagaagcttgcaaattttgatagggaacgtatcccagaacgtgttgcatgccagggcgctagtgcaaagggtttcttt

SEQ ID NO: 276065 - DNA, 285 bp, Glycine max
  unsure (1)..(285): unsure at all n locations
gatttctactccactgttactcgtgccagatttgaggagctcaacatggatctcttcaggnaatgtatggagccggtggagaaatgtttgagggatgctaagatggacaaaagaagtgttgatgatgttgtccttgttggtggttcnacngaattcccaaggttcancaactnctgcaggactnctttaatggnaaagagctttgcaagagcataatcccgatgaggctgttgcatatggtgcggctgttcaggctgcaatcttaagtggtgagggcaatgagaa

SEQ ID NO: 276066 - DNA, 219 bp, Glycine max
  unsure (1)..(219): unsure at all n locations
caacaatgtcgaagcgaggtcgcggaggatcggcagggaacaagttccgcatgtcactgggtctgccggtggcggcgacggtgaactgcgccgacaacaccggcgcgaagaatctctacatcatatcagtgaaggggatcaagggaaggctgaaccgttgccgtcagcttgcgtgggtgacatggttatggccaccgtcaagaagggatagctnatctc

SEQ ID NO: 276067 - DNA, 288 bp, Glycine max
  unsure (1)..(288): unsure at all n locations
caaaaaaatgggttcttcttcttccatatggaccgtgtgtttgattttgggcatcactggcctctgcagcactctgtgccaaccctcgnagaccagtggatgtacaatttggccgaaactacgtgcccacatgggcctttgatcacatcaatacttcaatggaggntctgacattcagcttcatctgacaagtaccctggtatgggcnnccagtccaaagggtcatactngtttggncattcagcatgtacataaagatggttcctggagattcagctggcacagtca

SEQ ID NO: 276068 - DNA, 285 bp, Glycine max
  unsure (1)..(285): unsure at all n locations
ggaagtcattaaaagtaatgagaaactagagaacattgacctctcttttttgcttagacctgcagctgaactgcggccagaagctgctcaatactgtgttcaaaaacaagatcatggtttggacatggccttggataataagcttatagtctgtccaatgctgctttggaaaagggtctcccggtatacattgaaagtccaatccataatgtaaaccgtgcagtgggaccntgctaagccaggggggnncctaaaagtaccacttaaatgggcttccatgtgacc

SEQ ID NO: 276069 - DNA, 284 bp, Glycine max
  unsure (1)..(284): unsure at all n locations
ctctaacctacctctttttcttctctctcaacaaacttcaccttcttcctcctcgatcatgtctcacttcaagggcaagtaccatgatgagcttatcgccaatgctgcgtacattggcactcctggaaagggtattcttgctgctgatgagtcaacagggacaattggcaagcgttggccagcatcagtgtaaaggaacattgaatccaacaggcgagctcttagggagctgcttttcatgctcctggtgttctcaatactcagtggnggcaacccccttgagg

SEQ ID NO: 276070 - DNA, 287 bp, Glycine max
  unsure (1)..(287): unsure at all n locations
tctcacacccttctcaatgaccaacaacaacganaacatcgncgtgacagatctcacttccgccctcaatgaagagaatcgcgccgacctagtcaatgctctcaagagcaagattcagagtctggctggggctcattctgatgntctggagantctatcccccaatgtcaggaagcgtgttgaatctcttagagagattcanggtaaacatgatgaaatagaggcagacttcttgaaggagacagangctcttgaagccaagtaccanaaatgtatcagccattgta

SEQ ID NO: 276071 - DNA, 277 bp, Glycine max
  unsure (1)..(277): unsure at all n locations
ggcgtcttcataaacgccgcccaaaacttctcatacccttttattcattccattcgnttctagggtttcttttctttgccgagaaaatgagagagtgcatttcgatccanattggccaggccggtatccaggttggaaacgctggtgggaatctattgccttgaacanggttttcagcccgatggacanatgccgagtgacnagaccgttggcggaggagacgacgccttcaacacatttttcagcgagaccggcgcggnaagcacgtggcccgcgc

SEQ ID NO: 276072 - DNA, 262 bp, Glycine max
  unsure (1)..(262): unsure at all n locations
ggactcttcttcgtctcaaatctctatcgttccttcgattcgntccatttcttccaaaatggccaaagacccagttcgcgttctcgtcactggagctgcagggcaaattgggtatgctcttgtccctatgattgctaggggagtgatgttgggtcctgaccagcccgtgatcctccacatgcttgacattcctccggcagcagagtcattgaatggggttaaaatggaattggtggatgctgcatccctcttcttaaaggtg

SEQ ID NO: 276073 - DNA, 284 bp, Glycine max
gtggtgagtgaaaatggcggtacccttgctctccaagaggatcgtgaagaagcgcgtcaagaagtttatacgcccccagagtgatcgcaagatctccgtcaagccaagctggcgcagacccaagggtattgattctcgtgtcaggagaaagttcaaaggatgcactttgatgcccaacattggttatggctcagacaagaaaacccgccattatctaccaaatggtttcaagaaatttgtcgtgcacaatgtgaaagacctggaacttctcatgatgcataaca

SEQ ID NO: 276074 - DNA, 215 bp, Glycine max
ggactttgacagaatctatgattatgatgtctataatgatttgggcaatccagatggtggtgatcctcgcccaatccttggtgggtctagcatctatccctaccctcgcagggttagaacaggaagagaaaggaccaggacagtcccaacagtgagaaaccgggcgaggtttatgttccaagagatgaaaattttggtcattgaagtctcggttt

SEQ ID NO: 276075 - DNA, 278 bp, Glycine max
  unsure (1)..(278): unsure at all n locations
ggccaacttggtcataattatattggatctgagcacttgcttcttggtctccttcgagagggtganggtgtagcagcacgtgttcttgaaaatttgggtgctgatccaaacaatattcgtgctcaggttatccgcatggttgtgagggtgctgacagtgttggtgctactgttggccctggaagtngtaataacaataagatgccaactttggaggagtatggcacgaatttgaccaagctagcggaananggaaaattggatcctgttgngggnaag

SEQ ID NO: 276076 - DNA, 277 bp, Glycine max
  unsure (1)..(277): unsure at all n locations
atttggtcttggatccctttcgatccgacgacttcgttcgttccttctccttccaagttctaaccatttcccactgtcttcgattttagggcattaaatctgccatggcagcagcacccgctagagctcgtgccgattacgatacctcatcaagcttcttcttatcggcgacagcggtgtggggaagagttgtctacttttgaggttttctgatggctcattcacaaccagttttatcancaccattggtatcgatttnngntaagnaccatgaact

SEQ ID NO: 276077 - DNA, 277 bp, Glycine max
  unsure (1)..(277): unsure at all n locations
gtgcctctagggttatcatatctccatttccatttcctctctctcagtttccaagaatcttaagctatgggaaagtcttacccaaccgtgagcgctgattaccagaaggccgttgagaaggcgaagaagaagctcagaggcttcatcgctgagaagagatgcgctcctctaatgttcngtttgccntggcactctgctggaacttacgacgtgagctcgaagaccggtggtccctcggaaccataaagcaacctccganttgttnacaggggtaaaa

SEQ ID NO: 276078 - DNA, 272 bp, Glycine max
  unsure (1)..(272): unsure at all n locations
caaaaggccatataatttttttttatttgaaataatgtccgggatcatccacaagattgaggagaccctccatgtgggagggcacaagaaagaggagcacaaaggagaacaccatggtgagcacaaaggtgaacacaaaggagaacaccatggtgagcacaaaggtgaacacaaaggagaacaacaccatggggagcacaaggagggacttgtggataagatcaaggacaagatccatggtgatgncntgacaagggttagaaaaagagaag

SEQ ID NO: 276079 - DNA, 210 bp, Glycine max
  unsure (1)..(210): unsure at all n locations
ctctgctcgtgcctctagggttatcanatntccatttcnatttcctctctctcagtttccaagaatcttaagctatgggaaagtcttacccaaccgtnagcgctgattaccagaaggccgttgagaaggcgaagaagaagctcagggcttcatcgctgngaagagatgcgctcctctaatgntccgtttggcatggcantcngctgacaa

SEQ ID NO: 276080 - DNA, 279 bp, Glycine max
cagccatctgtgtgtgaaggggacatgatggatgattcccaaaagcatagaatcctgatggtctcagattttttctatcccaactttggaggtgtggagaatcacatatattatctctcacagtgtttgctcaagttaggcacaaggtggtggttgcaactcatgcttatggaaatcgatctggggtccgatatatgaccggtggtctgaaagtctactatattccatggagtccatttgttatgcagaatacattaccgaccttctatgggttactac

SEQ ID NO: 276081 - DNA, 275 bp, Glycine max
  unsure (1)..(275): unsure at all n locations
tgcttctcactgatctccattcccattccatggcttccactgaatcatcccctttcaagaaaattcagattcaaagggatgacactacatttgacgcatatgtggttggaaaagaggatgctcctggaattgttgtgatnaggagtggtggggtgtggattacgaaattaagaaccatgccgtgaagatttctcagcttggtagtgggtttaaagctcttattccagatttatacagaggaaaggttggtctggatgttgctgaagctcagcatt

SEQ ID NO: 276082 - DNA, 277 bp, Glycine max
  unsure (1)..(277): unsure at all n locations
gttttagctgagctgctgcttggacagcctctgttccctggtgagagtggagttgatcaacttgttgagatcatcaaggttctgggcactccaacaagggaagagattaagtgcatgaaccctaattatacngantttaattcccnacngattaaagcacatccatggcacaagatcttccataagcgcatgcctccagaggctgttgatttggtatcaagactactacaatactcccctaacttgcggtgcacagcttttgatgccttgacgcatc

SEQ ID NO: 276083 - DNA, 277 bp, Glycine max
  unsure (1)..(277): unsure at all n locations
gaaagttcanccaatctccgaagcccttcaccgcattgcaaccatgtcgagaagaaaggttagagagccaaaggaagaaaacgtgactctgggcccagctgttagagatggcgaacatgtctttggcgtcgctcgcatcttgcctccttcaatgataccttcattcatgtcactgatctgtccgggagggaaacacttgtccgaatcacaggtggaatgaaggttaaggctgacagagatgaatcgnctccctatgctgctatgcttgctgcacagg

SEQ ID NO: 276084 - DNA, 275 bp, Glycine max
  unsure (1)..(275): unsure at all n locations
gcaagccccactcaaccaccacacctctcctcgttcacgctacccctttctgctcttcttctacctttcaagttttaaaagtataaagatggcagagacattcctatttacctcagagtcggtgaacgagggacaccctgaaagctctgcgaccaaatctccgatgctgtcctcgacgcttgcctcgagcaggacccagacagcaaagttgcctgcgaaacatgcacnaaaaccaattggtcatggtcttcggagaaatcacgaccaaggccaag

SEQ ID NO: 276085 - DNA, 278 bp, Glycine max
  unsure (1)..(278): unsure at all n locations
gaaaaaggtaagcaaggcactgccagtggaagaagttcagcccctggcttctgtgtctgcttctgatgatggctcggatacagaaagtgacaataagggacaggaagatgcagaagaagcatatgcttctaaagttggcgagaggttcaaaattattctagggaaagaagaagcaagcgttcgaagcggaagcgtcgctgtataaaggaccgcatacnattagtttatagtgagttttgtatatctcaagagattatagcatttttgggttggctatt

SEQ ID NO: 276086 - DNA, 276 bp, Glycine max
gcaaaaggccatataatttttttttatttgaaataatgtccgggatcatccacaagattgaggagaccctccatgtgggagggcacaagaaagaggagcacaaaggagaacaccatggtgagcacaaaggtgaacacaaagagaacaccatggtgagcacaaaggtgaacacaaaggagaacaacaccatggggagcacaaggagggacttgtggataagatcaaggacaagatccatggtgatggccatgaccagggtgagaaaaagaagaagaa

SEQ ID NO: 276087 - DNA, 275 bp, Glycine max
  unsure (1)..(275): unsure at all n locations
atttcagtgagtgatcggtgttcacttgatctcatcataatcgtcagcgtcaattgaagaagatgccgatcagaaacatcgccgtcggaaggcctgaagaggcgactcaccccgacacgttgaaggcggctttggctgattcatctcaaccttcatcttcgtgttcgccggctcaggctccggcatcgcctacaacaagctcaccgacaacggcgctgcnaaccctgccggcctcatctccgcctccatcgcccatgcattcgccctcttcgtcg

SEQ ID NO: 276088 - DNA, 282 bp, Glycine max
  unsure (1)..(282): unsure at all n locations
gcaagaatggcacttcgttgcttggtgatgtccctttctgttctcttcactcttggtcttgcgagagaaagccatgccagagacgaagatttttggcatgctgtttggccaaacactcccattccaagttcattgcgagatctntaaagcctggccctgcaagtgttgaaatcgatgatcaccctatgcaaattgnagaaacaccgtacccgnaaacttcttctataaagnagaccntcatccaggcaaaacaatgaagtacnattcngcaagcnncctttc

SEQ ID NO: 276089 - DNA, 278 bp, Glycine max
ttcatatgctctctcacaccaatctcacagtcacagggattacatcaatctcccccttttctctttggcacttcttcttcttcgtaccagtatgaaggagcttatttgagtgatggcaaagggataagcaactgggatgtcttcactcacaaaccaggtagtatatctgacgaaagcaacggtgatgttgctgttgatcaataccaccggtatctggaggatattgatctaatggaagctataaaagtcaatagctaccggttttcaatatcatgggc

SEQ ID NO: 276090 - DNA, 276 bp, Glycine max
atggctcccaagggtttaacctttctggctgtgttaatatgcgtttcagcactgtcactgagtccttctgttgcgggggaagggcaaaataatggccttgttatgaacttctacaaggaatcatgccctcaggctgaagacatcatcacagaacaagtcaagcttctctacaagcgccacaagaacactgctttctcctggctcaggaacatcttccatgactgtgctgttcagagttgtgatgcttcactgttgctggactccacaagaaggagc

SEQ ID NO: 276091 - DNA, 279 bp, Glycine max
gctgctgttgcaaaacttagggttgggcctttttttgaggttttcagcgcttctttctcacaatggttcttcagaatgatattgatttgctgaatcctccagctgagttggagaagagaaagcacaaactcaagcgtcttgttcagtcaccaaactctttcttcatggatgttaagtgccagggatgcttcaacataacaactgtgtttagccactctcaaactgttgtggtgtgcggaaactgccagactgttttgtgccaaccaacagggggacggg

SEQ ID NO: 276092 - DNA, 280 bp, Glycine max
aagcaattagaagttctttgcagcatttatgctttgtttctacttcataagcatctgggtgattttctttccactggctgcattaacccaaaacaaggatcacttgccagtgagcagctgagaaacttgtattcacaggttcgtcctaatgcaattgcgcttgttgatgcatttaactacactgatcactaccttggttcaattcttggacgttacgatggaaatgtgtatccgaagttgtacgaggaggcatggaaggatccttgaatgattcagttgt

SEQ ID NO: 276093 - DNA, 274 bp, Glycine max
  unsure (1)..(274): unsure at all n locations
ataatactacgatagcgtagactcttcccagttctgttgtgtgagtctgtgagtctttcttagctgatatggcggttgatcgctcccttaacgaggtgctgtagcctcgtactgtggtcgtggatgttgctgaggatgatgatggcgcaggtgcagccgcgagggccaaccggaaggagtgggactcggtcataaagttaccggctgaaccggtcgatgctgactcggatcatgaagtggggacacgatgggcggttcttgtggctggntcaaa

SEQ ID NO: 276094 - DNA, 276 bp, Glycine max
agaatggcaacggattcttctaatggtaatggacatcaccaaacaacaacaaagcaacctcctttgccgtctcccctgcgcttttccaaattttttcagtccaacatgagaatcttggttactggaggagctggattcattgggtctcacttagttgacagattgatggaaaatgaaaaaaatgaggtaattgttgctgacaactacttcactggatccaaggacaacctcaaaaaatggataggtcatccaagattgagcttatccgtcatgatg

SEQ ID NO: 276095 - DNA, 277 bp, Glycine max
  unsure (1)..(277): unsure at all n locations
cccgccgcttctctggcggcgcanttttctcgggcggcggtagaggccgaaaaggacactgttgccgtgccgtcgcttccgttgttcgattactctccgcctccgtatgcggggcccaccgctgacgagattctggcaaagcgcagggagtatctgagtccttccatcttgcacttctacaagaatcccgtgaacatagtggagggtaagaagcagtacctgtttgacgagaaggggagaaggtacgtggatgcgtttggagggattgctacggtgt

SEQ ID NO: 276096 - DNA, 275 bp, Glycine max
tgagaagtccctacagtcatgaaaggcctcttctaggccaccttaagttctttccttgggttgtaaatgaaggatattttaaggcatggagacaaggaagaactgggtaccctttggtggatgctgggatgagggagttgtgggccactggttggctgcatgatcgaatacgtgttgtagtttctagtttctttgtgaaggttctgcagcttccttggagatggggaatgaagtattctgggataccctttggatgccgatcttgagagtgatgc

SEQ ID NO: 276097 - DNA, 275 bp, Glycine max
ctccattgatctgcgcctcctgttccatggcaaagctgcctgtggaatacaacggcgactgcgccaccaccgcctcagcatccgcctccgcagccgcggagtctcagagatccattcccacgccgtttctcaccaaaacctttcaactcgtcgacgaccaatccatcgacgatgttatttcctggaacgacgacggatcaacgtttatcgtctggaaccctaccgtcttcgccagagacttgcttcctaaatatttcaaacacaacaattctcta

SEQ ID NO: 276098 - DNA, 237 bp, Glycine max
  unsure (1)..(237): unsure at all n locations
catggtggagntgccttttcagggaaagnccctaccaaggttgacagaagtggtgcctatatcgtgaggcaggctgcaaagagtgttgtggcaaatggccttgccagaaggtgcattgtccaagtttcctatgccattggtgtccctgagcccttgtcagtgtttgtggacacttatggaactgggaagattcctgacaaggagattcttcaaattgtgaaggagaattcgacttca

SEQ ID NO: 276099 - DNA, 274 bp, Glycine max
agaagacaagccatcggactgttgtcacttcagatgtacggcagcaaatcctaacaatgaataagaaggcaagggaagaatgggagaaaaaacagtcagaaacagagaagctccggaaactaaatgatgtagatggtaatgctgggattgatggtgacaaggagaaagatgagggtcggactaaagcaacaaaggtgaacaaagaagtggatgacaagatgaggacaaatgctgctaatgttgctgcccgagctgctgttgggggagatgactg

SEQ ID NO: 276100 - DNA, 275 bp, Glycine max
ctggtgaatgcgtagaaaaggaaaataaagaaattagcgtgaaaaatgttgggtgtgttcagcagctccatagtgtcgccgccggaggagctcgttgccgccggcagccgtacaccgtcgccgaagatgacggcggcggcgctgcggaagtggttcgaggagaagaacccctccgcagtgtcggtggaggtcggagagcatgtccagctcgcttatacccaccagaacgagtcgccgtttcagcccagatcctttgctgtgaaggatgaggtatt

SEQ ID NO: 276101 - DNA, 273 bp, Glycine max
caacgttagtgctttgtttaggtgaactaattcggagaccttgcaagacttcatcaatggctgtcaaagtttatattgtgtactactccatgtatgggcatgttgagaaactagcagaagaaataaagaaaggggcttcctctgtggaaggtgttgaggccaagttatggcaggtacctgagacactgctggatgaggtgcttggtaagatgagtgcaccacccaagagtgacgtaccagtcattacccccaatgaactatccgaggctgatg

SEQ ID NO: 276102 - DNA, 275 bp, Glycine max
cttgttctttatgtttcccattgcatttgctgatcttagggttggattctatagctctagctgcccaagagcagagcaaattgtgggtcaagttgttcagaggagattcaaccgtgatagatctattactgctgccttgcttcgcatgcacttccatgactgctttgtcagaggctgtgacgcgtccatattaatagactcaaccaggggcaatcaatctgaaaaagctgcaggagcaaacggcaccgttcggggatacgagctaatagacgaaa

SEQ ID NO: 276103 - DNA, 276 bp, Glycine max
  unsure (1)..(276): unsure at all n locations
ggctgatgctgggatcaagtacatccccagcaacactttctctcactangaccnggtttctcgacgccaccgcnaccctcggtgccgttccaccaaggnacggctggaccggcggcgagattgggtttgatacctacttctccatggccanangtaatgctaccgtgccagctatggagatgaccaagtggttcganaccaactancactttattgtccctgaatgggcnctgatgtgaacttcacctatgcttctcacaaggcngctgatgaana

SEQ ID NO: 276104 - DNA, 278 bp, Glycine max
  unsure (1)..(278): unsure at all n locations
tcatttttgatctcggtggtgggacttttgatgtctctcttcncaccatcgaggagggtattttcgaggtgaaggccactgctggtgatactcacttgggaggtgaagattttgataacagaatggtgaaccattttgttcaggaattcaagaggaagaacaagaaggatattagtggaaatgccagagctctgaggaggttgagaacagcatgtgagcgggcaaagaggactctctcttccactgctcaaaccaccatagagattgattccttgtac

SEQ ID NO: 276105 - DNA, 262 bp, Glycine max
caagatgcagatcttcgtcaagaccctcaccggaaagaccatcacccttgaggtggaaagctctgacaccatcgacaacgtcaaggccaagatccaggacaaggaaggaattcccccggatcagcaacgtctcatcttcgccggaaagcagctcgaggacggccgtaccctcgccgactacaacatccagaaggagtcaacccttcaccttgtccttcgtctccgtggtggcatgcagatcttcgtcaagactctcatggca

SEQ ID NO: 276106 - DNA, 271 bp, Glycine max
ctttgttcactcttcttctcttgcggctagggttttagcgcactttcttctagatttaaggaagatgggtaaggaaaaggttcacatcagtattgtggtcattggccatgtcgactctgggaaatccactaccactggtcacctgatttacaagcttggaggcattgacaagcgtgttattgagaggtttgagaaggaagctgctgagatgaacaagaggtctttcaagtatgcctgggtgctggacaaacttaaggctgagcgtgaaaga

SEQ ID NO: 276107 - DNA, 270 bp, Glycine max
ctcacgagggctgcacagcaatgggtggggagcgcaacaaggttttcactttggccgaggtctctcagcacaacaatgccaaagactgttggcttgtcattcatggcaaggtttataatgtaacaaagtttttggaagatcaccctggtggggatgaggtcctgttgtcttccacagggaaagatgcaaccaatgattttgaggatattggtcacagcaccagtgccgtagccatgatggatgagttctatgttggagacattgatacat

SEQ ID NO: 276108 - DNA, 268 bp, Glycine max
ttgatatttggaggaattacaattgtatgtggaatagtgggcactttagctggaggcttcgttctggattatatgagtaacaccttatcaaatgcatttaagcttctctcaattactacatttattggtgctgcattttgttttggtgccttcttattcagaagcatgtatggcttccttgctcttttctctattggtgaacttcttgtttttgccactcagggtcctgtgaattatgtatgtctacgttgtgttaaaccaagtttga

SEQ ID NO: 276109 - DNA, 273 bp, Glycine max
cgataatcttatacatggaattatatgcttgctgcattgagtacataattgtggagagcgacaacttatctacattatttccaaatgcgcacattagtttgggtggagttgaactcaatgcacacattttgtttgcaatattgaccgcagtggctcttctccctactgtttggctacgtgacctacgcattctcagttacatctcagcttgcggagttattgcaacgattctagtggttctctgcttgttctgggttggtttgttagacaatg

SEQ ID NO: 276110 - DNA, 273 bp, Glycine max
gatgatatttctatagttaaagagctgcctaaagagttcagctgggagcacaagagagtactatggcttggctattcgagaaacccgaatcaaggctgcgcctgtgcatgcatcagcccattggtatctggagaatgttttgcctgttctacagagttatggtattgctgcaatctctccattttctcacagactgagttttgacaacttgcctatggatattcaacacctacgctgtaaagtcaacttccaagctttaactttggtcctcat

SEQ ID NO: 276111 - DNA, 268 bp, Glycine max
gaaatttgtcgtgcacaatgtgaaagacctggaacttctcatgatgcataacaggacatattgtgctgagattgctcacaatgtatccacaaggaagaggaaggacatagttgagagagctgctcagcttgatgttgtcttgacgaacaagacggccagactacgtagccaggaggatgagtagatccaatacatgggagagttatttatgttttgtagtgagcttctgttgacacccttgatggtagattttgattttttgttattt

SEQ ID NO: 276112 - DNA, 268 bp, Glycine max
cgcaattgacatggcgagcgcgatggtagaggacgcgaacttcgaagatgaccaactagccaatatgaccaccgacgacatcgtcagagcttctcgtcttctcgacaacgagattcgcatcctcaaggaagagttgcagaggaccaatttggaattggaatcgtacaaggacaagatcaaggagaatcaggagaagattaagctcaataagcagttgccctacctcgttggcaacattgttgagatattggaaatgaacccggaagac

SEQ ID NO: 276113 - DNA, 270 bp, Glycine max
  unsure (1)..(270): unsure at all n locations
gtgtgttctactatgggcaaagaaacctgtgaaatactttgtggtagatgcattcactgagtcagcnttcaaggggaaccctgcagcagtgtgtttgctagaggaagagaaggaggactcatggatgcaaggggtagcgaccgagttcaatctctctgagacatgctacttgactcccattgctgagtcggagagatccgatatttcgctcaaccgtttccgcctcagatggttcactcctggctacagaggttgaactttgtggccatg

SEQ ID NO: 276114 - DNA, 266 bp, Glycine max
ccgttgtcttctcacttcgtcaaaaccaaccaaacccctccccaattctcaagccaaccatgtcttccttcaagagcaagtaccaagatgaactcattgccaatgctgcttacattggcaccccagggaagggtatccttgctgctgatgagtcaactggtacaattggcaagcgattggccagcattaatgtcgagaatgttgaagcaaataggcgtgctcttcgtgaactcctattcaccacacctggtgcttttgagtgcctc

SEQ ID NO: 276115 - DNA, 264 bp, Glycine max
ctaacctacctctttttcttctctctcaacaacttcaccttcttcctcctcgatcatgtctcacttcaagggcaagtaccatgatgagcttatcgccaatgctgcgtacattggcactcctggaaagggtattcttgctgctgatgagtcaacagggacaattggcaagcgtttggccagcatcagtgtagagaacattgaatccaacaggcgagctcttagggagctgcttttcactgctcctggtgttcttcaatatctcag

SEQ ID NO: 276116 - DNA, 266 bp, Glycine max
cctacctctttttcttctctctcaacaacttcaccttcttcctcctcgattcatgtctcacttcaagggcaagtaccatgatgagcttatcgccaatgctgcgtacattggcactcctggaaagggtattcttgctgctgatgagtcaacagggacaattggcaagcgtttggccagcatcagtgtagagaacattgaatccaacaggcgagctcttagggagctgcttttcactgctcctggtgttcttcaatatctcagtggtg

SEQ ID NO: 276117 - DNA, 266 bp, Glycine max
gtgacattctcagagttcctttcagaacagaaaagggaattgttcgcaaatggatctcaagattcgaagtctggccatacctagagacttacactgaggatgtcgcccttgaacttgccaaggagttgcaagccaagccagatctgattgttggaaactacagtgatggaaacattgttgcctctttgttagcacataaattaggagtaactcagtgtaccattgctcatgctctagaaaagaccaagtaccctgagtctgacatt

SEQ ID NO: 276118 - DNA, 267 bp, Glycine max
  unsure (1)..(267): unsure at all n locations
catctgntggaacttaacgacgtgaagctcgaaaaacggtgggtcctttcggaaccataaagcaaccctccggaactcgctcacgggcgctaacaaaggtcttgacatcgctgttaaggcttttggagccactcaaagcggagtttcctantttgagctacgccgatttctaaccagttggctggcgttgttgccgttgaggtcaccggtggactgaagttcccttccatcctggaagagaggacaaactgagccacaccagaggtc

SEQ ID NO: 276119 - DNA, 255 bp, Glycine max
caagttggttaggaattgttctttgcctaggttttaatgtagttgctgtgactgtctgttggattagaggcggcggtgttaaaatttttttccttgcggttatatatgctctacttggtgttcccctttcatatgttctttggtacagacccctctatcgtgctatgaggacggacagtgcactgaagtttggttggtttttcatgctctacttgcttcatattggattttgtatctttgctgcaattgcacctc

SEQ ID NO: 276120 - DNA, 254 bp, Glycine max
ggttcagtccttgattggccaaagagattgcatatagccattggagcagcacaaggtttgtgctacatgcatcatgactgcttaccgccggttgttcatcgcgatgtgaaaacaagtaacattctgttggattctcaattcaatgcaaaagttgctgattttggtctggccaagatgttgatgaagccagaagaacttgctaccatgtcagcggtggcaggcacattcggctatattgctccagaatatgctca

SEQ ID NO: 276121 - DNA, 279 bp, Glycine max
gagggagaagagtgaactcaaagccacagctgctgagaaagtggagcagataacagcttctctgggaacatcatcatctgatggcatcccatcatcagaagcctcagacaggatcaaagctggtttcattcacttcaagaaggagaaatatgacaagaatccagctttgtatggtgaacttgccaaaggccagagccccaagtttatggtgtttgcttgctcagactcaagggtgtgcccatctcatgtgctagatttccaaccaggagaggcctttgt

SEQ ID NO: 276122 - DNA, 272 bp, Glycine max
tttcattgatgtattgaaggatgatatttctatagttaaagagctgcctaaagagttcagctggagcacaagagagtactatggcttggctattcgagaaacccgaatcaaggctgcgcctgtgcatgcatcagcccattggtatctggagaatgttttgcctgttctacagagttatggtattgctgcaatctctccattttctcacagactgagttttgacaacttgcctatggatattcaacacctacgctgtaaagtcaacttccaag

SEQ ID NO: 276123 - DNA, 273 bp, Glycine max
  unsure (1)..(273): unsure at all n locations
tgcatttctatttctaactaattattgtgcttattatncattgttgagaaagaaaagaatggcaaagttaataaaattctttgagttgaacacaggggccaagattccttctgttgggttaggcacttggcaagctgagcctggtgttgtagccaaagctgtcaccacagccattctggttggatacaggcatattgattgtgctcaagcgtataacaatcaagcagagattggttctgctcttaagaagctttttgatgatggtgtggtgaa

SEQ ID NO: 276124 - DNA, 275 bp, Glycine max
  unsure (1)..(275): unsure at all n locations
gtgagttttgtttatttgaaattaacaagtagcaaagatgtttggnatcatcggaggaaacaagggtcacaagataaaggggaacttggtgattatgcgaaagaatgtgttggatatcaacagcattaccagtgttaagggtgtcatcggaaccggcattaacatcattggaggagtcgtcgacaccgttactgctttggcgtcccacatctccatccagctcattagtgccaccaaggctgatggacatgggaaaggaaaagttggaaaggcta

SEQ ID NO: 276125 - DNA, 275 bp, Glycine max
caagaatactcataatataggtagcatatagagctatagttatattgatattgctatttgttaagctcttatttcctcggccatggctaataatgaacgtgatctcttctcggcggagattgtgaatcgtggaattgaaccgtcgggacccaacgctggctcgttgacattctctgtgagggtgaggaggcgcttaccggattttctgcaatcggtgaaccttaagtacgtgaaattgggttaccattatctcataaaccatggcatatacttgt

SEQ ID NO: 276126 - DNA, 279 bp, Glycine max
  unsure (1)..(279): unsure at all n locations
ctccaacaagtgtttctgtaaccatggcatccaccactctatcccctacaaccccttctcagctatgctcaggaaagagtgggattttcagtccctcacaggcacttcttgtgaagccagtgaagaggcagatgatggggaagagcaagggaatgagaattgcatgccaagccaccagcattcctgctgatagagtccctgacatgggcaaaagncagctcatgaatctgcttcttcttggtgccatttcactcccctctgctggaatgcttattccct

SEQ ID NO: 276127 - DNA, 271 bp, Glycine max
  unsure (1)..(271): unsure at all n locations
gttgatttcccaattaatgatctggacttatcaacatatgtagcccacgggaatagccagtcttccanccgctatgtgttatatgcaattagttgtcattatggagggttaggaggaggtcactatacagcatttgtccgttatggctatgataaatggtatgattttgatgacagcagggtcgaatctgttagtgaggacatgataaagactcctgctgcctatgttcttttctacaggaaaatttagatgaaaattttagatgcaattg

SEQ ID NO: 276128 - DNA, 274 bp, Glycine max
  unsure (1)..(274): unsure at all n locations
ctggggatctggtttcttatactgctgaagaaggtgtaaggatnctgggagagggaaagttcttggtgtcggatagctttcctggaaatgaaaggacgaaatattgcctcacatccaagattccacttggagtgattttagccattccaccttttaactatcccgtcaatcttgctgtttccaaaattgctcctgcgctgattgctggaaactccattgtgctcaagcctccaactcagggagctgtttctgctcttcatatggttcatgcttt

SEQ ID NO: 276129 - DNA, 276 bp, Glycine max
  unsure (1)..(276): unsure at all n locations
aataatccctttatgctcggttttgggatgttgcaaattttattgtctcaaatcccaaacttccacaagttaacatgcctttcaaccgttgctgctattacctctttttgttatgcattaattggaagcgggctttctctggcagtagttgtctcaggtnaaggagaaacaacccgtgtatttggaaacaaagtagggccaggactatctgaagcagataaaatgtggagggttttcagtgctttgggaaacattgcacttgcttgctcttatgct

SEQ ID NO: 276130 - DNA, 283 bp, Glycine max
cacccacgtccacaaagacgccggcagcaaccccacgtggaactaccccgtgaaattctccgtcaacgaatcgctggccaaggagaatcgtttgtctcttgagatcaagctcgtctccgaccgcaccctcggcgacaccgttatcggcaccgtccatgttcctctcagggaactcatggacaatcccggcgacgacggttccttccgccaagtcagttaccaggtgatgaaacagtcagggaaatccaagggatccttgaatttctcctacaaagtaggcgaa

SEQ ID NO: 276131 - DNA, 256 bp, Glycine max
  unsure (1)..(256): unsure at all n locations
ttagccaacacaaccatcatggccacctctgcnattcagcaatcagcattcactggtcaaactgctctgaagcagctcaatgagttcgtccgcaanaccggtggcgccggcaaaggtcgcactaacatgcgccgcaccgtcaagagtgctcctcagagcatttggtatggccctgaccgtcccaagtacttgggtccattctcggagcagattccatcatacctgaccggagaattccctggtgactacggatggg

SEQ ID NO: 276132 - DNA, 270 bp, Glycine max
  unsure (1)..(270): unsure at all n locations
acagaaacanaagtggcagtattaggtggcatcaccgaagtgcagggagctgccaacagcgtcgagancaacaanctcgctcgctttgctgtagaggaacaaaacaaaagagagaattcagttctggagtttgtgagggtgattagtgcaaagcagcaagtggttgctggagtgaattactacataacattggaagcnaaagatggtgagattaaaaatgagtataaagcgaaggtttgggagagggaatcccaagagttgctagaattc

SEQ ID NO: 276133 - DNA, 271 bp, Glycine max
cttggccacgcttctcgctggcacagttaccaaccctttcaacaacggttacttccagggtcccccaacggcgccgttagaggccgtttcggcttgcactggtgttttcggaagtgggtcgtacccgggttatccgggtcgggttctcgtggataaggcaaccggggcgagttacaatgcgcatggtgcgaatggaaggaggtatctcgtgccagcgatgtgggacccgcagacttcgacatgcaagaccctcgtctgaagactgccacgt

SEQ ID NO: 276134 - DNA, 175 bp, Glycine max
gtgactgctgcaaaggcagacttaaattatattgggttagatggagaaataggctgcatggtgaatggagcagggttagcaatggccacaatggatataattaaattgcatgggggtactcctgccaattttttggatgtaggtggcaatgcctctgaaggccaggtggttgagg

SEQ ID NO: 276135 - DNA, 271 bp, Glycine max
  unsure (1)..(271): unsure at all n locations
gagtttgttgtgagctataagctagtttatcgtgaggagaatatgaagttgtttgtnttctttgttgctgcagtagttttggtagcatgcccatgccatggcgcaggctaccaaaggttccctctccgaatgaaaactggctatggtgagcgttcttcggaggtaaaatgcgcaagttttaggcttgctgtggaagcacacaacatccgagcctttaaaaccattcctgaagagtgcgttgaaccaacaaaggactacattaatggcgaac

SEQ ID NO: 276136 - DNA, 273 bp, Glycine max
attgaagttgaagtcttgcccttctctcttcaactccaaacacaagacatcatcatccatggctgcctccgtctccactgtcggagctgtcaacagagctcttttgaacctgaatgggtctggacctggggtttcagctcccagttcatccttctttgggagcagcttgaagaaggttattggctcaagggtccccaacacaaagatttcctctggaagcttcaagattgttgctgtagaagagaagaaagagattgaagagacccagcagac

SEQ ID NO: 276137 - DNA, 282 bp, Glycine max
  unsure (1)..(282): unsure at all n locations
ctcgagcccaaaacactatagcaatagaaacatttgcttttgaaaaacccctcactcttcatcactacactagctagnccacatacaatgtcgaccaaatttaaggtgtttcgtgaattcacaagcaatgactcattcctaaaccaagttatccctgaaaacatcaccgaattccaagtgactctgtccctcgctagagactacgatggcaacaactcaaccaacggaaagttcattccttactgggacactgaaaaggtcactcccgaagtgataaaaaaa

SEQ ID NO: 276138 - DNA, 269 bp, Glycine max
  unsure (1)..(269): unsure at all n locations
gcttattgcagattaattctatgttgcaatagttcttctagagttacagangcaatccgctctcgatgtctcaatgtgcgaataaatgcaccaagtgaagaacagattgttgaagttttagaattcattggtaagaaggaagggctgcaacttcctcctggttttgctgctcgcattgtggagaaatcaaatcgaaatttaaggagggccatattgtcatttgagacttgtcgtgtccaacagtatcctttcactaacaaacaaacaat

SEQ ID NO: 276139 - DNA, 270 bp, Glycine max
cttgaactcaaggagatggctctgggaagaggcagtgcagtggttctactactttgcttcttgctgcttcactctcagatggctcgtgctgccacctacacagttggagattctgggggttggacctttaacactgttgcctggcccaaaggaaagctctttcgggctggtgacacacttgctttcaattatagccctgggactcacaatgtggtggccgtgaacaaggctggatatgatagctgcaagactccaagaggagccaaagtg

SEQ ID NO: 276140 - DNA, 268 bp, Glycine max
  unsure (1)..(268): unsure at all n locations
gagtttgttgtgagctatnagctagtttatcgtgaggagaatatgaagttgtttgtnttctttnttgctgcagtagttttggtagcatgcccatgccatggcgcaggctaccaaaggttccctctccgaatganaactggctatggtgagcgttcttcggaggtaaaatgcgcaagttttaggctgctgtggaagcacacaacatccgagcctttaaaaccattcctgaagagtgcgttgaaccaacaaaggactacattaatggcga

SEQ ID NO: 276141 - DNA, 275 bp, Glycine max
  unsure (1)..(275): unsure at all n locations
ctttggtggccacagcaacaataacaatggcagcctcactacaanctgcagctacctncatgcaacccaccaaggtgggcatggccactacgcaacctcanatctacacaatgcatttctaaggcttttggcttggaacccgctgcagctaaactcatttgctcccttaagcccgatctcaaagatttngctcaaaaatgtgtcgacgccaccaaaattgcaggattcgcccttgccacctcagctctcgttgtttctggagcgagtgcagaagg

SEQ ID NO: 276142 - DNA, 278 bp, Glycine max
ggcaaagcaatggcatcgtcactacaagcagcagctactttcatgcaacccaccaagtttttgcagctaaagtctactcaggccatatctaaggcttttggtttggaacctgctggagttaataaggtcacatgctcccttcaggctgatcttaaggacttggctcacaagtgtgttgatgctactcaaaattgcaggctttgcccttgccacctctgctctcgttgtttctggggcaagtgctgaaggagtaccaaagcggctaacctttgacgaaa

SEQ ID NO: 276143 - DNA, 276 bp, Glycine max
  unsure (1)..(276): unsure at all n locations
ccaaggcacactcgaccgataccgtttctttcaccttcaacaagttcaacccagtccaaccaaacattatgctccaaaaagatgctagtatttcatcctctggggtgttacaactcaccaaagttggcagcaacggcgtgcccacctcgggatctctcggtcgtgccctttacgctgccccaatccagatttgggacagcgaaaccggcaaggtagccagctgggctacancctttaaattcaacattttcgcacccaacaaatcaaactcagctg

SEQ ID NO: 276144 - DNA, 274 bp, Glycine max
gcagaaagcaagctcatcctagagttttaaaaatggcagcagcctcctccatggctctctcttccccatccttggctggcaaggccgtgaagctgggcccatcagcccccgaagtcgggagggtcagcatgaggaagaccgtcaccaagcaggcctcctccggaagcccatggtacggcccagactgcgtcaagtacttgggcccattctctggcgagcccccgtcctacctcactggcgagttcccaggtgactacggctgggacactgctgg

SEQ ID NO: 276145 - DNA, 267 bp, Glycine max
  unsure (1)..(267): unsure at all n locations
cgaganatggcgatggcaatggcgcttcgcaggctttcatcttcaattgacaagcctctgcgccctctcttcaatgccggttccctctactacaagtcgtctttgcctgatgaagctgtttacgacaaggagcgacccggagttacatggccgaagcagttgaatgctccacttgaggtcgtggatcctgagattgctgatattattgagcttgagaaagctaggcaatggaaggggctagaatgataccgtcagagaatttcacct

SEQ ID NO: 276146 - DNA, 268 bp, Glycine max
  unsure (1)..(268): unsure at all n locations
ctcatcttcctctttttcncaaccaaaaggggttcaattctagctagttctattacatcgtccgcnaccatgaacatggcgatcgtgcttctgttcatggttttcgcagtttcatcagctttagacatgtcaataatatcacatgacaacgctcatgcggatagggccacgaggcgcaccgacgacgaggtgatgtcaatgttcgaggagtggctggtgaaacacgacaaggtgtacaacgcgctcggtgagaaggagaagaggtttc

SEQ ID NO: 276147 - DNA, 270 bp, Glycine max
tcaagatttcagttccaaacaaaacttatcaaaatctcatatactgattcagttctatacataaccatcgagatttactatcaaaccaaaaattctcaaaatctcttcacctctgtgatgaccatggaatacagaaccttagaactcaacatcatatccgcaaaggacatcaagaacgttaacctcttctccaagatggacgtatacgccgtcgttacgctctccggcgaccctctccaccctcagggcgccaccacccacgtccacaaa

SEQ ID NO: 276148 - DNA, 272 bp, Glycine max
attgaattctccagagagaagaagaaacttaatcgatcatcacttcacttcactaatacatcatggcagacgagacccagaacaagtatgagagctctgaggttgaggtccaggatcgtggtgtttttgactttctcggtaagaaaaaggatgaagaagacaagcctcatcctcaggaggaggtcatcgccaccgagtttcaaaaagtcactgtctcagaccaaggagagaacaagcacagcctcttagaaaagcttcaccgatctgacagc

SEQ ID NO: 276149 - DNA, 261 bp, Glycine max
  unsure (1)..(261): unsure at all n locations
ggnattcctgcccctgacnaacctcaaccacttngtaccatcgctgccgcaccatggggctcagcactcntantgccaatcnctnacacntacatagccatgatgggttctaaaggnctcaccgatgcatcaaagatagccattttgaatgcaaactacatggcaaaacgattggagaattattatcccgttcnttccgtggagtcaatggnncagttgctcangaatncatcattgacctgagaggctttaagaatatgt

SEQ ID NO: 276150 - DNA, 270 bp, Glycine max
ccaaggcacactcgaccgataccgtttctttcaccttcaacaagttcaacccagtccaaccaaacattatgctccaaaaagatgctagtatttcatcctctggggtgttacaactcaccaaagttggcagcaacggcgtgcccacctcgggatctctcggtcgtgccctttacgctgccccaatccagatttgggacagcgaaaccggcaaggtagccagctgggctacatcctttaaattcaacattttcgcacccaacaaatcaaact

SEQ ID NO: 276151 - DNA, 266 bp, Glycine max
  unsure (1)..(266): unsure at all n locations
cgtgatgttattgcactggctggtgggcctttctacgaggttgaattgggaagatttgatgggctaagatctaaatcttcagatgtaaataggaggctgcctcaggcagagttcaacttgaaccagctgaattcactgtttgcggccaacggcctcacccaaactgaaatgatagctctgtcagntgctcacactgttggattctcccattgcaacaaattcacgaacagagtatacaatttcaagagcaaaagtcgagtggaccc

SEQ ID NO: 276152 - DNA, 268 bp, Glycine max
cgagcagcgagagagagaaaccctagcaaaaatgccggctggtcacggtttgagatcccgcaccagagattccttctctcgtcccttcaggaagaagggtaccatcgccctcaccacatacctcagaacctaccacgtcggcgattatgtcgacgtcaaggttaacggcgccgtccacaagggaatgcctcacaagttctaccatggccgcaccggtcgcgtctggaatgtcaccaaacgtgctgttggggtcgaagtcaacaagcag

SEQ ID NO: 276153 - DNA, 271 bp, Glycine max
gtgaaagcagagaagtgagatacactaagttatcctcataaatacactctaattaggtggcaagataagtgtctaaccttagtaacattgccacatattgtgttcattttggaattgtgccactaaaattctattcaattcatctatggctgcctcttcttatgctatgcaatcaatcctggcaaaccctttgatccgcatttccagcgggtctagggtgaaccaatttggcgttcctgctttgcacatgagaaggaatgttggcctgaga

SEQ ID NO: 276154 - DNA, 279 bp, Glycine max
  unsure (1)..(279): unsure at all n locations
ggaatgatgagaagcagctccaagacatgtatcttagcagaaagtcttttgcttttgattctgatgcccctggtgctggcatgactgagaaaagaaaagtcttcgagatggctctgagcacagcagatgccacattccaaaatcttgattcatcagaaatttccctcactgacgtcagtcattactttnactcagacccgactaatctggtacaaaatctaaggaaagatgggaagaagcctagtgcatacattgctgatacaaccacagccaatgctc

SEQ ID NO: 276155 - DNA, 268 bp, Glycine max
acaatgtcttgctccaatctgacaatgttggtgtcctcaaaaccttccctttccgacccctcgaacctctccttccgctctgtcctgaacccttttcagctccctacacaaaacccagcttcatgcaccccttcacgctcctcaagcacccaaattcagtgtggtctgagagaactgagaacccgcattgagtctgtgaagaacacgcagaaaatcacggaggcaatgaagcttgttgctgcagccaaagtgagaagagctcaagaag

SEQ ID NO: 276156 - DNA, 287 bp, Glycine max
ggatgtgaaacgtaagacactattaacaacaactggagagaccataagttacaagattctgattgttgctactggtgctcgggctttgaagctggaagaatttggggtgagtggatcagatgcagaaaatgtatgttatttaagacatatagcagatgcaaataggcttgtagatgttatgcagtcttgtcctgtaggtaatgctgttgtcattggtggtggatacataggcatggagtgtgcagcgtctttagtgatcaataaaataaatgtaacaatggtcttcc

SEQ ID NO: 276157 - DNA, 267 bp, Glycine max
  unsure (1)..(267): unsure at all n locations
gtttttgaagactattactggcaagaaagagaccctcattgaccttacaatantagaaattttatcaaggcacgcatctgatgagttctaccttgggcagagagatggcggtgactactggacttctgatgccgggccattagaggcctttaagaggtttggaaagnatcttgaagagattgaaaagaagcttatagagaagaacaataatgagacattgagaaaccgctatgggccggctaaaatgccttacactttgctctatcc

SEQ ID NO: 276158 - DNA, 285 bp, Glycine max
gtcgaacttgtggtgagggaattggaaacggatccgctgttcaattcgggccgtggatctgccctgacagaaaaaggaacggtggagatggaggctagcatcatggatggtccaaaacgacgatgcggcgccgtttcgggtcttaccaccgttaagaacccgatctcgcttgctcgtttggttatggacaaatccccgcattcctacctcgccttctccggcgccgaagaatttgctaggcaacagggtgtggaggttgtggacaacgagtactttatcacacct

SEQ ID NO: 276159 - DNA, 186 bp, Glycine max
atcaatcttctgagagtgtttggttgaaagtagcaaagatgtttcctttcgggcaaaagggtcaaaagataaaggggactatggtggttatgcagaagaatgtgttggatatcaacagcatcaccagtgttggagggatcgttgaccaaggcttaggcttcataggcagtgcagtcgatgcactta

SEQ ID NO: 276160 - DNA, 287 bp, Glycine max
gatggtactatcgtaccaaaatcttctataaataagacccccagccctgaagtcatatccatgctaaatgatatgtgcaatgatcctaaaaatactgtgttcattgtgagtggaaggggaagagattctttaagtgattggtttacttcatgcaaaatgattggacttgcagccgaacacggatactttctaaggtggagtaaagattctgaatgggaaaccagtcccttgtctcctgatcttgattggaaaaagatgtggaacctgtcatgcattgtatacagagg

SEQ ID NO: 276161 - DNA, 287 bp, Glycine max
  unsure (1)..(287): unsure at all n locations
tttttctctctcccttagtcaaagggattcatcgttcttcttcccaggttatttagaaaagcaaaatggtgaagatttgctgcattggtgctggatatgtggggggtcctactatggcantcattgcacttaagtgcccatccattgaagtcgctgttgttgatatctctaaatcccgcattgcagcctggaacagcgaccagcttcctatctatgaacctggccttgatggtgttgtgaagcaatgccgtggcaagaacctcttcttcagcactgatgttgaaaag

SEQ ID NO: 276162 - DNA, 285 bp, Glycine max
  unsure (1)..(285): unsure at all n locations
ctttcttgcgaaacagaagggcgaaggggcaaacacaactttttngtttttttgtagagcgagagagaaaaaaatgttggggatcttcagcagttccgtggtgtcgccgccggaggagctggtggctgccggcagcagaacgccgtcgccgaagacgacggcggggaagctgctgaaccggttcgtggagaacaaggcgtcggcggtgtcgctgcaggtgggagaacacgtgcagttggcttacacgcaccacaacgagtcaccgtggcatcccagatcnttgct

SEQ ID NO: 276163 - DNA, 208 bp, Glycine max
  unsure (1)..(208): unsure at all n locations
ggctatcgcggtgcatggtggcgctggtgtcgaccctaatctcccactcgagcgccaagaagaagcgaaacaacttctcacgcgctgtctcaatcttggaatctctgctctaaattctaatcttcccgncatagatgtcgtcgaacttgtggtgagggaattggaaacggatccgctgttcaattcgggccgtggatctgccctgaca

SEQ ID NO: 276164 - DNA, 286 bp, Glycine max
gatggtactatcgtaccaaaatcttctataaataagacccccagccctgaagtcatatccatgctaaatgatatgtgcaatgatcctaaaaatactgtgttcattgtgagtggaaggggaagagattctttaagtgattggtttacttcatgcaaaatgattggacttgcagccgaacacggatactttctaaggtggagtaaagattctgaatgggaaaccagtcccttgtctcctgatcttgattggaaaaagattgtggaacctgtcatgcagttgtatacag

SEQ ID NO: 276165 - DNA, 282 bp, Glycine max
gatggattccttgcttggaattcgagttggagcacggtttcgtgtaccgtgagcacaacaggtcacctggatactatgatggacgctactggaccatgtggaagctgcctatgtttggctgcactgatgcttctcaggtgttgaaggagcttcaagaggctaagactgcataccccaatggcttcatccgtatcattggatttgacaacgttcgccaagtgcagtgcatcagcttcatcgcctacaagcccccaggcttctaagtcatgaaaaatttgcaaa
